United States Patent Application Publication US 2007/0214517 A1 - sequence listing, part 83

SEQ ID NO: 106755 - protein, 435 aa, Arabidopsis thaliana
  peptide (1)..(435): Ceres Seq. ID no. 13620359
  misc_feature (94)..(165): Pfam Name: RNA recognition motif. (a.k.a. RRM, RBD, or RNP domain) Pfam Description: RNA recognition motif. (a.k.a. RRM, RBD, or RNP
  misc_feature (31)..(435): Homolog of NCBI NO: 15221071 NR Description: RNA binding protein 45 (RBP45), putative
  misc_feature (32)..(435): Homolog of NCBI NO: 21592583 NR Description: putative DNA binding protein [Arabidopsis
  misc_feature (31)..(336): Homolog of NCBI NO: 30682335 NR Description: RNA binding protein 45 (RBP45), putative
  misc_feature (33)..(416): Homolog of NCBI NO: 9663767 NR Description: RNA Binding Protein 45 [Nicotiana plumbaginifolia]
  misc_feature (28)..(424): Homolog of NCBI NO: 40253807 NR Description: putative RNA Binding Protein 45 [Oryza sativa
  misc_feature (35)..(424): Homolog of NCBI NO: 39545835 NR Description: OSJNBb0060E08.6 [Oryza sativa (japonica
  misc_feature (31)..(424): Homolog of NCBI NO: 34896988 NR Description: putative RNA binding protein [Oryza sativa]
  misc_feature (51)..(433): Homolog of NCBI NO: 7485342 NR Description: hypothetical protein F10M23.340 - Arabidopsis >gi|4455223|emb|CAB36546.1| putative DNA binding protein thaliana] >gi|7269553|emb|CAB79555.1| putative DNA binding
  misc_feature (51)..(424): Homolog of NCBI NO: 18416906 NR Description: RNA binding protein 45 (RBP45), putative thaliana] >gi|13878153|gb|AAK44154.1|AF370339_1 putative DNA protein [Arabidopsis thaliana] >gi|15450814|gb|AAK96678.1|
  misc_feature (28)..(428): Homolog of NCBI NO: 34901884 NR Description: putative RNA Binding Protein 45 [Oryza sativa
HCFVIFFFITIFLRSEIQKSSFSLSYSPIIMMQQPPPGGILPHHAPPPSAQQQYGYQQPYGIAGAAPPPPQMWNPQAAAPPSVQPTTADEIRTLWIGDLQYWMDENFLYGCFAHTGEMVSAKVIRNKQTGQVEGYGFIEFASHAAAERVLQTFNNAPIPSFPDQLFRLNWASLSSGDKRDDSPDYTIFVGDLAADVTDYILLETFRASYPSVKGAKVVIDRVTGRTKGYGFVRFSDESEQIRAMTEMNGVPCSTRPMRIGPAASKKGVTGQRDSYQSSAAGVTTDNDPNNTTVFVGGLDASVTDDHLKNVFSQYGEIVHVKIPAGKRCGFVQFSEKSCAEEALRMLNGVQLGGTTVRLSWGRSPSNKQSGDPSQFYYGGYGQGQEQYGYTMPQDPNAYYGGYSGGGYSGGYQQTPQAGQQPPQQPPQQQQVGFSY

SEQ ID NO: 106756 - protein, 405 aa, Arabidopsis thaliana; identical to SEQ ID NO: 21464
  peptide (1)..(405): Ceres Seq. ID no. 13620360
  misc_feature (64)..(135): Pfam Name: RNA recognition motif. (a.k.a. RRM, RBD, or RNP domain) Pfam Description: RNA recognition motif. (a.k.a. RRM, RBD, or RNP
  misc_feature (1)..(405): Homolog of NCBI NO: 15221071 NR Description: RNA binding protein 45 (RBP45), putative
  misc_feature (2)..(405): Homolog of NCBI NO: 21592583 NR Description: putative DNA binding protein [Arabidopsis
  misc_feature (1)..(306): Homolog of NCBI NO: 30682335 NR Description: RNA binding protein 45 (RBP45), putative
  misc_feature (3)..(386): Homolog of NCBI NO: 9663767 NR Description: RNA Binding Protein 45 [Nicotiana plumbaginifolia]
  misc_feature (1)..(394): Homolog of NCBI NO: 40253807 NR Description: putative RNA Binding Protein 45 [Oryza sativa
  misc_feature (5)..(394): Homolog of NCBI NO: 39545835 NR Description: OSJNBb0060E08.6 [Oryza sativa (japonica
  misc_feature (1)..(394): Homolog of NCBI NO: 34896988 NR Description: putative RNA binding protein [Oryza sativa]
  misc_feature (21)..(403): Homolog of NCBI NO: 7485342 NR Description: hypothetical protein F10M23.340 - Arabidopsis >gi|4455223|emb|CAB36546.1| putative DNA binding protein thaliana] >gi|7269553|emb|CAB79555.1| putative DNA binding
  misc_feature (21)..(394): Homolog of NCBI NO: 18416906 NR Description: RNA binding protein 45 (RBP45), putative thaliana] >gi|13878153|gb|AAK44154.1|AF370339_1 putative DNA protein [Arabidopsis thaliana] >gi|15450814|gb|AAK96678.1|
  misc_feature (1)..(398): Homolog of NCBI NO: 34901884 NR Description: putative RNA Binding Protein 45 [Oryza sativa

SEQ ID NO: 106757 - protein, 404 aa, Arabidopsis thaliana; identical to SEQ ID NO: 21465
  peptide (1)..(404): Ceres Seq. ID no. 13620361
  misc_feature (63)..(134): Pfam Name: RNA recognition motif. (a.k.a. RRM, RBD, or RNP domain) Pfam Description: RNA recognition motif. (a.k.a. RRM, RBD, or RNP
  misc_feature (1)..(404): Homolog of NCBI NO: 15221071 NR Description: RNA binding protein 45 (RBP45), putative
  misc_feature (1)..(404): Homolog of NCBI NO: 21592583 NR Description: putative DNA binding protein [Arabidopsis
  misc_feature (1)..(305): Homolog of NCBI NO: 30682335 NR Description: RNA binding protein 45 (RBP45), putative
  misc_feature (2)..(385): Homolog of NCBI NO: 9663767 NR Description: RNA Binding Protein 45 [Nicotiana plumbaginifolia]
  misc_feature (1)..(393): Homolog of NCBI NO: 40253807 NR Description: putative RNA Binding Protein 45 [Oryza sativa
  misc_feature (4)..(393): Homolog of NCBI NO: 39545835 NR Description: OSJNBb0060E08.6 [Oryza sativa (japonica
  misc_feature (1)..(393): Homolog of NCBI NO: 34896988 NR Description: putative RNA binding protein [Oryza sativa]
  misc_feature (20)..(402): Homolog of NCBI NO: 7485342 NR Description: hypothetical protein F10M23.340 - Arabidopsis >gi|4455223|emb|CAB36546.1| putative DNA binding protein thaliana] >gi|7269553|emb|CAB79555.1| putative DNA binding
  misc_feature (20)..(393): Homolog of NCBI NO: 18416906 NR Description: RNA binding protein 45 (RBP45), putative thaliana] >gi|13878153|gb|AAK44154.1|AF370339_1 putative DNA protein [Arabidopsis thaliana] >gi|15450814|gb|AAK96678.1|
  misc_feature (1)..(397): Homolog of NCBI NO: 34901884 NR Description: putative RNA Binding Protein 45 [Oryza sativa

SEQ ID NO: 106758 - DNA, 2355 bp, Arabidopsis thaliana
  misc_feature (1)..(2355): Ceres Seq. ID no. 13620366
  misc_feature: MA Experiment ID: 20000437 Result: Up-regulated in Transcription
  misc_feature: MA Experiment 20000437 PARAMETER Experiment Name: At_Drought_P Parameter: Age (day) Value: 8
  misc_feature: MA Experiment 20000437 PARAMETER Experiment Name: At_Drought_P Parameter: Organism Value: A. thaliana
  misc_feature: MA Experiment 20000437 PARAMETER Experiment Name: At_Drought_P Parameter: Plant Line Value: WS
  misc_feature: MA Experiment 20000437 PARAMETER Experiment Name: At_Drought_P Parameter: Timepoint (hr) Value: 24
  misc_feature: MA Experiment 20000437 PARAMETER Experiment Name: At_Drought_P Parameter: Tissue Value: Whole Plant
  misc_feature: MA Experiment 20000437 PARAMETER Experiment Name: At_Drought_P Parameter: Treatment Value: Drought vs. No Drought
  misc_feature: MA Experiment ID: 20000439 Result: Up-regulated in Transcription
  misc_feature: MA Experiment 20000439 PARAMETER Experiment Name: At_Roots__P Parameter: Age (day) Value: 14 vs. 21
  misc_feature: MA Experiment 20000439 PARAMETER Experiment Name: At_Roots__P Parameter: Organism Value: A. thaliana
  misc_feature: MA Experiment 20000439 PARAMETER Experiment Name: At_Roots__P Parameter: Tissue Value: Roots vs. Whole Plant
  misc_feature: MA Experiment ID: 20000495 Result: Up-regulated in Transcription
  misc_feature: MA Experiment 20000495 PARAMETER Experiment Name: At_Guard_Cells_P Parameter: Harvest Date Value: 8/2/2002
  misc_feature: MA Experiment 20000495 PARAMETER Experiment Name: At_Guard_Cells_P Parameter: Organism Value: A. thaliana
  misc_feature: MA Experiment 20000495 PARAMETER Experiment Name: At_Guard_Cells_P Parameter: Tissue Value: Guard Cells vs. Leaves
  misc_feature: MA Experiment ID: 20000496 Result: Up-regulated in Transcription
  misc_feature: MA Experiment 20000496 PARAMETER Experiment Name: At_Guard_Cells_P Parameter: Harvest Date Value: 7/19/2002
  misc_feature: MA Experiment 20000496 PARAMETER Experiment Name: At_Guard_Cells_P Parameter: Organism Value: Canola
  misc_feature: MA Experiment 20000496 PARAMETER Experiment Name: At_Guard_Cells_P Parameter: Tissue Value: Guard Cells vs. Leaves
atgggagcatcagattcaactctgctaggctctcaggaaaatcgaggtgatgtgattacgactatatctcatcgatcagaaatagtcgatcccattctcgagaatcttaaagctctcacagtaagtaggccaatattgaagtctcctcccacggaaagtagcttaacagatatcttagtgagaaaagctctatccagttcctcttccaatacggttgatcctcaaatacttgtagagctcttctccatttaccgagaatggcaagagaacaaagctcaagaaattaccaagagacaggaagatatagaaaacaagatagaagtcgcagatgctttggcgactaaacttttacagaggtttaaccactctgtttctgcaatgaggacaactgcccagcatttatctcaagttcatggtttgcaggtggagctcggggagcttaaaggaagattgacagaggtgatcagcaactgcgatacattatgtaagagaattaattctgagggacctgaatctctgaggtccacagtggcgcctttttctcttgcatctcccgattcggtcagtataaatactactacaactctgtcttctaaacccgaggcataagagtaaatactcttaatggtagttagattggtgaatcgaatacgtgtagttctacagcatactttctgatctcctctgattttgcatagatgcatgatgatgctattgattgatctttttgttacaaatcattgttttcttttgtcatttcatctttaggcttttcgatttgtacaatcgcttgtgaccagtaagaaaccattgttctgataaggggaaaattcatatgtaataaatatgctttgtttgccttttgatacaaaatccacaatggacgattggcagtgtatggagttgaacaacttgaaacaacgaaagagaacaacaacaaatgaaacaaaattacatttcaatgaaaaagcagataatgattactcttctttgccacctccccatatcaaggttgctgctgagcgtccatgtaaccagcgtcggcgagcactttctccctcttggccagctcaaggtcttcgtccaccatcatcttcaccagcttctcgaaccctacttttggcttccaccccaacatttcctttgccttgcttgcgtctcctttcagattgtcgacctccgtgggccggaagtaccttttgtcgatctcgacatggtctttccagttgagccccacgtacccgaaagacacgtccagaaactccttgacggtgtgtgattcctcagttgcaaccacatagtcatctggtttctcctgctgcagcatcagccacattgcttccacgtagtctcctgcgaaaccccagtctcttgaagcctgtatatttcccaggaagagcttggtctgcaatccgaccttgatccttcccaaggcccgagtgattttccgagtcacgaagttctcgcctctgcgaggtgactcgtggttgaagaggattccgttgcaggcgtacagaccgtaggcctctcggtaattgactgtgtaccaatgagcagcgcatttggacgcagcgtagggagatctcggatggaagggcgtggtctctgactgcggaggaggagttgacccgaacatctccgaagagccagcctggtagtacttgatggcgcggccattgtcaatgttgtgagatctgacagcctccaggagacgaagagctccagtagcgacaacgtcagcagtgtaatcagggatctcgaaggagacggcaacgtgggactgagcagcaaggttgtagacctcgtcaggcttgatgacgtcgagccaacggcggagggaggaggcatcagagagatcaccgtagtggagcttcatgagagctttgttgacgttgtggggatcaacgtagatatggttgagtcgctgagtgttaaaattggaggatcgtcggatgaggccgtgaacttcgtagcctttctcgagcaggaactcggtcaggtaagatccatcttggccagtgattccggtgaccagtgcaatcttcctcggcttcacaatgtcggaatcgccattgagagatctggaggccattgatgggtgggtgcagagtcagatcggatcagaagaaatgattgggcacgtcgcgctttctgtttttgattttagcgtcaactgattcgatgacttatatataataaagcccaaggacgaagaagacagagagagagggttacttctgtaaactttaaaggtgaatctgtatggctacgtaaagttgtacttgtatggcaaatcgccggcaagcgttgaccgattacgaatattttactatctattgggccaagatgggcttt

SEQ ID NO: 106759 - protein, 202 aa, Arabidopsis thaliana
  peptide (1)..(202): Ceres Seq. ID no. 13620367
  misc_feature (1)..(202): Homolog of NCBI NO: 15239336 NR Description: hypothetical protein [Arabidopsis thaliana]
  misc_feature (127)..(202): Homolog of NCBI NO: 26449649 NR Description: unknown protein [Arabidopsis thaliana]
MGASDSTLLGSQENRGDVITTISHRSEIVDPILENLKALTVSRPILKSPPTESSLTDILVRKALSSSSSNTVDPQILVELFSIYREWQENKAQEITKRQEDIENKIEVADALATKLLQRFNHSVSAMRTTAQHLSQVHGLQVELGELKGRLTEVISNCDTLCKRINSEGPESLRSTVAPFSLASPDSVSINTTTTLSSKPEA

SEQ ID NO: 106760 - protein, 127 aa, Arabidopsis thaliana
  peptide (1)..(127): Ceres Seq. ID no. 13620368
MLCLPFDTKSTMDDWQCMELNNLKQRKRTTTNETKLHFNEKADNDYSSLPPPHIKVAAERPCNQRRRALSPSWPAQGLRPPSSSPASRTLLLASTPTFPLPCLRLLSDCRPPWAGSTFCRSRHGLSS

SEQ ID NO: 106761 - protein, 116 aa, Arabidopsis thaliana
  peptide (1)..(116): Ceres Seq. ID no. 13620369
MDDWQCMELNNLKQRKRTTTNETKLHFNEKADNDYSSLPPPHIKVAAERPCNQRRRALSPSWPAQGLRPPSSSPASRTLLLASTPTFPLPCLRLLSDCRPPWAGSTFCRSRHGLSS

SEQ ID NO: 106762 - DNA, 1589 bp, Arabidopsis thaliana
  misc_feature (1)..(1589): Ceres Seq. ID no. 13620374
  misc_feature: MA Experiment ID: 20001905 Result: Down-regulated in Transcription
  misc_feature: MA Experiment 20001905 PARAMETER Experiment Name: At_Drought_Reproduction_P Parameter: Age (day) Value: 40
  misc_feature: MA Experiment 20001905 PARAMETER Experiment Name: At_Drought_Reproduction_P Parameter: Organism Value: A. thaliana
  misc_feature: MA Experiment 20001905 PARAMETER Experiment Name: At_Drought_Reproduction_P Parameter: Plant Line Value: WS
  misc_feature: MA Experiment 20001905 PARAMETER Experiment Name: At_Drought_Reproduction_P Parameter: Timepoint (day) Value: 10
  misc_feature: MA Experiment 20001905 PARAMETER Experiment Name: At_Drought_Reproduction_P Parameter: Tissue Value: Rosettes
  misc_feature: MA Experiment 20001905 PARAMETER Experiment Name: At_Drought_Reproduction_P Parameter: Treatment Value: Drought vs. No Drought
aatgagttttacggaggagctcgcagctgcaggtaggtagcggaaacaagagatctttatatattccttcctctcttctctaacctaattccggcgaagaagaagacggaaaaagccctgactagtgaagaatccgatgtcagcgactgctctctcgagattaaacccagtttctcaatttgggtttcaaagaatcgttgctgggaaaagtaagagcttcttctccaattcgggtcaaaggagattgttttctgatagttctcggtttcgtcaagccatggctgcttctggttctttgccagtgtttggagacgcttgtttggatgatttggttactacttgttcaaatggcttagacttcactaagaagcgttctagtggtggtagcttcactattaattgtcctgtagctagcatgagacttgggaagagagggggaatgatgaagaaccgattggtttgtcactattctgttgttgatccgctagaaaagagtcgtgcactctttgggacattgtctaagagtgttcatacttctcctatggcttgtttctcggttggaccggctcatgagctgtcttctcttaacggtggttctcaagagtcaccaccaactactactacatctcttaagagtcttaggctagtgtcggggtcatgttatctcccgcatcctgaaaaggaagctacaggtggagaagacgctcactttatctgcgatgaagaacaagctattggagttgcagatggagttggcggttgggctgaggttggtgttaatgcgggactgttttcgcgtgagcttatgtcttattcagtatctgcaattcaagaacagcataaaggttcttctatcgaccctttagtggtgttagagaaagcacattctcaaaccaaagccaaaggctcctccacggcttgtatcatcgttttaaaagataagggattacacgccattaatctcggagacagtggattcacggtggttagagagggaaccacggtgtttcagtctccggttcagcagcatggattcaacttcacttatcaattagagagtgggaacagtgccgacgtccctagctccggtcaggtattcacaattgatgttcagtctggagatgtcattgtcgctggaacagatggagtgtatgataatttatacaatgaagagatcacaggagtggtggttagctcggtgagggccggtttagacccgaaaggcacagctcagaagattgcagagttggcacgtcaaagagcagtcgacaaaaaacggcagagccctttcgcaactgcggctcaggaggctggctacaggtattacggaggaaagcttgatgacatcactgccgtcgtttcttacgtcacctcatcttaagagaccaaattgatgatcttctgtttaaacggtccaatcccgccaaaatctgacgataccttttcttttattttttgttgtgtttttttgaaaaacttgttacggtattaaaagtcctcaggaggtcattaaatgtgtatttttcacggaatcaaaatatagtttagctaagttatgaaacgtgaatctaattgtgtttacttaggtg

SEQ ID NO: 106763 - protein, 414 aa, Arabidopsis thaliana
  peptide (1)..(414): Ceres Seq. ID no. 13620375
  misc_feature (177)..(381): Pfam Name: Protein phosphatase 2C Pfam Description: Protein phosphatase 2C
  misc_feature (1)..(414): Homolog of NCBI NO: 15240071 NR Description: expressed protein [Arabidopsis thaliana] contains similarity to unknown [Arabidopsis thaliana] >gi|22531134|gb|AAM97071.1| putative
  misc_feature (129)..(414): Homolog of NCBI NO: 25366932 NR Description: hypothetical protein dl4315c [imported] - thaliana >gi|5302796|emb|CAB46038.1| hypothetical protein thaliana] >gi|7268408|emb|CAB78700.1| hypothetical protein
  misc_feature (129)..(414): Homolog of NCBI NO: 30683717 NR Description: expressed protein [Arabidopsis thaliana] unknown protein [Arabidopsis thaliana]
  misc_feature (143)..(411): Homolog of NCBI NO: 18418226 NR Description: protein phosphatase 2C (PP2C) -related thaliana] >gi|14334748|gb|AAK59552.1| unknown protein thaliana] >gi|15293237|gb|AAK93729.1| unknown protein
  misc_feature (158)..(410): Homolog of NCBI NO: 7485658 NR Description: hypothetical protein F17M5.260 - Arabidopsis >gi|4490317|emb|CAB38808.1| putative protein [Arabidopsis >gi|7270298|emb|CAB80067.1| putative protein [Arabidopsis
  misc_feature (182)..(414): Homolog of NCBI NO: 37533570 NR Description: putative protein phosphatase 2C [Oryza sativa
  misc_feature (159)..(411): Homolog of NCBI NO: 34896100 NR Description: B1189A09.35 [Oryza sativa (japonica
  misc_feature (159)..(414): Homolog of NCBI NO: 18402284 NR Description: expressed protein [Arabidopsis thaliana] unknown protein [Arabidopsis thaliana] unknown protein [Arabidopsis thaliana]
  misc_feature (159)..(390): Homolog of NCBI NO: 7487482 NR Description: hypothetical protein At2g30170 [imported] -
  misc_feature (169)..(411): Homolog of NCBI NO: 24640366 NR Description: CG15035-PA [Drosophila melanogaster]
MSATALSRLNPVSQFGFQRIVAGKSKSFFSNSGQRRLFSDSSRFRQAMAASGSLPVFGDACLDDLVTTCSNGLDFTKKRSSGGSFTINCPVASMRLGKRGGMMKNRLVCHYSVVDPLEKSRALFGTLSKSVHTSPMACFSVGPAHELSSLNGGSQESPPTTTTSLKSLRLVSGSCYLPHPEKEATGGEDAHFICDEEQAIGVADGVGGWAEVGVNAGLFSRELMSYSVSAIQEQHKGSSIDPLVVLEKAHSQTKAKGSSTACIIVLKDKGLHAINLGDSGFTVVREGTTVFQSPVQQHGFNFTYQLESGNSADVPSSGQVFTIDVQSGDVIVAGTDGVYDNLYNEEITGVVVSSVRAGLDPKGTAQKIAELARQRAVDKKRQSPFATAAQEAGYRYYGGKLDDITAVVSYVTSS

SEQ ID NO: 106764 - protein, 367 aa, Arabidopsis thaliana
  peptide (1)..(367): Ceres Seq. ID no. 13620376
  misc_feature (130)..(334): Pfam Name: Protein phosphatase 2C Pfam Description: Protein phosphatase 2C
  misc_feature (1)..(367): Homolog of NCBI NO: 15240071 NR Description: expressed protein [Arabidopsis thaliana] contains similarity to unknown [Arabidopsis thaliana] >gi|22531134|gb|AAM97071.1| putative
  misc_feature (82)..(367): Homolog of NCBI NO: 25366932 NR Description: hypothetical protein dl4315c [imported] - thaliana >gi|5302796|emb|CAB46038.1| hypothetical protein thaliana] >gi|7268408|emb|CAB78700.1| hypothetical protein
  misc_feature (82)..(367): Homolog of NCBI NO: 30683717 NR Description: expressed protein [Arabidopsis thaliana] unknown protein [Arabidopsis thaliana]
  misc_feature (96)..(364): Homolog of NCBI NO: 18418226 NR Description: protein phosphatase 2C (PP2C) -related thaliana] >gi|14334748|gb|AAK59552.1| unknown protein thaliana] >gi|15293237|gb|AAK93729.1| unknown protein
  misc_feature (111)..(363): Homolog of NCBI NO: 7485658 NR Description: hypothetical protein F17M5.260 - Arabidopsis >gi|4490317|emb|CAB38808.1| putative protein [Arabidopsis >gi|7270298|emb|CAB80067.1| putative protein [Arabidopsis
  misc_feature (135)..(367): Homolog of NCBI NO: 37533570 NR Description: putative protein phosphatase 2C [Oryza sativa
  misc_feature (112)..(364): Homolog of NCBI NO: 34896100 NR Description: B1189A09.35 [Oryza sativa (japonica
  misc_feature (112)..(367): Homolog of NCBI NO: 18402284 NR Description: expressed protein [Arabidopsis thaliana] unknown protein [Arabidopsis thaliana] unknown protein [Arabidopsis thaliana]
  misc_feature (112)..(343): Homolog of NCBI NO: 7487482 NR Description: hypothetical protein At2g30170 [imported] -
  misc_feature (122)..(364): Homolog of NCBI NO: 24640366 NR Description: CG15035-PA [Drosophila melanogaster]
MAASGSLPVFGDACLDDLVTTCSNGLDFTKKRSSGGSFTINCPVASMRLGKRGGMMKNRLVCHYSVVDPLEKSRALFGTLSKSVHTSPMACFSVGPAHELSSLNGGSQESPPTTTTSLKSLRLVSGSCYLPHPEKEATGGEDAHFICDEEQAIGVADGVGGWAEVGVNAGLFSRELMSYSVSAIQEQHKGSSIDPLVVLEKAHSQTKAKGSSTACIIVLKDKGLHAINLGDSGFTVVREGTTVFQSPVQQHGFNFTYQLESGNSADVPSSGQVFTIDVQSGDVIVAGTDGVYDNLYNEEITGVVVSSVRAGLDPKGTAQKIAELARQRAVDKKRQSPFATAAQEAGYRYYGGKLDDITAVVSYVTSS

SEQ ID NO: 106765 - protein, 321 aa, Arabidopsis thaliana
  peptide (1)..(321): Ceres Seq. ID no. 13620377
  misc_feature (84)..(288): Pfam Name: Protein phosphatase 2C Pfam Description: Protein phosphatase 2C
  misc_feature (1)..(321): Homolog of NCBI NO: 15240071 NR Description: expressed protein [Arabidopsis thaliana] contains similarity to unknown [Arabidopsis thaliana] >gi|22531134|gb|AAM97071.1| putative
  misc_feature (36)..(321): Homolog of NCBI NO: 25366932 NR Description: hypothetical protein dl4315c [imported] - thaliana >gi|5302796|emb|CAB46038.1| hypothetical protein thaliana] >gi|7268408|emb|CAB78700.1| hypothetical protein
  misc_feature (36)..(321): Homolog of NCBI NO: 30683717 NR Description: expressed protein [Arabidopsis thaliana] unknown protein [Arabidopsis thaliana]
  misc_feature (50)..(318): Homolog of NCBI NO: 18418226 NR Description: protein phosphatase 2C (PP2C) -related thaliana] >gi|14334748|gb|AAK59552.1| unknown protein thaliana] >gi|15293237|gb|AAK93729.1| unknown protein
  misc_feature (65)..(317): Homolog of NCBI NO: 7485658 NR Description: hypothetical protein F17M5.260 - Arabidopsis >gi|4490317|emb|CAB38808.1| putative protein [Arabidopsis >gi|7270298|emb|CAB80067.1| putative protein [Arabidopsis
  misc_feature (89)..(321): Homolog of NCBI NO: 37533570 NR Description: putative protein phosphatase 2C [Oryza sativa
  misc_feature (66)..(318): Homolog of NCBI NO: 34896100 NR Description: B1189A09.35 [Oryza sativa (japonica
  misc_feature (66)..(321): Homolog of NCBI NO: 18402284 NR Description: expressed protein [Arabidopsis thaliana] unknown protein [Arabidopsis thaliana] unknown protein [Arabidopsis thaliana]
  misc_feature (66)..(297): Homolog of NCBI NO: 7487482 NR Description: hypothetical protein At2g30170 [imported] -
  misc_feature (76)..(318): Homolog of NCBI NO: 24640366 NR Description: CG15035-PA [Drosophila melanogaster]
MRLGKRGGMMKNRLVCHYSVVDPLEKSRALFGTLSKSVHTSPMACFSVGPAHELSSLNGGSQESPPTTTTSLKSLRLVSGSCYLPHPEKEATGGEDAHFICDEEQAIGVADGVGGWAEVGVNAGLFSRELMSYSVSAIQEQHKGSSIDPLVVLEKAHSQTKAKGSSTACIIVLKDKGLHAINLGDSGFTVVREGTTVFQSPVQQHGFNFTYQLESGNSADVPSSGQVFTIDVQSGDVIVAGTDGVYDNLYNEEITGVVVSSVRAGLDPKGTAQKIAELARQRAVDKKRQSPFATAAQEAGYRYYGGKLDDITAVVSYVTSS

SEQ ID NO: 106766 - DNA, 1638 bp, Arabidopsis thaliana
  misc_feature (1)..(1638): Ceres Seq. ID no. 13620378
  misc_feature: MA Experiment ID: 20000171 Result: Up-regulated in Transcription
  misc_feature: MA Experiment 20000171 PARAMETER Experiment Name: At_42deg_Heat_P Parameter: Age (day) Value: 14
  misc_feature: MA Experiment 20000171 PARAMETER Experiment Name: At_42deg_Heat_P Parameter: Organism Value: A. thaliana
  misc_feature: MA Experiment 20000171 PARAMETER Experiment Name: At_42deg_Heat_P Parameter: Plant Line Value: WS
  misc_feature: MA Experiment 20000171 PARAMETER Experiment Name: At_42deg_Heat_P Parameter: Temperature (deg C) Value: 42 vs. 22
  misc_feature: MA Experiment 20000171 PARAMETER Experiment Name: At_42deg_Heat_P Parameter: Timepoint (hr) Value: 1
  misc_feature: MA Experiment 20000171 PARAMETER Experiment Name: At_42deg_Heat_P Parameter: Tissue Value: Aerial
  misc_feature: MA Experiment ID: 20000173 Result: Up-regulated in Transcription
  misc_feature: MA Experiment 20000173 PARAMETER Experiment Name: At_42deg_Heat_P Parameter: Age (day) Value: 14
  misc_feature: MA Experiment 20000173 PARAMETER Experiment Name: At_42deg_Heat_P Parameter: Organism Value: A. thaliana
  misc_feature: MA Experiment 20000173 PARAMETER Experiment Name: At_42deg_Heat_P Parameter: Plant Line Value: WS
  misc_feature: MA Experiment 20000173 PARAMETER Experiment Name: At_42deg_Heat_P Parameter: Temperature (deg C) Value: 42 vs. 22
  misc_feature: MA Experiment 20000173 PARAMETER Experiment Name: At_42deg_Heat_P Parameter: Timepoint (hr) Value: 6
  misc_feature: MA Experiment 20000173 PARAMETER Experiment Name: At_42deg_Heat_P Parameter: Tissue Value: Aerial
  misc_feature: MA Experiment ID: 20000182 Result: Up-regulated in Transcription
  misc_feature: MA Experiment 20000182 PARAMETER Experiment Name: At_2mM_SA_P Parameter: Age (day) Value: 14
  misc_feature: MA Experiment 20000182 PARAMETER Experiment Name: At_2mM_SA_P Parameter: Organism Value: A. thaliana
  misc_feature: MA Experiment 20000182 PARAMETER Experiment Name: At_2mM_SA_P Parameter: Plant Line Value: WS
  misc_feature: MA Experiment 20000182 PARAMETER Experiment Name: At_2mM_SA_P Parameter: Timepoint (hr) Value: 6
  misc_feature: MA Experiment 20000182 PARAMETER Experiment Name: At_2mM_SA_P Parameter: Tissue Value: Aerial
  misc_feature: MA Experiment 20000182 PARAMETER Experiment Name: At_2mM_SA_P Parameter: Treatment Value: 2mM SA vs. No Treatment
  misc_feature: MA Experiment ID: 20000185 Result: Down-regulated in Transcription
  misc_feature: MA Experiment 20000185 PARAMETER Experiment Name: At_Roots__P Parameter: Age (day) Value: 7 vs. 21
  misc_feature: MA Experiment 20000185 PARAMETER Experiment Name: At_Roots__P Parameter: Organism Value: A. thaliana
  misc_feature: MA Experiment 20000185 PARAMETER Experiment Name: At_Roots__P Parameter: Tissue Value: Roots vs. Whole Plant
  misc_feature: MA Experiment ID: 20000234 Result: Down-regulated in Transcription
  misc_feature: MA Experiment 20000234 PARAMETER Experiment Name: At_Siliques_P Parameter: Age (day) Value: 21
  misc_feature: MA Experiment 20000234 PARAMETER Experiment Name: At_Siliques_P Parameter: Organism Value: A. thaliana
  misc_feature: MA Experiment 20000234 PARAMETER Experiment Name: At_Siliques_P Parameter: Plant Line Value: WS
  misc_feature: MA Experiment 20000234 PARAMETER Experiment Name: At_Siliques_P Parameter: Tissue Value: Less Than 5mm Siliques vs. Whole Plant
  misc_feature: MA Experiment ID: 20000235 Result: Down-regulated in Transcription
  misc_feature: MA Experiment 20000235 PARAMETER Experiment Name: At_Siliques_P Parameter: Age (day) Value: 21
  misc_feature: MA Experiment 20000235 PARAMETER Experiment Name: At_Siliques_P Parameter: Organism Value: A. thaliana
  misc_feature: MA Experiment 20000235 PARAMETER Experiment Name: At_Siliques_P Parameter: Plant Line Value: WS
  misc_feature: MA Experiment 20000235 PARAMETER Experiment Name: At_Siliques_P Parameter: Tissue Value: 5-10mm Siliques vs. Whole Plant
  misc_feature: MA Experiment ID: 20000264 Result: Down-regulated in Transcription
  misc_feature: MA Experiment 20000264 PARAMETER Experiment Name: At_Open_Flower_P Parameter: Age (day) Value: 21
  misc_feature: MA Experiment 20000264 PARAMETER Experiment Name: At_Open_Flower_P Parameter: Plant Line Value: WS
  misc_feature: MA Experiment 20000264 PARAMETER Experiment Name: At_Open_Flower_P Parameter: Tissue Value: Open Flower vs. Whole Plant
  misc_feature: MA Experiment ID: 20000265 Result: Down-regulated in Transcription
  misc_feature: MA Experiment 20000265 PARAMETER Experiment Name: At_Open_Flower_P Parameter: Age (day) Value: 21
  misc_feature: MA Experiment 20000265 PARAMETER Experiment Name: At_Open_Flower_P Parameter: Plant Line Value: WS
  misc_feature: MA Experiment 20000265 PARAMETER Experiment Name: At_Open_Flower_P Parameter: Tissue Value: Closed Flower vs. Whole Plant
  misc_feature: MA Experiment ID: 20000286 Result: Down-regulated in Transcription
  misc_feature: MA Experiment 20000286 PARAMETER Experiment Name: At_Open_Flower_P Parameter: Age (day) Value: 21
  misc_feature: MA Experiment 20000286 PARAMETER Experiment Name: At_Open_Flower_P Parameter: Plant Line Value: WS
  misc_feature: MA Experiment 20000286 PARAMETER Experiment Name: At_Open_Flower_P Parameter: Tissue Value: Half Open vs. Whole Plant
  misc_feature: MA Experiment ID: 20000436 Result: Up-regulated in Transcription
  misc_feature: MA Experiment 20000436 PARAMETER Experiment Name: At_Drought_P Parameter: Age (day) Value: 7
  misc_feature: MA Experiment 20000436 PARAMETER Experiment Name: At_Drought_P Parameter: Organism Value: A. thaliana
  misc_feature: MA Experiment 20000436 PARAMETER Experiment Name: At_Drought_P Parameter: Plant Line Value: WS
  misc_feature: MA Experiment 20000436 PARAMETER Experiment Name: At_Drought_P Parameter: Timepoint (hr) Value: 12
  misc_feature: MA Experiment 20000436 PARAMETER Experiment Name: At_Drought_P Parameter: Tissue Value: Whole Plant
  misc_feature: MA Experiment 20000436 PARAMETER Experiment Name: At_Drought_P Parameter: Treatment Value: Drought vs. No Drought
  misc_feature: MA Experiment ID: 20000437 Result: Up-regulated in Transcription
  misc_feature: MA Experiment 20000437 PARAMETER Experiment Name: At_Drought_P Parameter: Age (day) Value: 8
  misc_feature: MA Experiment 20000437 PARAMETER Experiment Name: At_Drought_P Parameter: Organism Value: A. thaliana
  misc_feature: MA Experiment 20000437 PARAMETER Experiment Name: At_Drought_P Parameter: Plant Line Value: WS
  misc_feature: MA Experiment 20000437 PARAMETER Experiment Name: At_Drought_P Parameter: Timepoint (hr) Value: 24
  misc_feature: MA Experiment 20000437 PARAMETER Experiment Name: At_Drought_P Parameter: Tissue Value: Whole Plant
  misc_feature: MA Experiment 20000437 PARAMETER Experiment Name: At_Drought_P Parameter: Treatment Value: Drought vs. No Drought
  misc_feature: MA Experiment ID: 20000438 Result: Down-regulated in Transcription
  misc_feature: MA Experiment 20000438 PARAMETER Experiment Name: At_Shoots__P Parameter: Age (day) Value: 14
  misc_feature: MA Experiment 20000438 PARAMETER Experiment Name: At_Shoots__P Parameter: Tissue Value: Shoots vs. Whole Plant
  misc_feature: MA Experiment ID: 20000439 Result: Down-regulated in Transcription
  misc_feature: MA Experiment 20000439 PARAMETER Experiment Name: At_Roots__P Parameter: Age (day) Value: 14 vs. 21
  misc_feature: MA Experiment 20000439 PARAMETER Experiment Name: At_Roots__P Parameter: Organism Value: A. thaliana
  misc_feature: MA Experiment 20000439 PARAMETER Experiment Name: At_Roots__P Parameter: Tissue Value: Roots vs. Whole Plant
  misc_feature: MA Experiment ID: 20000453 Result: Up-regulated in Transcription
  misc_feature: MA Experiment 20000453 PARAMETER Experiment Name: At_100uM_ABA_P Parameter: Age (day) Value: 15
  misc_feature: MA Experiment 20000453 PARAMETER Experiment Name: At_100uM_ABA_P Parameter: Organism Value: A. thaliana
  misc_feature: MA Experiment 20000453 PARAMETER Experiment Name: At_100uM_ABA_P Parameter: Plant Line Value: WS
  misc_feature: MA Experiment 20000453 PARAMETER Experiment Name: At_100uM_ABA_P Parameter: Timepoint (hr) Value: 24
  misc_feature: MA Experiment 20000453 PARAMETER Experiment Name: At_100uM_ABA_P Parameter: Tissue Value: Aerial
  misc_feature: MA Experiment 20000453 PARAMETER Experiment Name: At_100uM_ABA_P Parameter: Treatment Value: 100uM ABA vs. No Treatment
  misc_feature: MA Experiment ID: 20000527 Result: Down-regulated in Transcription
  misc_feature: MA Experiment 20000527 PARAMETER Experiment Name: At_10percent_PEG_P Parameter: Age (day) Value: 20
  misc_feature: MA Experiment 20000527 PARAMETER Experiment Name: At_10percent_PEG_P Parameter: Organism Value: A. thaliana
  misc_feature: MA Experiment 20000527 PARAMETER Experiment Name: At_10percent_PEG_P Parameter: Plant Line Value: WS
  misc_feature: MA Experiment 20000527 PARAMETER Experiment Name: At_10percent_PEG_P Parameter: Timepoint (day) Value: 20
  misc_feature: MA Experiment 20000527 PARAMETER Experiment Name: At_10percent_PEG_P Parameter: Tissue Value: Whole Plant
  misc_feature: MA Experiment 20000527 PARAMETER Experiment Name: At_10percent_PEG_P Parameter: Treatment Value: 10percent PEG vs. No Treatment
  misc_feature: MA Experiment ID: 20000709 Result: Up-regulated in Transcription
  misc_feature: MA Experiment 20000709 PARAMETER Experiment Name: At_15mM_NH4NO3_L-to-H_P Parameter: Age (hr) Value: 14
  misc_feature: MA Experiment 20000709 PARAMETER Experiment Name: At_15mM_NH4NO3_L-to-H_P Parameter: Organism Value: A. thaliana
  misc_feature: MA Experiment 20000709 PARAMETER Experiment Name: At_15mM_NH4NO3_L-to-H_P Parameter: Plant Line Value: WS
  misc_feature: MA Experiment 20000709 PARAMETER Experiment Name: At_15mM_NH4NO3_L-to-H_P Parameter: Timepoint (hr) Value: 4
  misc_feature: MA Experiment 20000709 PARAMETER Experiment Name: At_15mM_NH4NO3_L-to-H_P Parameter: Tissue Value: Aerial
  misc_feature: MA Experiment 20000709 PARAMETER Experiment Name: At_15mM_NH4NO3_L-to-H_P Parameter: Treatment Value: 15mM NH4NO3 vs. 30mM Mannitol
  misc_feature: MA Experiment ID: 20001757 Result: Down-regulated in Transcription
  misc_feature: MA Experiment 20001757 PARAMETER Experiment Name: At_50mM_NH4NO3_L-to-H_P Parameter: Timepoint (hr) Value: 6
  misc_feature: MA Experiment 20001757 PARAMETER Experiment Name: At_50mM_NH4NO3_L-to-H_P Parameter: Tissue Value: Leaf
  misc_feature: MA Experiment 20001757 PARAMETER Experiment Name: At_50mM_NH4NO3_L-to-H_P Parameter: Treatment Value: 50mM NH4NO3 vs 100mM Mannitol
  misc_feature: MA Experiment ID: 20001904 Result: Up-regulated in Transcription
  misc_feature: MA Experiment 20001904 PARAMETER Experiment Name: At_Drought_Reproduction_P Parameter: Age (day) Value: 37
  misc_feature: MA Experiment 20001904 PARAMETER Experiment Name: At_Drought_Reproduction_P Parameter: Organism Value: A. thaliana
  misc_feature: MA Experiment 20001904 PARAMETER Experiment Name: At_Drought_Reproduction_P Parameter: Plant Line Value: WS
  misc_feature: MA Experiment 20001904 PARAMETER Experiment Name: At_Drought_Reproduction_P Parameter: Timepoint (day) Value: 7
  misc_feature: MA Experiment 20001904 PARAMETER Experiment Name: At_Drought_Reproduction_P Parameter: Tissue Value: Rosettes
  misc_feature: MA Experiment 20001904 PARAMETER Experiment Name: At_Drought_Reproduction_P Parameter: Treatment Value: Drought vs. No Drought
  misc_feature: MA Experiment ID: 20001905 Result: Up-regulated in Transcription
  misc_feature: MA Experiment 20001905 PARAMETER Experiment Name: At_Drought_Reproduction_P Parameter: Age (day) Value: 40
  misc_feature: MA Experiment 20001905 PARAMETER Experiment Name: At_Drought_Reproduction_P Parameter: Organism Value: A. thaliana
  misc_feature: MA Experiment 20001905 PARAMETER Experiment Name: At_Drought_Reproduction_P Parameter: Plant Line Value: WS
  misc_feature: MA Experiment 20001905 PARAMETER Experiment Name: At_Drought_Reproduction_P Parameter: Timepoint (day) Value: 10
  misc_feature: MA Experiment 20001905 PARAMETER Experiment Name: At_Drought_Reproduction_P Parameter: Tissue Value: Rosettes
  misc_feature: MA Experiment 20001905 PARAMETER Experiment Name: At_Drought_Reproduction_P Parameter: Treatment Value: Drought vs. No Drought
gactactctccagaatcatgcgactagtctccagaattatgtgttcacgaatgggtgagatgattgatttgtttctactcgctctcatggccggattcattgcagtggcgtatgttttccgatcaaagcagaagaagaatttaccgccaaatcctgtaggttttccggtgatcggacacctccaccttctcaaagaacctgttcaccgttcccttcgtgacctctctcgaaacctcggcatcgacgtgtttattctccggctaggctctcgtcgagcggtggttgtaacgtcagcttcagctgcggaggagttcttatctcagcaaaacgatgttgttttcgccaacaggcctctcgctactttaactgaatacatgggttacaacaacacgctggttagcacagctccgtacggggagcattggcgcagactccgccgtttctgcgccgtagatatcttgtccaccgctcgtctcagagacttttcggatatacggagagacgaagtgagagctatgattcggaagatcaacgtggaactggtaacatcaggaggcagtgtcagattgaaactccagccgtttctttatgggcttacgtataacatcctaatgagcatggtcgctggaaaacgagaggaagacgaggaaactaaggaagttcggaagctgattagggaggtgttcgatttcgctggtgttaattatgtcggagattttctcccgactctgaagctctttgatcttgatggatacagaaagagagcaaagaaactcgcttcgaaattggacaagtttatgcagaaattagtcgacgagcatcggaaaaacagaggaaaagcagagcttgagaaaacgatgatcactcgtttgctgtctcttcaagaatcagaacctgaatgttacactgatgatatcatcaaagggctcgtacaggtgatgttgcttgctggaacggacacaaccgcagtgacgttggagtgggctatggctaaccttctaaatcatccggaagttttaaggaaactcaaaacggaactaaacgaggtttcgaaagaagggcgtgtgtttgaggaatcagatactggcaagtgtccctatctcaacaatgtgatctctgagactcttcgtttgtttccggcggcgcccttacttgtcccacacgcttcatccactgactgtgaagtcgctggatttgacattccacgtcgcacctggctatttatcaatgcgtgggctattcagagagacccaaatgtatgggatgacccagaaactttcaaaccagagaggtttgaatcagagacccatcgtggtaagtttctgcctttcggaatcggtaggagagcatgtcctggtatgggcctggcccaactagtactgagcttagctttaggctcattgatccagtgtttcgattgggagagagacaatgacgttgccgttgacatgtcggaaggaaagggtcttaccatgcccaaatctgtgcctttagttgccaaatgcaagtctttaccaatcctcgacaaacttgttctttaactggatcatttatctttcactttgtgatactttgtgtattaatttgatctattatcatcattaagcgtagttataaataaaaatttattttattttc

SEQ ID NO: 106767 - protein, 512 aa, Arabidopsis thaliana
  peptide (1)..(512): Ceres Seq. ID no. 13620379
  misc_feature (48)..(499): Pfam Name: Cytochrome P450 Pfam Description: Cytochrome P450
  misc_feature (6)..(512): Homolog of NCBI NO: 30698292 NR Description: cytochrome P450 family [Arabidopsis thaliana] putative cytochrome P450 [Arabidopsis thaliana]
  misc_feature (17)..(512): Homolog of NCBI NO: 9758430 NR Description: cytochrome P450 [Arabidopsis thaliana]
  misc_feature (32)..(511): Homolog of NCBI NO: 30692923 NR Description: cytochrome P450 91A1 [Arabidopsis thaliana] Cytochrome P450 81D1 >gi|9759034|dbj|BAB09361.1| cytochrome P450 thaliana] >gi|20147351|gb|AAM10388.1| AT5g36220/T30G6_3
  misc_feature (32)..(511): Homolog of NCBI NO: 25282604 NR Description: cytochrome P450 monooxygenase [imported] - thaliana (fragment) >gi|3164142|dbj|BAA28538.1| cytochrome P450
  misc_feature (19)..(511): Homolog of NCBI NO: 30690935 NR Description: cytochrome P450, putative [Arabidopsis thaliana]
  misc_feature (19)..(511): Homolog of NCBI NO: 15235533 NR Description: cytochrome P450 family [Arabidopsis thaliana]
  misc_feature (24)..(510): Homolog of NCBI NO: 4894170 NR Description: cytochrome P450 [Cicer arietinum]
  misc_feature (19)..(511): Homolog of NCBI NO: 15235517 NR Description: cytochrome P450 family [Arabidopsis thaliana]
  misc_feature (23)..(506): Homolog of NCBI NO: 33521519 NR Description: isoflavone 3'-hydroxylase [Medicago truncatula]
  misc_feature (32)..(510): Homolog of NCBI NO: 15235536 NR Description: cytochrome P450, putative [Arabidopsis thaliana]
LLSRIMRLVSRIMCSRMGEMIDLFLLALMAGFIAVAYVFRSKQKKNLPPNPVGFPVIGHLHLLKEPVHRSLRDLSRNLGIDVFILRLGSRRAVVVTSASAAEEFLSQQNDVVFANRPLATLTEYMGYNNTLVSTAPYGEHWRRLRRFCAVDILSTARLRDFSDIRRDEVRAMIRKINVELVTSGGSVRLKLQPFLYGLTYNILMSMVAGKREEDEETKEVRKLIREVFDFAGVNYVGDFLPTLKLFDLDGYRKRAKKLASKLDKFMQKLVDEHRKNRGKAELEKTMITRLLSLQESEPECYTDDIIKGLVQVMLLAGTDTTAVTLEWAMANLLNHPEVLRKLKTELNEVSKEGRVFEESDTGKCPYLNNVISETLRLFPAAPLLVPHASSTDCEVAGFDIPRRTWLFINAWAIQRDPNVWDDPETFKPERFESETHRGKFLPFGIGRRACPGMGLAQLVLSLALGSLIQCFDWERDNDVAVDMSEGKGLTMPKSVPLVAKCKSLPILDKLVL

SEQ ID NO: 106768 - protein, 507 aa, Arabidopsis thaliana
  peptide (1)..(507): Ceres Seq. ID no. 13620380
  misc_feature (43)..(494): Pfam Name: Cytochrome P450 Pfam Description: Cytochrome P450
  misc_feature (1)..(507): Homolog of NCBI NO: 30698292 NR Description: cytochrome P450 family [Arabidopsis thaliana] putative cytochrome P450 [Arabidopsis thaliana]
  misc_feature (12)..(507): Homolog of NCBI NO: 9758430 NR Description: cytochrome P450 [Arabidopsis thaliana]
  misc_feature (27)..(506): Homolog of NCBI NO: 30692923 NR Description: cytochrome P450 91A1 [Arabidopsis thaliana] Cytochrome P450 81D1 >gi|9759034|dbj|BAB09361.1| cytochrome P450 thaliana] >gi|20147351|gb|AAM10388.1| AT5g36220/T30G6_3
  misc_feature (27)..(506): Homolog of NCBI NO: 25282604 NR Description: cytochrome P450 monooxygenase [imported] - thaliana (fragment) >gi|3164142|dbj|BAA28538.1| cytochrome P450
  misc_feature (14)..(506): Homolog of NCBI NO: 30690935 NR Description: cytochrome P450, putative [Arabidopsis thaliana]
  misc_feature (14)..(506): Homolog of NCBI NO: 15235533 NR Description: cytochrome P450 family [Arabidopsis thaliana]
  misc_feature (19)..(505): Homolog of NCBI NO: 4894170 NR Description: cytochrome P450 [Cicer arietinum]
  misc_feature (14)..(506): Homolog of NCBI NO: 15235517 NR Description: cytochrome P450 family [Arabidopsis thaliana]
  misc_feature (18)..(501): Homolog of NCBI NO: 33521519 NR Description: isoflavone 3'-hydroxylase [Medicago truncatula]
  misc_feature (27)..(505): Homolog of NCBI NO: 15235536 NR Description: cytochrome P450, putative [Arabidopsis thaliana]
MRLVSRIMCSRMGEMIDLFLLALMAGFIAVAYVFRSKQKKNLPPNPVGFPVIGHLHLLKEPVHRSLRDLSRNLGIDVFILRLGSRRAVVVTSASAAEEFLSQQNDVVFANRPLATLTEYMGYNNTLVSTAPYGEHWRRLRRFCAVDILSTARLRDFSDIRRDEVRAMIRKINVELVTSGGSVRLKLQPFLYGLTYNILMSMVAGKREEDEETKEVRKLIREVFDFAGVNYVGDFLPTLKLFDLDGYRKRAKKLASKLDKFMQKLVDEHRKNRGKAELEKTMITRLLSLQESEPECYTDDIIKGLVQVMLLAGTDTTAVTLEWAMANLLNHPEVLRKLKTELNEVSKEGRVFEESDTGKCPYLNNVISETLRLFPAAPLLVPHASSTDCEVAGFDIPRRTWLFINAWAIQRDPNVWDDPETFKPERFESETHRGKFLPFGIGRRACPGMGLAQLVLSLALGSLIQCFDWERDNDVAVDMSEGKGLTMPKSVPLVAKCKSLPILDKLVL

SEQ ID NO: 106769 - protein, 500 aa, Arabidopsis thaliana
  peptide (1)..(500): Ceres Seq. ID no. 13620381
  misc_feature (36)..(487): Pfam Name: Cytochrome P450 Pfam Description: Cytochrome P450
  misc_feature (1)..(500): Homolog of NCBI NO: 30698292 NR Description: cytochrome P450 family [Arabidopsis thaliana] putative cytochrome P450 [Arabidopsis thaliana]
  misc_feature (5)..(500): Homolog of NCBI NO: 9758430 NR Description: cytochrome P450 [Arabidopsis thaliana]
  misc_feature (20)..(499): Homolog of NCBI NO: 30692923 NR Description: cytochrome P450 91A1 [Arabidopsis thaliana] Cytochrome P450 81D1 >gi|9759034|dbj|BAB09361.1| cytochrome P450 thaliana] >gi|20147351|gb|AAM10388.1| AT5g36220/T30G6_3
  misc_feature (20)..(499): Homolog of NCBI NO: 25282604 NR Description: cytochrome P450 monooxygenase [imported] - thaliana (fragment) >gi|3164142|dbj|BAA28538.1| cytochrome P450
  misc_feature (7)..(499): Homolog of NCBI NO: 30690935 NR Description: cytochrome P450, putative [Arabidopsis thaliana]
  misc_feature (7)..(499): Homolog of NCBI NO: 15235533 NR Description: cytochrome P450 family [Arabidopsis thaliana]
  misc_feature (12)..(498): Homolog of NCBI NO: 4894170 NR Description: cytochrome P450 [Cicer arietinum]
  misc_feature (7)..(499): Homolog of NCBI NO: 15235517 NR Description: cytochrome P450 family [Arabidopsis thaliana]
  misc_feature (11)..(494): Homolog of NCBI NO: 33521519 NR Description: isoflavone 3'-hydroxylase [Medicago truncatula]
  misc_feature (20)..(498): Homolog of NCBI NO: 15235536 NR Description: cytochrome P450, putative [Arabidopsis thaliana]
MCSRMGEMIDLFLLALMAGFIAVAYVFRSKQKKNLPPNPVGFPVIGHLHLLKEPVHRSLRDLSRNLGIDVFILRLGSRRAVVVTSASAAEEFLSQQNDVVFANRPLATLTEYMGYNNTLVSTAPYGEHWRRLRRFCAVDILSTARLRDFSDIRRDEVRAMIRKINVELVTSGGSVRLKLQPFLYGLTYNILMSMVAGKREEDEETKEVRKLIREVFDFAGVNYVGDFLPTLKLFDLDGYRKRAKKLASKLDKFMQKLVDEHRKNRGKAELEKTMITRLLSLQESEPECYTDDIIKGLVQVMLLAGTDTTAVTLEWAMANLLNHPEVLRKLKTELNEVSKEGRVFEESDTGKCPYLNNVISETLRLFPAAPLLVPHASSTDCEVAGFDIPRRTWLFINAWAIQRDPNVWDDPETFKPERFESETHRGKFLPFGIGRRACPGMGLAQLVLSLALGSLIQCFDWERDNDVAVDMSEGKGLTMPKSVPLVAKCKSLPILDKLVL

SEQ ID NO: 106770 - DNA, 1364 bp, Arabidopsis thaliana
  misc_feature (1)..(1364): Ceres Seq. ID no. 13620394
  misc_feature: MA Experiment ID: 108461 Result: Down-regulated in Transcription
  misc_feature: MA Experiment 108461 PARAMETER Experiment Name: At_Germinating_Seeds_cDNA_P Parameter: Age (day) Value: 1 vs. 0
  misc_feature: MA Experiment 108461 PARAMETER Experiment Name: At_Germinating_Seeds_cDNA_P Parameter: Tissue Value: Germinating Seeds
  misc_feature: MA Experiment ID: 108462 Result: Down-regulated in Transcription
  misc_feature: MA Experiment 108462 PARAMETER Experiment Name: At_Germinating_Seeds_cDNA_P Parameter: Age (day) Value: 2 vs. 0
  misc_feature: MA Experiment 108462 PARAMETER Experiment Name: At_Germinating_Seeds_cDNA_P Parameter: Tissue Value: Germinating Seeds
  misc_feature: MA Experiment ID: 108463 Result: Down-regulated in Transcription
  misc_feature: MA Experiment 108463 PARAMETER Experiment Name: At_Germinating_Seeds_cDNA_P Parameter: Age (day) Value: 3 vs. 0
  misc_feature: MA Experiment 108463 PARAMETER Experiment Name: At_Germinating_Seeds_cDNA_P Parameter: Tissue Value: Germinating Seeds
  misc_feature: MA Experiment ID: 108464 Result: Down-regulated in Transcription
  misc_feature: MA Experiment 108464 PARAMETER Experiment Name: At_Germinating_Seeds_cDNA_P Parameter: Age (day) Value: 4 vs. 0
  misc_feature: MA Experiment 108464 PARAMETER Experiment Name: At_Germinating_Seeds_cDNA_P Parameter: Tissue Value: Germinating Seeds
  misc_feature: MA Experiment ID: 20000224 Result: Up-regulated in Transcription
  misc_feature: MA Experiment ID: 20000307 Result: Down-regulated in Transcription
  misc_feature: MA Experiment 20000307 PARAMETER Experiment Name: At_Germinating_Seeds_Sub_P Parameter: Age (hr) Value: 24 vs. 0
  misc_feature: MA Experiment 20000307 PARAMETER Experiment Name: At_Germinating_Seeds_Sub_P Parameter: Organism Value: A. thaliana
  misc_feature: MA Experiment 20000307 PARAMETER Experiment Name: At_Germinating_Seeds_Sub_P Parameter: Plant Line Value: WS
  misc_feature: MA Experiment 20000307 PARAMETER Experiment Name: At_Germinating_Seeds_Sub_P Parameter: Tissue Value: Germinating Seeds
  misc_feature: MA Experiment ID: 20000315 Result: Down-regulated in Transcription
  misc_feature: MA Experiment 20000315 PARAMETER Experiment Name: At_14day_Shoots-Roots_Sub_P Parameter: Age (day) Value: 14
  misc_feature: MA Experiment 20000315 PARAMETER Experiment Name: At_14day_Shoots-Roots_Sub_P Parameter: Organism Value: A. thaliana
  misc_feature: MA Experiment 20000315 PARAMETER Experiment Name: At_14day_Shoots-Roots_Sub_P Parameter: Plant Line Value: WS
  misc_feature: MA Experiment 20000315 PARAMETER Experiment Name: At_14day_Shoots-Roots_Sub_P Parameter: Tissue Value: Shoots vs. Whole Plant
  misc_feature: MA Experiment ID: 20000328 Result: Up-regulated in Transcription
  misc_feature: MA Experiment 20000328 PARAMETER Experiment Name: At_42deg_Heat_Sub_P Parameter: Age (day) Value: 14
  misc_feature: MA Experiment 20000328 PARAMETER Experiment Name: At_42deg_Heat_Sub_P Parameter: Organism Value: A. thaliana
  misc_feature: MA Experiment 20000328 PARAMETER Experiment Name: At_42deg_Heat_Sub_P Parameter: Plant Line Value: WS
  misc_feature: MA Experiment 20000328 PARAMETER Experiment Name: At_42deg_Heat_Sub_P Parameter: Temperature (deg C) Value: 42 vs. 22
  misc_feature: MA Experiment 20000328 PARAMETER Experiment Name: At_42deg_Heat_Sub_P Parameter: Timepoint (hr) Value: 6
  misc_feature: MA Experiment 20000328 PARAMETER Experiment Name: At_42deg_Heat_Sub_P Parameter: Tissue Value: Aerial
gtcggaaaatacggacggcgtcgtcgttctttttgacggtgtagctcaccggcgtcgatttttagatttttttttaagggaaacactaagcagcaaattacaagtgggtgatttgtgtttgttacatagtcttatatctaactatgtcagattctggtgagcctaaaccttctcagcaagaagaacctctacctcaacctgctgcccaagaaactcagtctcaacaagtttgcactttcttcaagaagccaacgaaaagtaaaaacataagaaaaagaaccattgacgctgatgaagaagacggagattcgaaaagcgaaagctctattctacaaaatctaaagaaagttgcaaaacccgatagcaagttatacttttcttctggaccatctaagagttctactacaacgagtggagctcctgagaggtccgtctttcactacgattcatccaaggaaatccaggttcagaacgacagtggagcaacagcaacccttgaaactgagaccgacttcaatcaagacgcacgagctatccgtgagagagttcttaaaaaagcagacgaagcattgaaagggaataagaaaaaggcttctgatgagaagctgtacaaaggaattcatggatatacagatcacaaagctgggtttagaagagaacaaacaatctcgagcgagaaagctggaggctcacacgggccattaagagcttctgctcacataagagtgtcggctagattcgattaccagccagacatttgcaaggattacaaagaaaccggatactgtggatatggagattcgtgtaagttcttgcatgaccgtggggattacaaaccaggatggcagatagagaaagagtgggaagaagcagagaaagttaggaagagaaataaagctatgggagttgaggatgaagatgatgaggctgacaaggatagcgacgaagacgaaaatgcattgccctttgcttgcttcatttgcagggagccttttgttgatccagttgtcaccaaatgcaagcattacttctgtgagcattgtgctttaaagcatcacacgaagaacaagaagtgctttgtgtgtaaccaaccaacaatggggattttcaatgcagcacatgagatcaagaagagaatggctgaagaacggagtaaagctgaacaaggattgtgaagtccttgtttcactggacaaaaaggcaaaaactatatttggttatttacttgaggaaagctttttgttttgttgtactcactggcctatatatattcattcggatgacgacgatagttgtttcaaactgattaacttttaaatttaaacaaactgaaaattgaatcagagttttggagtcaacttccc

SEQ ID NO: 106771 - protein, 343 aa, Arabidopsis thaliana
  peptide (1)..(343): Ceres Seq. ID no. 13620395
  misc_feature (277)..(314): Pfam Name: Zinc finger, C3HC4 type (RING finger) Pfam Description: Zinc finger, C3HC4 type (RING finger)
  misc_feature (1)..(343): Homolog of NCBI NO: 15223384 NR Description: expressed protein [Arabidopsis thaliana]
  misc_feature (1)..(343): Homolog of NCBI NO: 26451788 NR Description: unknown protein [Arabidopsis thaliana]
  misc_feature (25)..(343): Homolog of NCBI NO: 15240037 NR Description: expressed protein [Arabidopsis thaliana] expressed protein [Arabidopsis thaliana] contains similarity to zinc finger protein~gene_id:MHF15.6
  misc_feature (25)..(343): Homolog of NCBI NO: 22531136 NR Description: putative protein [Arabidopsis thaliana]
  misc_feature (1)..(303): Homolog of NCBI NO: 25406720 NR Description: probable zinc finger protein [imported] - thaliana >gi|9665151|gb|AAF97335.1|AC023628_16 Putative zinc
  misc_feature (26)..(343): Homolog of NCBI NO: 23943840 NR Description: RIKEN cDNA 2810428C21 [Mus musculus]
  misc_feature (28)..(340): Homolog of NCBI NO: 27715515 NR Description: similar to RIKEN cDNA 2810428C21 [Mus musculus]
  misc_feature (16)..(343): Homolog of NCBI NO: 21313494 NR Description: RIKEN cDNA 2310020H19 [Mus musculus]
  misc_feature (13)..(342): Homolog of NCBI NO: 34935361 NR Description: similar to RIKEN cDNA 2310020H19 [Rattus
  misc_feature (28)..(342): Homolog of NCBI NO: 5902158 NR Description: zinc finger protein 183 (RING finger, C3HC4 type) sapiens] >gi|3123165|sp|O15541|Z183_HUMAN Zinc finger protein 183
MSDSGEPKPSQQEEPLPQPAAQETQSQQVCTFFKKPTKSKNIRKRTIDADEEDGDSKSESSILQNLKKVAKPDSKLYFSSGPSKSSTTTSGAPERSVFHYDSSKEIQVQNDSGATATLETETDFNQDARAIRERVLKKADEALKGNKKKASDEKLYKGIHGYTDHKAGFRREQTISSEKAGGSHGPLRASAHIRVSARFDYQPDICKDYKETGYCGYGDSCKFLHDRGDYKPGWQIEKEWEEAEKVRKRNKAMGVEDEDDEADKDSDEDENALPFACFICREPFVDPVVTKCKHYFCEHCALKHHTKNKKCFVCNQPTMGIFNAAHEIKKRMAEERSKAEQGL

SEQ ID NO: 106772 - DNA, 811 bp, Arabidopsis thaliana
  misc_feature (1)..(811): Ceres Seq. ID no. 13620396
  misc_feature: MA Experiment ID: 20000111 Result: Down-regulated in Transcription
  misc_feature: MA Experiment 20000111 PARAMETER Experiment Name: At_42deg_Heat_cDNA_P Parameter: Temperature (deg C) Value: 42 vs. 22
  misc_feature: MA Experiment 20000111 PARAMETER Experiment Name: At_42deg_Heat_cDNA_P Parameter: Timepoint (hr) Value: 6
  misc_feature: MA Experiment 20000111 PARAMETER Experiment Name: At_42deg_Heat_cDNA_P Parameter: Tissue Value: Aerial
  misc_feature: MA Experiment ID: 20000112 Result: Down-regulated in Transcription
  misc_feature: MA Experiment 20000112 PARAMETER Experiment Name: At_42deg_Heat_cDNA_P Parameter: Temperature (deg C) Value: 42 vs. 22
  misc_feature: MA Experiment 20000112 PARAMETER Experiment Name: At_42deg_Heat_cDNA_P Parameter: Timepoint (hr) Value: 2
  misc_feature: MA Experiment 20000112 PARAMETER Experiment Name: At_42deg_Heat_cDNA_P Parameter: Tissue Value: Aerial
  misc_feature: MA Experiment ID: 20000113 Result: Down-regulated in Transcription
  misc_feature: MA Experiment 20000113 PARAMETER Experiment Name: At_42deg_Heat_cDNA_P Parameter: Temperature (deg C) Value: 42 vs. 22
  misc_feature: MA Experiment 20000113 PARAMETER Experiment Name: At_42deg_Heat_cDNA_P Parameter: Timepoint (hr) Value: 8
  misc_feature: MA Experiment 20000113 PARAMETER Experiment Name: At_42deg_Heat_cDNA_P Parameter: Tissue Value: Aerial
  misc_feature: MA Experiment ID: 20000224 Result: Down-regulated in Transcription
aaaattaaaccaaagaaacaaacaatccttgttctcgccgaaatagagaattttgtgaatctgggtttttagttcaggtgttaatataagattttgatcaaaagaagacgagattcgatccgatccgatctgattgaagaagaaatggcgaatctgtatgtgaaagcggttccaccaccggatatgaataggaatacggaatggttcatgtatccaggagtttggacgacttacatgcttattctcttcttcggttggctcgttgttctctctgtctctggttgttcccctggaatggcttggactgttgttaatctcgctcacttcgttgtaacgtatcacagcttccactggatgaaaggaactccttttgcagatgaccaaggaatctacaatggtttaacttggtgggaacaaatggacaatggtcaacagcttacccgcaaccgcaaatttcttaccctagttcctgttgttctgtacttgattgcatcgcatacaacagattacagacatccatggctgttcctcaacacactcgctgtgatggttctcgttgttgccaagttccccaacatgcacaaggtacgcatctttggtatcaatggtgataaataagtttcctttacggcaagagaacacctgaaagaaggaaaaggggatataagcgaacatatatatgtgtaaatgttcatatgagttggtttaattctcgagtcatgttttttgttggatatttgtaagtaaactctctaattttgaagctttcatcttttaccttttataatagacacgaaaaagctttcccttc

SEQ ID NO: 106773 - protein, 157 aa, Arabidopsis thaliana; identical to SEQ ID NO: 29363
  peptide (1)..(157): Ceres Seq. ID no. 13620397
  misc_feature (14)..(156): Pfam Name: ORMDL family Pfam Description: ORMDL family
  misc_feature (1)..(157): Homolog of NCBI NO: 18378814 NR Description: expressed protein [Arabidopsis thaliana] unknown protein [Arabidopsis thaliana]
  misc_feature (1)..(147): Homolog of NCBI NO: 25513580 NR Description: F6F3.4 protein - Arabidopsis thaliana
  misc_feature (1)..(154): Homolog of NCBI NO: 38344271 NR Description: OSJNBa0005N02.9 [Oryza sativa (japonica
  misc_feature (4)..(157): Homolog of NCBI NO: 15238262 NR Description: expressed protein [Arabidopsis thaliana] gene_id:MJC20.10~pir||T39307~similar to unknown protein
  misc_feature (5)..(156): Homolog of NCBI NO: 34394897 NR Description: putative ORMDL2 [Oryza sativa (japonica
  misc_feature (5)..(147): Homolog of NCBI NO: 34901370 NR Description: OSJNBb0062P14.15 [Oryza sativa (japonica
  misc_feature (56)..(156): Homolog of NCBI NO: 18419644 NR Description: unknown [Narcissus pseudonarcissus]
  misc_feature (13)..(154): Homolog of NCBI NO: 13385128 NR Description: ORM1-like 3 [Mus musculus] unnamed protein product [Mus musculus]
  misc_feature (15)..(153): Homolog of NCBI NO: 19112082 NR Description: hypothetical protein; similar to S. cerevisiae contains 3 predicted transmembrane helices [Schizosaccharomyces
  misc_feature (13)..(154): Homolog of NCBI NO: 26352536 NR Description: unnamed protein product [Mus musculus]

SEQ ID NO: 106774 - protein, 144 aa, Arabidopsis thaliana; identical to SEQ ID NO: 29364
  peptide (1)..(144): Ceres Seq. ID no. 13620398
  misc_feature (1)..(143): Pfam Name: ORMDL family Pfam Description: ORMDL family
  misc_feature (1)..(144): Homolog of NCBI NO: 18378814 NR Description: expressed protein [Arabidopsis thaliana] unknown protein [Arabidopsis thaliana]
  misc_feature (1)..(134): Homolog of NCBI NO: 25513580 NR Description: F6F3.4 protein - Arabidopsis thaliana
  misc_feature (1)..(141): Homolog of NCBI NO: 38344271 NR Description: OSJNBa0005N02.9 [Oryza sativa (japonica
  misc_feature (1)..(144): Homolog of NCBI NO: 15238262 NR Description: expressed protein [Arabidopsis thaliana] gene_id:MJC20.10~pir||T39307~similar to unknown protein
  misc_feature (1)..(143): Homolog of NCBI NO: 34394897 NR Description: putative ORMDL2 [Oryza sativa (japonica
  misc_feature (1)..(134): Homolog of NCBI NO: 34901370 NR Description: OSJNBb0062P14.15 [Oryza sativa (japonica
  misc_feature (43)..(143): Homolog of NCBI NO: 18419644 NR Description: unknown [Narcissus pseudonarcissus]
  misc_feature (1)..(141): Homolog of NCBI NO: 13385128 NR Description: ORM1-like 3 [Mus musculus] unnamed protein product [Mus musculus]
  misc_feature (2)..(140): Homolog of NCBI NO: 19112082 NR Description: hypothetical protein; similar to S. cerevisiae contains 3 predicted transmembrane helices [Schizosaccharomyces
  misc_feature (1)..(141): Homolog of NCBI NO: 26352536 NR Description: unnamed protein product [Mus musculus]

SEQ ID NO: 106775 - protein, 136 aa, Arabidopsis thaliana; identical to SEQ ID NO: 29365
  peptide (1)..(136): Ceres Seq. ID no. 13620399
  misc_feature (1)..(135): Pfam Name: ORMDL family Pfam Description: ORMDL family
  misc_feature (1)..(136): Homolog of NCBI NO: 18378814 NR Description: expressed protein [Arabidopsis thaliana] unknown protein [Arabidopsis thaliana]
  misc_feature (1)..(126): Homolog of NCBI NO: 25513580 NR Description: F6F3.4 protein - Arabidopsis thaliana
  misc_feature (1)..(133): Homolog of NCBI NO: 38344271 NR Description: OSJNBa0005N02.9 [Oryza sativa (japonica
  misc_feature (1)..(136): Homolog of NCBI NO: 15238262 NR Description: expressed protein [Arabidopsis thaliana] gene_id:MJC20.10~pir||T39307~similar to unknown protein
  misc_feature (1)..(135): Homolog of NCBI NO: 34394897 NR Description: putative ORMDL2 [Oryza sativa (japonica
  misc_feature (1)..(126): Homolog of NCBI NO: 34901370 NR Description: OSJNBb0062P14.15 [Oryza sativa (japonica
  misc_feature (35)..(135): Homolog of NCBI NO: 18419644 NR Description: unknown [Narcissus pseudonarcissus]
  misc_feature (1)..(133): Homolog of NCBI NO: 13385128 NR Description: ORM1-like 3 [Mus musculus] unnamed protein product [Mus musculus]
  misc_feature (1)..(132): Homolog of NCBI NO: 19112082 NR Description: hypothetical protein; similar to S. cerevisiae contains 3 predicted transmembrane helices [Schizosaccharomyces
  misc_feature (1)..(133): Homolog of NCBI NO: 26352536 NR Description: unnamed protein product [Mus musculus]

SEQ ID NO: 106776 - DNA, 1282 bp, Arabidopsis thaliana
  misc_feature (1)..(1282): Ceres Seq. ID no. 13620419
  misc_feature: MA Experiment ID: 20000184 Result: Down-regulated in Transcription
  misc_feature: MA Experiment 20000184 PARAMETER Experiment Name: At_Shoots__P Parameter: Age (day) Value: 7
  misc_feature: MA Experiment 20000184 PARAMETER Experiment Name: At_Shoots__P Parameter: Tissue Value: Shoots vs. Whole Plant
  misc_feature: MA Experiment ID: 20000227 Result: Down-regulated in Transcription
  misc_feature: MA Experiment 20000227 PARAMETER Experiment Name: At_Root-Tips-vs-Tops_P Parameter: Tissue Value: Root Tips vs. Root Tops
  misc_feature: MA Experiment ID: 20000234 Result: Down-regulated in Transcription
  misc_feature: MA Experiment 20000234 PARAMETER Experiment Name: At_Siliques_P Parameter: Age (day) Value: 21
  misc_feature: MA Experiment 20000234 PARAMETER Experiment Name: At_Siliques_P Parameter: Organism Value: A. thaliana
  misc_feature: MA Experiment 20000234 PARAMETER Experiment Name: At_Siliques_P Parameter: Plant Line Value: WS
  misc_feature: MA Experiment 20000234 PARAMETER Experiment Name: At_Siliques_P Parameter: Tissue Value: Less Than 5mm Siliques vs. Whole Plant
  misc_feature: MA Experiment ID: 20000265 Result: Down-regulated in Transcription
  misc_feature: MA Experiment 20000265 PARAMETER Experiment Name: At_Open_Flower_P Parameter: Age (day) Value: 21
  misc_feature: MA Experiment 20000265 PARAMETER Experiment Name: At_Open_Flower_P Parameter: Plant Line Value: WS
  misc_feature: MA Experiment 20000265 PARAMETER Experiment Name: At_Open_Flower_P Parameter: Tissue Value: Closed Flower vs. Whole Plant
  misc_feature: MA Experiment ID: 20000438 Result: Down-regulated in Transcription
  misc_feature: MA Experiment 20000438 PARAMETER Experiment Name: At_Shoots__P Parameter: Age (day) Value: 14
  misc_feature: MA Experiment 20000438 PARAMETER Experiment Name: At_Shoots__P Parameter: Tissue Value: Shoots vs. Whole Plant
  misc_feature: MA Experiment ID: 20000495 Result: Up-regulated in Transcription
  misc_feature: MA Experiment 20000495 PARAMETER Experiment Name: At_Guard_Cells_P Parameter: Harvest Date Value: 8/2/2002
  misc_feature: MA Experiment 20000495 PARAMETER Experiment Name: At_Guard_Cells_P Parameter: Organism Value: A. thaliana
  misc_feature: MA Experiment 20000495 PARAMETER Experiment Name: At_Guard_Cells_P Parameter: Tissue Value: Guard Cells vs. Leaves
  misc_feature: MA Experiment ID: 20001757 Result: Down-regulated in Transcription
  misc_feature: MA Experiment 20001757 PARAMETER Experiment Name: At_50mM_NH4NO3_L-to-H_P Parameter: Timepoint (hr) Value: 6
  misc_feature: MA Experiment 20001757 PARAMETER Experiment Name: At_50mM_NH4NO3_L-to-H_P Parameter: Tissue Value: Leaf
  misc_feature: MA Experiment 20001757 PARAMETER Experiment Name: At_50mM_NH4NO3_L-to-H_P Parameter: Treatment Value: 50mM NH4NO3 vs 100mM Mannitol
acaccaagcataaaaaaaagtcgcgacgttctcattctttctcgaatcataccacagagagagagagaacaaaaagaagcaatcgtcgaaagtcatgttcgctacaaaaacagttctctttatcgccgtcgtgtcacttctcggaacgttttcatccgccgctgtcgatacttttatctacggtggttgctcacaagaaaagtactttccgggatcgccttacgagtcaaacgttaactctctactcacctcgttcgttagctcagcttctctctacacatacaacaacttcaccaccaacggaatctccggcgacagttcctccgtctacggtttgtaccagtgtcgcggtgatctctcctccggctcgggagattgtgcaagatgcgtcgcgcgagcagtaagccgtctagggagtctctgcgccatggcaagcggtggcgcgttgcagctcgaaggctgtttcgttaaatacgacaacacgacgttcctcggtgttgaggataagacggtggtggttcgacgttgtggaccaccggttggttataactcggacgagatgactcgtagagactcggtggtgggttctttagcggcgagtagcggtggttcatacagagtaggagtgtcgggggaactgcaaggtgtggcgcagtgcaccggagatcttagtgcgactgagtgtcaagactgtttgatggaagcgatcggacggctgagaacggattgcggaggagctgcttggggtgacgtgtacttagcaaagtgctacgcgcgttactctgcgcgtggaggtcactctagagccaacggctatggtgggaatcgtaataacaatgatgacgatgagatagagaaaacacttgcaatcatagttggcttaattgctggagttacgttactcgtcgtatttctctcttttatggcaaaatcgtgcgagagaggtaaaggtgggaagtaaataacgttatgggacttttgacttgtatcatcaatttatggttttaaaaaagaatcaaatgcgtaaaggagaaagaaaagcgaagagattcttcatattctccactaaaatcctaaaggatgtttcttttttgacccactttaattgaagttttactatttttcaaatgtatagaaaactcacgccgtttagatttgtgatcgtatctttacgtaagaacatttaaaagtggcgcatatgcaatttatctttgatatgtatttctaattatcataatcacttaacgttgtagtttaaaggaattattgttgattttgtgtt

SEQ ID NO: 106777 - protein, 288 aa, Arabidopsis thaliana; identical to SEQ ID NO: 43586
  peptide (1)..(288): Ceres Seq. ID no. 13620420
  misc_feature (182)..(236): Pfam Name: Domain of unknown function DUF26 Pfam Description: Domain of unknown function DUF26
  misc_feature (1)..(288): Homolog of NCBI NO: 18379273 NR Description: expressed protein [Arabidopsis thaliana] Unknown protein [Arabidopsis thaliana] expressed protein [Arabidopsis thaliana]
  misc_feature (1)..(288): Homolog of NCBI NO: 21554153 NR Description: unknown [Arabidopsis thaliana]
  misc_feature (1)..(242): Homolog of NCBI NO: 25410919 NR Description: hypothetical protein At2g01660 [imported] -
  misc_feature (4)..(284): Homolog of NCBI NO: 30693130 NR Description: expressed protein [Arabidopsis thaliana]
  misc_feature (1)..(283): Homolog of NCBI NO: 21593606 NR Description: unknown [Arabidopsis thaliana]
  misc_feature (1)..(283): Homolog of NCBI NO: 18409653 NR Description: expressed protein [Arabidopsis thaliana] Unknown protein [Arabidopsis thaliana]
  misc_feature (4)..(241): Homolog of NCBI NO: 9757976 NR Description: contains similarity to secretory
  misc_feature (1)..(237): Homolog of NCBI NO: 25406066 NR Description: unknown protein F5A18.13 [imported] - Arabidopsis
  misc_feature (10)..(237): Homolog of NCBI NO: 38567870 NR Description: OSJNBa0091D06.12 [Oryza sativa (japonica
  misc_feature (6)..(244): Homolog of NCBI NO: 15232412 NR Description: secretory protein - like [Arabidopsis thaliana]

SEQ ID NO: 106778 - protein, 177 aa, Arabidopsis thaliana; identical to SEQ ID NO: 43587
  peptide (1)..(177): Ceres Seq. ID no. 13620421
  misc_feature (71)..(125): Pfam Name: Domain of unknown function DUF26 Pfam Description: Domain of unknown function DUF26
  misc_feature (1)..(177): Homolog of NCBI NO: 18379273 NR Description: expressed protein [Arabidopsis thaliana] Unknown protein [Arabidopsis thaliana] expressed protein [Arabidopsis thaliana]
  misc_feature (1)..(177): Homolog of NCBI NO: 21554153 NR Description: unknown [Arabidopsis thaliana]
  misc_feature (1)..(131): Homolog of NCBI NO: 25410919 NR Description: hypothetical protein At2g01660 [imported] -
  misc_feature (1)..(173): Homolog of NCBI NO: 30693130 NR Description: expressed protein [Arabidopsis thaliana]
  misc_feature (1)..(172): Homolog of NCBI NO: 21593606 NR Description: unknown [Arabidopsis thaliana]
  misc_feature (1)..(172): Homolog of NCBI NO: 18409653 NR Description: expressed protein [Arabidopsis thaliana] Unknown protein [Arabidopsis thaliana]
  misc_feature (1)..(130): Homolog of NCBI NO: 9757976 NR Description: contains similarity to secretory
  misc_feature (1)..(126): Homolog of NCBI NO: 25406066 NR Description: unknown protein F5A18.13 [imported] - Arabidopsis
  misc_feature (1)..(126): Homolog of NCBI NO: 38567870 NR Description: OSJNBa0091D06.12 [Oryza sativa (japonica
  misc_feature (1)..(133): Homolog of NCBI NO: 15232412 NR Description: secretory protein - like [Arabidopsis thaliana]

SEQ ID NO: 106779 - DNA, 1160 bp, Arabidopsis thaliana
  misc_feature (1)..(1160): Ceres Seq. ID no. 13620422
  misc_feature: MA Experiment ID: 20000439 Result: Up-regulated in Transcription
  misc_feature: MA Experiment 20000439 PARAMETER Experiment Name: At_Roots__P Parameter: Age (day) Value: 14 vs. 21
  misc_feature: MA Experiment 20000439 PARAMETER Experiment Name: At_Roots__P Parameter: Organism Value: A. thaliana
  misc_feature: MA Experiment 20000439 PARAMETER Experiment Name: At_Roots__P Parameter: Tissue Value: Roots vs. Whole Plant
  misc_feature: MA Experiment ID: 20000451 Result: Up-regulated in Transcription
  misc_feature: MA Experiment 20000451 PARAMETER Experiment Name: At_CS6879_Shoots-Roots_P Parameter: Age (day) Value: 14
  misc_feature: MA Experiment 20000451 PARAMETER Experiment Name: At_CS6879_Shoots-Roots_P Parameter: Organism Value: A. thaliana
  misc_feature: MA Experiment 20000451 PARAMETER Experiment Name: At_CS6879_Shoots-Roots_P Parameter: Plant Line Value: CS6879 vs. WS
  misc_feature: MA Experiment 20000451 PARAMETER Experiment Name: At_CS6879_Shoots-Roots_P Parameter: Tissue Value: Roots
  misc_feature: MA Experiment ID: 20000527 Result: Down-regulated in Transcription
  misc_feature: MA Experiment 20000527 PARAMETER Experiment Name: At_10percent_PEG_P Parameter: Age (day) Value: 20
  misc_feature: MA Experiment 20000527 PARAMETER Experiment Name: At_10percent_PEG_P Parameter: Organism Value: A. thaliana
  misc_feature: MA Experiment 20000527 PARAMETER Experiment Name: At_10percent_PEG_P Parameter: Plant Line Value: WS
  misc_feature: MA Experiment 20000527 PARAMETER Experiment Name: At_10percent_PEG_P Parameter: Timepoint (day) Value: 20
  misc_feature: MA Experiment 20000527 PARAMETER Experiment Name: At_10percent_PEG_P Parameter: Tissue Value: Whole Plant
  misc_feature: MA Experiment 20000527 PARAMETER Experiment Name: At_10percent_PEG_P Parameter: Treatment Value: 10percent PEG vs. No Treatment
gtctcataccagataaaacaaagtaagaagaagatgaagatgcacgtatgttttagtgtgattttgatgtttctaagcatcttcttcatcaatggtgctttgtcgaagcttgaaaggttgaaacatccggtgaagaagaaatctgatggctctctgagttttcttgttatcggagattggggacgcaaaggtggttttaatcaatctctcgttgcacatcagatgggagttgtgggagagaaattagacatagattttgtgatatcagtaggagataatttctacgacgacggattaaaaggagtcaatgatccttcctttgaagcctctttctctcatatctacactcatcctagtctccaaaaacaatggtattcagttttgggtaaccatgattacagaggaaatgttgaagcacaactaagtaaagttctcacccaaaaagattggagatggttttgtcgcagatcttttgtcttatcctcaggaatggtggattttttcttcgcggacacaaatccttttgtagaaaaatacttcactgaaccagaagatcacacttatgattggagaaatgtcttaccaagaaataaatacatctcaaacctcttacatgatttagatttagagattaaaaagtcgcgtgccacatggaaatttgtcgtgggacatcacgggatcaaaaccgcaggtaatcacggtgtgactcaagagcttgtagatcaacttcttccaattctagaggagaataaagtggacttgtacataaatggacatgatcactgcttgcaacacattggttctcacggtaaaacccaatttcttacaagtggaggaggatcaaaggcatggagaggacatgttcagccatgggatccaaaagaactcaaactgtattacgatggacaaggtttcatgtctcttcacatcactcactccaaagctaaattcatctactatgatgtttccggcaatgttcttcaccgatcctcattgtccaaaagatctgctcatctttaaataacatttctaagaataaaatttgcacacaatttaatttaagtttttatttacaataaatttattgatgtatgattattgaacacaatggtcttgaataatatagagttttttcacgttctgaaaacgtggttccgttg

SEQ ID NO: 106780 - protein, 339 aa, Arabidopsis thaliana
  peptide (1)..(339): Ceres Seq. ID no. 13620423
  misc_feature (52)..(263): Pfam Name: Calcineurin-like phosphoesterase Pfam Description: Calcineurin-like phosphoesterase
  misc_feature (12)..(339): Homolog of NCBI NO: 22325417 NR Description: purple acid phosphatase (PAP7) [Arabidopsis >gi|20257477|gb|AAM15908.1|AF492659_1 purple acid phosphatase
  misc_feature (12)..(339): Homolog of NCBI NO: 26452681 NR Description: putative purple acid phosphatase [Arabidopsis
VSYQIKQSKKKMKMHVCFSVILMFLSIFFINGALSKLERLKHPVKKKSDGSLSFLVIGDWGRKGGFNQSLVAHQMGVVGEKLDIDFVISVGDNFYDDGLKGVNDPSFEASFSHIYTHPSLQKQWYSVLGNHDYRGNVEAQLSKVLTQKDWRWFCRRSFVLSSGMVDFFFADTNPFVEKYFTEPEDHTYDWRNVLPRNKYISNLLHDLDLEIKKSRATWKFVVGHHGIKTAGNHGVTQELVDQLLPILEENKVDLYINGHDHCLQHIGSHGKTQFLTSGGGSKAWRGHVQPWDPKELKLYYDGQGFMSLHITHSKAKFIYYDVSGNVLHRSSLSKRSAHL

SEQ ID NO: 106781 - protein, 328 aa, Arabidopsis thaliana
  peptide (1)..(328): Ceres Seq. ID no. 13620424
  misc_feature (41)..(252): Pfam Name: Calcineurin-like phosphoesterase Pfam Description: Calcineurin-like phosphoesterase
  misc_feature (1)..(328): Homolog of NCBI NO: 22325417 NR Description: purple acid phosphatase (PAP7) [Arabidopsis >gi|20257477|gb|AAM15908.1|AF492659_1 purple acid phosphatase
  misc_feature (1)..(328): Homolog of NCBI NO: 26452681 NR Description: putative purple acid phosphatase [Arabidopsis
MKMHVCFSVILMFLSIFFINGALSKLERLKHPVKKKSDGSLSFLVIGDWGRKGGFNQSLVAHQMGVVGEKLDIDFVISVGDNFYDDGLKGVNDPSFEASFSHIYTHPSLQKQWYSVLGNHDYRGNVEAQLSKVLTQKDWRWFCRRSFVLSSGMVDFFFADTNPFVEKYFTEPEDHTYDWRNVLPRNKYISNLLHDLDLEIKKSRATWKFVVGHHGIKTAGNHGVTQELVDQLLPILEENKVDLYINGHDHCLQHIGSHGKTQFLTSGGGSKAWRGHVQPWDPKELKLYYDGQGFMSLHITHSKAKFIYYDVSGNVLHRSSLSKRSAHL

SEQ ID NO: 106782 - protein, 326 aa, Arabidopsis thaliana
  peptide (1)..(326): Ceres Seq. ID no. 13620425
  misc_feature (39)..(250): Pfam Name: Calcineurin-like phosphoesterase Pfam Description: Calcineurin-like phosphoesterase
  misc_feature (1)..(326): Homolog of NCBI NO: 22325417 NR Description: purple acid phosphatase (PAP7) [Arabidopsis >gi|20257477|gb|AAM15908.1|AF492659_1 purple acid phosphatase
  misc_feature (1)..(326): Homolog of NCBI NO: 26452681 NR Description: putative purple acid phosphatase [Arabidopsis
MHVCFSVILMFLSIFFINGALSKLERLKHPVKKKSDGSLSFLVIGDWGRKGGFNQSLVAHQMGVVGEKLDIDFVISVGDNFYDDGLKGVNDPSFEASFSHIYTHPSLQKQWYSVLGNHDYRGNVEAQLSKVLTQKDWRWFCRRSFVLSSGMVDFFFADTNPFVEKYFTEPEDHTYDWRNVLPRNKYISNLLHDLDLEIKKSRATWKFVVGHHGIKTAGNHGVTQELVDQLLPILEENKVDLYINGHDHCLQHIGSHGKTQFLTSGGGSKAWRGHVQPWDPKELKLYYDGQGFMSLHITHSKAKFIYYDVSGNVLHRSSLSKRSAHL

SEQ ID NO: 106783 - DNA, 1305 bp, Arabidopsis thaliana
  misc_feature (1)..(1305): Ceres Seq. ID no. 13620442
  misc_feature: MA Experiment ID: 20000173 Result: Down-regulated in Transcription
  misc_feature: MA Experiment 20000173 PARAMETER Experiment Name: At_42deg_Heat_P Parameter: Age (day) Value: 14
  misc_feature: MA Experiment 20000173 PARAMETER Experiment Name: At_42deg_Heat_P Parameter: Organism Value: A. thaliana
  misc_feature: MA Experiment 20000173 PARAMETER Experiment Name: At_42deg_Heat_P Parameter: Plant Line Value: WS
  misc_feature: MA Experiment 20000173 PARAMETER Experiment Name: At_42deg_Heat_P Parameter: Temperature (deg C) Value: 42 vs. 22
  misc_feature: MA Experiment 20000173 PARAMETER Experiment Name: At_42deg_Heat_P Parameter: Timepoint (hr) Value: 6
  misc_feature: MA Experiment 20000173 PARAMETER Experiment Name: At_42deg_Heat_P Parameter: Tissue Value: Aerial
  misc_feature: MA Experiment ID: 20000184 Result: Down-regulated in Transcription
  misc_feature: MA Experiment 20000184 PARAMETER Experiment Name: At_Shoots__P Parameter: Age (day) Value: 7
  misc_feature: MA Experiment 20000184 PARAMETER Experiment Name: At_Shoots__P Parameter: Tissue Value: Shoots vs. Whole Plant
  misc_feature: MA Experiment ID: 20000185 Result: Down-regulated in Transcription
  misc_feature: MA Experiment 20000185 PARAMETER Experiment Name: At_Roots__P Parameter: Age (day) Value: 7 vs. 21
  misc_feature: MA Experiment 20000185 PARAMETER Experiment Name: At_Roots__P Parameter: Organism Value: A. thaliana
  misc_feature: MA Experiment 20000185 PARAMETER Experiment Name: At_Roots__P Parameter: Tissue Value: Roots vs. Whole Plant
  misc_feature: MA Experiment ID: 20000264 Result: Down-regulated in Transcription
  misc_feature: MA Experiment 20000264 PARAMETER Experiment Name: At_Open_Flower_P Parameter: Age (day) Value: 21
  misc_feature: MA Experiment 20000264 PARAMETER Experiment Name: At_Open_Flower_P Parameter: Plant Line Value: WS
  misc_feature: MA Experiment 20000264 PARAMETER Experiment Name: At_Open_Flower_P Parameter: Tissue Value: Open Flower vs. Whole Plant
  misc_feature: MA Experiment ID: 20000286 Result: Down-regulated in Transcription
  misc_feature: MA Experiment 20000286 PARAMETER Experiment Name: At_Open_Flower_P Parameter: Age (day) Value: 21
  misc_feature: MA Experiment 20000286 PARAMETER Experiment Name: At_Open_Flower_P Parameter: Plant Line Value: WS
  misc_feature: MA Experiment 20000286 PARAMETER Experiment Name: At_Open_Flower_P Parameter: Tissue Value: Half Open vs. Whole Plant
  misc_feature: MA Experiment ID: 20000438 Result: Down-regulated in Transcription
  misc_feature: MA Experiment 20000438 PARAMETER Experiment Name: At_Shoots__P Parameter: Age (day) Value: 14
  misc_feature: MA Experiment 20000438 PARAMETER Experiment Name: At_Shoots__P Parameter: Tissue Value: Shoots vs. Whole Plant
  misc_feature: MA Experiment ID: 20000455 Result: Down-regulated in Transcription
  misc_feature: MA Experiment 20000455 PARAMETER Experiment Name: At_100uM_ABA_P Parameter: Age (day) Value: 16
  misc_feature: MA Experiment 20000455 PARAMETER Experiment Name: At_100uM_ABA_P Parameter: Organism Value: A. thaliana
  misc_feature: MA Experiment 20000455 PARAMETER Experiment Name: At_100uM_ABA_P Parameter: Plant Line Value: WS
  misc_feature: MA Experiment 20000455 PARAMETER Experiment Name: At_100uM_ABA_P Parameter: Timepoint (hr) Value: 48
  misc_feature: MA Experiment 20000455 PARAMETER Experiment Name: At_100uM_ABA_P Parameter: Tissue Value: Aerial
  misc_feature: MA Experiment 20000455 PARAMETER Experiment Name: At_100uM_ABA_P Parameter: Treatment Value: 100uM ABA vs. No Treatment
  misc_feature: MA Experiment ID: 20001451 Result: Down-regulated in Transcription
  misc_feature: MA Experiment 20001451 PARAMETER Experiment Name: At_Far-red-induction_P Parameter: Age (day) Value: 7
  misc_feature: MA Experiment 20001451 PARAMETER Experiment Name: At_Far-red-induction_P Parameter: Light Value: Far-red vs. White
  misc_feature: MA Experiment 20001451 PARAMETER Experiment Name: At_Far-red-induction_P Parameter: Organism Value: A. thaliana
  misc_feature: MA Experiment 20001451 PARAMETER Experiment Name: At_Far-red-induction_P Parameter: Plant Line Value: Columbia
  misc_feature: MA Experiment 20001451 PARAMETER Experiment Name: At_Far-red-induction_P Parameter: Timepoint (hr) Value: 24
  misc_feature: MA Experiment 20001451 PARAMETER Experiment Name: At_Far-red-induction_P Parameter: Tissue Value: Whole Plant
  misc_feature: MA Experiment ID: 20001555 Result: Down-regulated in Transcription
  misc_feature: MA Experiment 20001555 PARAMETER Experiment Name: At_Drought_Soil_Dry_P Parameter: Age (day) Value: 24
  misc_feature: MA Experiment 20001555 PARAMETER Experiment Name: At_Drought_Soil_Dry_P Parameter: Organism Value: A. thaliana
  misc_feature: MA Experiment 20001555 PARAMETER Experiment Name: At_Drought_Soil_Dry_P Parameter: Plant Line Value: WS
  misc_feature: MA Experiment 20001555 PARAMETER Experiment Name: At_Drought_Soil_Dry_P Parameter: Post Timepoint (hr) Value: None
  misc_feature: MA Experiment 20001555 PARAMETER Experiment Name: At_Drought_Soil_Dry_P Parameter: Post-Treatment Value: None
  misc_feature: MA Experiment 20001555 PARAMETER Experiment Name: At_Drought_Soil_Dry_P Parameter: Timepoint (day) Value: 10
  misc_feature: MA Experiment 20001555 PARAMETER Experiment Name: At_Drought_Soil_Dry_P Parameter: Treatment Value: Drought vs. No Drought
  misc_feature: MA Experiment ID: 20001560 Result: Down-regulated in Transcription
  misc_feature: MA Experiment 20001560 PARAMETER Experiment Name: At_Drought_Soil_Dry_P Parameter: Age (day) Value: 28
  misc_feature: MA Experiment 20001560 PARAMETER Experiment Name: At_Drought_Soil_Dry_P Parameter: Organism Value: A. thaliana
  misc_feature: MA Experiment 20001560 PARAMETER Experiment Name: At_Drought_Soil_Dry_P Parameter: Plant Line Value: WS
  misc_feature: MA Experiment 20001560 PARAMETER Experiment Name: At_Drought_Soil_Dry_P Parameter: Post Timepoint (hr) Value: None
  misc_feature: MA Experiment 20001560 PARAMETER Experiment Name: At_Drought_Soil_Dry_P Parameter: Post-Treatment Value: None
  misc_feature: MA Experiment 20001560 PARAMETER Experiment Name: At_Drought_Soil_Dry_P Parameter: Timepoint (day) Value: 14
  misc_feature: MA Experiment 20001560 PARAMETER Experiment Name: At_Drought_Soil_Dry_P Parameter: Treatment Value: Drought vs. No Drought
  misc_feature: MA Experiment ID: 20001904 Result: Down-regulated in Transcription
  misc_feature: MA Experiment 20001904 PARAMETER Experiment Name: At_Drought_Reproduction_P Parameter: Age (day) Value: 37
  misc_feature: MA Experiment 20001904 PARAMETER Experiment Name: At_Drought_Reproduction_P Parameter: Organism Value: A. thaliana
  misc_feature: MA Experiment 20001904 PARAMETER Experiment Name: At_Drought_Reproduction_P Parameter: Plant Line Value: WS
  misc_feature: MA Experiment 20001904 PARAMETER Experiment Name: At_Drought_Reproduction_P Parameter: Timepoint (day) Value: 7
  misc_feature: MA Experiment 20001904 PARAMETER Experiment Name: At_Drought_Reproduction_P Parameter: Tissue Value: Rosettes
  misc_feature: MA Experiment 20001904 PARAMETER Experiment Name: At_Drought_Reproduction_P Parameter: Treatment Value: Drought vs. No Drought
  misc_feature: MA Experiment ID: 20001905 Result: Down-regulated in Transcription
  misc_feature: MA Experiment 20001905 PARAMETER Experiment Name: At_Drought_Reproduction_P Parameter: Age (day) Value: 40
  misc_feature: MA Experiment 20001905 PARAMETER Experiment Name: At_Drought_Reproduction_P Parameter: Organism Value: A. thaliana
  misc_feature: MA Experiment 20001905 PARAMETER Experiment Name: At_Drought_Reproduction_P Parameter: Plant Line Value: WS
  misc_feature: MA Experiment 20001905 PARAMETER Experiment Name: At_Drought_Reproduction_P Parameter: Timepoint (day) Value: 10
  misc_feature: MA Experiment 20001905 PARAMETER Experiment Name: At_Drought_Reproduction_P Parameter: Tissue Value: Rosettes
  misc_feature: MA Experiment 20001905 PARAMETER Experiment Name: At_Drought_Reproduction_P Parameter: Treatment Value: Drought vs. No Drought
  misc_feature: MA Experiment ID: 20001907 Result: Down-regulated in Transcription
  misc_feature: MA Experiment 20001907 PARAMETER Experiment Name: At_Drought_Reproduction_P Parameter: Age (day) Value: 37
  misc_feature: MA Experiment 20001907 PARAMETER Experiment Name: At_Drought_Reproduction_P Parameter: Organism Value: A. thaliana
  misc_feature: MA Experiment 20001907 PARAMETER Experiment Name: At_Drought_Reproduction_P Parameter: Plant Line Value: WS
  misc_feature: MA Experiment 20001907 PARAMETER Experiment Name: At_Drought_Reproduction_P Parameter: Timepoint (day) Value: 7
  misc_feature: MA Experiment 20001907 PARAMETER Experiment Name: At_Drought_Reproduction_P Parameter: Tissue Value: Siliques
  misc_feature: MA Experiment 20001907 PARAMETER Experiment Name: At_Drought_Reproduction_P Parameter: Treatment Value: Drought vs. No Drought
atggcaattgtatcctccacaacaagcatcattcccatgagtaaccaagtcaacaataacgaaaaaggtatagaagacaatgatcatagaggcggccaagagagtcatgtccaaaatgaagatgaagctgatgatcatgatcatgacatggtcatgcccggatttagattccatcctaccgaagaagaactcatagagttttaccttcgccgaaaagttgaaggcaaacgctttaatgtagaactcatcactttcctcgatctttatcgctatgatccttgggaacttcctgctatggcggcgataggagagaaagagtggtacttctatgtgccaagagatcggaaatatagaaatggagatagaccgaaccgagtaacgacttcaggatattggaaagccaccggagctgataggatgatcagatcggagacttctcggcctatcggattaaagaaaaccctagttttctactctggtaaagcccctaaaggcactcgtactagttggatcatgaacgagtatcgtcttccgcaccatgaaaccgagaagtaccaaaaggctgaaatatcattgtgccgagtgtacaaaaggccaggagtagaagatcatccatcggtaccacgttctctctccacaagacatcataaccataactcatcgacatcatcccgtttagccttaagacaacaacaacaccattcatcctcctctaatcattccgacaacaaccttaacaacaacaacaacatcaacaatctcgagaagctctccaccgaatattccggcgacggcagcacaacaacaacgaccacaaacagtaactctgacgttaccattgctctagccaatcaaaacatatatcgtccaatgccttacgacacaagcaacaacacattgatagtctctacgagaaatcatcaagacgatgatgaaactgccattgttgacgatcttcaaagactagttaactaccaaatatcagatggagcgacaacgctaatgcctcaaactcaagcggcgttagctatgaacatgattcctgcaggaacgattccaaacaatgctttgtgggatatgtggaatccaatagtaccagatggaaacagagatcactatactaatattccttttaagtaatttaattagatcatgattattatccatgacaataattattaatgctgctttgccatattttcatactccttatatattgttatggcgatagacaatgattgattactgcgagtttatgtaatggaactgattctcaacatatatagtcaattaagtagttttttt

SEQ ID NO: 106784 - protein, 379 aa, Arabidopsis thaliana
  peptide (1)..(379): Ceres Seq. ID no. 13620443
  misc_feature (51)..(178): Pfam Name: No apical meristem (NAM) protein Pfam Description: No apical meristem (NAM) protein
  misc_feature (1)..(379): Homolog of NCBI NO: 30678000 NR Description: No apical meristem (NAM) protein family thaliana] >gi|24030186|gb|AAN41274.1| putative NAM (no apical
  misc_feature (1)..(330): Homolog of NCBI NO: 30678002 NR Description: No apical meristem (NAM) protein family
  misc_feature (88)..(379): Homolog of NCBI NO: 21450867 NR Description: putative NAM protein [Arabidopsis thaliana]
  misc_feature (13)..(187): Homolog of NCBI NO: 25410986 NR Description: NAM (no apical meristem)-like protein [imported]
  misc_feature (42)..(190): Homolog of NCBI NO: 34907482 NR Description: OsNAC6-like protein [Oryza sativa (japonica
  misc_feature (38)..(291): Homolog of NCBI NO: 15223376 NR Description: No apical meristem (NAM) protein family
  misc_feature (38)..(291): Homolog of NCBI NO: 25518578 NR Description: hypothetical protein T2P11.6 - Arabidopsis
  misc_feature (53)..(224): Homolog of NCBI NO: 18416983 NR Description: No apical meristem (NAM) protein family thaliana] >gi|15982729|gb|AAL09817.1| unknown protein thaliana] >gi|16226943|gb|AAL16305.1|AF428375_1
  misc_feature (53)..(224): Homolog of NCBI NO: 23397295 NR Description: unknown protein [Arabidopsis thaliana]
  misc_feature (49)..(198): Homolog of NCBI NO: 25411775 NR Description: NAM (no apical meristem)-like protein [imported]
MAIVSSTTSIIPMSNQVNNNEKGIEDNDHRGGQESHVQNEDEADDHDHDMVMPGFRFHPTEEELIEFYLRRKVEGKRFNVELITFLDLYRYDPWELPAMAAIGEKEWYFYVPRDRKYRNGDRPNRVTTSGYWKATGADRMIRSETSRPIGLKKTLVFYSGKAPKGTRTSWIMNEYRLPHHETEKYQKAEISLCRVYKRPGVEDHPSVPRSLSTRHHNHNSSTSSRLALRQQQHHSSSSNHSDNNLNNNNNINNLEKLSTEYSGDGSTTTTTTNSNSDVTIALANQNIYRPMPYDTSNNTLIVSTRNHQDDDETAIVDDLQRLVNYQISDGATTLMPQTQAALAMNMIPAGTIPNNALWDMWNPIVPDGNRDHYTNIPFK

SEQ ID NO: 106785 - protein, 367 aa, Arabidopsis thaliana
  peptide (1)..(367): Ceres Seq. ID no. 13620444
  misc_feature (39)..(166): Pfam Name: No apical meristem (NAM) protein Pfam Description: No apical meristem (NAM) protein
  misc_feature (1)..(367): Homolog of NCBI NO: 30678000 NR Description: No apical meristem (NAM) protein family thaliana] >gi|24030186|gb|AAN41274.1| putative NAM (no apical
  misc_feature (1)..(318): Homolog of NCBI NO: 30678002 NR Description: No apical meristem (NAM) protein family
  misc_feature (76)..(367): Homolog of NCBI NO: 21450867 NR Description: putative NAM protein [Arabidopsis thaliana]
  misc_feature (1)..(175): Homolog of NCBI NO: 25410986 NR Description: NAM (no apical meristem)-like protein [imported]
  misc_feature (30)..(178): Homolog of NCBI NO: 34907482 NR Description: OsNAC6-like protein [Oryza sativa (japonica
  misc_feature (26)..(279): Homolog of NCBI NO: 15223376 NR Description: No apical meristem (NAM) protein family
  misc_feature (26)..(279): Homolog of NCBI NO: 25518578 NR Description: hypothetical protein T2P11.6 - Arabidopsis
  misc_feature (41)..(212): Homolog of NCBI NO: 18416983 NR Description: No apical meristem (NAM) protein family thaliana] >gi|15982729|gb|AAL09817.1| unknown protein thaliana] >gi|16226943|gb|AAL16305.1|AF428375_1
  misc_feature (41)..(212): Homolog of NCBI NO: 23397295 NR Description: unknown protein [Arabidopsis thaliana]
  misc_feature (37)..(186): Homolog of NCBI NO: 25411775 NR Description: NAM (no apical meristem)-like protein [imported]
MSNQVNNNEKGIEDNDHRGGQESHVQNEDEADDHDHDMVMPGFRFHPTEEELIEFYLRRKVEGKRFNVELITFLDLYRYDPWELPAMAAIGEKEWYFYVPRDRKYRNGDRPNRVTTSGYWKATGADRMIRSETSRPIGLKKTLVFYSGKAPKGTRTSWIMNEYRLPHHETEKYQKAEISLCRVYKRPGVEDHPSVPRSLSTRHHNHNSSTSSRLALRQQQHHSSSSNHSDNNLNNNNNINNLEKLSTEYSGDGSTTTTTTNSNSDVTIALANQNIYRPMPYDTSNNTLIVSTRNHQDDDETAIVDDLQRLVNYQISDGATTLMPQTQAALAMNMIPAGTIPNNALWDMWNPIVPDGNRDHYTNIPFK

SEQ ID NO: 106786 - protein, 330 aa, Arabidopsis thaliana
  peptide (1)..(330): Ceres Seq. ID no. 13620445
  misc_feature (2)..(129): Pfam Name: No apical meristem (NAM) protein Pfam Description: No apical meristem (NAM) protein
  misc_feature (1)..(330): Homolog of NCBI NO: 30678000 NR Description: No apical meristem (NAM) protein family thaliana] >gi|24030186|gb|AAN41274.1| putative NAM (no apical
  misc_feature (1)..(281): Homolog of NCBI NO: 30678002 NR Description: No apical meristem (NAM) protein family
  misc_feature (39)..(330): Homolog of NCBI NO: 21450867 NR Description: putative NAM protein [Arabidopsis thaliana]
  misc_feature (1)..(138): Homolog of NCBI NO: 25410986 NR Description: NAM (no apical meristem)-like protein [imported]
  misc_feature (1)..(141): Homolog of NCBI NO: 34907482 NR Description: OsNAC6-like protein [Oryza sativa (japonica
  misc_feature (1)..(242): Homolog of NCBI NO: 15223376 NR Description: No apical meristem (NAM) protein family
  misc_feature (1)..(242): Homolog of NCBI NO: 25518578 NR Description: hypothetical protein T2P11.6 - Arabidopsis
  misc_feature (4)..(175): Homolog of NCBI NO: 18416983 NR Description: No apical meristem (NAM) protein family thaliana] >gi|15982729|gb|AAL09817.1| unknown protein thaliana] >gi|16226943|gb|AAL16305.1|AF428375_1
  misc_feature (4)..(175): Homolog of NCBI NO: 23397295 NR Description: unknown protein [Arabidopsis thaliana]
  misc_feature (1)..(149): Homolog of NCBI NO: 25411775 NR Description: NAM (no apical meristem)-like protein [imported]
MVMPGFRFHPTEEELIEFYLRRKVEGKRFNVELITFLDLYRYDPWELPAMAAIGEKEWYFYVPRDRKYRNGDRPNRVTTSGYWKATGADRMIRSETSRPIGLKKTLVFYSGKAPKGTRTSWIMNEYRLPHHETEKYQKAEISLCRVYKRPGVEDHPSVPRSLSTRHHNHNSSTSSRLALRQQQHHSSSSNHSDNNLNNNNNINNLEKLSTEYSGDGSTTTTTTNSNSDVTIALANQNIYRPMPYDTSNNTLIVSTRNHQDDDETAIVDDLQRLVNYQISDGATTLMPQTQAALAMNMIPAGTIPNNALWDMWNPIVPDGNRDHYTNIPFK

SEQ ID NO: 106787 - DNA, 2107 bp, Arabidopsis thaliana
  misc_feature (1)..(2107): Ceres Seq. ID no. 13620453
  misc_feature: MA Experiment ID: 20000437 Result: Down-regulated in Transcription
  misc_feature: MA Experiment 20000437 PARAMETER Experiment Name: At_Drought_P Parameter: Age (day) Value: 8
  misc_feature: MA Experiment 20000437 PARAMETER Experiment Name: At_Drought_P Parameter: Organism Value: A. thaliana
  misc_feature: MA Experiment 20000437 PARAMETER Experiment Name: At_Drought_P Parameter: Plant Line Value: WS
  misc_feature: MA Experiment 20000437 PARAMETER Experiment Name: At_Drought_P Parameter: Timepoint (hr) Value: 24
  misc_feature: MA Experiment 20000437 PARAMETER Experiment Name: At_Drought_P Parameter: Tissue Value: Whole Plant
  misc_feature: MA Experiment 20000437 PARAMETER Experiment Name: At_Drought_P Parameter: Treatment Value: Drought vs. No Drought
gtctgaccctaaaatttctctctgtttttctcagccgttctgtctaaaaccaccgacggcgacttcaaatagacgtcggaatttgtcgccaccggagaattgttacatgtgaatcccgttttataaagatgatgtatgtatctgctcgatccggttctgcgaagcgaagcatctcaagtctacctcatctctctcagagatttaaacaaacagagaatgagattgttcaaatgtttagtgttccgaatcatgaggaatctgagaagcctcaagagaagtggaaattatctagaaaggatccgtcagtgcggatgttggatgagagattcattaggatagtgaaaatcttcaaatggggacctgatgctgagaaagctcttgaggtgcttaaactgaaagttgatcatcgattagttcgttcgattcttgagatagacgttgagataaatgtcaagattcagtttttcaaatgggctggtaaaagaagaaactttcagcatgattgctccacttacatgaccttaatacgctgccttgaagaagctaggctttatggtgaaatgtatagaacgatacaagaagtggtccgtaacacatatgttagcgttagtccagcagtactctctgagcttgtgaaagcattggggcgagctaagatggttagtaaagctttatcggttttttatcaggcaaaaggacgcaagtgtaaacccacttcgagcacttacaactcggtgattctaatgttgatgcaagaaggacagcacgagaaagtccatgaggtttatactgagatgtgtaacgaaggtgactgttttccagacacgattacttactctgcgcttatatcctcgtatgaaaaactaggtcgtaatgattctgcgataaggttgtttgatgaaatgaaggataactgtatgcagcctacagagaaaatatacaccacgttgttgggaatttactttaaggtgggtaaagttgagaaagctttagatcttttcgaggagatgaaacgagcaggttgttcaccaacagtttatacgtacacggaactgataaagggacttggcaaagctgggagggtagatgaagcatatggcttctataaagacatgcttagagatggattgactcctgatgttgtgttcttaaacaatctgatgaacattttaggcaaagtgggtcgagtggaggagttgacaaatgtcttcagtgagatgggaatgtggagatgtacacccactgttgtctcatacaataccgtgattaaagctctgtttgagtcaaaagcacatgtttcggaagtaagctcttggtttgataagatgaaagcagacagtgtttcccctagtgaattcacttactcaatccttatagatggttattgtaaaacgaatagagtagagaaagctctgttgctgcttgaggagatggatgagaaaggttttccaccttgtcctgcagcgtattgcagcctcataaacgctcttggaaaggcgaaaagatatgaagcagcgaatgagctatttaaggaactaaaagaaaacttcggcaatgtaagttctcgagtatacgctgtgatgatcaaacattttgggaaatgcgggaagctcagcgaagctgtagatctcttcaatgagatgaagaaccaaggaagtggtcccgatgtttatgcctacaacgccctcatgtcaggaatggtaaaggctggtatgatcaacgaagctaattccttgcttagaaagatggaagaaaacggttgcagggccgatataaactcgcataatatcatcctcaatggatttgctagaacaggtgtgccgagacgggctatagaaatgtttgaaactataaagcattctggtattaagcctgatggtgtcacttataatactcttcttggatgctttgcacatgctggaatgtttgaggaggctgcaagaatgatgagagagatgaaagataaaggctttgagtatgatgccatcacttactcatctatacttgacgctgttggcaatgtggatcatgaaaaagatgatgtttcatctttctaagatttgatttatctaatatgaataacaaaaagaaaaaaaagtagaagctg

SEQ ID NO: 106788 - protein, 642 aa, Arabidopsis thaliana
  peptide (1)..(642): Ceres Seq. ID no. 13620454
  misc_feature (198)..(232): Pfam Name: PPR repeat Pfam Description: PPR repeat
  misc_feature (126)..(642): Homolog of NCBI NO: 33146978 NR Description: putative pentatricopeptide (PPR)
  misc_feature (126)..(633): Homolog of NCBI NO: 34900768 NR Description: hypothetical protein~similar to Arabidopsis
  misc_feature (84)..(642): Homolog of NCBI NO: 15231338 NR Description: pentatricopeptide (PPR) repeat-containing protein thaliana] >gi|6728999|gb|AAF26996.1|AC016827_7 hypothetical
  misc_feature (132)..(633): Homolog of NCBI NO: 15231338 NR Description: pentatricopeptide (PPR) repeat-containing protein thaliana] >gi|6728999|gb|AAF26996.1|AC016827_7 hypothetical
  misc_feature (124)..(633): Homolog of NCBI NO: 15221674 NR Description: pentatricopeptide (PPR) repeat-containing protein
  misc_feature (52)..(642): Homolog of NCBI NO: 15221549 NR Description: pentatricopeptide (PPR) repeat-containing protein
  misc_feature (168)..(633): Homolog of NCBI NO: 34900768 NR Description: hypothetical protein~similar to Arabidopsis
  misc_feature (168)..(633): Homolog of NCBI NO: 33146978 NR Description: putative pentatricopeptide (PPR)
  misc_feature (52)..(642): Homolog of NCBI NO: 6630464 NR Description: F23N19.4 [Arabidopsis thaliana]
  misc_feature (128)..(629): Homolog of NCBI NO: 37535708 NR Description: putative membrane-associated protein [Oryza
MMYVSARSGSAKRSISSLPHLSQRFKQTENEIVQMFSVPNHEESEKPQEKWKLSRKDPSVRMLDERFIRIVKIFKWGPDAEKALEVLKLKVDHRLVRSILEIDVEINVKIQFFKWAGKRRNFQHDCSTYMTLIRCLEEARLYGEMYRTIQEVVRNTYVSVSPAVLSELVKALGRAKMVSKALSVFYQAKGRKCKPTSSTYNSVILMLMQEGQHEKVHEVYTEMCNEGDCFPDTITYSALISSYEKLGRNDSAIRLFDEMKDNCMQPTEKIYTTLLGIYFKVGKVEKALDLFEEMKRAGCSPTVYTYTELIKGLGKAGRVDEAYGFYKDMLRDGLTPDVVFLNNLMNILGKVGRVEELTNVFSEMGMWRCTPTVVSYNTVIKALFESKAHVSEVSSWFDKMKADSVSPSEFTYSILIDGYCKTNRVEKALLLLEEMDEKGFPPCPAAYCSLINALGKAKRYEAANELFKELKENFGNVSSRVYAVMIKHFGKCGKLSEAVDLFNEMKNQGSGPDVYAYNALMSGMVKAGMINEANSLLRKMEENGCRADINSHNIILNGFARTGVPRRAIEMFETIKHSGIKPDGVTYNTLLGCFAHAGMFEEAARMMREMKDKGFEYDAITYSSILDAVGNVDHEKDDVSSF

SEQ ID NO: 106789 - protein, 641 aa, Arabidopsis thaliana
  peptide (1)..(641): Ceres Seq. ID no. 13620455
  misc_feature (197)..(231): Pfam Name: PPR repeat Pfam Description: PPR repeat
  misc_feature (125)..(641): Homolog of NCBI NO: 33146978 NR Description: putative pentatricopeptide (PPR)
  misc_feature (125)..(632): Homolog of NCBI NO: 34900768 NR Description: hypothetical protein~similar to Arabidopsis
  misc_feature (83)..(641): Homolog of NCBI NO: 15231338 NR Description: pentatricopeptide (PPR) repeat-containing protein thaliana] >gi|6728999|gb|AAF26996.1|AC016827_7 hypothetical
  misc_feature (131)..(632): Homolog of NCBI NO: 15231338 NR Description: pentatricopeptide (PPR) repeat-containing protein thaliana] >gi|6728999|gb|AAF26996.1|AC016827_7 hypothetical
  misc_feature (123)..(632): Homolog of NCBI NO: 15221674 NR Description: pentatricopeptide (PPR) repeat-containing protein
  misc_feature (51)..(641): Homolog of NCBI NO: 15221549 NR Description: pentatricopeptide (PPR) repeat-containing protein
  misc_feature (167)..(632): Homolog of NCBI NO: 34900768 NR Description: hypothetical protein~similar to Arabidopsis
  misc_feature (167)..(632): Homolog of NCBI NO: 33146978 NR Description: putative pentatricopeptide (PPR)
  misc_feature (51)..(641): Homolog of NCBI NO: 6630464 NR Description: F23N19.4 [Arabidopsis thaliana]
  misc_feature (127)..(628): Homolog of NCBI NO: 37535708 NR Description: putative membrane-associated protein [Oryza
MYVSARSGSAKRSISSLPHLSQRFKQTENEIVQMFSVPNHEESEKPQEKWKLSRKDPSVRMLDERFIRIVKIFKWGPDAEKALEVLKLKVDHRLVRSILEIDVEINVKIQFFKWAGKRRNFQHDCSTYMTLIRCLEEARLYGEMYRTIQEVVRNTYVSVSPAVLSELVKALGRAKMVSKALSVFYQAKGRKCKPTSSTYNSVILMLMQEGQHEKVHEVYTEMCNEGDCFPDTITYSALISSYEKLGRNDSAIRLFDEMKDNCMQPTEKIYTTLLGIYFKVGKVEKALDLFEEMKRAGCSPTVYTYTELIKGLGKAGRVDEAYGFYKDMLRDGLTPDVVFLNNLMNILGKVGRVEELTNVFSEMGMWRCTPTVVSYNTVIKALFESKAHVSEVSSWFDKMKADSVSPSEFTYSILIDGYCKTNRVEKALLLLEEMDEKGFPPCPAAYCSLINALGKAKRYEAANELFKELKENFGNVSSRVYAVMIKHFGKCGKLSEAVDLFNEMKNQGSGPDVYAYNALMSGMVKAGMINEANSLLRKMEENGCRADINSHNIILNGFARTGVPRRAIEMFETIKHSGIKPDGVTYNTLLGCFAHAGMFEEAARMMREMKDKGFEYDAITYSSILDAVGNVDHEKDDVSSF

SEQ ID NO: 106790 - protein, 608 aa, Arabidopsis thaliana
  peptide (1)..(608): Ceres Seq. ID no. 13620456
  misc_feature (164)..(198): Pfam Name: PPR repeat Pfam Description: PPR repeat
  misc_feature (92)..(608): Homolog of NCBI NO: 33146978 NR Description: putative pentatricopeptide (PPR)
  misc_feature (92)..(599): Homolog of NCBI NO: 34900768 NR Description: hypothetical protein~similar to Arabidopsis
  misc_feature (50)..(608): Homolog of NCBI NO: 15231338 NR Description: pentatricopeptide (PPR) repeat-containing protein thaliana] >gi|6728999|gb|AAF26996.1|AC016827_7 hypothetical
  misc_feature (98)..(599): Homolog of NCBI NO: 15231338 NR Description: pentatricopeptide (PPR) repeat-containing protein thaliana] >gi|6728999|gb|AAF26996.1|AC016827_7 hypothetical
  misc_feature (90)..(599): Homolog of NCBI NO: 15221674 NR Description: pentatricopeptide (PPR) repeat-containing protein
  misc_feature (18)..(608): Homolog of NCBI NO: 15221549 NR Description: pentatricopeptide (PPR) repeat-containing protein
  misc_feature (134)..(599): Homolog of NCBI NO: 34900768 NR Description: hypothetical protein~similar to Arabidopsis
  misc_feature (134)..(599): Homolog of NCBI NO: 33146978 NR Description: putative pentatricopeptide (PPR)
  misc_feature (18)..(608): Homolog of NCBI NO: 6630464 NR Description: F23N19.4 [Arabidopsis thaliana]
  misc_feature (94)..(595): Homolog of NCBI NO: 37535708 NR Description: putative membrane-associated protein [Oryza
MFSVPNHEESEKPQEKWKLSRKDPSVRMLDERFIRIVKIFKWGPDAEKALEVLKLKVDHRLVRSILEIDVEINVKIQFFKWAGKRRNFQHDCSTYMTLIRCLEEARLYGEMYRTIQEVVRNTYVSVSPAVLSELVKALGRAKMVSKALSVFYQAKGRKCKPTSSTYNSVILMLMQEGQHEKVHEVYTEMCNEGDCFPDTITYSALISSYEKLGRNDSAIRLFDEMKDNCMQPTEKIYTTLLGIYFKVGKVEKALDLFEEMKRAGCSPTVYTYTELIKGLGKAGRVDEAYGFYKDMLRDGLTPDVVFLNNLMNILGKVGRVEELTNVFSEMGMWRCTPTVVSYNTVIKALFESKAHVSEVSSWFDKMKADSVSPSEFTYSILIDGYCKTNRVEKALLLLEEMDEKGFPPCPAAYCSLINALGKAKRYEAANELFKELKENFGNVSSRVYAVMIKHFGKCGKLSEAVDLFNEMKNQGSGPDVYAYNALMSGMVKAGMINEANSLLRKMEENGCRADINSHNIILNGFARTGVPRRAIEMFETIKHSGIKPDGVTYNTLLGCFAHAGMFEEAARMMREMKDKGFEYDAITYSSILDAVGNVDHEKDDVSSF

SEQ ID NO: 106791 - DNA, 1570 bp, Arabidopsis thaliana
  misc_feature (1)..(1570): Ceres Seq. ID no. 13620461
  misc_feature: MA Experiment ID: 20000180 Result: Up-regulated in Transcription
  misc_feature: MA Experiment 20000180 PARAMETER Experiment Name: At_Germinating_Seeds_P Parameter: Age (hr) Value: 24 vs. 0
  misc_feature: MA Experiment 20000180 PARAMETER Experiment Name: At_Germinating_Seeds_P Parameter: Tissue Value: Germinating Seeds
  misc_feature: MA Experiment ID: 20000185 Result: Up-regulated in Transcription
  misc_feature: MA Experiment 20000185 PARAMETER Experiment Name: At_Roots__P Parameter: Age (day) Value: 7 vs. 21
  misc_feature: MA Experiment 20000185 PARAMETER Experiment Name: At_Roots__P Parameter: Organism Value: A. thaliana
  misc_feature: MA Experiment 20000185 PARAMETER Experiment Name: At_Roots__P Parameter: Tissue Value: Roots vs. Whole Plant
  misc_feature: MA Experiment ID: 20000269 Result: Down-regulated in Transcription
  misc_feature: MA Experiment 20000269 PARAMETER Experiment Name: At_1mM_KNO3_L-vs-H_Roots_P Parameter: Age (day) Value: 7,10,12
  misc_feature: MA Experiment 20000269 PARAMETER Experiment Name: At_1mM_KNO3_L-vs-H_Roots_P Parameter: Organism Value: A. thaliana
  misc_feature: MA Experiment 20000269 PARAMETER Experiment Name: At_1mM_KNO3_L-vs-H_Roots_P Parameter: Plant Line Value: WS
  misc_feature: MA Experiment 20000269 PARAMETER Experiment Name: At_1mM_KNO3_L-vs-H_Roots_P Parameter: Timepoint (day) Value: 7,10,12
  misc_feature: MA Experiment 20000269 PARAMETER Experiment Name: At_1mM_KNO3_L-vs-H_Roots_P Parameter: Tissue Value: Roots
  misc_feature: MA Experiment 20000269 PARAMETER Experiment Name: At_1mM_KNO3_L-vs-H_Roots_P Parameter: Treatment Value: 1mM KNO3 vs. 50mM KNO3
  misc_feature: MA Experiment ID: 20000439 Result: Up-regulated in Transcription
  misc_feature: MA Experiment 20000439 PARAMETER Experiment Name: At_Roots__P Parameter: Age (day) Value: 14 vs. 21
  misc_feature: MA Experiment 20000439 PARAMETER Experiment Name: At_Roots__P Parameter: Organism Value: A. thaliana
  misc_feature: MA Experiment 20000439 PARAMETER Experiment Name: At_Roots__P Parameter: Tissue Value: Roots vs. Whole Plant
  misc_feature: MA Experiment ID: 20000495 Result: Down-regulated in Transcription
  misc_feature: MA Experiment 20000495 PARAMETER Experiment Name: At_Guard_Cells_P Parameter: Harvest Date Value: 8/2/2002
  misc_feature: MA Experiment 20000495 PARAMETER Experiment Name: At_Guard_Cells_P Parameter: Organism Value: A. thaliana
  misc_feature: MA Experiment 20000495 PARAMETER Experiment Name: At_Guard_Cells_P Parameter: Tissue Value: Guard Cells vs. Leaves
atctctatctaaaaatcttctttgaatttgtgtatacacaaatcttattcaacgaatcatttatcaccaaaaggttctctcttttttgtttgtttctgtcttgtgtgaatgactcgtcggtgttcgcattgtagcaacaatgggcacaattcacgcacgtgtccaacgcgtggtggtggcacgtgcggtggaagtggcggaggaggaggaggtggtggtggaggagggtctggttcctcctccgccgtgaagttatttggtgtgaggttaacggatggctcgattattaaaaagagtgcgagtatgggtaatctctcggcattggctgttgcggcggcggcggcaacgcaccaccgtttatctccgtcgtctcctctggcgacgtcaaatcttaatgattcgccgttatcggatcatgcccgatactctaatttgcatcataatgaagggtatttatctgatgatcctgctcatggttctgggtctagtcaccgtcgtggtgagaggaagagaggtgttccttggactgaagaggaacatagactattcttagtcggtcttcagaaactcgggaaaggagattggcgcggtatttcgagaaactatgtaacgtcaagaactcctacacaagtggctagtcatgctcaaaagtattttattcgacatactagttcaagccgcaggaaaagacggtctagcctcttcgacatggttacagatgagatggtaaccgattcatcgccaacacaggaagagcagaccttaaacggttcctctccaagcaaggaacctgaaaagaaaagctaccttccttcacttgagctctcactcaataataccacagaagctgaagaggtcgtagccacggcgccacgacaggaaaaatctcaagaagctatagaaccatcaaatggtgtttcaccaatgctagtcccgggtggcttctttcctccttgttttccagtgacttacacgatttggctccctgcgtcacttcacggaacagaacatgccttaaacgctgagacttcttctcagcagcatcaggtcctaaaaccaaaacctggatttgctaaagaacgtgtgaacatggacgagttggtcggtatgtctcagcttagcataggaatggcgacaagacacgaaaccgaaacttccccttccccgctatctttgagactagagccctcaaggccatcagcgtttcactcgaatggctcggttaatggtgcagatttgagtaaaggcaacagcgcgattcaggctatctaaaaaatctttgttattgtgttaaagaatgaagaaggaagaccctgaccggattaaaccagaggatgttcctggtttaggacgaaacaaaccaagccataagccattagagagaacaattacttacaaaggaaaaaaaaacagagcaaactgtaacaaagacttaccaaacagtcaaaaacacatttctcagcatcacgtcatacttacataagataagcgtaacttacaattttacccttcatttttcatgtttaaggcaaattatttattatctagagactaaacaataaagaatgtt

SEQ ID NO: 106792 - protein, 387 aa, Arabidopsis thaliana
  peptide (1)..(387): Ceres Seq. ID no. 13620462
  misc_feature (136)..(183): Pfam Name: Myb-like DNA-binding domain Pfam Description: Myb-like DNA-binding domain
  misc_feature (1)..(387): Homolog of NCBI NO: 15228185 NR Description: myb family transcription factor [Arabidopsis
  misc_feature (20)..(387): Homolog of NCBI NO: 2062176 NR Description: Myb-related transcription activator (MybSt1)
  misc_feature (35)..(387): Homolog of NCBI NO: 34906364 NR Description: unnamed protein product [Oryza sativa (japonica group)] >gi|9558504|dbj|BAB03423.1| unnamed protein product
  misc_feature (1)..(31): Homolog of NCBI NO: 34906364 NR Description: unnamed protein product [Oryza sativa (japonica group)] >gi|9558504|dbj|BAB03423.1| unnamed protein product
  misc_feature (47)..(387): Homolog of NCBI NO: 7705206 NR Description: MybSt1 [Solanum tuberosum]
  misc_feature (1)..(22): Homolog of NCBI NO: 7705206 NR Description: MybSt1 [Solanum tuberosum]
  misc_feature (47)..(387): Homolog of NCBI NO: 1076660 NR Description: D13F(MYBST1) protein - potato
  misc_feature (1)..(22): Homolog of NCBI NO: 1076660 NR Description: D13F(MYBST1) protein - potato
  misc_feature (113)..(369): Homolog of NCBI NO: 24850307 NR Description: transcription factor MYBS3 [Oryza sativa
  misc_feature (1)..(22): Homolog of NCBI NO: 24850307 NR Description: transcription factor MYBS3 [Oryza sativa
MTRRCSHCSNNGHNSRTCPTRGGGTCGGSGGGGGGGGGGGSGSSSAVKLFGVRLTDGSIIKKSASMGNLSALAVAAAAATHHRLSPSSPLATSNLNDSPLSDHARYSNLHHNEGYLSDDPAHGSGSSHRRGERKRGVPWTEEEHRLFLVGLQKLGKGDWRGISRNYVTSRTPTQVASHAQKYFIRHTSSSRRKRRSSLFDMVTDEMVTDSSPTQEEQTLNGSSPSKEPEKKSYLPSLELSLNNTTEAEEVVATAPRQEKSQEAIEPSNGVSPMLVPGGFFPPCFPVTYTIWLPASLHGTEHALNAETSSQQHQVLKPKPGFAKERVNMDELVGMSQLSIGMATRHETETSPSPLSLRLEPSRPSAFHSNGSVNGADLSKGNSAIQAI

SEQ ID NO: 106793 - protein, 322 aa, Arabidopsis thaliana
  peptide (1)..(322): Ceres Seq. ID no. 13620463
  misc_feature (71)..(118): Pfam Name: Myb-like DNA-binding domain Pfam Description: Myb-like DNA-binding domain
  misc_feature (1)..(322): Homolog of NCBI NO: 15228185 NR Description: myb family transcription factor [Arabidopsis
  misc_feature (1)..(322): Homolog of NCBI NO: 2062176 NR Description: Myb-related transcription activator (MybSt1)
  misc_feature (1)..(322): Homolog of NCBI NO: 34906364 NR Description: unnamed protein product [Oryza sativa (japonica group)] >gi|9558504|dbj|BAB03423.1| unnamed protein product
  misc_feature (1)..(322): Homolog of NCBI NO: 7705206 NR Description: MybSt1 [Solanum tuberosum]
  misc_feature (1)..(322): Homolog of NCBI NO: 1076660 NR Description: D13F(MYBST1) protein - potato
  misc_feature (48)..(304): Homolog of NCBI NO: 24850307 NR Description: transcription factor MYBS3 [Oryza sativa
  misc_feature (48)..(304): Homolog of NCBI NO: 37536856 NR Description: putative Myb-related protein [Oryza sativa
  misc_feature (49)..(304): Homolog of NCBI NO: 28848628 NR Description: ZmMybst1 [Zea mays]
  misc_feature (1)..(22): Homolog of NCBI NO: 28848628 NR Description: ZmMybst1 [Zea mays]
  misc_feature (1)..(228): Homolog of NCBI NO: 15238083 NR Description: Myb-related transcription activator-like
MGNLSALAVAAAAATHHRLSPSSPLATSNLNDSPLSDHARYSNLHHNEGYLSDDPAHGSGSSHRRGERKRGVPWTEEEHRLFLVGLQKLGKGDWRGISRNYVTSRTPTQVASHAQKYFIRHTSSSRRKRRSSLFDMVTDEMVTDSSPTQEEQTLNGSSPSKEPEKKSYLPSLELSLNNTTEAEEVVATAPRQEKSQEAIEPSNGVSPMLVPGGFFPPCFPVTYTIWLPASLHGTEHALNAETSSQQHQVLKPKPGFAKERVNMDELVGMSQLSIGMATRHETETSPSPLSLRLEPSRPSAFHSNGSVNGADLSKGNSAIQAI

SEQ ID NO: 106794 - DNA, 1456 bp, Arabidopsis thaliana
  misc_feature (1)..(1456): Ceres Seq. ID no. 13620464
  misc_feature: MA Experiment ID: 108461 Result: Up-regulated in Transcription
  misc_feature: MA Experiment 108461 PARAMETER Experiment Name: At_Germinating_Seeds_cDNA_P Parameter: Age (day) Value: 1 vs. 0
  misc_feature: MA Experiment 108461 PARAMETER Experiment Name: At_Germinating_Seeds_cDNA_P Parameter: Tissue Value: Germinating Seeds
  misc_feature: MA Experiment ID: 108462 Result: Up-regulated in Transcription
  misc_feature: MA Experiment 108462 PARAMETER Experiment Name: At_Germinating_Seeds_cDNA_P Parameter: Age (day) Value: 2 vs. 0
  misc_feature: MA Experiment 108462 PARAMETER Experiment Name: At_Germinating_Seeds_cDNA_P Parameter: Tissue Value: Germinating Seeds
  misc_feature: MA Experiment ID: 108464 Result: Up-regulated in Transcription
  misc_feature: MA Experiment 108464 PARAMETER Experiment Name: At_Germinating_Seeds_cDNA_P Parameter: Age (day) Value: 4 vs. 0
  misc_feature: MA Experiment 108464 PARAMETER Experiment Name: At_Germinating_Seeds_cDNA_P Parameter: Tissue Value: Germinating Seeds
  misc_feature: MA Experiment ID: 108488 Result: Up-regulated in Transcription
  misc_feature: MA Experiment ID: 108572 Result: Up-regulated in Transcription
  misc_feature: MA Experiment 108572 PARAMETER Experiment Name: At_Drought_cDNA_P Parameter: Timepoint (hr) Value: 1
  misc_feature: MA Experiment 108572 PARAMETER Experiment Name: At_Drought_cDNA_P Parameter: Tissue Value: Aerial
  misc_feature: MA Experiment 108572 PARAMETER Experiment Name: At_Drought_cDNA_P Parameter: Treatment Value: Drought vs. No Drought
  misc_feature: MA Experiment ID: 108576 Result: Down-regulated in Transcription
  misc_feature: MA Experiment 108576 PARAMETER Experiment Name: At_42deg_Heat_cDNA_P Parameter: Temperature (deg C) Value: 42 vs. 22
  misc_feature: MA Experiment 108576 PARAMETER Experiment Name: At_42deg_Heat_cDNA_P Parameter: Timepoint (hr) Value: 1
  misc_feature: MA Experiment 108576 PARAMETER Experiment Name: At_42deg_Heat_cDNA_P Parameter: Tissue Value: Aerial
  misc_feature: MA Experiment ID: 108577 Result: Down-regulated in Transcription
  misc_feature: MA Experiment 108577 PARAMETER Experiment Name: At_42deg_Heat_cDNA_P Parameter: Temperature (deg C) Value: 42 vs. 22
  misc_feature: MA Experiment 108577 PARAMETER Experiment Name: At_42deg_Heat_cDNA_P Parameter: Timepoint (hr) Value: 6
  misc_feature: MA Experiment 108577 PARAMETER Experiment Name: At_42deg_Heat_cDNA_P Parameter: Tissue Value: Aerial
  misc_feature: MA Experiment ID: 108585 Result: Down-regulated in Transcription
  misc_feature: MA Experiment 108585 PARAMETER Experiment Name: At_5mM_NaNP_cDNA_P Parameter: Timepoint (hr) Value: 6
  misc_feature: MA Experiment 108585 PARAMETER Experiment Name: At_5mM_NaNP_cDNA_P Parameter: Tissue Value: Aerial
  misc_feature: MA Experiment 108585 PARAMETER Experiment Name: At_5mM_NaNP_cDNA_P Parameter: Treatment Value: null
  misc_feature: MA Experiment ID: 108594 Result: Down-regulated in Transcription
  misc_feature: MA Experiment 108594 PARAMETER Experiment Name: At_Ler-rhl_Root_cDNA_P Parameter: Plant Line Value: null
  misc_feature: MA Experiment ID: 108595 Result: Down-regulated in Transcription
  misc_feature: MA Experiment 108595 PARAMETER Experiment Name: At_Ler-pi_Ovule_cDNA_P Parameter: Plant Line Value: null
  misc_feature: MA Experiment ID: 108607 Result: Up-regulated in Transcription
  misc_feature: MA Experiment 108607 PARAMETER Experiment Name: At_100uM_ABA_cDNA_P Parameter: Timepoint (hr) Value: 4
  misc_feature: MA Experiment 108607 PARAMETER Experiment Name: At_100uM_ABA_cDNA_P Parameter: Tissue Value: Aerial
  misc_feature: MA Experiment 108607 PARAMETER Experiment Name: At_100uM_ABA_cDNA_P Parameter: Treatment Value: 100uM ABA vs. No Treatment
  misc_feature: MA Experiment ID: 108668 Result: Down-regulated in Transcription
  misc_feature: MA Experiment 108668 PARAMETER Experiment Name: At_2mM_SA_cDNA_P Parameter: Plant Line Value: WS
  misc_feature: MA Experiment 108668 PARAMETER Experiment Name: At_2mM_SA_cDNA_P Parameter: Timepoint (hr) Value: 6
  misc_feature: MA Experiment 108668 PARAMETER Experiment Name: At_2mM_SA_cDNA_P Parameter: Treatment Value: 2mM SA vs. No Treatment
  misc_feature: MA Experiment ID: 20000112 Result: Down-regulated in Transcription
  misc_feature: MA Experiment 20000112 PARAMETER Experiment Name: At_42deg_Heat_cDNA_P Parameter: Temperature (deg C) Value: 42 vs. 22
  misc_feature: MA Experiment 20000112 PARAMETER Experiment Name: At_42deg_Heat_cDNA_P Parameter: Timepoint (hr) Value: 2
  misc_feature: MA Experiment 20000112 PARAMETER Experiment Name: At_42deg_Heat_cDNA_P Parameter: Tissue Value: Aerial
  misc_feature: MA Experiment ID: 20000113 Result: Down-regulated in Transcription
  misc_feature: MA Experiment 20000113 PARAMETER Experiment Name: At_42deg_Heat_cDNA_P Parameter: Temperature (deg C) Value: 42 vs. 22
  misc_feature: MA Experiment 20000113 PARAMETER Experiment Name: At_42deg_Heat_cDNA_P Parameter: Timepoint (hr) Value: 8
  misc_feature: MA Experiment 20000113 PARAMETER Experiment Name: At_42deg_Heat_cDNA_P Parameter: Tissue Value: Aerial
  misc_feature: MA Experiment ID: 20000144 Result: Down-regulated in Transcription
  misc_feature: MA Experiment 20000144 PARAMETER Experiment Name: At_42deg_Heat_cDNA_P Parameter: Temperature (deg C) Value: 42 vs. 22
  misc_feature: MA Experiment 20000144 PARAMETER Experiment Name: At_42deg_Heat_cDNA_P Parameter: Timepoint (hr) Value: 1
  misc_feature: MA Experiment 20000144 PARAMETER Experiment Name: At_42deg_Heat_cDNA_P Parameter: Tissue Value: Aerial
  misc_feature: MA Experiment ID: 20000171 Result: Down-regulated in Transcription
  misc_feature: MA Experiment 20000171 PARAMETER Experiment Name: At_42deg_Heat_P Parameter: Age (day) Value: 14
  misc_feature: MA Experiment 20000171 PARAMETER Experiment Name: At_42deg_Heat_P Parameter: Organism Value: A. thaliana
  misc_feature: MA Experiment 20000171 PARAMETER Experiment Name: At_42deg_Heat_P Parameter: Plant Line Value: WS
  misc_feature: MA Experiment 20000171 PARAMETER Experiment Name: At_42deg_Heat_P Parameter: Temperature (deg C) Value: 42 vs. 22
  misc_feature: MA Experiment 20000171 PARAMETER Experiment Name: At_42deg_Heat_P Parameter: Timepoint (hr) Value: 1
  misc_feature: MA Experiment 20000171 PARAMETER Experiment Name: At_42deg_Heat_P Parameter: Tissue Value: Aerial
  misc_feature: MA Experiment ID: 20000173 Result: Down-regulated in Transcription
  misc_feature: MA Experiment 20000173 PARAMETER Experiment Name: At_42deg_Heat_P Parameter: Age (day) Value: 14
  misc_feature: MA Experiment 20000173 PARAMETER Experiment Name: At_42deg_Heat_P Parameter: Organism Value: A. thaliana
  misc_feature: MA Experiment 20000173 PARAMETER Experiment Name: At_42deg_Heat_P Parameter: Plant Line Value: WS
  misc_feature: MA Experiment 20000173 PARAMETER Experiment Name: At_42deg_Heat_P Parameter: Temperature (deg C) Value: 42 vs. 22
  misc_feature: MA Experiment 20000173 PARAMETER Experiment Name: At_42deg_Heat_P Parameter: Timepoint (hr) Value: 6
  misc_feature: MA Experiment 20000173 PARAMETER Experiment Name: At_42deg_Heat_P Parameter: Tissue Value: Aerial
  misc_feature: MA Experiment ID: 20000180 Result: Up-regulated in Transcription
  misc_feature: MA Experiment 20000180 PARAMETER Experiment Name: At_Germinating_Seeds_P Parameter: Age (hr) Value: 24 vs. 0
  misc_feature: MA Experiment 20000180 PARAMETER Experiment Name: At_Germinating_Seeds_P Parameter: Tissue Value: Germinating Seeds
  misc_feature: MA Experiment ID: 20000184 Result: Up-regulated in Transcription
  misc_feature: MA Experiment 20000184 PARAMETER Experiment Name: At_Shoots__P Parameter: Age (day) Value: 7
  misc_feature: MA Experiment 20000184 PARAMETER Experiment Name: At_Shoots__P Parameter: Tissue Value: Shoots vs. Whole Plant
  misc_feature: MA Experiment ID: 20000185 Result: Down-regulated in Transcription
  misc_feature: MA Experiment 20000185 PARAMETER Experiment Name: At_Roots__P Parameter: Age (day) Value: 7 vs. 21
  misc_feature: MA Experiment 20000185 PARAMETER Experiment Name: At_Roots__P Parameter: Organism Value: A. thaliana
  misc_feature: MA Experiment 20000185 PARAMETER Experiment Name: At_Roots__P Parameter: Tissue Value: Roots vs. Whole Plant
  misc_feature: MA Experiment ID: 20000224 Result: Down-regulated in Transcription
  misc_feature: MA Experiment ID: 20000234 Result: Up-regulated in Transcription
  misc_feature: MA Experiment 20000234 PARAMETER Experiment Name: At_Siliques_P Parameter: Age (day) Value: 21
  misc_feature: MA Experiment 20000234 PARAMETER Experiment Name: At_Siliques_P Parameter: Organism Value: A. thaliana
  misc_feature: MA Experiment 20000234 PARAMETER Experiment Name: At_Siliques_P Parameter: Plant Line Value: WS
  misc_feature: MA Experiment 20000234 PARAMETER Experiment Name: At_Siliques_P Parameter: Tissue Value: Less Than 5mm Siliques vs. Whole Plant
  misc_feature: MA Experiment ID: 20000286 Result: Up-regulated in Transcription
  misc_feature: MA Experiment 20000286 PARAMETER Experiment Name: At_Open_Flower_P Parameter: Age (day) Value: 21
  misc_feature: MA Experiment 20000286 PARAMETER Experiment Name: At_Open_Flower_P Parameter: Plant Line Value: WS
  misc_feature: MA Experiment 20000286 PARAMETER Experiment Name: At_Open_Flower_P Parameter: Tissue Value: Half Open vs. Whole Plant
  misc_feature: MA Experiment ID: 20000438 Result: Up-regulated in Transcription
  misc_feature: MA Experiment 20000438 PARAMETER Experiment Name: At_Shoots__P Parameter: Age (day) Value: 14
  misc_feature: MA Experiment 20000438 PARAMETER Experiment Name: At_Shoots__P Parameter: Tissue Value: Shoots vs. Whole Plant
  misc_feature: MA Experiment ID: 20000439 Result: Down-regulated in Transcription
  misc_feature: MA Experiment 20000439 PARAMETER Experiment Name: At_Roots__P Parameter: Age (day) Value: 14 vs. 21
  misc_feature: MA Experiment 20000439 PARAMETER Experiment Name: At_Roots__P Parameter: Organism Value: A. thaliana
  misc_feature: MA Experiment 20000439 PARAMETER Experiment Name: At_Roots__P Parameter: Tissue Value: Roots vs. Whole Plant
  misc_feature: MA Experiment ID: 20000451 Result: Up-regulated in Transcription
  misc_feature: MA Experiment 20000451 PARAMETER Experiment Name: At_CS6879_Shoots-Roots_P Parameter: Age (day) Value: 14
  misc_feature: MA Experiment 20000451 PARAMETER Experiment Name: At_CS6879_Shoots-Roots_P Parameter: Organism Value: A. thaliana
  misc_feature: MA Experiment 20000451 PARAMETER Experiment Name: At_CS6879_Shoots-Roots_P Parameter: Plant Line Value: CS6879 vs. WS
  misc_feature: MA Experiment 20000451 PARAMETER Experiment Name: At_CS6879_Shoots-Roots_P Parameter: Tissue Value: Roots
  misc_feature: MA Experiment ID: 20000573 Result: Down-regulated in Transcription
  misc_feature: MA Experiment 20000573 PARAMETER Experiment Name: At_100uM_ABA_Mutants__P Parameter: Organism Value: A. thaliana
  misc_feature: MA Experiment 20000573 PARAMETER Experiment Name: At_100uM_ABA_Mutants__P Parameter: Plant Line Value: CS22 vs. Ler wt
  misc_feature: MA Experiment 20000573 PARAMETER Experiment Name: At_100uM_ABA_Mutants__P Parameter: Timepoint (hr) Value: N/A
  misc_feature: MA Experiment 20000573 PARAMETER Experiment Name: At_100uM_ABA_Mutants__P Parameter: Tissue Value: Whole Plant
  misc_feature: MA Experiment 20000573 PARAMETER Experiment Name: At_100uM_ABA_Mutants__P Parameter: Treatment Value: None
  misc_feature: MA Experiment ID: 20000574 Result: Down-regulated in Transcription
  misc_feature: MA Experiment 20000574 PARAMETER Experiment Name: At_100uM_ABA_Mutants__P Parameter: Organism Value: A. thaliana
  misc_feature: MA Experiment 20000574 PARAMETER Experiment Name: At_100uM_ABA_Mutants__P Parameter: Plant Line Value: CS23 vs. Ler wt
  misc_feature: MA Experiment 20000574 PARAMETER Experiment Name: At_100uM_ABA_Mutants__P Parameter: Timepoint (hr) Value: N/A
  misc_feature: MA Experiment 20000574 PARAMETER Experiment Name: At_100uM_ABA_Mutants__P Parameter: Tissue Value: Whole Plant
  misc_feature: MA Experiment 20000574 PARAMETER Experiment Name: At_100uM_ABA_Mutants__P Parameter: Treatment Value: None
  misc_feature: MA Experiment ID: 20001248 Result: Down-regulated in Transcription
  misc_feature: MA Experiment 20001248 PARAMETER Experiment Name: At_Far-red-induction_P Parameter: Age (day) Value: 7
  misc_feature: MA Experiment 20001248 PARAMETER Experiment Name: At_Far-red-induction_P Parameter: Light Value: Far-red vs. White
  misc_feature: MA Experiment 20001248 PARAMETER Experiment Name: At_Far-red-induction_P Parameter: Organism Value: A. thaliana
  misc_feature: MA Experiment 20001248 PARAMETER Experiment Name: At_Far-red-induction_P Parameter: Plant Line Value: Columbia
  misc_feature: MA Experiment 20001248 PARAMETER Experiment Name: At_Far-red-induction_P Parameter: Timepoint (hr) Value: 4
  misc_feature: MA Experiment 20001248 PARAMETER Experiment Name: At_Far-red-induction_P Parameter: Tissue Value: Whole Plant
  misc_feature: MA Experiment ID: 20001558 Result: Up-regulated in Transcription
  misc_feature: MA Experiment 20001558 PARAMETER Experiment Name: At_Drought_Soil_Dry_P Parameter: Age (day) Value: 27
  misc_feature: MA Experiment 20001558 PARAMETER Experiment Name: At_Drought_Soil_Dry_P Parameter: Organism Value: A. thaliana
  misc_feature: MA Experiment 20001558 PARAMETER Experiment Name: At_Drought_Soil_Dry_P Parameter: Plant Line Value: WS
  misc_feature: MA Experiment 20001558 PARAMETER Experiment Name: At_Drought_Soil_Dry_P Parameter: Post Timepoint (hr) Value: 6
  misc_feature: MA Experiment 20001558 PARAMETER Experiment Name: At_Drought_Soil_Dry_P Parameter: Post-Treatment Value: Re-Water vs. No Drought
  misc_feature: MA Experiment 20001558 PARAMETER Experiment Name: At_Drought_Soil_Dry_P Parameter: Timepoint (day) Value: 13
  misc_feature: MA Experiment 20001558 PARAMETER Experiment Name: At_Drought_Soil_Dry_P Parameter: Treatment Value: Drought vs. No Drought
  misc_feature: MA Experiment ID: 20001906 Result: Down-regulated in Transcription
  misc_feature: MA Experiment 20001906 PARAMETER Experiment Name: At_Drought_Reproduction_P Parameter: Age (day) Value: 35
  misc_feature: MA Experiment 20001906 PARAMETER Experiment Name: At_Drought_Reproduction_P Parameter: Organism Value: A. thaliana
  misc_feature: MA Experiment 20001906 PARAMETER Experiment Name: At_Drought_Reproduction_P Parameter: Plant Line Value: WS
  misc_feature: MA Experiment 20001906 PARAMETER Experiment Name: At_Drought_Reproduction_P Parameter: Timepoint (day) Value: 5
  misc_feature: MA Experiment 20001906 PARAMETER Experiment Name: At_Drought_Reproduction_P Parameter: Tissue Value: Siliques
  misc_feature: MA Experiment 20001906 PARAMETER Experiment Name: At_Drought_Reproduction_P Parameter: Treatment Value: Drought vs. No Drought
  misc_feature: MA Experiment ID: 20001908 Result: Down-regulated in Transcription
  misc_feature: MA Experiment 20001908 PARAMETER Experiment Name: At_Drought_Reproduction_P Parameter: Age (day) Value: 40
  misc_feature: MA Experiment 20001908 PARAMETER Experiment Name: At_Drought_Reproduction_P Parameter: Organism Value: A. thaliana
  misc_feature: MA Experiment 20001908 PARAMETER Experiment Name: At_Drought_Reproduction_P Parameter: Plant Line Value: WS
  misc_feature: MA Experiment 20001908 PARAMETER Experiment Name: At_Drought_Reproduction_P Parameter: Timepoint (day) Value: 10
  misc_feature: MA Experiment 20001908 PARAMETER Experiment Name: At_Drought_Reproduction_P Parameter: Tissue Value: Siliques
  misc_feature: MA Experiment 20001908 PARAMETER Experiment Name: At_Drought_Reproduction_P Parameter: Treatment Value: Drought vs. No Drought
  misc_feature: MA Experiment ID: 20001911 Result: Down-regulated in Transcription
  misc_feature: MA Experiment 20001911 PARAMETER Experiment Name: At_Drought_Reproduction_P Parameter: Age (day) Value: 40
  misc_feature: MA Experiment 20001911 PARAMETER Experiment Name: At_Drought_Reproduction_P Parameter: Organism Value: A. thaliana
  misc_feature: MA Experiment 20001911 PARAMETER Experiment Name: At_Drought_Reproduction_P Parameter: Plant Line Value: WS
  misc_feature: MA Experiment 20001911 PARAMETER Experiment Name: At_Drought_Reproduction_P Parameter: Timepoint (day) Value: 10
  misc_feature: MA Experiment 20001911 PARAMETER Experiment Name: At_Drought_Reproduction_P Parameter: Tissue Value: Flowers
  misc_feature: MA Experiment 20001911 PARAMETER Experiment Name: At_Drought_Reproduction_P Parameter: Treatment Value: Drought vs. No Drought
aaatttatttaataaagtttacctataatatcaaattatgcaaaacacaggctggttcagttttttccacgaatcaaaaatggttggagaaatattgaataagagagagagagagagagagagagatagagtttcagagttgacacaacattgaagtaaactaaactcctaacctctttatctatgtgtatatataaaactcaaaagtacatataatcttcaccattcacacatagtcacataccaaagcaaaaacatggatcgttgcacgtcgtcgtttttgcttctcacattggtctctaccttgtccattctccaaatctcctttgctcaacttgttccagcaatcatgacattcggtgactctgtagttgatgtcggcaacaacaactatcttccgacccttttcagagctgattatcctccttatggccgtgatttcgctaaccacaaagccaccggtcgtttctgcaacggcaaattagccactgatataactgctgagactttaggcttcactaagtacccaccagcttatctaagtcctgaagcttctggtaagaatcttctcattggtgctaatttcgcttctgcagcttcaggttatgatgacaaagctgctcttctcaatcacgcgatcccgttgtatcagcaagtagagtatttcaaggaatacaagagcaagctaataaaaattgcaggaagcaaaaaagctgattcgatcataaagggagcaatctgtctcttaagtgcaggaagcagtgattttgttcaaaactactatgtgaatcctctgctttacaaagtttacactgttgatgcatacggatctttccttatcgataacttctctacatttatcaagcaagtgtatgcggttggagcaaggaagatcggtgtgacatctctgcctccaacaggatgtcttcccgctgcaagaacccttttcggtttccatgaaaaaggctgtgtttcaagactcaacacagatgctcaaaactttaacaagaagcttaacgctgctgcttcaaagcttcagaagcaatattccgatcttaagattgttgtcttcgacatctactctccactttatgatcttgttcagaacccttccaaatccggattcacggaagcaaccaaaggatgttgtggaacaggaacagtcgagacaacttcactcttgtgcaacccgaaatcgtttgggacatgctccaatgctactcagtatgtgttctgggacagtgtgcatccttctgaagctgccaatgagattcttgccactgccctaattggacagggcttttctctcctcggttgatctcacgtatttttcttatattctcttttcaaatcgctgtttctatcacacattgagtcatacatttgtttttctttgaattatgtatcaaagcatcactgttttactaaaaatgtattgaaacttattacaagtact

SEQ ID NO: 106795 - protein, 353 aa, Arabidopsis thaliana
  peptide (1)..(353): Ceres Seq. ID no. 13620465
  misc_feature (31)..(344): Pfam Name: GDSL-like Lipase/Acylhydrolase Pfam Description: GDSL-like Lipase/Acylhydrolase
  misc_feature (1)..(353): Homolog of NCBI NO: 15228189 NR Description: GDSL-motif lipase/hydrolase protein [Arabidopsis
  misc_feature (32)..(353): Homolog of NCBI NO: 2062167 NR Description: Proline-rich protein APG isolog [Arabidopsis
  misc_feature (5)..(352): Homolog of NCBI NO: 10638955 NR Description: putative proline-rich protein APG isolog [Cicer
  misc_feature (27)..(352): Homolog of NCBI NO: 15237137 NR Description: lipase, putative [Arabidopsis thaliana]
  misc_feature (9)..(352): Homolog of NCBI NO: 15237531 NR Description: GDSL-motif lipase/hydrolase protein [Arabidopsis
  misc_feature (13)..(352): Homolog of NCBI NO: 13174242 NR Description: putative proline-rich protein [Oryza sativa]
  misc_feature (9)..(352): Homolog of NCBI NO: 9758010 NR Description: proline-rich protein APG-like [Arabidopsis
  misc_feature (35)..(352): Homolog of NCBI NO: 15237528 NR Description: GDSL-motif lipase/hydrolase protein [Arabidopsis
  misc_feature (6)..(352): Homolog of NCBI NO: 30693763 NR Description: GDSL-motif lipase/hydrolase protein [Arabidopsis
  misc_feature (6)..(290): Homolog of NCBI NO: 11280580 NR Description: hypothetical protein T4D2.30 - Arabidopsis >gi|6630730|emb|CAB64213.1| putative protein [Arabidopsis
MDRCTSSFLLLTLVSTLSILQISFAQLVPAIMTFGDSVVDVGNNNYLPTLFRADYPPYGRDFANHKATGRFCNGKLATDITAETLGFTKYPPAYLSPEASGKNLLIGANFASAASGYDDKAALLNHAIPLYQQVEYFKEYKSKLIKIAGSKKADSIIKGAICLLSAGSSDFVQNYYVNPLLYKVYTVDAYGSFLIDNFSTFIKQVYAVGARKIGVTSLPPTGCLPAARTLFGFHEKGCVSRLNTDAQNFNKKLNAAASKLQKQYSDLKIVVFDIYSPLYDLVQNPSKSGFTEATKGCCGTGTVETTSLLCNPKSFGTCSNATQYVFWDSVHPSEAANEILATALIGQGFSLLG

SEQ ID NO: 106796 - protein, 322 aa, Arabidopsis thaliana; identical to SEQ ID NO: 21577
  peptide (1)..(322): Ceres Seq. ID no. 13620466
  misc_feature (1)..(313): Pfam Name: GDSL-like Lipase/Acylhydrolase Pfam Description: GDSL-like Lipase/Acylhydrolase
  misc_feature (1)..(322): Homolog of NCBI NO: 15228189 NR Description: GDSL-motif lipase/hydrolase protein [Arabidopsis
  misc_feature (1)..(322): Homolog of NCBI NO: 2062167 NR Description: Proline-rich protein APG isolog [Arabidopsis
  misc_feature (1)..(321): Homolog of NCBI NO: 10638955 NR Description: putative proline-rich protein APG isolog [Cicer
  misc_feature (1)..(321): Homolog of NCBI NO: 15237137 NR Description: lipase, putative [Arabidopsis thaliana]
  misc_feature (1)..(321): Homolog of NCBI NO: 15237531 NR Description: GDSL-motif lipase/hydrolase protein [Arabidopsis
  misc_feature (1)..(321): Homolog of NCBI NO: 13174242 NR Description: putative proline-rich protein [Oryza sativa]
  misc_feature (1)..(321): Homolog of NCBI NO: 9758010 NR Description: proline-rich protein APG-like [Arabidopsis
  misc_feature (4)..(321): Homolog of NCBI NO: 15237528 NR Description: GDSL-motif lipase/hydrolase protein [Arabidopsis
  misc_feature (1)..(321): Homolog of NCBI NO: 30693763 NR Description: GDSL-motif lipase/hydrolase protein [Arabidopsis
  misc_feature (1)..(259): Homolog of NCBI NO: 11280580 NR Description: hypothetical protein T4D2.30 - Arabidopsis >gi|6630730|emb|CAB64213.1| putative protein [Arabidopsis

SEQ ID NO: 106797 - DNA, 1460 bp, Arabidopsis thaliana
  misc_feature (1)..(1460): Ceres Seq. ID no. 13620474
  misc_feature: MA Experiment ID: 20000180 Result: Up-regulated in Transcription
  misc_feature: MA Experiment 20000180 PARAMETER Experiment Name: At_Germinating_Seeds_P Parameter: Age (hr) Value: 24 vs. 0
  misc_feature: MA Experiment 20000180 PARAMETER Experiment Name: At_Germinating_Seeds_P Parameter: Tissue Value: Germinating Seeds
  misc_feature: MA Experiment ID: 20000182 Result: Down-regulated in Transcription
  misc_feature: MA Experiment 20000182 PARAMETER Experiment Name: At_2mM_SA_P Parameter: Age (day) Value: 14
  misc_feature: MA Experiment 20000182 PARAMETER Experiment Name: At_2mM_SA_P Parameter: Organism Value: A. thaliana
  misc_feature: MA Experiment 20000182 PARAMETER Experiment Name: At_2mM_SA_P Parameter: Plant Line Value: WS
  misc_feature: MA Experiment 20000182 PARAMETER Experiment Name: At_2mM_SA_P Parameter: Timepoint (hr) Value: 6
  misc_feature: MA Experiment 20000182 PARAMETER Experiment Name: At_2mM_SA_P Parameter: Tissue Value: Aerial
  misc_feature: MA Experiment 20000182 PARAMETER Experiment Name: At_2mM_SA_P Parameter: Treatment Value: 2mM SA vs. No Treatment
  misc_feature: MA Experiment ID: 20000185 Result: Down-regulated in Transcription
  misc_feature: MA Experiment 20000185 PARAMETER Experiment Name: At_Roots__P Parameter: Age (day) Value: 7 vs. 21
  misc_feature: MA Experiment 20000185 PARAMETER Experiment Name: At_Roots__P Parameter: Organism Value: A. thaliana
  misc_feature: MA Experiment 20000185 PARAMETER Experiment Name: At_Roots__P Parameter: Tissue Value: Roots vs. Whole Plant
  misc_feature: MA Experiment ID: 20000436 Result: Down-regulated in Transcription
  misc_feature: MA Experiment 20000436 PARAMETER Experiment Name: At_Drought_P Parameter: Age (day) Value: 7
  misc_feature: MA Experiment 20000436 PARAMETER Experiment Name: At_Drought_P Parameter: Organism Value: A. thaliana
  misc_feature: MA Experiment 20000436 PARAMETER Experiment Name: At_Drought_P Parameter: Plant Line Value: WS
  misc_feature: MA Experiment 20000436 PARAMETER Experiment Name: At_Drought_P Parameter: Timepoint (hr) Value: 12
  misc_feature: MA Experiment 20000436 PARAMETER Experiment Name: At_Drought_P Parameter: Tissue Value: Whole Plant
  misc_feature: MA Experiment 20000436 PARAMETER Experiment Name: At_Drought_P Parameter: Treatment Value: Drought vs. No Drought
  misc_feature: MA Experiment ID: 20000437 Result: Down-regulated in Transcription
  misc_feature: MA Experiment 20000437 PARAMETER Experiment Name: At_Drought_P Parameter: Age (day) Value: 8
  misc_feature: MA Experiment 20000437 PARAMETER Experiment Name: At_Drought_P Parameter: Organism Value: A. thaliana
  misc_feature: MA Experiment 20000437 PARAMETER Experiment Name: At_Drought_P Parameter: Plant Line Value: WS
  misc_feature: MA Experiment 20000437 PARAMETER Experiment Name: At_Drought_P Parameter: Timepoint (hr) Value: 24
  misc_feature: MA Experiment 20000437 PARAMETER Experiment Name: At_Drought_P Parameter: Tissue Value: Whole Plant
  misc_feature: MA Experiment 20000437 PARAMETER Experiment Name: At_Drought_P Parameter: Treatment Value: Drought vs. No Drought
  misc_feature: MA Experiment ID: 20000438 Result: Up-regulated in Transcription
  misc_feature: MA Experiment 20000438 PARAMETER Experiment Name: At_Shoots__P Parameter: Age (day) Value: 14
  misc_feature: MA Experiment 20000438 PARAMETER Experiment Name: At_Shoots__P Parameter: Tissue Value: Shoots vs. Whole Plant
  misc_feature: MA Experiment ID: 20000439 Result: Down-regulated in Transcription
  misc_feature: MA Experiment 20000439 PARAMETER Experiment Name: At_Roots__P Parameter: Age (day) Value: 14 vs. 21
  misc_feature: MA Experiment 20000439 PARAMETER Experiment Name: At_Roots__P Parameter: Organism Value: A. thaliana
  misc_feature: MA Experiment 20000439 PARAMETER Experiment Name: At_Roots__P Parameter: Tissue Value: Roots vs. Whole Plant
  misc_feature: MA Experiment ID: 20001757 Result: Up-regulated in Transcription
  misc_feature: MA Experiment 20001757 PARAMETER Experiment Name: At_50mM_NH4NO3_L-to-H_P Parameter: Timepoint (hr) Value: 6
  misc_feature: MA Experiment 20001757 PARAMETER Experiment Name: At_50mM_NH4NO3_L-to-H_P Parameter: Tissue Value: Leaf
  misc_feature: MA Experiment 20001757 PARAMETER Experiment Name: At_50mM_NH4NO3_L-to-H_P Parameter: Treatment Value: 50mM NH4NO3 vs 100mM Mannitol
  misc_feature: MA Experiment ID: 20001904 Result: Down-regulated in Transcription
  misc_feature: MA Experiment 20001904 PARAMETER Experiment Name: At_Drought_Reproduction_P Parameter: Age (day) Value: 37
  misc_feature: MA Experiment 20001904 PARAMETER Experiment Name: At_Drought_Reproduction_P Parameter: Organism Value: A. thaliana
  misc_feature: MA Experiment 20001904 PARAMETER Experiment Name: At_Drought_Reproduction_P Parameter: Plant Line Value: WS
  misc_feature: MA Experiment 20001904 PARAMETER Experiment Name: At_Drought_Reproduction_P Parameter: Timepoint (day) Value: 7
  misc_feature: MA Experiment 20001904 PARAMETER Experiment Name: At_Drought_Reproduction_P Parameter: Tissue Value: Rosettes
  misc_feature: MA Experiment 20001904 PARAMETER Experiment Name: At_Drought_Reproduction_P Parameter: Treatment Value: Drought vs. No Drought
  misc_feature: MA Experiment ID: 20001905 Result: Down-regulated in Transcription
  misc_feature: MA Experiment 20001905 PARAMETER Experiment Name: At_Drought_Reproduction_P Parameter: Age (day) Value: 40
  misc_feature: MA Experiment 20001905 PARAMETER Experiment Name: At_Drought_Reproduction_P Parameter: Organism Value: A. thaliana
  misc_feature: MA Experiment 20001905 PARAMETER Experiment Name: At_Drought_Reproduction_P Parameter: Plant Line Value: WS
  misc_feature: MA Experiment 20001905 PARAMETER Experiment Name: At_Drought_Reproduction_P Parameter: Timepoint (day) Value: 10
  misc_feature: MA Experiment 20001905 PARAMETER Experiment Name: At_Drought_Reproduction_P Parameter: Tissue Value: Rosettes
  misc_feature: MA Experiment 20001905 PARAMETER Experiment Name: At_Drought_Reproduction_P Parameter: Treatment Value: Drought vs. No Drought
  misc_feature: MA Experiment ID: 20001906 Result: Down-regulated in Transcription
  misc_feature: MA Experiment 20001906 PARAMETER Experiment Name: At_Drought_Reproduction_P Parameter: Age (day) Value: 35
  misc_feature: MA Experiment 20001906 PARAMETER Experiment Name: At_Drought_Reproduction_P Parameter: Organism Value: A. thaliana
  misc_feature: MA Experiment 20001906 PARAMETER Experiment Name: At_Drought_Reproduction_P Parameter: Plant Line Value: WS
  misc_feature: MA Experiment 20001906 PARAMETER Experiment Name: At_Drought_Reproduction_P Parameter: Timepoint (day) Value: 5
  misc_feature: MA Experiment 20001906 PARAMETER Experiment Name: At_Drought_Reproduction_P Parameter: Tissue Value: Siliques
  misc_feature: MA Experiment 20001906 PARAMETER Experiment Name: At_Drought_Reproduction_P Parameter: Treatment Value: Drought vs. No Drought
  misc_feature: MA Experiment ID: 20001908 Result: Down-regulated in Transcription
  misc_feature: MA Experiment 20001908 PARAMETER Experiment Name: At_Drought_Reproduction_P Parameter: Age (day) Value: 40
  misc_feature: MA Experiment 20001908 PARAMETER Experiment Name: At_Drought_Reproduction_P Parameter: Organism Value: A. thaliana
  misc_feature: MA Experiment 20001908 PARAMETER Experiment Name: At_Drought_Reproduction_P Parameter: Plant Line Value: WS
  misc_feature: MA Experiment 20001908 PARAMETER Experiment Name: At_Drought_Reproduction_P Parameter: Timepoint (day) Value: 10
  misc_feature: MA Experiment 20001908 PARAMETER Experiment Name: At_Drought_Reproduction_P Parameter: Tissue Value: Siliques
  misc_feature: MA Experiment 20001908 PARAMETER Experiment Name: At_Drought_Reproduction_P Parameter: Treatment Value: Drought vs. No Drought
agaagctttaattgtgaagtgatttggtgggttaatggcgcttgcaaacatatctctgcgtttcaagtttccacctttacaatcttcttcttcttcttcttcctcgttcaatgctactttaatcaataccagaaaactctcttcaatcgtttgctcgaaaccctcctctaatgacggcggcaaagtggctaatgacgatggtggcgcaaagccgcggaagaagttgtcggagcaatcgtcatgggaagttaaagattcagaagggaaggattatctctataggcttggcgcggaatcggataatgttaacatagccgttggggcacgaagcggcatgatcgatgatgtattcattggagacttccttggaaaagattctgatattgtgtttgattaccgtcagaaggcgacgaggtcctttgaacatcttcaaggagattattacattgctccatcgtttctggataaagttgcggtccacattgtgaagaactaccttgctccttctctaaatataaaaatcccattgattttaggtatatggggaggtaaaggacaaggcaaaacatttcagactgaacttatattcaaaacaatgggagttgaaccagttataatgtctgcaggagagttggaatctgatagagctggtgaaccggggagactcatacgtgaccgctatcgaacagcttcacaagtcattcagaatcaaggaaagatgagtgttctcatgatcaatgatattgatgctggccttggtagatttggggaaacgcaaatgacagtaaacaaccagatagttgttggtaccctgatgaatcttgcggataatcctacaagggtaagtgtaggacaagaatggagagaagctgacatggtaaacagagttcctctaattgtcacagggaacgatttctctacactgtatgctccactgatccgtgaaggaagaatggagaagttctactggcagccaactcgtgaagatatcgtaaacattgttagcagaatgtacgagaaagatggtatatcgcggaaagatgttataagcattgtagataagtttccaaatcaagcacttgacttctatggagctttgaggtcacgcacatatgataggtctatcctcaagtgggtagatgaagctggaggaatggagactctagggaaagttcttctcagacgtaaaaagacccaagaggttcctcaattcactgcccctgagcaaacggtggaagcattgctggaatcagggtactcactcataaatgaacagaaacttattatggaaacaaagctttccaaggagtacatgaagaacatggacgattgataccaaacaaacatcaatttttttcattcttaaagtgactttcgaggaacactcagctgaatcctgataagttgttacaaaagcttaaaaagattaaccgaatcactctatagagtttgtttatacg

SEQ ID NO: 106798 - protein, 432 aa, Arabidopsis thaliana
  peptide (1)..(432): Ceres Seq. ID no. 13620475
  misc_feature (166)..(337): Pfam Name: ATPase family associated with various cellular Pfam Description: ATPase family associated with various cellular
  misc_feature (1)..(432): Homolog of NCBI NO: 15219376 NR Description: rubisco activase -related [Arabidopsis thaliana] At1g73110/F3N23_39 [Arabidopsis thaliana]
  misc_feature (2)..(432): Homolog of NCBI NO: 38346401 NR Description: OSJNBa0011F23.7 [Oryza sativa (japonica
  misc_feature (154)..(432): Homolog of NCBI NO: 19387266 NR Description: putative rubisco activase [Oryza sativa (japonica
  misc_feature (2)..(148): Homolog of NCBI NO: 19387266 NR Description: putative rubisco activase [Oryza sativa (japonica
  misc_feature (188)..(432): Homolog of NCBI NO: 25535799 NR Description: ribulose-bisphosphate carboxylase activase (EC
  misc_feature (17)..(427): Homolog of NCBI NO: 8918359 NR Description: RuBisCO activase large isoform precursor [Oryza
  misc_feature (17)..(427): Homolog of NCBI NO: 8918361 NR Description: RuBisCO activase small isoform precursor [Oryza
  misc_feature (17)..(427): Homolog of NCBI NO: 3914603 NR Description: Ribulose bisphosphate carboxylase/oxygenase
  misc_feature (62)..(427): Homolog of NCBI NO: 32481067 NR Description: Rubisco activase beta form precursor [Larrea
  misc_feature (17)..(427): Homolog of NCBI NO: 29429152 NR Description: Ribulose bisphosphate carboxylase/oxygenase chloroplast precursor (RuBisCO activase) (RA)
MALANISLRFKFPPLQSSSSSSSSFNATLINTRKLSSIVCSKPSSNDGGKVANDDGGAKPRKKLSEQSSWEVKDSEGKDYLYRLGAESDNVNIAVGARSGMIDDVFIGDFLGKDSDIVFDYRQKATRSFEHLQGDYYIAPSFLDKVAVHIVKNYLAPSLNIKIPLILGIWGGKGQGKTFQTELIFKTMGVEPVIMSAGELESDRAGEPGRLIRDRYRTASQVIQNQGKMSVLMINDIDAGLGRFGETQMTVNNQIVVGTLMNLADNPTRVSVGQEWREADMVNRVPLIVTGNDFSTLYAPLIREGRMEKFYWQPTREDIVNIVSRMYEKDGISRKDVISIVDKFPNQALDFYGALRSRTYDRSILKWVDEAGGMETLGKVLLRRKKTQEVPQFTAPEQTVEALLESGYSLINEQKLIMETKLSKEYMKNMDD

SEQ ID NO: 106799 - protein, 332 aa, Arabidopsis thaliana
  peptide (1)..(332): Ceres Seq. ID no. 13620476
  misc_feature (66)..(237): Pfam Name: ATPase family associated with various cellular Pfam Description: ATPase family associated with various cellular
  misc_feature (1)..(332): Homolog of NCBI NO: 15219376 NR Description: rubisco activase -related [Arabidopsis thaliana] At1g73110/F3N23_39 [Arabidopsis thaliana]
  misc_feature (1)..(332): Homolog of NCBI NO: 38346401 NR Description: OSJNBa0011F23.7 [Oryza sativa (japonica
  misc_feature (54)..(332): Homolog of NCBI NO: 19387266 NR Description: putative rubisco activase [Oryza sativa (japonica
  misc_feature (1)..(48): Homolog of NCBI NO: 19387266 NR Description: putative rubisco activase [Oryza sativa (japonica
  misc_feature (88)..(332): Homolog of NCBI NO: 25535799 NR Description: ribulose-bisphosphate carboxylase activase (EC
  misc_feature (1)..(327): Homolog of NCBI NO: 8918359 NR Description: RuBisCO activase large isoform precursor [Oryza
  misc_feature (1)..(327): Homolog of NCBI NO: 8918361 NR Description: RuBisCO activase small isoform precursor [Oryza
  misc_feature (1)..(327): Homolog of NCBI NO: 3914603 NR Description: Ribulose bisphosphate carboxylase/oxygenase
  misc_feature (1)..(327): Homolog of NCBI NO: 32481067 NR Description: Rubisco activase beta form precursor [Larrea
  misc_feature (1)..(327): Homolog of NCBI NO: 29429152 NR Description: Ribulose bisphosphate carboxylase/oxygenase chloroplast precursor (RuBisCO activase) (RA)
MIDDVFIGDFLGKDSDIVFDYRQKATRSFEHLQGDYYIAPSFLDKVAVHIVKNYLAPSLNIKIPLILGIWGGKGQGKTFQTELIFKTMGVEPVIMSAGELESDRAGEPGRLIRDRYRTASQVIQNQGKMSVLMINDIDAGLGRFGETQMTVNNQIVVGTLMNLADNPTRVSVGQEWREADMVNRVPLIVTGNDFSTLYAPLIREGRMEKFYWQPTREDIVNIVSRMYEKDGISRKDVISIVDKFPNQALDFYGALRSRTYDRSILKWVDEAGGMETLGKVLLRRKKTQEVPQFTAPEQTVEALLESGYSLINEQKLIMETKLSKEYMKNMDD

SEQ ID NO: 106800 - protein, 245 aa, Arabidopsis thaliana
  peptide (1)..(245): Ceres Seq. ID no. 13620477
  misc_feature (1)..(150): Pfam Name: ATPase family associated with various cellular Pfam Description: ATPase family associated with various cellular
  misc_feature (1)..(245): Homolog of NCBI NO: 15219376 NR Description: rubisco activase -related [Arabidopsis thaliana] At1g73110/F3N23_39 [Arabidopsis thaliana]
  misc_feature (1)..(245): Homolog of NCBI NO: 38346401 NR Description: OSJNBa0011F23.7 [Oryza sativa (japonica
  misc_feature (1)..(245): Homolog of NCBI NO: 19387266 NR Description: putative rubisco activase [Oryza sativa (japonica
  misc_feature (1)..(245): Homolog of NCBI NO: 25535799 NR Description: ribulose-bisphosphate carboxylase activase (EC
  misc_feature (1)..(240): Homolog of NCBI NO: 8918359 NR Description: RuBisCO activase large isoform precursor [Oryza
  misc_feature (1)..(240): Homolog of NCBI NO: 8918361 NR Description: RuBisCO activase small isoform precursor [Oryza
  misc_feature (1)..(240): Homolog of NCBI NO: 3914603 NR Description: Ribulose bisphosphate carboxylase/oxygenase
  misc_feature (1)..(240): Homolog of NCBI NO: 32481067 NR Description: Rubisco activase beta form precursor [Larrea
  misc_feature (1)..(240): Homolog of NCBI NO: 29429152 NR Description: Ribulose bisphosphate carboxylase/oxygenase chloroplast precursor (RuBisCO activase) (RA)
  misc_feature (1)..(240): Homolog of NCBI NO: 21950712 NR Description: rubisco activase [Chenopodium quinoa]
MGVEPVIMSAGELESDRAGEPGRLIRDRYRTASQVIQNQGKMSVLMINDIDAGLGRFGETQMTVNNQIVVGTLMNLADNPTRVSVGQEWREADMVNRVPLIVTGNDFSTLYAPLIREGRMEKFYWQPTREDIVNIVSRMYEKDGISRKDVISIVDKFPNQALDFYGALRSRTYDRSILKWVDEAGGMETLGKVLLRRKKTQEVPQFTAPEQTVEALLESGYSLINEQKLIMETKLSKEYMKNMDD

SEQ ID NO: 106801 - DNA, 1546 bp, Arabidopsis thaliana
  misc_feature (1)..(1546): Ceres Seq. ID no. 13620482
  misc_feature: MA Experiment ID: 20000180 Result: Down-regulated in Transcription
  misc_feature: MA Experiment 20000180 PARAMETER Experiment Name: At_Germinating_Seeds_P Parameter: Age (hr) Value: 24 vs. 0
  misc_feature: MA Experiment 20000180 PARAMETER Experiment Name: At_Germinating_Seeds_P Parameter: Tissue Value: Germinating Seeds
  misc_feature: MA Experiment ID: 20000184 Result: Down-regulated in Transcription
  misc_feature: MA Experiment 20000184 PARAMETER Experiment Name: At_Shoots__P Parameter: Age (day) Value: 7
  misc_feature: MA Experiment 20000184 PARAMETER Experiment Name: At_Shoots__P Parameter: Tissue Value: Shoots vs. Whole Plant
  misc_feature: MA Experiment ID: 20000264 Result: Down-regulated in Transcription
  misc_feature: MA Experiment 20000264 PARAMETER Experiment Name: At_Open_Flower_P Parameter: Age (day) Value: 21
  misc_feature: MA Experiment 20000264 PARAMETER Experiment Name: At_Open_Flower_P Parameter: Plant Line Value: WS
  misc_feature: MA Experiment 20000264 PARAMETER Experiment Name: At_Open_Flower_P Parameter: Tissue Value: Open Flower vs. Whole Plant
  misc_feature: MA Experiment ID: 20000265 Result: Down-regulated in Transcription
  misc_feature: MA Experiment 20000265 PARAMETER Experiment Name: At_Open_Flower_P Parameter: Age (day) Value: 21
  misc_feature: MA Experiment 20000265 PARAMETER Experiment Name: At_Open_Flower_P Parameter: Plant Line Value: WS
  misc_feature: MA Experiment 20000265 PARAMETER Experiment Name: At_Open_Flower_P Parameter: Tissue Value: Closed Flower vs. Whole Plant
  misc_feature: MA Experiment ID: 20000437 Result: Up-regulated in Transcription
  misc_feature: MA Experiment 20000437 PARAMETER Experiment Name: At_Drought_P Parameter: Age (day) Value: 8
  misc_feature: MA Experiment 20000437 PARAMETER Experiment Name: At_Drought_P Parameter: Organism Value: A. thaliana
  misc_feature: MA Experiment 20000437 PARAMETER Experiment Name: At_Drought_P Parameter: Plant Line Value: WS
  misc_feature: MA Experiment 20000437 PARAMETER Experiment Name: At_Drought_P Parameter: Timepoint (hr) Value: 24
  misc_feature: MA Experiment 20000437 PARAMETER Experiment Name: At_Drought_P Parameter: Tissue Value: Whole Plant
  misc_feature: MA Experiment 20000437 PARAMETER Experiment Name: At_Drought_P Parameter: Treatment Value: Drought vs. No Drought
  misc_feature: MA Experiment ID: 20000438 Result: Down-regulated in Transcription
  misc_feature: MA Experiment 20000438 PARAMETER Experiment Name: At_Shoots__P Parameter: Age (day) Value: 14
  misc_feature: MA Experiment 20000438 PARAMETER Experiment Name: At_Shoots__P Parameter: Tissue Value: Shoots vs. Whole Plant
  misc_feature: MA Experiment ID: 20001451 Result: Down-regulated in Transcription
  misc_feature: MA Experiment 20001451 PARAMETER Experiment Name: At_Far-red-induction_P Parameter: Age (day) Value: 7
  misc_feature: MA Experiment 20001451 PARAMETER Experiment Name: At_Far-red-induction_P Parameter: Light Value: Far-red vs. White
  misc_feature: MA Experiment 20001451 PARAMETER Experiment Name: At_Far-red-induction_P Parameter: Organism Value: A. thaliana
  misc_feature: MA Experiment 20001451 PARAMETER Experiment Name: At_Far-red-induction_P Parameter: Plant Line Value: Columbia
  misc_feature: MA Experiment 20001451 PARAMETER Experiment Name: At_Far-red-induction_P Parameter: Timepoint (hr) Value: 24
  misc_feature: MA Experiment 20001451 PARAMETER Experiment Name: At_Far-red-induction_P Parameter: Tissue Value: Whole Plant
  misc_feature: MA Experiment ID: 20001555 Result: Up-regulated in Transcription
  misc_feature: MA Experiment 20001555 PARAMETER Experiment Name: At_Drought_Soil_Dry_P Parameter: Age (day) Value: 24
  misc_feature: MA Experiment 20001555 PARAMETER Experiment Name: At_Drought_Soil_Dry_P Parameter: Organism Value: A. thaliana
  misc_feature: MA Experiment 20001555 PARAMETER Experiment Name: At_Drought_Soil_Dry_P Parameter: Plant Line Value: WS
  misc_feature: MA Experiment 20001555 PARAMETER Experiment Name: At_Drought_Soil_Dry_P Parameter: Post Timepoint (hr) Value: None
  misc_feature: MA Experiment 20001555 PARAMETER Experiment Name: At_Drought_Soil_Dry_P Parameter: Post-Treatment Value: None
  misc_feature: MA Experiment 20001555 PARAMETER Experiment Name: At_Drought_Soil_Dry_P Parameter: Timepoint (day) Value: 10
  misc_feature: MA Experiment 20001555 PARAMETER Experiment Name: At_Drought_Soil_Dry_P Parameter: Treatment Value: Drought vs. No Drought
  misc_feature: MA Experiment ID: 20001911 Result: Up-regulated in Transcription
  misc_feature: MA Experiment 20001911 PARAMETER Experiment Name: At_Drought_Reproduction_P Parameter: Age (day) Value: 40
  misc_feature: MA Experiment 20001911 PARAMETER Experiment Name: At_Drought_Reproduction_P Parameter: Organism Value: A. thaliana
  misc_feature: MA Experiment 20001911 PARAMETER Experiment Name: At_Drought_Reproduction_P Parameter: Plant Line Value: WS
  misc_feature: MA Experiment 20001911 PARAMETER Experiment Name: At_Drought_Reproduction_P Parameter: Timepoint (day) Value: 10
  misc_feature: MA Experiment 20001911 PARAMETER Experiment Name: At_Drought_Reproduction_P Parameter: Tissue Value: Flowers
  misc_feature: MA Experiment 20001911 PARAMETER Experiment Name: At_Drought_Reproduction_P Parameter: Treatment Value: Drought vs. No Drought
aatcagaatctgaaatacgaaatggcaaacaagtatttttcctctgttctgaagtcgttgcttctgcttcttcaccttgtattcttgagtaagcaacatgttgactctgcctcaatcgtcaagttccttcctggttttgaaggcccccttccctttgagctcgaaaccgggtatattggtattggtgaggaagaggaagtgcaactgttctactacttcatcaagtctgagaggaacccaaaagaagaccctcttattctctggctaactggaggacctggctgctcttccatctctggccttctttttgagaatgggcctctaactatgaagcttgacgtttacaatggaactctcccttctttggtctctactacatattcttggacaaagacttcgagcatgatattcttggatcagcctgttggaactggcttttcctattcaagaactcaacaatttaataaacctagtgattcaggagaagccaaacggatccatgagtttcttcaaaagtggctaggcaagcatcaagagttttcctccaaccctttctatgttgccggagattcttattccggtttggttgttcccgctaccgttcaagaaatctcaaaaggaaactatgaatgctgcaatcctccaataaaccttcagggctatgtgcttggtaatccgttaacagactatgcaattgatagtaacagccgcattccatttgcccatggaatggcactgatatctgatgaactctacgagtcgttgaagaaaacctgtaaaggagaatatacaaatgttcatccacgtaacacacaatgcttgaaattcattgaagaatttaataagtgtacaaacagaatactccaacaacttatactagatccgttgtgcgaaactgaaactccagattgctatatttatcggtatttgctaactacctactgggccaatgacgcgactgtgcgcgaagctcttcaaatcaataaggagagtataggggaatgggtacgatgttatcgcactattccttacgataatgacattaaaagtagcatgccttaccatgtgaataacagcatcagtggttatcgttctctcatctacagtggtgatcatgatttggaagtaccttaccttggaactcaagcttggataagatctctcaactattcaattattgatgactggaggccatggatgatcaaaaatcaaatcgctgggtacacaaggacttatgccaacaaaatgacatttgctactataaaaggaggtgggcacacaatagagtttaaaccagaggaagcctctatcatgtttcaaagatggatcaatggccaacctctctaaaagaggggagtacctgccttaacgtataaaggaaaagaaaatacgattctagtaacacatccaaatatatataagaacccttggccttataaatgaatagaatttaaactcataatttgtaagcaacatgtgtgttgcttttccacaatcttggtatagttgcatttcacctttttttttttcagcaagcttgttttct

SEQ ID NO: 106802 - protein, 448 aa, Arabidopsis thaliana
  peptide (1)..(448): Ceres Seq. ID no. 15219358
  misc_feature (44)..(445): Pfam Name: Serine carboxypeptidase Pfam Description: Serine carboxypeptidase
  misc_feature (8)..(448): Homolog of NCBI NO: 15219433 NR Description: serine carboxypeptidase -related [Arabidopsis
  misc_feature (8)..(448): Homolog of NCBI NO: 22327401 NR Description: serine carboxypeptidase -related [Arabidopsis >gi|20260290|gb|AAM13043.1| serine carboxypeptidase [Arabidopsis >gi|22136494|gb|AAM91325.1| serine carboxypeptidase [Arabidopsis
  misc_feature (8)..(448): Homolog of NCBI NO: 8777303 NR Description: serine carboxypeptidase [Arabidopsis thaliana]
  misc_feature (8)..(448): Homolog of NCBI NO: 15219429 NR Description: serine carboxypeptidase -related [Arabidopsis
  misc_feature (8)..(448): Homolog of NCBI NO: 15219435 NR Description: serine carboxypeptidase -related [Arabidopsis
  misc_feature (8)..(448): Homolog of NCBI NO: 15219431 NR Description: serine carboxypeptidase -related [Arabidopsis
  misc_feature (8)..(448): Homolog of NCBI NO: 15219427 NR Description: serine carboxypeptidase -related [Arabidopsis
  misc_feature (8)..(282): Homolog of NCBI NO: 25289774 NR Description: probable serine carboxypeptidase T9L24.47 - Arabidopsis thaliana >gi|11120810|gb|AAG30990.1|AC012396_26
  misc_feature (307)..(448): Homolog of NCBI NO: 25289774 NR Description: probable serine carboxypeptidase T9L24.47 - Arabidopsis thaliana >gi|11120810|gb|AAG30990.1|AC012396_26
  misc_feature (8)..(448): Homolog of NCBI NO: 15228300 NR Description: serine carboxypeptidase -related [Arabidopsis >gi|8567775|gb|AAF76347.1| glucose acyltransferase, putative
NQNLKYEMANKYFSSVLKSLLLLLHLVFLSKQHVDSASIVKFLPGFEGPLPFELETGYIGIGEEEEVQLFYYFIKSERNPKEDPLILWLTGGPGCSSISGLLFENGPLTMKLDVYNGTLPSLVSTTYSWTKTSSMIFLDQPVGTGFSYSRTQQFNKPSDSGEAKRIHEFLQKWLGKHQEFSSNPFYVAGDSYSGLVVPATVQEISKGNYECCNPPINLQGYVLGNPLTDYAIDSNSRIPFAHGMALISDELYESLKKTCKGEYTNVHPRNTQCLKFIEEFNKCTNRILQQLILDPLCETETPDCYIYRYLLTTYWANDATVREALQINKESIGEWVRCYRTIPYDNDIKSSMPYHVNNSISGYRSLIYSGDHDLEVPYLGTQAWIRSLNYSIIDDWRPWMIKNQIAGYTRTYANKMTFATIKGGGHTIEFKPEEASIMFQRWINGQPL

SEQ ID NO: 106803 - protein, 441 aa, Arabidopsis thaliana
  peptide (1)..(441): Ceres Seq. ID no. 15219359
  misc_feature (37)..(438): Pfam Name: Serine carboxypeptidase Pfam Description: Serine carboxypeptidase
  misc_feature (1)..(441): Homolog of NCBI NO: 15219433 NR Description: serine carboxypeptidase -related [Arabidopsis
  misc_feature (1)..(441): Homolog of NCBI NO: 22327401 NR Description: serine carboxypeptidase -related [Arabidopsis >gi|20260290|gb|AAM13043.1| serine carboxypeptidase [Arabidopsis >gi|22136494|gb|AAM91325.1| serine carboxypeptidase [Arabidopsis
  misc_feature (1)..(441): Homolog of NCBI NO: 8777303 NR Description: serine carboxypeptidase [Arabidopsis thaliana]
  misc_feature (1)..(441): Homolog of NCBI NO: 15219429 NR Description: serine carboxypeptidase -related [Arabidopsis
  misc_feature (1)..(441): Homolog of NCBI NO: 15219435 NR Description: serine carboxypeptidase -related [Arabidopsis
  misc_feature (1)..(441): Homolog of NCBI NO: 15219431 NR Description: serine carboxypeptidase -related [Arabidopsis
  misc_feature (1)..(441): Homolog of NCBI NO: 15219427 NR Description: serine carboxypeptidase -related [Arabidopsis
  misc_feature (1)..(275): Homolog of NCBI NO: 25289774 NR Description: probable serine carboxypeptidase T9L24.47 - Arabidopsis thaliana >gi|11120810|gb|AAG30990.1|AC012396_26
  misc_feature (300)..(441): Homolog of NCBI NO: 25289774 NR Description: probable serine carboxypeptidase T9L24.47 - Arabidopsis thaliana >gi|11120810|gb|AAG30990.1|AC012396_26
  misc_feature (1)..(441): Homolog of NCBI NO: 15228300 NR Description: serine carboxypeptidase -related [Arabidopsis >gi|8567775|gb|AAF76347.1| glucose acyltransferase, putative
MANKYFSSVLKSLLLLLHLVFLSKQHVDSASIVKFLPGFEGPLPFELETGYIGIGEEEEVQLFYYFIKSERNPKEDPLILWLTGGPGCSSISGLLFENGPLTMKLDVYNGTLPSLVSTTYSWTKTSSMIFLDQPVGTGFSYSRTQQFNKPSDSGEAKRIHEFLQKWLGKHQEFSSNPFYVAGDSYSGLVVPATVQEISKGNYECCNPPINLQGYVLGNPLTDYAIDSNSRIPFAHGMALISDELYESLKKTCKGEYTNVHPRNTQCLKFIEEFNKCTNRILQQLILDPLCETETPDCYIYRYLLTTYWANDATVREALQINKESIGEWVRCYRTIPYDNDIKSSMPYHVNNSISGYRSLIYSGDHDLEVPYLGTQAWIRSLNYSIIDDWRPWMIKNQIAGYTRTYANKMTFATIKGGGHTIEFKPEEASIMFQRWINGQPL

SEQ ID NO: 106804 - protein, 339 aa, Arabidopsis thaliana
  peptide (1)..(339): Ceres Seq. ID no. 15219360
  misc_feature (1)..(336): Pfam Name: Serine carboxypeptidase Pfam Description: Serine carboxypeptidase
  misc_feature (1)..(339): Homolog of NCBI NO: 15219433 NR Description: serine carboxypeptidase -related [Arabidopsis
  misc_feature (1)..(339): Homolog of NCBI NO: 22327401 NR Description: serine carboxypeptidase -related [Arabidopsis >gi|20260290|gb|AAM13043.1| serine carboxypeptidase [Arabidopsis >gi|22136494|gb|AAM91325.1| serine carboxypeptidase [Arabidopsis
  misc_feature (1)..(339): Homolog of NCBI NO: 8777303 NR Description: serine carboxypeptidase [Arabidopsis thaliana]
  misc_feature (1)..(339): Homolog of NCBI NO: 15219429 NR Description: serine carboxypeptidase -related [Arabidopsis
  misc_feature (1)..(339): Homolog of NCBI NO: 15219435 NR Description: serine carboxypeptidase -related [Arabidopsis
  misc_feature (1)..(339): Homolog of NCBI NO: 15219431 NR Description: serine carboxypeptidase -related [Arabidopsis
  misc_feature (1)..(339): Homolog of NCBI NO: 15219427 NR Description: serine carboxypeptidase -related [Arabidopsis
  misc_feature (1)..(173): Homolog of NCBI NO: 25289774 NR Description: probable serine carboxypeptidase T9L24.47 - Arabidopsis thaliana >gi|11120810|gb|AAG30990.1|AC012396_26
  misc_feature (198)..(339): Homolog of NCBI NO: 25289774 NR Description: probable serine carboxypeptidase T9L24.47 - Arabidopsis thaliana >gi|11120810|gb|AAG30990.1|AC012396_26
  misc_feature (1)..(339): Homolog of NCBI NO: 15228300 NR Description: serine carboxypeptidase -related [Arabidopsis >gi|8567775|gb|AAF76347.1| glucose acyltransferase, putative
MKLDVYNGTLPSLVSTTYSWTKTSSMIFLDQPVGTGFSYSRTQQFNKPSDSGEAKRIHEFLQKWLGKHQEFSSNPFYVAGDSYSGLVVPATVQEISKGNYECCNPPINLQGYVLGNPLTDYAIDSNSRIPFAHGMALISDELYESLKKTCKGEYTNVHPRNTQCLKFIEEFNKCTNRILQQLILDPLCETETPDCYIYRYLLTTYWANDATVREALQINKESIGEWVRCYRTIPYDNDIKSSMPYHVNNSISGYRSLIYSGDHDLEVPYLGTQAWIRSLNYSIIDDWRPWMIKNQIAGYTRTYANKMTFATIKGGGHTIEFKPEEASIMFQRWINGQPL

SEQ ID NO: 106805 - DNA, 1722 bp, Arabidopsis thaliana
  misc_feature (1)..(1722): Ceres Seq. ID no. 13620491
  misc_feature: MA Experiment ID: 20000169 Result: Up-regulated in Transcription
  misc_feature: MA Experiment 20000169 PARAMETER Experiment Name: At_100uM_ABA_P Parameter: Age (day) Value: 14
  misc_feature: MA Experiment 20000169 PARAMETER Experiment Name: At_100uM_ABA_P Parameter: Organism Value: A. thaliana
  misc_feature: MA Experiment 20000169 PARAMETER Experiment Name: At_100uM_ABA_P Parameter: Plant Line Value: WS
  misc_feature: MA Experiment 20000169 PARAMETER Experiment Name: At_100uM_ABA_P Parameter: Timepoint (hr) Value: 6
  misc_feature: MA Experiment 20000169 PARAMETER Experiment Name: At_100uM_ABA_P Parameter: Tissue Value: Aerial
  misc_feature: MA Experiment 20000169 PARAMETER Experiment Name: At_100uM_ABA_P Parameter: Treatment Value: 100uM ABA vs. No Treatment
  misc_feature: MA Experiment ID: 20000184 Result: Down-regulated in Transcription
  misc_feature: MA Experiment 20000184 PARAMETER Experiment Name: At_Shoots__P Parameter: Age (day) Value: 7
  misc_feature: MA Experiment 20000184 PARAMETER Experiment Name: At_Shoots__P Parameter: Tissue Value: Shoots vs. Whole Plant
  misc_feature: MA Experiment ID: 20000227 Result: Down-regulated in Transcription
  misc_feature: MA Experiment 20000227 PARAMETER Experiment Name: At_Root-Tips-vs-Tops_P Parameter: Tissue Value: Root Tips vs. Root Tops
  misc_feature: MA Experiment ID: 20000234 Result: Down-regulated in Transcription
  misc_feature: MA Experiment 20000234 PARAMETER Experiment Name: At_Siliques_P Parameter: Age (day) Value: 21
  misc_feature: MA Experiment 20000234 PARAMETER Experiment Name: At_Siliques_P Parameter: Organism Value: A. thaliana
  misc_feature: MA Experiment 20000234 PARAMETER Experiment Name: At_Siliques_P Parameter: Plant Line Value: WS
  misc_feature: MA Experiment 20000234 PARAMETER Experiment Name: At_Siliques_P Parameter: Tissue Value: Less Than 5mm Siliques vs. Whole Plant
  misc_feature: MA Experiment ID: 20000235 Result: Down-regulated in Transcription
  misc_feature: MA Experiment 20000235 PARAMETER Experiment Name: At_Siliques_P Parameter: Age (day) Value: 21
  misc_feature: MA Experiment 20000235 PARAMETER Experiment Name: At_Siliques_P Parameter: Organism Value: A. thaliana
  misc_feature: MA Experiment 20000235 PARAMETER Experiment Name: At_Siliques_P Parameter: Plant Line Value: WS
  misc_feature: MA Experiment 20000235 PARAMETER Experiment Name: At_Siliques_P Parameter: Tissue Value: 5-10mm Siliques vs. Whole Plant
  misc_feature: MA Experiment ID: 20000265 Result: Down-regulated in Transcription
  misc_feature: MA Experiment 20000265 PARAMETER Experiment Name: At_Open_Flower_P Parameter: Age (day) Value: 21
  misc_feature: MA Experiment 20000265 PARAMETER Experiment Name: At_Open_Flower_P Parameter: Plant Line Value: WS
  misc_feature: MA Experiment 20000265 PARAMETER Experiment Name: At_Open_Flower_P Parameter: Tissue Value: Closed Flower vs. Whole Plant
  misc_feature: MA Experiment ID: 20000269 Result: Down-regulated in Transcription
  misc_feature: MA Experiment 20000269 PARAMETER Experiment Name: At_1mM_KNO3_L-vs-H_Roots_P Parameter: Age (day) Value: 7,10,12
  misc_feature: MA Experiment 20000269 PARAMETER Experiment Name: At_1mM_KNO3_L-vs-H_Roots_P Parameter: Organism Value: A. thaliana
  misc_feature: MA Experiment 20000269 PARAMETER Experiment Name: At_1mM_KNO3_L-vs-H_Roots_P Parameter: Plant Line Value: WS
  misc_feature: MA Experiment 20000269 PARAMETER Experiment Name: At_1mM_KNO3_L-vs-H_Roots_P Parameter: Timepoint (day) Value: 7,10,12
  misc_feature: MA Experiment 20000269 PARAMETER Experiment Name: At_1mM_KNO3_L-vs-H_Roots_P Parameter: Tissue Value: Roots
  misc_feature: MA Experiment 20000269 PARAMETER Experiment Name: At_1mM_KNO3_L-vs-H_Roots_P Parameter: Treatment Value: 1mM KNO3 vs. 50mM KNO3
  misc_feature: MA Experiment ID: 20000286 Result: Down-regulated in Transcription
  misc_feature: MA Experiment 20000286 PARAMETER Experiment Name: At_Open_Flower_P Parameter: Age (day) Value: 21
  misc_feature: MA Experiment 20000286 PARAMETER Experiment Name: At_Open_Flower_P Parameter: Plant Line Value: WS
  misc_feature: MA Experiment 20000286 PARAMETER Experiment Name: At_Open_Flower_P Parameter: Tissue Value: Half Open vs. Whole Plant
  misc_feature: MA Experiment ID: 20000308 Result: Down-regulated in Transcription
  misc_feature: MA Experiment 20000308 PARAMETER Experiment Name: At_100mM_NaCl__P Parameter: Age (day) Value: 17
  misc_feature: MA Experiment 20000308 PARAMETER Experiment Name: At_100mM_NaCl__P Parameter: Organism Value: A. thaliana
  misc_feature: MA Experiment 20000308 PARAMETER Experiment Name: At_100mM_NaCl__P Parameter: Plant Line Value: WS
  misc_feature: MA Experiment 20000308 PARAMETER Experiment Name: At_100mM_NaCl__P Parameter: Timepoint (hr) Value: 72
  misc_feature: MA Experiment 20000308 PARAMETER Experiment Name: At_100mM_NaCl__P Parameter: Tissue Value: Whole Plant
  misc_feature: MA Experiment 20000308 PARAMETER Experiment Name: At_100mM_NaCl__P Parameter: Treatment Value: 100mM NaCl vs. No Treatment
  misc_feature: MA Experiment ID: 20000436 Result: Up-regulated in Transcription
  misc_feature: MA Experiment 20000436 PARAMETER Experiment Name: At_Drought_P Parameter: Age (day) Value: 7
  misc_feature: MA Experiment 20000436 PARAMETER Experiment Name: At_Drought_P Parameter: Organism Value: A. thaliana
  misc_feature: MA Experiment 20000436 PARAMETER Experiment Name: At_Drought_P Parameter: Plant Line Value: WS
  misc_feature: MA Experiment 20000436 PARAMETER Experiment Name: At_Drought_P Parameter: Timepoint (hr) Value: 12
  misc_feature: MA Experiment 20000436 PARAMETER Experiment Name: At_Drought_P Parameter: Tissue Value: Whole Plant
  misc_feature: MA Experiment 20000436 PARAMETER Experiment Name: At_Drought_P Parameter: Treatment Value: Drought vs. No Drought
  misc_feature: MA Experiment ID: 20000437 Result: Up-regulated in Transcription
  misc_feature: MA Experiment 20000437 PARAMETER Experiment Name: At_Drought_P Parameter: Age (day) Value: 8
  misc_feature: MA Experiment 20000437 PARAMETER Experiment Name: At_Drought_P Parameter: Organism Value: A. thaliana
  misc_feature: MA Experiment 20000437 PARAMETER Experiment Name: At_Drought_P Parameter: Plant Line Value: WS
  misc_feature: MA Experiment 20000437 PARAMETER Experiment Name: At_Drought_P Parameter: Timepoint (hr) Value: 24
  misc_feature: MA Experiment 20000437 PARAMETER Experiment Name: At_Drought_P Parameter: Tissue Value: Whole Plant
  misc_feature: MA Experiment 20000437 PARAMETER Experiment Name: At_Drought_P Parameter: Treatment Value: Drought vs. No Drought
  misc_feature: MA Experiment ID: 20000439 Result: Down-regulated in Transcription
  misc_feature: MA Experiment 20000439 PARAMETER Experiment Name: At_Roots__P Parameter: Age (day) Value: 14 vs. 21
  misc_feature: MA Experiment 20000439 PARAMETER Experiment Name: At_Roots__P Parameter: Organism Value: A. thaliana
  misc_feature: MA Experiment 20000439 PARAMETER Experiment Name: At_Roots__P Parameter: Tissue Value: Roots vs. Whole Plant
  misc_feature: MA Experiment ID: 20000441 Result: Up-regulated in Transcription
  misc_feature: MA Experiment 20000441 PARAMETER Experiment Name: At_1uM_BR-BRZ__P Parameter: Tissue Value: Shoot Apices
  misc_feature: MA Experiment 20000441 PARAMETER Experiment Name: At_1uM_BR-BRZ__P Parameter: Treatment Value: 1uM BR vs. No Treatment
  misc_feature: MA Experiment ID: 20000443 Result: Up-regulated in Transcription
  misc_feature: MA Experiment 20000443 PARAMETER Experiment Name: At_1uM_BR-BRZ__P Parameter: Tissue Value: Shoot Apices
  misc_feature: MA Experiment 20000443 PARAMETER Experiment Name: At_1uM_BR-BRZ__P Parameter: Treatment Value: 1uM BRZ vs. No Treatment
  misc_feature: MA Experiment ID: 20000451 Result: Down-regulated in Transcription
  misc_feature: MA Experiment 20000451 PARAMETER Experiment Name: At_CS6879_Shoots-Roots_P Parameter: Age (day) Value: 14
  misc_feature: MA Experiment 20000451 PARAMETER Experiment Name: At_CS6879_Shoots-Roots_P Parameter: Organism Value: A. thaliana
  misc_feature: MA Experiment 20000451 PARAMETER Experiment Name: At_CS6879_Shoots-Roots_P Parameter: Plant Line Value: CS6879 vs. WS
  misc_feature: MA Experiment 20000451 PARAMETER Experiment Name: At_CS6879_Shoots-Roots_P Parameter: Tissue Value: Roots
  misc_feature: MA Experiment ID: 20001247 Result: Up-regulated in Transcription
  misc_feature: MA Experiment 20001247 PARAMETER Experiment Name: At_Far-red-induction_P Parameter: Age (day) Value: 7
  misc_feature: MA Experiment 20001247 PARAMETER Experiment Name: At_Far-red-induction_P Parameter: Light Value: Far-red vs. White
  misc_feature: MA Experiment 20001247 PARAMETER Experiment Name: At_Far-red-induction_P Parameter: Organism Value: A. thaliana
  misc_feature: MA Experiment 20001247 PARAMETER Experiment Name: At_Far-red-induction_P Parameter: Plant Line Value: Columbia
  misc_feature: MA Experiment 20001247 PARAMETER Experiment Name: At_Far-red-induction_P Parameter: Timepoint (hr) Value: 1
  misc_feature: MA Experiment 20001247 PARAMETER Experiment Name: At_Far-red-induction_P Parameter: Tissue Value: Whole Plant
  misc_feature: MA Experiment ID: 20001248 Result: Up-regulated in Transcription
  misc_feature: MA Experiment 20001248 PARAMETER Experiment Name: At_Far-red-induction_P Parameter: Age (day) Value: 7
  misc_feature: MA Experiment 20001248 PARAMETER Experiment Name: At_Far-red-induction_P Parameter: Light Value: Far-red vs. White
  misc_feature: MA Experiment 20001248 PARAMETER Experiment Name: At_Far-red-induction_P Parameter: Organism Value: A. thaliana
  misc_feature: MA Experiment 20001248 PARAMETER Experiment Name: At_Far-red-induction_P Parameter: Plant Line Value: Columbia
  misc_feature: MA Experiment 20001248 PARAMETER Experiment Name: At_Far-red-induction_P Parameter: Timepoint (hr) Value: 4
  misc_feature: MA Experiment 20001248 PARAMETER Experiment Name: At_Far-red-induction_P Parameter: Tissue Value: Whole Plant
  misc_feature: MA Experiment ID: 20001450 Result: Up-regulated in Transcription
  misc_feature: MA Experiment 20001450 PARAMETER Experiment Name: At_Far-red-induction_P Parameter: Age (day) Value: 7
  misc_feature: MA Experiment 20001450 PARAMETER Experiment Name: At_Far-red-induction_P Parameter: Light Value: Far-red vs. White
  misc_feature: MA Experiment 20001450 PARAMETER Experiment Name: At_Far-red-induction_P Parameter: Organism Value: A. thaliana
  misc_feature: MA Experiment 20001450 PARAMETER Experiment Name: At_Far-red-induction_P Parameter: Plant Line Value: Columbia
  misc_feature: MA Experiment 20001450 PARAMETER Experiment Name: At_Far-red-induction_P Parameter: Timepoint (hr) Value: 8
  misc_feature: MA Experiment 20001450 PARAMETER Experiment Name: At_Far-red-induction_P Parameter: Tissue Value: Whole Plant
  misc_feature: MA Experiment ID: 20001904 Result: Up-regulated in Transcription
  misc_feature: MA Experiment 20001904 PARAMETER Experiment Name: At_Drought_Reproduction_P Parameter: Age (day) Value: 37
  misc_feature: MA Experiment 20001904 PARAMETER Experiment Name: At_Drought_Reproduction_P Parameter: Organism Value: A. thaliana
  misc_feature: MA Experiment 20001904 PARAMETER Experiment Name: At_Drought_Reproduction_P Parameter: Plant Line Value: WS
  misc_feature: MA Experiment 20001904 PARAMETER Experiment Name: At_Drought_Reproduction_P Parameter: Timepoint (day) Value: 7
  misc_feature: MA Experiment 20001904 PARAMETER Experiment Name: At_Drought_Reproduction_P Parameter: Tissue Value: Rosettes
  misc_feature: MA Experiment 20001904 PARAMETER Experiment Name: At_Drought_Reproduction_P Parameter: Treatment Value: Drought vs. No Drought
  misc_feature: MA Experiment ID: 20001905 Result: Up-regulated in Transcription
  misc_feature: MA Experiment 20001905 PARAMETER Experiment Name: At_Drought_Reproduction_P Parameter: Age (day) Value: 40
  misc_feature: MA Experiment 20001905 PARAMETER Experiment Name: At_Drought_Reproduction_P Parameter: Organism Value: A. thaliana
  misc_feature: MA Experiment 20001905 PARAMETER Experiment Name: At_Drought_Reproduction_P Parameter: Plant Line Value: WS
  misc_feature: MA Experiment 20001905 PARAMETER Experiment Name: At_Drought_Reproduction_P Parameter: Timepoint (day) Value: 10
  misc_feature: MA Experiment 20001905 PARAMETER Experiment Name: At_Drought_Reproduction_P Parameter: Tissue Value: Rosettes
  misc_feature: MA Experiment 20001905 PARAMETER Experiment Name: At_Drought_Reproduction_P Parameter: Treatment Value: Drought vs. No Drought
tggagaaacgcgacaaaaccaatcgtcctcttccgatagccacaaaacaaaaatcagacaagaagaaagaagaacgtttcttctaacagatagagattacaatcaaattgactcttaatttctcaattccgtatctctcatttcatcttcttcttcttctcctttacttaaggatctctggtttctctttctctcctctgtcttatcttctccaaagttacgctttttttcaatgaaaacattttcttgattcctgatttcaaatttcacaatctggatttcgtgtttcgaattcactttgaagaaaaagtttctcaatttcgcctgaaaacccacatgggattggaactaaacactagactgacaagaagaagaagagtaatcatcatcgagtgtttattacgattatgtccttaacgaaatcttcagaatcagttttcactgaagaagaagaagaagattcctttagcggtcgatacacgttatggatcaaagaagcattagaggagcttccacacaatttcacaatcaccgacccgtttatttcgggtcacccgattgttttcgcgagcttagggtttttgaaaatgactggctattcacgagaagaagtgatcggaagaaacggtaaagtttttcaaggacctaagactaatcgaagatcgatcatggagattcgtgaagcgattcgtgaagagagatcagtgcaagtgagcttgttgaattatcgtaaatctgggtctccgttttggatgttgtttcatatgtgtcctgtttttgggaaagatgatggtaaagtcaccaattttgtggcggttcaggtcccgatttcgggacgagaacatcatcggaagaagttgagaaatgtcggagatttgtcgtcggatacttctccgacatttggttcttgtcgaagagaggtttgttttggtaatttcgtgtgtcaggatcgagctttaccagtggaatgtgatgatgatgaacaaggattagaggattgggaacagtgtgaagcgagtgagtccgagaagctgaaagctacggaagctattaacaatgtgttatctatcttagtgcattacagcgagttgagtggtagattagtctgcggaaagcggtactgcttgcgaggagtagattgtctaagctcgtcgttagttatttctctcggtagaatcaaacaaagtttcgtattaaccaatccatgcttaccagacatgcctatcatttatgcgagtgatgcctttttgacactgaccggttacaagagacaggaagtgttgggacaaaactgtagatttctgagtggggttgatactgattcctcagtactatacgagatgaaggaatgcatcttaaagggacaatcatgcacagtgcaaatactaaattacagtaacagaaaagataagagctcattttggaatcttcttcacatctcaccagttcgtaatgcttcaggcaagacagcatattttgtgggtgttcaagtagaagcaagttgtagaaatactgaaattaaagagctgagaccagagacgagacaactgagtgttgtcggtgcggttagagttgcggttagaagctcattgatggtgacatgctaatatacgccagaaagaaaatgcgtcgacttagagaagagtctaaagtgaattggacatacatctttactatatgtataatcatttgacatactacattaatataagtctttattct

SEQ ID NO: 106806 - protein, 399 aa, Arabidopsis thaliana
  peptide (1)..(399): Ceres Seq. ID no. 13620492
  misc_feature (101)..(144): Pfam Name: PAC motif Pfam Description: PAC motif
  misc_feature (1)..(399): Homolog of NCBI NO: 18395411 NR Description: receptor-related protein kinase [Arabidopsis >gi|15010682|gb|AAK74000.1| At2g02710/T20F6.15 [Arabidopsis >gi|16323302|gb|AAL15406.1| At2g02710/T20F6.15 [Arabidopsis
  misc_feature (1)..(399): Homolog of NCBI NO: 30678020 NR Description: receptor-related protein kinase [Arabidopsis >gi|18146960|dbj|BAB83170.1| twin LOV protein 1 [Arabidopsis
  misc_feature (1)..(311): Homolog of NCBI NO: 7487253 NR Description: probable receptor-like protein kinase [imported]
  misc_feature (353)..(395): Homolog of NCBI NO: 7487253 NR Description: probable receptor-like protein kinase [imported]
  misc_feature (250)..(393): Homolog of NCBI NO: 6006310 NR Description: nonphototrophic hypocotyl 1b [Oryza sativa
  misc_feature (5)..(142): Homolog of NCBI NO: 6006310 NR Description: nonphototrophic hypocotyl 1b [Oryza sativa
  misc_feature (12)..(142): Homolog of NCBI NO: 20260484 NR Description: unknown protein [Arabidopsis thaliana]
  misc_feature (250)..(365): Homolog of NCBI NO: 20260484 NR Description: unknown protein [Arabidopsis thaliana]
  misc_feature (12)..(142): Homolog of NCBI NO: 30697015 NR Description: non phototropic hypocotyl 1-related [Arabidopsis
  misc_feature (250)..(365): Homolog of NCBI NO: 30697015 NR Description: non phototropic hypocotyl 1-related [Arabidopsis
MSLTKSSESVFTEEEEEDSFSGRYTLWIKEALEELPHNFTITDPFISGHPIVFASLGFLKMTGYSREEVIGRNGKVFQGPKTNRRSIMEIREAIREERSVQVSLLNYRKSGSPFWMLFHMCPVFGKDDGKVTNFVAVQVPISGREHHRKKLRNVGDLSSDTSPTFGSCRREVCFGNFVCQDRALPVECDDDEQGLEDWEQCEASESEKLKATEAINNVLSILVHYSELSGRLVCGKRYCLRGVDCLSSSLVISLGRIKQSFVLTNPCLPDMPIIYASDAFLTLTGYKRQEVLGQNCRFLSGVDTDSSVLYEMKECILKGQSCTVQILNYSNRKDKSSFWNLLHISPVRNASGKTAYFVGVQVEASCRNTEIKELRPETRQLSVVGAVRVAVRSSLMVTC

SEQ ID NO: 106807 - protein, 339 aa, Arabidopsis thaliana
  peptide (1)..(339): Ceres Seq. ID no. 13620493
  misc_feature (41)..(84): Pfam Name: PAC motif Pfam Description: PAC motif
  misc_feature (1)..(339): Homolog of NCBI NO: 18395411 NR Description: receptor-related protein kinase [Arabidopsis >gi|15010682|gb|AAK74000.1| At2g02710/T20F6.15 [Arabidopsis >gi|16323302|gb|AAL15406.1| At2g02710/T20F6.15 [Arabidopsis
  misc_feature (1)..(339): Homolog of NCBI NO: 30678020 NR Description: receptor-related protein kinase [Arabidopsis >gi|18146960|dbj|BAB83170.1| twin LOV protein 1 [Arabidopsis
  misc_feature (1)..(251): Homolog of NCBI NO: 7487253 NR Description: probable receptor-like protein kinase [imported]
  misc_feature (293)..(335): Homolog of NCBI NO: 7487253 NR Description: probable receptor-like protein kinase [imported]
  misc_feature (190)..(333): Homolog of NCBI NO: 6006310 NR Description: nonphototrophic hypocotyl 1b [Oryza sativa
  misc_feature (1)..(82): Homolog of NCBI NO: 6006310 NR Description: nonphototrophic hypocotyl 1b [Oryza sativa
  misc_feature (1)..(82): Homolog of NCBI NO: 20260484 NR Description: unknown protein [Arabidopsis thaliana]
  misc_feature (190)..(305): Homolog of NCBI NO: 20260484 NR Description: unknown protein [Arabidopsis thaliana]
  misc_feature (1)..(82): Homolog of NCBI NO: 30697015 NR Description: non phototropic hypocotyl 1-related [Arabidopsis
  misc_feature (190)..(305): Homolog of NCBI NO: 30697015 NR Description: non phototropic hypocotyl 1-related [Arabidopsis
MTGYSREEVIGRNGKVFQGPKTNRRSIMEIREAIREERSVQVSLLNYRKSGSPFWMLFHMCPVFGKDDGKVTNFVAVQVPISGREHHRKKLRNVGDLSSDTSPTFGSCRREVCFGNFVCQDRALPVECDDDEQGLEDWEQCEASESEKLKATEAINNVLSILVHYSELSGRLVCGKRYCLRGVDCLSSSLVISLGRIKQSFVLTNPCLPDMPIIYASDAFLTLTGYKRQEVLGQNCRFLSGVDTDSSVLYEMKECILKGQSCTVQILNYSNRKDKSSFWNLLHISPVRNASGKTAYFVGVQVEASCRNTEIKELRPETRQLSVVGAVRVAVRSSLMVTC

SEQ ID NO: 106808 - protein, 312 aa, Arabidopsis thaliana
  peptide (1)..(312): Ceres Seq. ID no. 13620494
  misc_feature (14)..(57): Pfam Name: PAC motif Pfam Description: PAC motif
  misc_feature (1)..(312): Homolog of NCBI NO: 18395411 NR Description: receptor-related protein kinase [Arabidopsis >gi|15010682|gb|AAK74000.1| At2g02710/T20F6.15 [Arabidopsis >gi|16323302|gb|AAL15406.1| At2g02710/T20F6.15 [Arabidopsis
  misc_feature (1)..(312): Homolog of NCBI NO: 30678020 NR Description: receptor-related protein kinase [Arabidopsis >gi|18146960|dbj|BAB83170.1| twin LOV protein 1 [Arabidopsis
  misc_feature (1)..(224): Homolog of NCBI NO: 7487253 NR Description: probable receptor-like protein kinase [imported]
  misc_feature (266)..(308): Homolog of NCBI NO: 7487253 NR Description: probable receptor-like protein kinase [imported]
  misc_feature (163)..(306): Homolog of NCBI NO: 6006310 NR Description: nonphototrophic hypocotyl 1b [Oryza sativa
  misc_feature (1)..(55): Homolog of NCBI NO: 6006310 NR Description: nonphototrophic hypocotyl 1b [Oryza sativa
  misc_feature (1)..(55): Homolog of NCBI NO: 20260484 NR Description: unknown protein [Arabidopsis thaliana]
  misc_feature (163)..(278): Homolog of NCBI NO: 20260484 NR Description: unknown protein [Arabidopsis thaliana]
  misc_feature (1)..(55): Homolog of NCBI NO: 30697015 NR Description: non phototropic hypocotyl 1-related [Arabidopsis
  misc_feature (163)..(278): Homolog of NCBI NO: 30697015 NR Description: non phototropic hypocotyl 1-related [Arabidopsis
MEIREAIREERSVQVSLLNYRKSGSPFWMLFHMCPVFGKDDGKVTNFVAVQVPISGREHHRKKLRNVGDLSSDTSPTFGSCRREVCFGNFVCQDRALPVECDDDEQGLEDWEQCEASESEKLKATEAINNVLSILVHYSELSGRLVCGKRYCLRGVDCLSSSLVISLGRIKQSFVLTNPCLPDMPIIYASDAFLTLTGYKRQEVLGQNCRFLSGVDTDSSVLYEMKECILKGQSCTVQILNYSNRKDKSSFWNLLHISPVRNASGKTAYFVGVQVEASCRNTEIKELRPETRQLSVVGAVRVAVRSSLMVTC

SEQ ID NO: 106809 - DNA, 1541 bp, Arabidopsis thaliana
  misc_feature (1)..(1541): Ceres Seq. ID no. 13620499
  misc_feature: MA Experiment ID: 20001451 Result: Down-regulated in Transcription
  misc_feature: MA Experiment 20001451 PARAMETER Experiment Name: At_Far-red-induction_P Parameter: Age (day) Value: 7
  misc_feature: MA Experiment 20001451 PARAMETER Experiment Name: At_Far-red-induction_P Parameter: Light Value: Far-red vs. White
  misc_feature: MA Experiment 20001451 PARAMETER Experiment Name: At_Far-red-induction_P Parameter: Organism Value: A. thaliana
  misc_feature: MA Experiment 20001451 PARAMETER Experiment Name: At_Far-red-induction_P Parameter: Plant Line Value: Columbia
  misc_feature: MA Experiment 20001451 PARAMETER Experiment Name: At_Far-red-induction_P Parameter: Timepoint (hr) Value: 24
  misc_feature: MA Experiment 20001451 PARAMETER Experiment Name: At_Far-red-induction_P Parameter: Tissue Value: Whole Plant
atggtgagctagagatcttcgcttcagtgtttaaggattagataatgttaccggagagaagaagcacggtgttttcttcttcttcttcatatctgaatccatctggtcacaatgataattcttttttacttcttcggagaggcaaaaagtttggtcgtattgtgaaattgaagctttcacatttctttttgttctttgtgtcactctttttcttctcttgcatgttctctggccataaactactctttcatggttctgagttcttacctcattttgagcaaaacccttacatgaacagtcatatgttggtttcatcggagattgatataggattaaacaaatccaacatcgaaagaccacctggaagcaagaagagaaccaagcatttaccttgtgaagttccacttgctgaatctgctgatcgcatacttgagcctcaggattatttgaatttcactcggttttcgttaggctttgtagagactgagacatatgataaccctaggtttggagggcatcaaacactcagtgaaagagagagatcttactctgcagtaaatcagacaattcactgtggttttgtcaaaggaactggatttgatttgagcgaaaaggatagggcctatatgaagaactgtgtagtctctgtgtcttcttgcatttttggaagctctgattttctaaggagacctgcaaccaaaaagattagtgagttttcgaagcgaaatgtttgctttgtgatgtttgttgatgagcaaacgctatcgaaactggctagtgaagggcatgttcctgacaagcaaggatttgttggtttgtggaaaactgtagtagtgagcaatttgccttataatgatatgcgaaagactggcaaggttccgaaatttctgtcacaccgcctttttccttcttctaggtattcaatttggctagatagtaagatgagactcactacagatcctatgctgatcattgacttcttcttatggagaacaaaatcagaattcgctatctccaaccattatgaccggcattgtgtgtgggatgaagtgttacagaacaaacggctgaataagtacaaccattcggccattgatgaacagtttatgttttaccgatcagatggtctcaagaaatttgatccttcagatcctaattctcctcttccaagttatgtaccggaaggttcttttattgtaagggctcatacaccaatgtcaaacctcttcacttgcctttggttcaatgaagttgatcggtttacctcacgagatcagttgagttttgcatacacataccttaaacttcagagactgaattcggatagacccttgcgcctaaacatgttcaaggattgtgagcgtcgagcattaactaagctcttccaccatcgcgtagattcatcgcctccttcacctcctacttgattgattaagtatagatagtgttcttatgtttctacaatttttgtacttttctcctctttatacttttagtctaactttgaaggagatgaaacatggaagaggaacctaattgac

SEQ ID NO: 106810 - protein, 460 aa, Arabidopsis thaliana
  peptide (1)..(460): Ceres Seq. ID no. 13620500
  misc_feature (141)..(449): Pfam Name: Protein of unknown function (DUF616) Pfam Description: Protein of unknown function (DUF616)
  misc_feature (83)..(460): Homolog of NCBI NO: 15227062 NR Description: hypothetical protein [Arabidopsis thaliana]
  misc_feature (117)..(452): Homolog of NCBI NO: 25403429 NR Description: protein F12K21.12 [imported] - Arabidopsis >gi|8778248|gb|AAF79257.1|AC023279_6 F12K21.12 [Arabidopsis
  misc_feature (111)..(450): Homolog of NCBI NO: 15233955 NR Description: expressed protein [Arabidopsis thaliana]
  misc_feature (183)..(436): Homolog of NCBI NO: 15218687 NR Description: hypothetical protein [Arabidopsis thaliana]
  misc_feature (260)..(460): Homolog of NCBI NO: 34905662 NR Description: P0475H04.14 [Oryza sativa (japonica
  misc_feature (105)..(277): Homolog of NCBI NO: 34905662 NR Description: P0475H04.14 [Oryza sativa (japonica
  misc_feature (98)..(452): Homolog of NCBI NO: 15217874 NR Description: expressed protein [Arabidopsis thaliana]
  misc_feature (98)..(452): Homolog of NCBI NO: 17064856 NR Description: Unknown protein [Arabidopsis thaliana]
  misc_feature (104)..(459): Homolog of NCBI NO: 25405617 NR Description: hypothetical protein F8L10.10 [imported] - thaliana >gi|9454542|gb|AAF87865.1|AC022520_9 Unknown protein
  misc_feature (104)..(459): Homolog of NCBI NO: 30695403 NR Description: expressed protein [Arabidopsis thaliana]
MLPERRSTVFSSSSSYLNPSGHNDNSFLLLRRGKKFGRIVKLKLSHFFLFFVSLFFFSCMFSGHKLLFHGSEFLPHFEQNPYMNSHMLVSSEIDIGLNKSNIERPPGSKKRTKHLPCEVPLAESADRILEPQDYLNFTRFSLGFVETETYDNPRFGGHQTLSERERSYSAVNQTIHCGFVKGTGFDLSEKDRAYMKNCVVSVSSCIFGSSDFLRRPATKKISEFSKRNVCFVMFVDEQTLSKLASEGHVPDKQGFVGLWKTVVVSNLPYNDMRKTGKVPKFLSHRLFPSSRYSIWLDSKMRLTTDPMLIIDFFLWRTKSEFAISNHYDRHCVWDEVLQNKRLNKYNHSAIDEQFMFYRSDGLKKFDPSDPNSPLPSYVPEGSFIVRAHTPMSNLFTCLWFNEVDRFTSRDQLSFAYTYLKLQRLNSDRPLRLNMFKDCERRALTKLFHHRVDSSPPSPPT

SEQ ID NO: 106811 - protein, 401 aa, Arabidopsis thaliana
  peptide (1)..(401): Ceres Seq. ID no. 13620501
  misc_feature (82)..(390): Pfam Name: Protein of unknown function (DUF616) Pfam Description: Protein of unknown function (DUF616)
  misc_feature (24)..(401): Homolog of NCBI NO: 15227062 NR Description: hypothetical protein [Arabidopsis thaliana]
  misc_feature (58)..(393): Homolog of NCBI NO: 25403429 NR Description: protein F12K21.12 [imported] - Arabidopsis >gi|8778248|gb|AAF79257.1|AC023279_6 F12K21.12 [Arabidopsis
  misc_feature (52)..(391): Homolog of NCBI NO: 15233955 NR Description: expressed protein [Arabidopsis thaliana]
  misc_feature (124)..(377): Homolog of NCBI NO: 15218687 NR Description: hypothetical protein [Arabidopsis thaliana]
  misc_feature (201)..(401): Homolog of NCBI NO: 34905662 NR Description: P0475H04.14 [Oryza sativa (japonica
  misc_feature (46)..(218): Homolog of NCBI NO: 34905662 NR Description: P0475H04.14 [Oryza sativa (japonica
  misc_feature (39)..(393): Homolog of NCBI NO: 15217874 NR Description: expressed protein [Arabidopsis thaliana]
  misc_feature (39)..(393): Homolog of NCBI NO: 17064856 NR Description: Unknown protein [Arabidopsis thaliana]
  misc_feature (45)..(400): Homolog of NCBI NO: 25405617 NR Description: hypothetical protein F8L10.10 [imported] - thaliana >gi|9454542|gb|AAF87865.1|AC022520_9 Unknown protein
  misc_feature (45)..(400): Homolog of NCBI NO: 30695403 NR Description: expressed protein [Arabidopsis thaliana]
MFSGHKLLFHGSEFLPHFEQNPYMNSHMLVSSEIDIGLNKSNIERPPGSKKRTKHLPCEVPLAESADRILEPQDYLNFTRFSLGFVETETYDNPRFGGHQTLSERERSYSAVNQTIHCGFVKGTGFDLSEKDRAYMKNCVVSVSSCIFGSSDFLRRPATKKISEFSKRNVCFVMFVDEQTLSKLASEGHVPDKQGFVGLWKTVVVSNLPYNDMRKTGKVPKFLSHRLFPSSRYSIWLDSKMRLTTDPMLIIDFFLWRTKSEFAISNHYDRHCVWDEVLQNKRLNKYNHSAIDEQFMFYRSDGLKKFDPSDPNSPLPSYVPEGSFIVRAHTPMSNLFTCLWFNEVDRFTSRDQLSFAYTYLKLQRLNSDRPLRLNMFKDCERRALTKLFHHRVDSSPPSPPT

SEQ ID NO: 106812 - protein, 378 aa, Arabidopsis thaliana
  peptide (1)..(378): Ceres Seq. ID no. 13620502
  misc_feature (59)..(367): Pfam Name: Protein of unknown function (DUF616) Pfam Description: Protein of unknown function (DUF616)
  misc_feature (1)..(378): Homolog of NCBI NO: 15227062 NR Description: hypothetical protein [Arabidopsis thaliana]
  misc_feature (35)..(370): Homolog of NCBI NO: 25403429 NR Description: protein F12K21.12 [imported] - Arabidopsis >gi|8778248|gb|AAF79257.1|AC023279_6 F12K21.12 [Arabidopsis
  misc_feature (29)..(368): Homolog of NCBI NO: 15233955 NR Description: expressed protein [Arabidopsis thaliana]
  misc_feature (101)..(354): Homolog of NCBI NO: 15218687 NR Description: hypothetical protein [Arabidopsis thaliana]
  misc_feature (178)..(378): Homolog of NCBI NO: 34905662 NR Description: P0475H04.14 [Oryza sativa (japonica
  misc_feature (23)..(195): Homolog of NCBI NO: 34905662 NR Description: P0475H04.14 [Oryza sativa (japonica
  misc_feature (16)..(370): Homolog of NCBI NO: 15217874 NR Description: expressed protein [Arabidopsis thaliana]
  misc_feature (16)..(370): Homolog of NCBI NO: 17064856 NR Description: Unknown protein [Arabidopsis thaliana]
  misc_feature (22)..(377): Homolog of NCBI NO: 25405617 NR Description: hypothetical protein F8L10.10 [imported] - thaliana >gi|9454542|gb|AAF87865.1|AC022520_9 Unknown protein
  misc_feature (22)..(377): Homolog of NCBI NO: 30695403 NR Description: expressed protein [Arabidopsis thaliana]
MNSHMLVSSEIDIGLNKSNIERPPGSKKRTKHLPCEVPLAESADRILEPQDYLNFTRFSLGFVETETYDNPRFGGHQTLSERERSYSAVNQTIHCGFVKGTGFDLSEKDRAYMKNCVVSVSSCIFGSSDFLRRPATKKISEFSKRNVCFVMFVDEQTLSKLASEGHVPDKQGFVGLWKTVVVSNLPYNDMRKTGKVPKFLSHRLFPSSRYSIWLDSKMRLTTDPMLIIDFFLWRTKSEFAISNHYDRHCVWDEVLQNKRLNKYNHSAIDEQFMFYRSDGLKKFDPSDPNSPLPSYVPEGSFIVRAHTPMSNLFTCLWFNEVDRFTSRDQLSFAYTYLKLQRLNSDRPLRLNMFKDCERRALTKLFHHRVDSSPPSPPT

SEQ ID NO: 106813 - DNA, 2171 bp, Arabidopsis thaliana
  misc_feature (1)..(2171): Ceres Seq. ID no. 13620515
  misc_feature: MA Experiment ID: 20000307 Result: Down-regulated in Transcription
  misc_feature: MA Experiment 20000307 PARAMETER Experiment Name: At_Germinating_Seeds_Sub_P Parameter: Age (hr) Value: 24 vs. 0
  misc_feature: MA Experiment 20000307 PARAMETER Experiment Name: At_Germinating_Seeds_Sub_P Parameter: Organism Value: A. thaliana
  misc_feature: MA Experiment 20000307 PARAMETER Experiment Name: At_Germinating_Seeds_Sub_P Parameter: Plant Line Value: WS
  misc_feature: MA Experiment 20000307 PARAMETER Experiment Name: At_Germinating_Seeds_Sub_P Parameter: Tissue Value: Germinating Seeds
tggttttccatagttttagtggagacgatgaagtcagtaatgtcaaagatcaaactttttagaccagtcgtcacgttacgttgttcttacagctccacagatcaaactcttcttcttagcgaatttaccagactctgttaccagagagaccttcccagagctatgaaagcaatggattcattgcaaagtcatggtctttgggcagactctgcaacttattctgagcttatcaagtgttgtatatctaatagagctgttcatgaagggaatctcatttgtcgtcatttatacttcaatggtcatcgaccaatgatgtttctggttaatgttctgatcaatatgtatgtaaaattcaatcttttgaatgatgctcaccaactgttcgatcaaatgcctcaaaggaatgttatttcttggactacgatgatttctgcttattctaagtgtaagattcatcaaaaggctttggagcttttggttttgatgttgagagataatgtgaggcctaatgtgtatacttactcttctgttttgagatcttgcaatggtatgtctgatgttagaatgcttcattgtgggattattaaggaggggttggagtctgatgtttttgttaggagtgctttgattgatgtgtttgctaaactgggtgagccggaggatgctctttcggttttcgatgaaatggttacaggtgatgcgattgtttggaactcgatcattggtgggtttgctcagaatagtagaagcgatgtagctttggagctttttaagaggatgaagagagctggtttcattgcggagcaggctacgttgactagcgtattgagggcttgtactggtttggctctgttggagcttgggatgcaagctcatgttcatatcgtgaaatatgaccaagacttgatactcaacaacgcactcgtggacatgtattgcaagtgtgggagtttggaggatgctctccgtgtgttcaaccagatgaaggagagagatgtgattacatggagcactatgatttcagggttggcacagaatggttatagccaggaggcactgaagttgtttgagcgtatgaaatcttctgggacgaagccaaactacattacgattgtcggggttctctttgcttgcagccacgcagggctcctggaagatggttggtactacttcagatcaatgaagaaactttatggaatcgatccagtgagggaacattatggttgcatgattgatctgcttggaaaagctggaaagctcgacgatgcagtgaagctgttaaatgaaatggagtgtgagccagatgctgtgacatggagaactttgcttggtgcttgtagggttcaaagaaacatggtgctagcggagtatgcagctaaaaaggtcatagcactcgatcccgaggatgcaggaacttacacactattgtctaacatatacgcaaactctcagaaatgggacagtgttgaagaaattcggacacgaatgagagacagaggaatcaagaaagaacctggatgcagctggatcgaagtaaacaaacagattcatgcttttataattggagacaattctcacccacagatagttgaagtcagtaagaagctgaaccaattgatccatagactcactggtattggctatgttcctgaaacaaactttgtgctacaagatcttgaaggtgaacaaatggaagattcacttagacatcacagtgagaaactggctttagcctttggcttgatgacattacctattgagaaagtcattaggataagaaagaatctgagaatatgtggggattgtcatgtgttttgcaagctcgcatcgaagcttgaaatccgcagtatcgttatacgagatccgatccgttaccatcatttccaggatggcaaatgttcttgtggtgactactggtaacaatcagatgactttagattactatgaaacagagtataagatggtttagaagattgtttctctgcaagttttcttcatcaaattttttgattagtgaatcatttttgcttatgaagaagctcattgatttgccaaattttcctgataggattttgtaacatttgcaaaattgaatatgtatgataaaattggtcattggagtatggagactcactaatttagtaatttgtgataaaaaagagtttcttcag

SEQ ID NO: 106814 - protein, 639 aa, Arabidopsis thaliana
  peptide (1)..(639): Ceres Seq. ID no. 13620516
  misc_feature (405)..(439): Pfam Name: PPR repeat Pfam Description: PPR repeat
  misc_feature (13)..(639): Homolog of NCBI NO: 15229561 NR Description: pentatricopeptide (PPR) repeat-containing protein thaliana] >gi|9294669|dbj|BAB03018.1| contains similarity to
  misc_feature (58)..(638): Homolog of NCBI NO: 37534806 NR Description: putative PPR-repeat containing protein [Oryza
  misc_feature (109)..(639): Homolog of NCBI NO: 15235472 NR Description: pentatricopeptide (PPR) repeat-containing protein
  misc_feature (45)..(158): Homolog of NCBI NO: 15235472 NR Description: pentatricopeptide (PPR) repeat-containing protein
  misc_feature (126)..(639): Homolog of NCBI NO: 22093801 NR Description: hypothetical protein~predicted by
  misc_feature (53)..(639): Homolog of NCBI NO: 34915012 NR Description: P0458A05.10 [Oryza sativa (japonica
  misc_feature (50)..(639): Homolog of NCBI NO: 15236324 NR Description: pentatricopeptide (PPR) repeat-containing protein
  misc_feature (23)..(639): Homolog of NCBI NO: 9279668 NR Description: selenium-binding protein-like [Arabidopsis
  misc_feature (23)..(639): Homolog of NCBI NO: 15231617 NR Description: expressed protein [Arabidopsis thaliana]
  misc_feature (121)..(639): Homolog of NCBI NO: 15229426 NR Description: pentatricopeptide (PPR) repeat-containing protein thaliana] >gi|11994318|dbj|BAB02277.1|
WFSIVLVETMKSVMSKIKLFRPVVTLRCSYSSTDQTLLLSEFTRLCYQRDLPRAMKAMDSLQSHGLWADSATYSELIKCCISNRAVHEGNLICRHLYFNGHRPMMFLVNVLINMYVKFNLLNDAHQLFDQMPQRNVISWTTMISAYSKCKIHQKALELLVLMLRDNVRPNVYTYSSVLRSCNGMSDVRMLHCGIIKEGLESDVFVRSALIDVFAKLGEPEDALSVFDEMVTGDAIVWNSIIGGFAQNSRSDVALELFKRMKRAGFIAEQATLTSVLRACTGLALLELGMQAHVHIVKYDQDLILNNALVDMYCKCGSLEDALRVFNQMKERDVITWSTMISGLAQNGYSQEALKLFERMKSSGTKPNYITIVGVLFACSHAGLLEDGWYYFRSMKKLYGIDPVREHYGCMIDLLGKAGKLDDAVKLLNEMECEPDAVTWRTLLGACRVQRNMVLAEYAAKKVIALDPEDAGTYTLLSNIYANSQKWDSVEEIRTRMRDRGIKKEPGCSWIEVNKQIHAFIIGDNSHPQIVEVSKKLNQLIHRLTGIGYVPETNFVLQDLEGEQMEDSLRHHSEKLALAFGLMTLPIEKVIRIRKNLRICGDCHVFCKLASKLEIRSIVIRDPIRYHHFQDGKCSCGDYW

SEQ ID NO: 106815 - protein, 630 aa, Arabidopsis thaliana
  peptide (1)..(630): Ceres Seq. ID no. 13620517
  misc_feature (396)..(430): Pfam Name: PPR repeat Pfam Description: PPR repeat
  misc_feature (4)..(630): Homolog of NCBI NO: 15229561 NR Description: pentatricopeptide (PPR) repeat-containing protein thaliana] >gi|9294669|dbj|BAB03018.1| contains similarity to
  misc_feature (49)..(629): Homolog of NCBI NO: 37534806 NR Description: putative PPR-repeat containing protein [Oryza
  misc_feature (100)..(630): Homolog of NCBI NO: 15235472 NR Description: pentatricopeptide (PPR) repeat-containing protein
  misc_feature (36)..(149): Homolog of NCBI NO: 15235472 NR Description: pentatricopeptide (PPR) repeat-containing protein
  misc_feature (117)..(630): Homolog of NCBI NO: 22093801 NR Description: hypothetical protein~predicted by
  misc_feature (44)..(630): Homolog of NCBI NO: 34915012 NR Description: P0458A05.10 [Oryza sativa (japonica
  misc_feature (41)..(630): Homolog of NCBI NO: 15236324 NR Description: pentatricopeptide (PPR) repeat-containing protein
  misc_feature (14)..(630): Homolog of NCBI NO: 9279668 NR Description: selenium-binding protein-like [Arabidopsis
  misc_feature (14)..(630): Homolog of NCBI NO: 15231617 NR Description: expressed protein [Arabidopsis thaliana]
  misc_feature (112)..(630): Homolog of NCBI NO: 15229426 NR Description: pentatricopeptide (PPR) repeat-containing protein thaliana] >gi|11994318|dbj|BAB02277.1|
MKSVMSKIKLFRPVVTLRCSYSSTDQTLLLSEFTRLCYQRDLPRAMKAMDSLQSHGLWADSATYSELIKCCISNRAVHEGNLICRHLYFNGHRPMMFLVNVLINMYVKFNLLNDAHQLFDQMPQRNVISWTTMISAYSKCKIHQKALELLVLMLRDNVRPNVYTYSSVLRSCNGMSDVRMLHCGIIKEGLESDVFVRSALIDVFAKLGEPEDALSVFDEMVTGDAIVWNSIIGGFAQNSRSDVALELFKRMKRAGFIAEQATLTSVLRACTGLALLELGMQAHVHIVKYDQDLILNNALVDMYCKCGSLEDALRVFNQMKERDVITWSTMISGLAQNGYSQEALKLFERMKSSGTKPNYITIVGVLFACSHAGLLEDGWYYFRSMKKLYGIDPVREHYGCMIDLLGKAGKLDDAVKLLNEMECEPDAVTWRTLLGACRVQRNMVLAEYAAKKVIALDPEDAGTYTLLSNIYANSQKWDSVEEIRTRMRDRGIKKEPGCSWIEVNKQIHAFIIGDNSHPQIVEVSKKLNQLIHRLTGIGYVPETNFVLQDLEGEQMEDSLRHHSEKLALAFGLMTLPIEKVIRIRKNLRICGDCHVFCKLASKLEIRSIVIRDPIRYHHFQDGKCSCGDYW

SEQ ID NO: 106816 - protein, 626 aa, Arabidopsis thaliana
  peptide (1)..(626): Ceres Seq. ID no. 13620518
  misc_feature (392)..(426): Pfam Name: PPR repeat Pfam Description: PPR repeat
  misc_feature (1)..(626): Homolog of NCBI NO: 15229561 NR Description: pentatricopeptide (PPR) repeat-containing protein thaliana] >gi|9294669|dbj|BAB03018.1| contains similarity to
  misc_feature (45)..(625): Homolog of NCBI NO: 37534806 NR Description: putative PPR-repeat containing protein [Oryza
  misc_feature (96)..(626): Homolog of NCBI NO: 15235472 NR Description: pentatricopeptide (PPR) repeat-containing protein
  misc_feature (32)..(145): Homolog of NCBI NO: 15235472 NR Description: pentatricopeptide (PPR) repeat-containing protein
  misc_feature (113)..(626): Homolog of NCBI NO: 22093801 NR Description: hypothetical protein~predicted by
  misc_feature (40)..(626): Homolog of NCBI NO: 34915012 NR Description: P0458A05.10 [Oryza sativa (japonica
  misc_feature (37)..(626): Homolog of NCBI NO: 15236324 NR Description: pentatricopeptide (PPR) repeat-containing protein
  misc_feature (10)..(626): Homolog of NCBI NO: 9279668 NR Description: selenium-binding protein-like [Arabidopsis
  misc_feature (10)..(626): Homolog of NCBI NO: 15231617 NR Description: expressed protein [Arabidopsis thaliana]
  misc_feature (108)..(626): Homolog of NCBI NO: 15229426 NR Description: pentatricopeptide (PPR) repeat-containing protein thaliana] >gi|11994318|dbj|BAB02277.1|
MSKIKLFRPVVTLRCSYSSTDQTLLLSEFTRLCYQRDLPRAMKAMDSLQSHGLWADSATYSELIKCCISNRAVHEGNLICRHLYFNGHRPMMFLVNVLINMYVKFNLLNDAHQLFDQMPQRNVISWTTMISAYSKCKIHQKALELLVLMLRDNVRPNVYTYSSVLRSCNGMSDVRMLHCGIIKEGLESDVFVRSALIDVFAKLGEPEDALSVFDEMVTGDAIVWNSIIGGFAQNSRSDVALELFKRMKRAGFIAEQATLTSVLRACTGLALLELGMQAHVHIVKYDQDLILNNALVDMYCKCGSLEDALRVFNQMKERDVITWSTMISGLAQNGYSQEALKLFERMKSSGTKPNYITIVGVLFACSHAGLLEDGWYYFRSMKKLYGIDPVREHYGCMIDLLGKAGKLDDAVKLLNEMECEPDAVTWRTLLGACRVQRNMVLAEYAAKKVIALDPEDAGTYTLLSNIYANSQKWDSVEEIRTRMRDRGIKKEPGCSWIEVNKQIHAFIIGDNSHPQIVEVSKKLNQLIHRLTGIGYVPETNFVLQDLEGEQMEDSLRHHSEKLALAFGLMTLPIEKVIRIRKNLRICGDCHVFCKLASKLEIRSIVIRDPIRYHHFQDGKCSCGDYW

SEQ ID NO: 106817 - DNA, 1271 bp, Arabidopsis thaliana
  misc_feature (1)..(1271): Ceres Seq. ID no. 13620539
  misc_feature: MA Experiment ID: 20000452 Result: Up-regulated in Transcription
  misc_feature: MA Experiment 20000452 PARAMETER Experiment Name: At_CS6879_Shoots-Roots_P Parameter: Age (day) Value: 14
  misc_feature: MA Experiment 20000452 PARAMETER Experiment Name: At_CS6879_Shoots-Roots_P Parameter: Organism Value: A. thaliana
  misc_feature: MA Experiment 20000452 PARAMETER Experiment Name: At_CS6879_Shoots-Roots_P Parameter: Plant Line Value: CS6879 vs. WS
  misc_feature: MA Experiment 20000452 PARAMETER Experiment Name: At_CS6879_Shoots-Roots_P Parameter: Tissue Value: Shoots
  misc_feature: MA Experiment ID: 20000573 Result: Up-regulated in Transcription
  misc_feature: MA Experiment 20000573 PARAMETER Experiment Name: At_100uM_ABA_Mutants__P Parameter: Organism Value: A. thaliana
  misc_feature: MA Experiment 20000573 PARAMETER Experiment Name: At_100uM_ABA_Mutants__P Parameter: Plant Line Value: CS22 vs. Ler wt
  misc_feature: MA Experiment 20000573 PARAMETER Experiment Name: At_100uM_ABA_Mutants__P Parameter: Timepoint (hr) Value: N/A
  misc_feature: MA Experiment 20000573 PARAMETER Experiment Name: At_100uM_ABA_Mutants__P Parameter: Tissue Value: Whole Plant
  misc_feature: MA Experiment 20000573 PARAMETER Experiment Name: At_100uM_ABA_Mutants__P Parameter: Treatment Value: None
  misc_feature: MA Experiment ID: 20000574 Result: Up-regulated in Transcription
  misc_feature: MA Experiment 20000574 PARAMETER Experiment Name: At_100uM_ABA_Mutants__P Parameter: Organism Value: A. thaliana
  misc_feature: MA Experiment 20000574 PARAMETER Experiment Name: At_100uM_ABA_Mutants__P Parameter: Plant Line Value: CS23 vs. Ler wt
  misc_feature: MA Experiment 20000574 PARAMETER Experiment Name: At_100uM_ABA_Mutants__P Parameter: Timepoint (hr) Value: N/A
  misc_feature: MA Experiment 20000574 PARAMETER Experiment Name: At_100uM_ABA_Mutants__P Parameter: Tissue Value: Whole Plant
  misc_feature: MA Experiment 20000574 PARAMETER Experiment Name: At_100uM_ABA_Mutants__P Parameter: Treatment Value: None
ctgtttcagtttggtaattaggttatcttataaagctaatccttctctcacactgacaatcgtcgttatcaaggtgatttctttctctgcgtcaaacatcgcttaccctcttgattgattcctccaatcttcttcgtgtggtttcacaggattgaaatgagttcgatctctggattggtggaagatgaaatcagttcgtttttcgaatcgtctccacctctgaagaacaaggaagagatcgtagccaatcttaatcagttcattgagctgaattcttcgtgtcaaggagggatgaggaggattgtatgtgtgacttcaggtggaactacagttccattggagcaacgatgtgtaagatacattgataatttcagctctggaaatagaggtgctgcttctactgagaatttcgtcaaggctggatatgctgtgatatttctctataggaggggaacttgtcaaccgtattgccggtatcttcctgatgatccattccttgaatgttttgagtttccagatgccaaaaacattcaagttcatgggtcacattcaggagctgtgaagatggctgttatggaccagcaagctgcagttgcagaaggtcgcttgcttaaactcccattctcaaccatatatgaatatctccagatgttgcggttgattgctacgatattgaaagatgtcggtccatgttcgatgttttatcttgctgctgctgtatctgacttctatgtgccatggttaagcatggcaagaacagagcacaaaatagaatcaggatctggtcctttggacataagactagctcaagtccctaaaatgctttcaatcttgagatcaaattgggctccaaaggctttctgcatatcattcaagcttgagacagactcaaagattttgctagagaaagctacaaaggctttacaaaaatacaaagtgcacgcagttgtagcaaatgaactattaacgcgtaaggaggaagttgtggttgtttcaagtagcggtaatgttgtggtgagacgtgatagcaataagccggaatctatcgtagaagataatctcattcgtctcctcgtagatcgacattcaacatacatcaaagaatctctcacttgatccccaaattcttctacgtcaagaaaagttccaagtgttcgatgtgggatacgtgtaattgtgtatgagtgatgacttggaccataaattactcaaataattttcacactttcttatgtttttgacatgttgggaatatatgaatcctagaaatc

SEQ ID NO: 106818 - protein, 319 aa, Arabidopsis thaliana
  peptide (1)..(319): Ceres Seq. ID no. 13620540
  misc_feature (43)..(291): Pfam Name: DNA / pantothenate metabolism flavoprotein Pfam Description: DNA / pantothenate metabolism flavoprotein
  misc_feature (1)..(319): Homolog of NCBI NO: 30682728 NR Description: expressed protein [Arabidopsis thaliana]
  misc_feature (127)..(319): Homolog of NCBI NO: 8778623 NR Description: F5O11.7 [Arabidopsis thaliana]
  misc_feature (1)..(98): Homolog of NCBI NO: 8778623 NR Description: F5O11.7 [Arabidopsis thaliana]
  misc_feature (148)..(317): Homolog of NCBI NO: 15241677 NR Description: hypothetical protein [Arabidopsis thaliana]
  misc_feature (26)..(126): Homolog of NCBI NO: 15241677 NR Description: hypothetical protein [Arabidopsis thaliana]
  misc_feature (11)..(316): Homolog of NCBI NO: 40253297 NR Description: putative Chain A, Crystal Structure Of
  misc_feature (47)..(314): Homolog of NCBI NO: 34810081 NR Description: Chain A, Crystal Structure Of Synthetase >gi|34810082|pdb|1P9O|B Chain B, Crystal Structure Of
  misc_feature (47)..(314): Homolog of NCBI NO: 34870890 NR Description: similar to RIKEN cDNA 6330579B17 gene [Rattus
  misc_feature (47)..(314): Homolog of NCBI NO: 18255582 NR Description: RIKEN cDNA 6330579B17 gene [Mus musculus]
  misc_feature (10)..(316): Homolog of NCBI NO: 19075572 NR Description: conserved hypothetical protein
MSSISGLVEDEISSFFESSPPLKNKEEIVANLNQFIELNSSCQGGMRRIVCVTSGGTTVPLEQRCVRYIDNFSSGNRGAASTENFVKAGYAVIFLYRRGTCQPYCRYLPDDPFLECFEFPDAKNIQVHGSHSGAVKMAVMDQQAAVAEGRLLKLPFSTIYEYLQMLRLIATILKDVGPCSMFYLAAAVSDFYVPWLSMARTEHKIESGSGPLDIRLAQVPKMLSILRSNWAPKAFCISFKLETDSKILLEKATKALQKYKVHAVVANELLTRKEEVVVVSSSGNVVVRRDSNKPESIVEDNLIRLLVDRHSTYIKESLT

SEQ ID NO: 106819 - protein, 274 aa, Arabidopsis thaliana
  peptide (1)..(274): Ceres Seq. ID no. 13620541
  misc_feature (1)..(246): Pfam Name: DNA / pantothenate metabolism flavoprotein Pfam Description: DNA / pantothenate metabolism flavoprotein
  misc_feature (1)..(274): Homolog of NCBI NO: 30682728 NR Description: expressed protein [Arabidopsis thaliana]
  misc_feature (82)..(274): Homolog of NCBI NO: 8778623 NR Description: F5O11.7 [Arabidopsis thaliana]
  misc_feature (1)..(53): Homolog of NCBI NO: 8778623 NR Description: F5O11.7 [Arabidopsis thaliana]
  misc_feature (103)..(272): Homolog of NCBI NO: 15241677 NR Description: hypothetical protein [Arabidopsis thaliana]
  misc_feature (1)..(81): Homolog of NCBI NO: 15241677 NR Description: hypothetical protein [Arabidopsis thaliana]
  misc_feature (1)..(271): Homolog of NCBI NO: 40253297 NR Description: putative Chain A, Crystal Structure Of
  misc_feature (2)..(269): Homolog of NCBI NO: 34810081 NR Description: Chain A, Crystal Structure Of Synthetase >gi|34810082|pdb|1P9O|B Chain B, Crystal Structure Of
  misc_feature (2)..(269): Homolog of NCBI NO: 34870890 NR Description: similar to RIKEN cDNA 6330579B17 gene [Rattus
  misc_feature (2)..(269): Homolog of NCBI NO: 18255582 NR Description: RIKEN cDNA 6330579B17 gene [Mus musculus]
  misc_feature (1)..(271): Homolog of NCBI NO: 19075572 NR Description: conserved hypothetical protein
MRRIVCVTSGGTTVPLEQRCVRYIDNFSSGNRGAASTENFVKAGYAVIFLYRRGTCQPYCRYLPDDPFLECFEFPDAKNIQVHGSHSGAVKMAVMDQQAAVAEGRLLKLPFSTIYEYLQMLRLIATILKDVGPCSMFYLAAAVSDFYVPWLSMARTEHKIESGSGPLDIRLAQVPKMLSILRSNWAPKAFCISFKLETDSKILLEKATKALQKYKVHAVVANELLTRKEEVVVVSSSGNVVVRRDSNKPESIVEDNLIRLLVDRHSTYIKESLT

SEQ ID NO: 106820 - protein, 183 aa, Arabidopsis thaliana
  peptide (1)..(183): Ceres Seq. ID no. 13620542
  misc_feature (1)..(155): Pfam Name: DNA / pantothenate metabolism flavoprotein Pfam Description: DNA / pantothenate metabolism flavoprotein
  misc_feature (1)..(183): Homolog of NCBI NO: 30682728 NR Description: expressed protein [Arabidopsis thaliana]
  misc_feature (1)..(183): Homolog of NCBI NO: 8778623 NR Description: F5O11.7 [Arabidopsis thaliana]
  misc_feature (12)..(181): Homolog of NCBI NO: 15241677 NR Description: hypothetical protein [Arabidopsis thaliana]
  misc_feature (1)..(180): Homolog of NCBI NO: 40253297 NR Description: putative Chain A, Crystal Structure Of
  misc_feature (1)..(178): Homolog of NCBI NO: 34810081 NR Description: Chain A, Crystal Structure Of Synthetase >gi|34810082|pdb|1P9O|B Chain B, Crystal Structure Of
  misc_feature (1)..(178): Homolog of NCBI NO: 34870890 NR Description: similar to RIKEN cDNA 6330579B17 gene [Rattus
  misc_feature (1)..(178): Homolog of NCBI NO: 18255582 NR Description: RIKEN cDNA 6330579B17 gene [Mus musculus]
  misc_feature (1)..(180): Homolog of NCBI NO: 19075572 NR Description: conserved hypothetical protein
  misc_feature (1)..(183): Homolog of NCBI NO: 13385982 NR Description: RIKEN cDNA 6330579B17 [Mus musculus]
  misc_feature (1)..(144): Homolog of NCBI NO: 13375919 NR Description: hypothetical protein FLJ11838 [Homo sapiens]
MAVMDQQAAVAEGRLLKLPFSTIYEYLQMLRLIATILKDVGPCSMFYLAAAVSDFYVPWLSMARTEHKIESGSGPLDIRLAQVPKMLSILRSNWAPKAFCISFKLETDSKILLEKATKALQKYKVHAVVANELLTRKEEVVVVSSSGNVVVRRDSNKPESIVEDNLIRLLVDRHSTYIKESLT

SEQ ID NO: 106821 - DNA, 1484 bp, Arabidopsis thaliana
  misc_feature (1)..(1484): Ceres Seq. ID no. 13620555
  misc_feature: MA Experiment ID: 20000185 Result: Up-regulated in Transcription
  misc_feature: MA Experiment 20000185 PARAMETER Experiment Name: At_Roots__P Parameter: Age (day) Value: 7 vs. 21
  misc_feature: MA Experiment 20000185 PARAMETER Experiment Name: At_Roots__P Parameter: Organism Value: A. thaliana
  misc_feature: MA Experiment 20000185 PARAMETER Experiment Name: At_Roots__P Parameter: Tissue Value: Roots vs. Whole Plant
  misc_feature: MA Experiment ID: 20000439 Result: Up-regulated in Transcription
  misc_feature: MA Experiment 20000439 PARAMETER Experiment Name: At_Roots__P Parameter: Age (day) Value: 14 vs. 21
  misc_feature: MA Experiment 20000439 PARAMETER Experiment Name: At_Roots__P Parameter: Organism Value: A. thaliana
  misc_feature: MA Experiment 20000439 PARAMETER Experiment Name: At_Roots__P Parameter: Tissue Value: Roots vs. Whole Plant
  misc_feature: MA Experiment ID: 20000451 Result: Up-regulated in Transcription
  misc_feature: MA Experiment 20000451 PARAMETER Experiment Name: At_CS6879_Shoots-Roots_P Parameter: Age (day) Value: 14
  misc_feature: MA Experiment 20000451 PARAMETER Experiment Name: At_CS6879_Shoots-Roots_P Parameter: Organism Value: A. thaliana
  misc_feature: MA Experiment 20000451 PARAMETER Experiment Name: At_CS6879_Shoots-Roots_P Parameter: Plant Line Value: CS6879 vs. WS
  misc_feature: MA Experiment 20000451 PARAMETER Experiment Name: At_CS6879_Shoots-Roots_P Parameter: Tissue Value: Roots
  misc_feature: MA Experiment ID: 20000794 Result: Up-regulated in Transcription
  misc_feature: MA Experiment 20000794 PARAMETER Experiment Name: At_Petals_P Parameter: Age (day) Value: 23-25 days
  misc_feature: MA Experiment 20000794 PARAMETER Experiment Name: At_Petals_P Parameter: Plant Line Value: WS
  misc_feature: MA Experiment 20000794 PARAMETER Experiment Name: At_Petals_P Parameter: Tissue Value: Petals vs. Whole plant
  misc_feature: MA Experiment ID: 20001557 Result: Up-regulated in Transcription
  misc_feature: MA Experiment 20001557 PARAMETER Experiment Name: At_Drought_Soil_Dry_P Parameter: Age (day) Value: 27
  misc_feature: MA Experiment 20001557 PARAMETER Experiment Name: At_Drought_Soil_Dry_P Parameter: Organism Value: A. thaliana
  misc_feature: MA Experiment 20001557 PARAMETER Experiment Name: At_Drought_Soil_Dry_P Parameter: Plant Line Value: WS
  misc_feature: MA Experiment 20001557 PARAMETER Experiment Name: At_Drought_Soil_Dry_P Parameter: Post Timepoint (hr) Value: 3
  misc_feature: MA Experiment 20001557 PARAMETER Experiment Name: At_Drought_Soil_Dry_P Parameter: Post-Treatment Value: Re-Water vs. No Drought
  misc_feature: MA Experiment 20001557 PARAMETER Experiment Name: At_Drought_Soil_Dry_P Parameter: Timepoint (day) Value: 13
  misc_feature: MA Experiment 20001557 PARAMETER Experiment Name: At_Drought_Soil_Dry_P Parameter: Treatment Value: Drought vs. No Drought
aaaaagattcgatttttgactgcaaaaaagagaatttctaaaagcaaatcggagagcttcggcgatggcgttatcacgactttcttcacgatccaacactttcctaaagccggcgattaccgccttgccctcctccatccgccgtcatgtttccacagactcatcaccgatcacaatcgaaaccgccgtccctttcacatcgcatctatgtgaatcaccgtcacgctccgtcgagacttcatcggaggagatcttagcctttttccgtgacatggctcggatgaggaggatggagatcgcagcagattctctttacaaggcgaagctgatccgtgggttctgtcatttgtacgatggtcaagaggctttagcggtgggaatggaagcggcgattaccaaaaaagatgcgattatcacatcgtatcgtgatcactgtactttcattggtcgtggtgggaagcttgttgatgctttctctgagcttatggggagaaaaactggttgttctcatggtaaaggaggatctatgcatttctataagaaagatgcttccttttatggtggacatgggattgttggtgctcagattccattgggatgtggtttggcttttgctcagaagtataataaggatgaggctgtgacttttgctttgtatggtgatggtgctgcgaatcagggacagttgtttgaggccttgaacatttcggctttgtgggatttgcctgcgattcttgtttgcgagaataaccattatggaatgggaacggctacatggaggtcggctaagtctccggcttatttcaagcgtggagattatgttcctggcttgaaggtggatggtatggatgcactggctgtgaaacaggcgtgcaagtttgccaaggagcatgctctcaagaatggtcctattatccttgagatggacacttacagataccacggtcactctatgtctgacccaggaagcacttaccgtactcgtgatgaaatctctggcgtgagacaggtgcgtgatccaattgaaagggtgcgaaagttgctcttaactcatgacatagctaccgaaaaagagcttaaggacatggagaaagagataaggaaagaagtagatgacgccgtagctcaggccaaggagagcccgataccagatgcatctgagctattcacaaacatgtacgtgaaagactgcggagttgagtcgtttggagcagacagaaaagaactcaaagtaacacttccatagaatcttgcttcccaaggagatgattggttcaataaatcagaaggcaaggctacacaaatctttttaacttgctaccaaaaatatttctggttttttttttttgtattttcatttcaagtgtaaagccattgcttcaccagtttgccaacttttgtttcccacacttcaatttgacaccaagcaaaagaagcttcggatatcactctgtgagataaagttagagaaataagcagagagt

SEQ ID NO: 106822 - protein, 393 aa, Arabidopsis thaliana; identical to SEQ ID NO: 37473
  peptide (1)..(393): Ceres Seq. ID no. 13620556
  misc_feature (68)..(365): Pfam Name: Dehydrogenase E1 component Pfam Description: Dehydrogenase E1 component
  misc_feature (1)..(393): Homolog of NCBI NO: 15221692 NR Description: pyruvate dehydrogenase E1 alpha subunit thaliana] >gi|7431563|pir||T00648 pyruvate dehydrogenase
  misc_feature (1)..(393): Homolog of NCBI NO: 23306664 NR Description: pyruvate dehydrogenase E1a-like subunit IAR4
  misc_feature (1)..(393): Homolog of NCBI NO: 15218940 NR Description: pyruvate dehydrogenase e1 alpha subunit -related thaliana] >gi|27735220|sp|P52901|ODPA_ARATH Pyruvate
  misc_feature (1)..(393): Homolog of NCBI NO: 13430788 NR Description: putative pyruvate dehydrogenase e1 alpha subunit
  misc_feature (1)..(393): Homolog of NCBI NO: 2117533 NR Description: pyruvate dehydrogenase (lipoamide) (EC 1.2.4.1)
  misc_feature (1)..(393): Homolog of NCBI NO: 1709449 NR Description: Pyruvate dehydrogenase E1 component alpha subunit,
  misc_feature (3)..(393): Homolog of NCBI NO: 28465343 NR Description: pyruvate dehydrogenase E1alpha subunit [Beta
  misc_feature (1)..(393): Homolog of NCBI NO: 1709453 NR Description: Pyruvate dehydrogenase E1 component alpha subunit,
  misc_feature (1)..(393): Homolog of NCBI NO: 3851005 NR Description: pyruvate dehydrogenase E1 alpha subunit [Zea mays]
  misc_feature (3)..(393): Homolog of NCBI NO: 28465345 NR Description: pyruvate dehydrogenase E1 alpha subunit [Beta

SEQ ID NO: 106823 - protein, 324 aa, Arabidopsis thaliana; identical to SEQ ID NO: 37474
  peptide (1)..(324): Ceres Seq. ID no. 13620557
  misc_feature (1)..(296): Pfam Name: Dehydrogenase E1 component Pfam Description: Dehydrogenase E1 component
  misc_feature (1)..(324): Homolog of NCBI NO: 15221692 NR Description: pyruvate dehydrogenase E1 alpha subunit thaliana] >gi|7431563|pir||T00648 pyruvate dehydrogenase
  misc_feature (1)..(324): Homolog of NCBI NO: 23306664 NR Description: pyruvate dehydrogenase E1a-like subunit IAR4
  misc_feature (1)..(324): Homolog of NCBI NO: 15218940 NR Description: pyruvate dehydrogenase e1 alpha subunit -related thaliana] >gi|27735220|sp|P52901|ODPA_ARATH Pyruvate
  misc_feature (1)..(324): Homolog of NCBI NO: 13430788 NR Description: putative pyruvate dehydrogenase e1 alpha subunit
  misc_feature (1)..(324): Homolog of NCBI NO: 2117533 NR Description: pyruvate dehydrogenase (lipoamide) (EC 1.2.4.1)
  misc_feature (1)..(324): Homolog of NCBI NO: 1709449 NR Description: Pyruvate dehydrogenase E1 component alpha subunit,
  misc_feature (1)..(324): Homolog of NCBI NO: 28465343 NR Description: pyruvate dehydrogenase E1alpha subunit [Beta
  misc_feature (1)..(324): Homolog of NCBI NO: 1709453 NR Description: Pyruvate dehydrogenase E1 component alpha subunit,
  misc_feature (1)..(324): Homolog of NCBI NO: 3851005 NR Description: pyruvate dehydrogenase E1 alpha subunit [Zea mays]
  misc_feature (1)..(324): Homolog of NCBI NO: 28465345 NR Description: pyruvate dehydrogenase E1 alpha subunit [Beta

SEQ ID NO: 106824 - protein, 321 aa, Arabidopsis thaliana; identical to SEQ ID NO: 37475
  peptide (1)..(321): Ceres Seq. ID no. 13620558
  misc_feature (1)..(293): Pfam Name: Dehydrogenase E1 component Pfam Description: Dehydrogenase E1 component
  misc_feature (1)..(321): Homolog of NCBI NO: 15221692 NR Description: pyruvate dehydrogenase E1 alpha subunit thaliana] >gi|7431563|pir||T00648 pyruvate dehydrogenase
  misc_feature (1)..(321): Homolog of NCBI NO: 23306664 NR Description: pyruvate dehydrogenase E1a-like subunit IAR4
  misc_feature (1)..(321): Homolog of NCBI NO: 15218940 NR Description: pyruvate dehydrogenase e1 alpha subunit -related thaliana] >gi|27735220|sp|P52901|ODPA_ARATH Pyruvate
  misc_feature (1)..(321): Homolog of NCBI NO: 13430788 NR Description: putative pyruvate dehydrogenase e1 alpha subunit
  misc_feature (1)..(321): Homolog of NCBI NO: 2117533 NR Description: pyruvate dehydrogenase (lipoamide) (EC 1.2.4.1)
  misc_feature (1)..(321): Homolog of NCBI NO: 1709449 NR Description: Pyruvate dehydrogenase E1 component alpha subunit,
  misc_feature (1)..(321): Homolog of NCBI NO: 28465343 NR Description: pyruvate dehydrogenase E1alpha subunit [Beta
  misc_feature (1)..(321): Homolog of NCBI NO: 1709453 NR Description: Pyruvate dehydrogenase E1 component alpha subunit,
  misc_feature (1)..(321): Homolog of NCBI NO: 3851005 NR Description: pyruvate dehydrogenase E1 alpha subunit [Zea mays]
  misc_feature (1)..(321): Homolog of NCBI NO: 28465345 NR Description: pyruvate dehydrogenase E1 alpha subunit [Beta

SEQ ID NO: 106825 - DNA, 1420 bp, Arabidopsis thaliana
  misc_feature (1)..(1420): Ceres Seq. ID no. 13620559
  misc_feature: MA Experiment ID: 20000315 Result: Down-regulated in Transcription
  misc_feature: MA Experiment 20000315 PARAMETER Experiment Name: At_14day_Shoots-Roots_Sub_P Parameter: Age (day) Value: 14
  misc_feature: MA Experiment 20000315 PARAMETER Experiment Name: At_14day_Shoots-Roots_Sub_P Parameter: Organism Value: A. thaliana
  misc_feature: MA Experiment 20000315 PARAMETER Experiment Name: At_14day_Shoots-Roots_Sub_P Parameter: Plant Line Value: WS
  misc_feature: MA Experiment 20000315 PARAMETER Experiment Name: At_14day_Shoots-Roots_Sub_P Parameter: Tissue Value: Shoots vs. Whole Plant
  misc_feature: MA Experiment ID: 20000355 Result: Down-regulated in Transcription
  misc_feature: MA Experiment 20000355 PARAMETER Experiment Name: At_Siliques_Sub_P Parameter: Age (day) Value: 21
  misc_feature: MA Experiment 20000355 PARAMETER Experiment Name: At_Siliques_Sub_P Parameter: Organism Value: A. thaliana
  misc_feature: MA Experiment 20000355 PARAMETER Experiment Name: At_Siliques_Sub_P Parameter: Plant Line Value: WS
  misc_feature: MA Experiment 20000355 PARAMETER Experiment Name: At_Siliques_Sub_P Parameter: Tissue Value: Less Than 5mm Siliques vs. Whole Plant
  misc_feature: MA Experiment ID: 20000440 Result: Down-regulated in Transcription
  misc_feature: MA Experiment 20000440 PARAMETER Experiment Name: At_Closed-Flower__Sub_P Parameter: Tissue Value: Closed Flower vs. Whole Plant
atcgagaaacactaaactgctataatcattacctctcttcgatttctcaaaccctatctggctctctacccatatgcttcagatccgcattaaaaaagatctgctatccgcagtcatctgttcataggaaaagatctggctttacttttagagattatctcagatccagccttttacccaattgaagacgttgaatcaatgagactccccgtcaccgtcaaagccactaagccgtcgtttctcgtcatttggatccgatactcctccgccgcgtcgtcgccgacagtctccttgaatccaagtggacgattacagcaaactctcgcaggatctgtggaagtgaaaggaaaatctctgcactccggtaagttctcgacggtgaagctaaatccggagatcgccggagctggtaggttcttcgagtttcgatccagattcatccctgcgtcgattgaatttgctcaggaatcgcctctttgcacgacgctgttgaaagatgagctcaaaatccgaaccgttgagcatttgttatcagctcttgaggcgaagggagttgataattgcaggattcaaatcgagagcgaaagttccgatgatcgagaagtcgaggtccctatttttgatggatcagctaaagaatgggtcgatgcgatacaaggagttggcataaacgcggctcaaaaccatgatggtgaaagtgtagagaagatggtcgcacatgtgaacaagcctgtgtatgtttgcaagaacgatacttttgttgctgcatttccggctctagagactcggatcacttgtggtatcgacttcccacaggtgcctgctataggctgccaatggttttcttggagacctatccatgagtcttcttttgcaaaggatatcgcatcatcaagaaccttctgtgtctatgaagaggtggagcgtatgcgtgaagcagggctcattaaaggaggttctctggataacgccatagtttcgctgagcatggatggatgaatcctcctctgcggtttgatgatgaagcatgtcgacataagattcttgacctaatcggtgacctctcccttgtttcacggggcggaaatggaggactccccgtggctcacatagtcgcatataaggcgggtcatgcactgcacactgacttagcacgtcaccttaccatggactgaagagtatgtgctcgttgtcaaccatatcccgcaaaagccttgatcgtttctgtttctttttggattcgttatccaaagatggtaccaatgtgggatttttgtttgttcaatggaagatcattactcttgtgaatacagtaaaatttgtaacattaaactattttaggtactaatcatagggacattttaaccgatcaaactgttccaaaaccaaattgaattgaaacttaagttgtagttcaaag

SEQ ID NO: 106826 - protein, 266 aa, Arabidopsis thaliana
  peptide (1)..(266): Ceres Seq. ID no. 13620560
  misc_feature (36)..(266): Pfam Name: UDP-3-O-acyl N-acetylglycosamine deacetylase Pfam Description: UDP-3-O-acyl N-acetylglycosamine deacetylase
  misc_feature (1)..(266): Homolog of NCBI NO: 26451306 NR Description: unknown protein [Arabidopsis thaliana]
  misc_feature (1)..(266): Homolog of NCBI NO: 25518320 NR Description: hypothetical protein F4F7.1 [imported] -
  misc_feature (1)..(266): Homolog of NCBI NO: 30689101 NR Description: expressed protein [Arabidopsis thaliana] F5A9.4 [Arabidopsis thaliana]
  misc_feature (1)..(266): Homolog of NCBI NO: 25518507 NR Description: hypothetical protein F4F7.4 [imported] -
  misc_feature (1)..(266): Homolog of NCBI NO: 15221839 NR Description: F5A9.8 [Arabidopsis thaliana]
  misc_feature (1)..(266): Homolog of NCBI NO: 20453133 NR Description: At1g25190/F4F7_4 [Arabidopsis thaliana]
  misc_feature (1)..(266): Homolog of NCBI NO: 15221809 NR Description: F5A9.18 [Arabidopsis thaliana]
  misc_feature (1)..(179): Homolog of NCBI NO: 15221830 NR Description: F5A9.14 [Arabidopsis thaliana]
  misc_feature (211)..(266): Homolog of NCBI NO: 15221830 NR Description: F5A9.14 [Arabidopsis thaliana]
  misc_feature (20)..(263): Homolog of NCBI NO: 34902272 NR Description: Hypothetical protein [Oryza sativa (japonica group)] >gi|24308613|gb|AAN52736.1| Hypothetical protein [Oryza
MRLPVTVKATKPSFLVIWIRYSSAASSPTVSLNPSGRLQQTLAGSVEVKGKSLHSGKFSTVKLNPEIAGAGRFFEFRSRFIPASIEFAQESPLCTTLLKDELKIRTVEHLLSALEAKGVDNCRIQIESESSDDREVEVPIFDGSAKEWVDAIQGVGINAAQNHDGESVEKMVAHVNKPVYVCKNDTFVAAFPALETRITCGIDFPQVPAIGCQWFSWRPIHESSFAKDIASSRTFCVYEEVERMREAGLIKGGSLDNAIVSLSMDG

SEQ ID NO: 106827 - DNA, 1773 bp, Arabidopsis thaliana
  misc_feature (1)..(1773): Ceres Seq. ID no. 13620576
  misc_feature: MA Experiment ID: 108461 Result: Up-regulated in Transcription
  misc_feature: MA Experiment 108461 PARAMETER Experiment Name: At_Germinating_Seeds_cDNA_P Parameter: Age (day) Value: 1 vs. 0
  misc_feature: MA Experiment 108461 PARAMETER Experiment Name: At_Germinating_Seeds_cDNA_P Parameter: Tissue Value: Germinating Seeds
  misc_feature: MA Experiment ID: 108574 Result: Up-regulated in Transcription
  misc_feature: MA Experiment 108574 PARAMETER Experiment Name: At_Wounding__cDNA_P Parameter: Timepoint (hr) Value: 1
  misc_feature: MA Experiment 108574 PARAMETER Experiment Name: At_Wounding__cDNA_P Parameter: Tissue Value: Aerial
  misc_feature: MA Experiment 108574 PARAMETER Experiment Name: At_Wounding__cDNA_P Parameter: Treatment Value: Wounding vs. No Wounding
  misc_feature: MA Experiment ID: 108579 Result: Up-regulated in Transcription
  misc_feature: MA Experiment 108579 PARAMETER Experiment Name: At_4deg_Cold_cDNA_P Parameter: Temperature (deg C) Value: 4 vs. 22
  misc_feature: MA Experiment 108579 PARAMETER Experiment Name: At_4deg_Cold_cDNA_P Parameter: Timepoint (hr) Value: 6
  misc_feature: MA Experiment 108579 PARAMETER Experiment Name: At_4deg_Cold_cDNA_P Parameter: Tissue Value: Aerial
  misc_feature: MA Experiment ID: 20000088 Result: Down-regulated in Transcription
  misc_feature: MA Experiment 20000088 PARAMETER Experiment Name: At_100uM_ABA_Mutants_cDNA_P Parameter: Plant Line Value: Landsberg
  misc_feature: MA Experiment 20000088 PARAMETER Experiment Name: At_100uM_ABA_Mutants_cDNA_P Parameter: Timepoint (hr) Value: 6
  misc_feature: MA Experiment 20000088 PARAMETER Experiment Name: At_100uM_ABA_Mutants_cDNA_P Parameter: Tissue Value: Aerial
  misc_feature: MA Experiment 20000088 PARAMETER Experiment Name: At_100uM_ABA_Mutants_cDNA_P Parameter: Treatment Value: 100uM ABA vs. No Treatment
  misc_feature: MA Experiment ID: 20000180 Result: Up-regulated in Transcription
  misc_feature: MA Experiment 20000180 PARAMETER Experiment Name: At_Germinating_Seeds_P Parameter: Age (hr) Value: 24 vs. 0
  misc_feature: MA Experiment 20000180 PARAMETER Experiment Name: At_Germinating_Seeds_P Parameter: Tissue Value: Germinating Seeds
  misc_feature: MA Experiment ID: 20000185 Result: Down-regulated in Transcription
  misc_feature: MA Experiment 20000185 PARAMETER Experiment Name: At_Roots__P Parameter: Age (day) Value: 7 vs. 21
  misc_feature: MA Experiment 20000185 PARAMETER Experiment Name: At_Roots__P Parameter: Organism Value: A. thaliana
  misc_feature: MA Experiment 20000185 PARAMETER Experiment Name: At_Roots__P Parameter: Tissue Value: Roots vs. Whole Plant
  misc_feature: MA Experiment ID: 20000235 Result: Up-regulated in Transcription
  misc_feature: MA Experiment 20000235 PARAMETER Experiment Name: At_Siliques_P Parameter: Age (day) Value: 21
  misc_feature: MA Experiment 20000235 PARAMETER Experiment Name: At_Siliques_P Parameter: Organism Value: A. thaliana
  misc_feature: MA Experiment 20000235 PARAMETER Experiment Name: At_Siliques_P Parameter: Plant Line Value: WS
  misc_feature: MA Experiment 20000235 PARAMETER Experiment Name: At_Siliques_P Parameter: Tissue Value: 5-10mm Siliques vs. Whole Plant
  misc_feature: MA Experiment ID: 20000286 Result: Up-regulated in Transcription
  misc_feature: MA Experiment 20000286 PARAMETER Experiment Name: At_Open_Flower_P Parameter: Age (day) Value: 21
  misc_feature: MA Experiment 20000286 PARAMETER Experiment Name: At_Open_Flower_P Parameter: Plant Line Value: WS
  misc_feature: MA Experiment 20000286 PARAMETER Experiment Name: At_Open_Flower_P Parameter: Tissue Value: Half Open vs. Whole Plant
  misc_feature: MA Experiment ID: 20000437 Result: Down-regulated in Transcription
  misc_feature: MA Experiment 20000437 PARAMETER Experiment Name: At_Drought_P Parameter: Age (day) Value: 8
  misc_feature: MA Experiment 20000437 PARAMETER Experiment Name: At_Drought_P Parameter: Organism Value: A. thaliana
  misc_feature: MA Experiment 20000437 PARAMETER Experiment Name: At_Drought_P Parameter: Plant Line Value: WS
  misc_feature: MA Experiment 20000437 PARAMETER Experiment Name: At_Drought_P Parameter: Timepoint (hr) Value: 24
  misc_feature: MA Experiment 20000437 PARAMETER Experiment Name: At_Drought_P Parameter: Tissue Value: Whole Plant
  misc_feature: MA Experiment 20000437 PARAMETER Experiment Name: At_Drought_P Parameter: Treatment Value: Drought vs. No Drought
  misc_feature: MA Experiment ID: 20000439 Result: Down-regulated in Transcription
  misc_feature: MA Experiment 20000439 PARAMETER Experiment Name: At_Roots__P Parameter: Age (day) Value: 14 vs. 21
  misc_feature: MA Experiment 20000439 PARAMETER Experiment Name: At_Roots__P Parameter: Organism Value: A. thaliana
  misc_feature: MA Experiment 20000439 PARAMETER Experiment Name: At_Roots__P Parameter: Tissue Value: Roots vs. Whole Plant
  misc_feature: MA Experiment ID: 20000573 Result: Down-regulated in Transcription
  misc_feature: MA Experiment 20000573 PARAMETER Experiment Name: At_100uM_ABA_Mutants__P Parameter: Organism Value: A. thaliana
  misc_feature: MA Experiment 20000573 PARAMETER Experiment Name: At_100uM_ABA_Mutants__P Parameter: Plant Line Value: CS22 vs. Ler wt
  misc_feature: MA Experiment 20000573 PARAMETER Experiment Name: At_100uM_ABA_Mutants__P Parameter: Timepoint (hr) Value: N/A
  misc_feature: MA Experiment 20000573 PARAMETER Experiment Name: At_100uM_ABA_Mutants__P Parameter: Tissue Value: Whole Plant
  misc_feature: MA Experiment 20000573 PARAMETER Experiment Name: At_100uM_ABA_Mutants__P Parameter: Treatment Value: None
  misc_feature: MA Experiment ID: 20000574 Result: Down-regulated in Transcription
  misc_feature: MA Experiment 20000574 PARAMETER Experiment Name: At_100uM_ABA_Mutants__P Parameter: Organism Value: A. thaliana
  misc_feature: MA Experiment 20000574 PARAMETER Experiment Name: At_100uM_ABA_Mutants__P Parameter: Plant Line Value: CS23 vs. Ler wt
  misc_feature: MA Experiment 20000574 PARAMETER Experiment Name: At_100uM_ABA_Mutants__P Parameter: Timepoint (hr) Value: N/A
  misc_feature: MA Experiment 20000574 PARAMETER Experiment Name: At_100uM_ABA_Mutants__P Parameter: Tissue Value: Whole Plant
  misc_feature: MA Experiment 20000574 PARAMETER Experiment Name: At_100uM_ABA_Mutants__P Parameter: Treatment Value: None
  misc_feature: MA Experiment ID: 20001248 Result: Down-regulated in Transcription
  misc_feature: MA Experiment 20001248 PARAMETER Experiment Name: At_Far-red-induction_P Parameter: Age (day) Value: 7
  misc_feature: MA Experiment 20001248 PARAMETER Experiment Name: At_Far-red-induction_P Parameter: Light Value: Far-red vs. White
  misc_feature: MA Experiment 20001248 PARAMETER Experiment Name: At_Far-red-induction_P Parameter: Organism Value: A. thaliana
  misc_feature: MA Experiment 20001248 PARAMETER Experiment Name: At_Far-red-induction_P Parameter: Plant Line Value: Columbia
  misc_feature: MA Experiment 20001248 PARAMETER Experiment Name: At_Far-red-induction_P Parameter: Timepoint (hr) Value: 4
  misc_feature: MA Experiment 20001248 PARAMETER Experiment Name: At_Far-red-induction_P Parameter: Tissue Value: Whole Plant
  misc_feature: MA Experiment ID: 20001558 Result: Up-regulated in Transcription
  misc_feature: MA Experiment 20001558 PARAMETER Experiment Name: At_Drought_Soil_Dry_P Parameter: Age (day) Value: 27
  misc_feature: MA Experiment 20001558 PARAMETER Experiment Name: At_Drought_Soil_Dry_P Parameter: Organism Value: A. thaliana
  misc_feature: MA Experiment 20001558 PARAMETER Experiment Name: At_Drought_Soil_Dry_P Parameter: Plant Line Value: WS
  misc_feature: MA Experiment 20001558 PARAMETER Experiment Name: At_Drought_Soil_Dry_P Parameter: Post Timepoint (hr) Value: 6
  misc_feature: MA Experiment 20001558 PARAMETER Experiment Name: At_Drought_Soil_Dry_P Parameter: Post-Treatment Value: Re-Water vs. No Drought
  misc_feature: MA Experiment 20001558 PARAMETER Experiment Name: At_Drought_Soil_Dry_P Parameter: Timepoint (day) Value: 13
  misc_feature: MA Experiment 20001558 PARAMETER Experiment Name: At_Drought_Soil_Dry_P Parameter: Treatment Value: Drought vs. No Drought
  misc_feature: MA Experiment ID: 20001904 Result: Up-regulated in Transcription
  misc_feature: MA Experiment 20001904 PARAMETER Experiment Name: At_Drought_Reproduction_P Parameter: Age (day) Value: 37
  misc_feature: MA Experiment 20001904 PARAMETER Experiment Name: At_Drought_Reproduction_P Parameter: Organism Value: A. thaliana
  misc_feature: MA Experiment 20001904 PARAMETER Experiment Name: At_Drought_Reproduction_P Parameter: Plant Line Value: WS
  misc_feature: MA Experiment 20001904 PARAMETER Experiment Name: At_Drought_Reproduction_P Parameter: Timepoint (day) Value: 7
  misc_feature: MA Experiment 20001904 PARAMETER Experiment Name: At_Drought_Reproduction_P Parameter: Tissue Value: Rosettes
  misc_feature: MA Experiment 20001904 PARAMETER Experiment Name: At_Drought_Reproduction_P Parameter: Treatment Value: Drought vs. No Drought
  misc_feature: MA Experiment ID: 20001905 Result: Up-regulated in Transcription
  misc_feature: MA Experiment 20001905 PARAMETER Experiment Name: At_Drought_Reproduction_P Parameter: Age (day) Value: 40
  misc_feature: MA Experiment 20001905 PARAMETER Experiment Name: At_Drought_Reproduction_P Parameter: Organism Value: A. thaliana
  misc_feature: MA Experiment 20001905 PARAMETER Experiment Name: At_Drought_Reproduction_P Parameter: Plant Line Value: WS
  misc_feature: MA Experiment 20001905 PARAMETER Experiment Name: At_Drought_Reproduction_P Parameter: Timepoint (day) Value: 10
  misc_feature: MA Experiment 20001905 PARAMETER Experiment Name: At_Drought_Reproduction_P Parameter: Tissue Value: Rosettes
  misc_feature: MA Experiment 20001905 PARAMETER Experiment Name: At_Drought_Reproduction_P Parameter: Treatment Value: Drought vs. No Drought
  misc_feature: MA Experiment ID: 20001911 Result: Down-regulated in Transcription
  misc_feature: MA Experiment 20001911 PARAMETER Experiment Name: At_Drought_Reproduction_P Parameter: Age (day) Value: 40
  misc_feature: MA Experiment 20001911 PARAMETER Experiment Name: At_Drought_Reproduction_P Parameter: Organism Value: A. thaliana
  misc_feature: MA Experiment 20001911 PARAMETER Experiment Name: At_Drought_Reproduction_P Parameter: Plant Line Value: WS
  misc_feature: MA Experiment 20001911 PARAMETER Experiment Name: At_Drought_Reproduction_P Parameter: Timepoint (day) Value: 10
  misc_feature: MA Experiment 20001911 PARAMETER Experiment Name: At_Drought_Reproduction_P Parameter: Tissue Value: Flowers
  misc_feature: MA Experiment 20001911 PARAMETER Experiment Name: At_Drought_Reproduction_P Parameter: Treatment Value: Drought vs. No Drought
acttgcactcctctttttctttctttctttcttgttggtctctcttacttctttcttattcatctaaaacaatttcgatccatttacacataaatatatgtaactggccgtagaagaaacacattgaaggaagagatggctcataggagattaatcatgacgatgacaaagatgatgatgatggtgaccatgatgatgatgatggataaaacatgcatatgtgcggacatttccagaggcagttttccaaagggctttgtctttggaactgcttcttcggcttttcagcatgaaggagcggtgaaggcagaaggcagaggtcctacgatatgggacacattttcccacacttttggtaaaatcaccgattttagcaatgctgatgtcgctgttgatcagtatcatcgttacgaggaagatgtacaacttatgaagaatatgggaatggacgcttacagattttccatttcttggacccgcatctttccaaatggtgttggacatataaatgaagccggaatcgatcactacaacaaactcataaatgctttacttgctaaagggatcgagccgtacgtgacactgtaccactgggatcttccacaagcacttcatgatcgatacctcggttggctaaacccacaaatcataaatgattttgcagcgtatgcggaggtttgtttccagagatttggagatagagtgaagcactggatcacgttcaacgagccacacacgttcgcgatacaaggctatgatgttggcctacaagctccaggccgttgcactattctttttaagctcacttgtcgcgaaggaaactcatcgaccgagccttacattgttggtcacaatgttattttaactcacgccacagtatccgatatctataggaaaaagtataaggcaaagcaaggaggttcgttagggattgcgtttgatgtaatgtggtttgaaccagagtcgaacaagacagaggacattgaagctgcacaaagagctcaagactttcaacttggctggtttttggatccgttgatgtttggggattacccaagctcgatgagaagcagagtcggaagcagattaccggtgtttacaggatctcaatcttctctggtgaagggttctttagattttgtagggattaatcactacacaacgtactacgcaaggaacaatgccaccaatctcattggcactcttctacacgacgccgtttctgattctggaaccgtcactctaccgtttaagggtttaagcacgattggagatagggcaagttcgatatggttgtacatagtgcctagagggatgagaagcttgatgaattacattaaacatagatatggaaaccctccagtcttcatcactgaaaatggaatggacgacccaaacagcattctgatctcaagaaaagacgctctcaaagatgcaaagaggatcaaataccatcatgattacctttctagcttacaagcttcgataaaagaggatggatgtaatgtcaaagggtacttcgtatggtcgctattggacaattgggaatgggcagcaggttatagttcaagatttggtctctacttcgttgattacagagacaacctcaagagatatcctaaagactctgttcattggttcacttctttcttaaactccacttcttgatttttccttcccattttattggtttagcgtaatgtatacaaaagtttatgattagttatggatttcggtttagataaatatatttaaatcaagatatgttgatat

SEQ ID NO: 106828 - protein, 510 aa, Arabidopsis thaliana
  peptide (1)..(510): Ceres Seq. ID no. 13620577
  misc_feature (33)..(509): Pfam Name: Glycosyl hydrolase family 1 Pfam Description: Glycosyl hydrolase family 1
  misc_feature (1)..(510): Homolog of NCBI NO: 15222734 NR Description: glycosyl hydrolase family 1 [Arabidopsis thaliana]
  misc_feature (13)..(510): Homolog of NCBI NO: 21537259 NR Description: beta-glucosidase, putative [Arabidopsis thaliana]
  misc_feature (32)..(508): Homolog of NCBI NO: 22658440 NR Description: beta-glucosidase [Oryza sativa (japonica
  misc_feature (5)..(510): Homolog of NCBI NO: 22327832 NR Description: glycosyl hydrolase family 1 [Arabidopsis thaliana]
  misc_feature (5)..(510): Homolog of NCBI NO: 9758949 NR Description: beta-glucosidase [Arabidopsis thaliana]
  misc_feature (29)..(506): Homolog of NCBI NO: 7435445 NR Description: beta-glucosidase (EC 3.2.1.21) precursor isoform
  misc_feature (29)..(506): Homolog of NCBI NO: 16757966 NR Description: amygdalin hydrolase isoform AH I precursor
  misc_feature (29)..(506): Homolog of NCBI NO: 15778634 NR Description: amygdalin hydrolase isoform AH I precursor
  misc_feature (28)..(510): Homolog of NCBI NO: 7435446 NR Description: beta-glucosidase (EC 3.2.1.21) precursor, - black cherry >gi|1236961|gb|AAA93032.1| prunasin hydrolase
  misc_feature (8)..(345): Homolog of NCBI NO: 30689721 NR Description: glycosyl hydrolase family 1 [Arabidopsis thaliana]
MAHRRLIMTMTKMMMMVTMMMMMDKTCICADISRGSFPKGFVFGTASSAFQHEGAVKAEGRGPTIWDTFSHTFGKITDFSNADVAVDQYHRYEEDVQLMKNMGMDAYRFSISWTRIFPNGVGHINEAGIDHYNKLINALLAKGIEPYVTLYHWDLPQALHDRYLGWLNPQIINDFAAYAEVCFQRFGDRVKHWITFNEPHTFAIQGYDVGLQAPGRCTILFKLTCREGNSSTEPYIVGHNVILTHATVSDIYRKKYKAKQGGSLGIAFDVMWFEPESNKTEDIEAAQRAQDFQLGWFLDPLMFGDYPSSMRSRVGSRLPVFTGSQSSLVKGSLDFVGINHYTTYYARNNATNLIGTLLHDAVSDSGTVTLPFKGLSTIGDRASSIWLYIVPRGMRSLMNYIKHRYGNPPVFITENGMDDPNSILISRKDALKDAKRIKYHHDYLSSLQASIKEDGCNVKGYFVWSLLDNWEWAAGYSSRFGLYFVDYRDNLKRYPKDSVHWFTSFLNSTS

SEQ ID NO: 106829 - protein, 503 aa, Arabidopsis thaliana
  peptide (1)..(503): Ceres Seq. ID no. 13620578
  misc_feature (26)..(502): Pfam Name: Glycosyl hydrolase family 1 Pfam Description: Glycosyl hydrolase family 1
  misc_feature (1)..(503): Homolog of NCBI NO: 15222734 NR Description: glycosyl hydrolase family 1 [Arabidopsis thaliana]
  misc_feature (6)..(503): Homolog of NCBI NO: 21537259 NR Description: beta-glucosidase, putative [Arabidopsis thaliana]
  misc_feature (25)..(501): Homolog of NCBI NO: 22658440 NR Description: beta-glucosidase [Oryza sativa (japonica
  misc_feature (1)..(503): Homolog of NCBI NO: 22327832 NR Description: glycosyl hydrolase family 1 [Arabidopsis thaliana]
  misc_feature (1)..(503): Homolog of NCBI NO: 9758949 NR Description: beta-glucosidase [Arabidopsis thaliana]
  misc_feature (22)..(499): Homolog of NCBI NO: 7435445 NR Description: beta-glucosidase (EC 3.2.1.21) precursor isoform
  misc_feature (22)..(499): Homolog of NCBI NO: 16757966 NR Description: amygdalin hydrolase isoform AH I precursor
  misc_feature (22)..(499): Homolog of NCBI NO: 15778634 NR Description: amygdalin hydrolase isoform AH I precursor
  misc_feature (21)..(503): Homolog of NCBI NO: 7435446 NR Description: beta-glucosidase (EC 3.2.1.21) precursor, - black cherry >gi|1236961|gb|AAA93032.1| prunasin hydrolase
  misc_feature (1)..(338): Homolog of NCBI NO: 30689721 NR Description: glycosyl hydrolase family 1 [Arabidopsis thaliana]
MTMTKMMMMVTMMMMMDKTCICADISRGSFPKGFVFGTASSAFQHEGAVKAEGRGPTIWDTFSHTFGKITDFSNADVAVDQYHRYEEDVQLMKNMGMDAYRFSISWTRIFPNGVGHINEAGIDHYNKLINALLAKGIEPYVTLYHWDLPQALHDRYLGWLNPQIINDFAAYAEVCFQRFGDRVKHWITFNEPHTFAIQGYDVGLQAPGRCTILFKLTCREGNSSTEPYIVGHNVILTHATVSDIYRKKYKAKQGGSLGIAFDVMWFEPESNKTEDIEAAQRAQDFQLGWFLDPLMFGDYPSSMRSRVGSRLPVFTGSQSSLVKGSLDFVGINHYTTYYARNNATNLIGTLLHDAVSDSGTVTLPFKGLSTIGDRASSIWLYIVPRGMRSLMNYIKHRYGNPPVFITENGMDDPNSILISRKDALKDAKRIKYHHDYLSSLQASIKEDGCNVKGYFVWSLLDNWEWAAGYSSRFGLYFVDYRDNLKRYPKDSVHWFTSFLNSTS

SEQ ID NO: 106830 - protein, 501 aa, Arabidopsis thaliana
  peptide (1)..(501): Ceres Seq. ID no. 13620579
  misc_feature (24)..(500): Pfam Name: Glycosyl hydrolase family 1 Pfam Description: Glycosyl hydrolase family 1
  misc_feature (1)..(501): Homolog of NCBI NO: 15222734 NR Description: glycosyl hydrolase family 1 [Arabidopsis thaliana]
  misc_feature (4)..(501): Homolog of NCBI NO: 21537259 NR Description: beta-glucosidase, putative [Arabidopsis thaliana]
  misc_feature (23)..(499): Homolog of NCBI NO: 22658440 NR Description: beta-glucosidase [Oryza sativa (japonica
  misc_feature (1)..(501): Homolog of NCBI NO: 22327832 NR Description: glycosyl hydrolase family 1 [Arabidopsis thaliana]
  misc_feature (1)..(501): Homolog of NCBI NO: 9758949 NR Description: beta-glucosidase [Arabidopsis thaliana]
  misc_feature (20)..(497): Homolog of NCBI NO: 7435445 NR Description: beta-glucosidase (EC 3.2.1.21) precursor isoform
  misc_feature (20)..(497): Homolog of NCBI NO: 16757966 NR Description: amygdalin hydrolase isoform AH I precursor
  misc_feature (20)..(497): Homolog of NCBI NO: 15778634 NR Description: amygdalin hydrolase isoform AH I precursor
  misc_feature (19)..(501): Homolog of NCBI NO: 7435446 NR Description: beta-glucosidase (EC 3.2.1.21) precursor, - black cherry >gi|1236961|gb|AAA93032.1| prunasin hydrolase
  misc_feature (1)..(336): Homolog of NCBI NO: 30689721 NR Description: glycosyl hydrolase family 1 [Arabidopsis thaliana]
MTKMMMMVTMMMMMDKTCICADISRGSFPKGFVFGTASSAFQHEGAVKAEGRGPTIWDTFSHTFGKITDFSNADVAVDQYHRYEEDVQLMKNMGMDAYRFSISWTRIFPNGVGHINEAGIDHYNKLINALLAKGIEPYVTLYHWDLPQALHDRYLGWLNPQIINDFAAYAEVCFQRFGDRVKHWITFNEPHTFAIQGYDVGLQAPGRCTILFKLTCREGNSSTEPYIVGHNVILTHATVSDIYRKKYKAKQGGSLGIAFDVMWFEPESNKTEDIEAAQRAQDFQLGWFLDPLMFGDYPSSMRSRVGSRLPVFTGSQSSLVKGSLDFVGINHYTTYYARNNATNLIGTLLHDAVSDSGTVTLPFKGLSTIGDRASSIWLYIVPRGMRSLMNYIKHRYGNPPVFITENGMDDPNSILISRKDALKDAKRIKYHHDYLSSLQASIKEDGCNVKGYFVWSLLDNWEWAAGYSSRFGLYFVDYRDNLKRYPKDSVHWFTSFLNSTS

SEQ ID NO: 106831 - DNA, 1153 bp, Arabidopsis thaliana
  misc_feature (1)..(1153): Ceres Seq. ID no. 13620580
  misc_feature: MA Experiment ID: 108464 Result: Down-regulated in Transcription
  misc_feature: MA Experiment 108464 PARAMETER Experiment Name: At_Germinating_Seeds_cDNA_P Parameter: Age (day) Value: 4 vs. 0
  misc_feature: MA Experiment 108464 PARAMETER Experiment Name: At_Germinating_Seeds_cDNA_P Parameter: Tissue Value: Germinating Seeds
  misc_feature: MA Experiment ID: 20000264 Result: Up-regulated in Transcription
  misc_feature: MA Experiment 20000264 PARAMETER Experiment Name: At_Open_Flower_P Parameter: Age (day) Value: 21
  misc_feature: MA Experiment 20000264 PARAMETER Experiment Name: At_Open_Flower_P Parameter: Plant Line Value: WS
  misc_feature: MA Experiment 20000264 PARAMETER Experiment Name: At_Open_Flower_P Parameter: Tissue Value: Open Flower vs. Whole Plant
  misc_feature: MA Experiment ID: 20000265 Result: Up-regulated in Transcription
  misc_feature: MA Experiment 20000265 PARAMETER Experiment Name: At_Open_Flower_P Parameter: Age (day) Value: 21
  misc_feature: MA Experiment 20000265 PARAMETER Experiment Name: At_Open_Flower_P Parameter: Plant Line Value: WS
  misc_feature: MA Experiment 20000265 PARAMETER Experiment Name: At_Open_Flower_P Parameter: Tissue Value: Closed Flower vs. Whole Plant
  misc_feature: MA Experiment ID: 20000286 Result: Up-regulated in Transcription
  misc_feature: MA Experiment 20000286 PARAMETER Experiment Name: At_Open_Flower_P Parameter: Age (day) Value: 21
  misc_feature: MA Experiment 20000286 PARAMETER Experiment Name: At_Open_Flower_P Parameter: Plant Line Value: WS
  misc_feature: MA Experiment 20000286 PARAMETER Experiment Name: At_Open_Flower_P Parameter: Tissue Value: Half Open vs. Whole Plant
  misc_feature: MA Experiment ID: 20000794 Result: Up-regulated in Transcription
  misc_feature: MA Experiment 20000794 PARAMETER Experiment Name: At_Petals_P Parameter: Age (day) Value: 23-25 days
  misc_feature: MA Experiment 20000794 PARAMETER Experiment Name: At_Petals_P Parameter: Plant Line Value: WS
  misc_feature: MA Experiment 20000794 PARAMETER Experiment Name: At_Petals_P Parameter: Tissue Value: Petals vs. Whole plant
  misc_feature: MA Experiment ID: 20001910 Result: Up-regulated in Transcription
  misc_feature: MA Experiment 20001910 PARAMETER Experiment Name: At_Drought_Reproduction_P Parameter: Age (day) Value: 37
  misc_feature: MA Experiment 20001910 PARAMETER Experiment Name: At_Drought_Reproduction_P Parameter: Organism Value: A. thaliana
  misc_feature: MA Experiment 20001910 PARAMETER Experiment Name: At_Drought_Reproduction_P Parameter: Plant Line Value: WS
  misc_feature: MA Experiment 20001910 PARAMETER Experiment Name: At_Drought_Reproduction_P Parameter: Timepoint (day) Value: 7
  misc_feature: MA Experiment 20001910 PARAMETER Experiment Name: At_Drought_Reproduction_P Parameter: Tissue Value: Flowers
  misc_feature: MA Experiment 20001910 PARAMETER Experiment Name: At_Drought_Reproduction_P Parameter: Treatment Value: Drought vs. No Drought
gattattttatttatctcaccaaggaaaacaaaacacaaaacaaacaaacaaacaaacccataaatcaagatctctgttttcagacagattattatcggaacaaaatgtcatcatcaggatccgacaaagagagagagacttttgtctatatggctaagctctccgaacaagccgagcgatacgacgagatggtggagacgatgaagaaagtggcgagggttaatagcgagctgactgtggaagagaggaatctgttgtcggttggttacaagaacgtgatcggagcaagaagagcttcgtggaggataatgtcgtccatcgagcagaaagaagagtctaaaggcaatgaatcaaacgtgaaacaaatcaagggttatcgccaaaaggtagaagatgagctcgctaacatttgccaagacattctcaccatcattgatcagcatctcatccctcacgctacctcaggggaagctaccgtcttctactacaagatgaaaggagattattaccgttacttggctgagtttaagaccgagcaagagaggaaggaagctgctgaacagtctctcaaaggctatgaggctgcaacacaagctgcaagcactgagcttccttcgacccatccaattcgtcttggccttgctcttaacttctctgttttctactatgagatcatgaactctcctgaaagagcttgccatttggctaagcaagccttcgatgaggcgattgcagagttagatactctaagtgaggagtcgtacaaggacagcactttgatcatgcagctcctgagagacaacctcaccctctggacttctgatcttcctgaagatggaggagaagacaacatcaagactgaagaatccaagcaagaacaggccaagcctgccgatgccactgagaactgatcaaagggcttggaagttgaatgagatttagattcgatgtccagaagggggaggcaaattcctttaaattccatagcttggtttcatcaggaagatgagatcagagacaattgaattcaatcctatattgtttcttttttgtattacttttcgtcttctttattttgttctcaattttcatgtcatcaagtattttatgttacgcaattttattatgatttgatcagcatatgcttttgct

SEQ ID NO: 106832 - protein, 303 aa, Arabidopsis thaliana
  peptide (1)..(303): Ceres Seq. ID no. 13620581
  misc_feature (45)..(280): Pfam Name: 14-3-3 protein Pfam Description: 14-3-3 protein
  misc_feature (36)..(302): Homolog of NCBI NO: 25288844 NR Description: T1K7.15 protein - Arabidopsis thaliana
  misc_feature (36)..(303): Homolog of NCBI NO: 18395915 NR Description: 14-3-3 protein GF14 iota (grf12) [Arabidopsis
  misc_feature (51)..(303): Homolog of NCBI NO: 21553476 NR Description: 14-3-3-like protein GF14 iota (General regulatory
  misc_feature (41)..(291): Homolog of NCBI NO: 16755676 NR Description: 14-3-3 protein [Fritillaria cirrhosa]
  misc_feature (41)..(287): Homolog of NCBI NO: 8515890 NR Description: 14-3-3 protein [Populus x canescens]
  misc_feature (41)..(283): Homolog of NCBI NO: 2822483 NR Description: 14-3-3 protein homolog [Maackia amurensis]
  misc_feature (41)..(282): Homolog of NCBI NO: 6752903 NR Description: 14-3-3-like protein [Euphorbia esula]
  misc_feature (41)..(287): Homolog of NCBI NO: 8099061 NR Description: 14-3-3 protein [Populus x canescens]
  misc_feature (40)..(300): Homolog of NCBI NO: 1531629 NR Description: GF14 mu [Arabidopsis thaliana]
DYFIYLTKENKTQNKQTNKPINQDLCFQTDYYRNKMSSSGSDKERETFVYMAKLSEQAERYDEMVETMKKVARVNSELTVEERNLLSVGYKNVIGARRASWRIMSSIEQKEESKGNESNVKQIKGYRQKVEDELANICQDILTIIDQHLIPHATSGEATVFYYKMKGDYYRYLAEFKTEQERKEAAEQSLKGYEAATQAASTELPSTHPIRLGLALNFSVFYYEIMNSPERACHLAKQAFDEAIAELDTLSEESYKDSTLIMQLLRDNLTLWTSDLPEDGGEDNIKTEESKQEQAKPADATEN

SEQ ID NO: 106833 - protein, 268 aa, Arabidopsis thaliana; identical to SEQ ID NO: 42414
  peptide (1)..(268): Ceres Seq. ID no. 13620582
  misc_feature (10)..(245): Pfam Name: 14-3-3 protein Pfam Description: 14-3-3 protein
  misc_feature (1)..(267): Homolog of NCBI NO: 25288844 NR Description: T1K7.15 protein - Arabidopsis thaliana
  misc_feature (1)..(268): Homolog of NCBI NO: 18395915 NR Description: 14-3-3 protein GF14 iota (grf12) [Arabidopsis
  misc_feature (16)..(268): Homolog of NCBI NO: 21553476 NR Description: 14-3-3-like protein GF14 iota (General regulatory
  misc_feature (6)..(256): Homolog of NCBI NO: 16755676 NR Description: 14-3-3 protein [Fritillaria cirrhosa]
  misc_feature (6)..(252): Homolog of NCBI NO: 8515890 NR Description: 14-3-3 protein [Populus x canescens]
  misc_feature (6)..(248): Homolog of NCBI NO: 2822483 NR Description: 14-3-3 protein homolog [Maackia amurensis]
  misc_feature (6)..(247): Homolog of NCBI NO: 6752903 NR Description: 14-3-3-like protein [Euphorbia esula]
  misc_feature (6)..(252): Homolog of NCBI NO: 8099061 NR Description: 14-3-3 protein [Populus x canescens]
  misc_feature (5)..(265): Homolog of NCBI NO: 1531629 NR Description: GF14 mu [Arabidopsis thaliana]

SEQ ID NO: 106834 - protein, 253 aa, Arabidopsis thaliana; identical to SEQ ID NO: 42415
  peptide (1)..(253): Ceres Seq. ID no. 13620583
  misc_feature (1)..(230): Pfam Name: 14-3-3 protein Pfam Description: 14-3-3 protein
  misc_feature (1)..(252): Homolog of NCBI NO: 25288844 NR Description: T1K7.15 protein - Arabidopsis thaliana
  misc_feature (1)..(253): Homolog of NCBI NO: 18395915 NR Description: 14-3-3 protein GF14 iota (grf12) [Arabidopsis
  misc_feature (1)..(253): Homolog of NCBI NO: 21553476 NR Description: 14-3-3-like protein GF14 iota (General regulatory
  misc_feature (1)..(241): Homolog of NCBI NO: 16755676 NR Description: 14-3-3 protein [Fritillaria cirrhosa]
  misc_feature (1)..(237): Homolog of NCBI NO: 8515890 NR Description: 14-3-3 protein [Populus x canescens]
  misc_feature (1)..(233): Homolog of NCBI NO: 2822483 NR Description: 14-3-3 protein homolog [Maackia amurensis]
  misc_feature (1)..(232): Homolog of NCBI NO: 6752903 NR Description: 14-3-3-like protein [Euphorbia esula]
  misc_feature (1)..(237): Homolog of NCBI NO: 8099061 NR Description: 14-3-3 protein [Populus x canescens]
  misc_feature (1)..(250): Homolog of NCBI NO: 1531629 NR Description: GF14 mu [Arabidopsis thaliana]

SEQ ID NO: 106835 - DNA, 1393 bp, Arabidopsis thaliana
  misc_feature (1)..(1393): Ceres Seq. ID no. 13620591
  misc_feature: MA Experiment ID: 108434 Result: Up-regulated in Transcription
  misc_feature: MA Experiment 108434 PARAMETER Experiment Name: At_Root_Tips_cDNA_P Parameter: Tissue Value: Root Tips
  misc_feature: MA Experiment ID: 108595 Result: Up-regulated in Transcription
  misc_feature: MA Experiment 108595 PARAMETER Experiment Name: At_Ler-pi_Ovule_cDNA_P Parameter: Plant Line Value: null
  misc_feature: MA Experiment ID: 20000069 Result: Down-regulated in Transcription
  misc_feature: MA Experiment 20000069 PARAMETER Experiment Name: At_100uM_ABA_Mutants_cDNA_P Parameter: Plant Line Value: CS23
  misc_feature: MA Experiment 20000069 PARAMETER Experiment Name: At_100uM_ABA_Mutants_cDNA_P Parameter: Timepoint (hr) Value: 6
  misc_feature: MA Experiment 20000069 PARAMETER Experiment Name: At_100uM_ABA_Mutants_cDNA_P Parameter: Tissue Value: Aerial
  misc_feature: MA Experiment 20000069 PARAMETER Experiment Name: At_100uM_ABA_Mutants_cDNA_P Parameter: Treatment Value: 100uM ABA vs. No Treatment
  misc_feature: MA Experiment ID: 20000071 Result: Down-regulated in Transcription
  misc_feature: MA Experiment 20000071 PARAMETER Experiment Name: At_100uM_ABA_Mutants_cDNA_P Parameter: Plant Line Value: CS8104
  misc_feature: MA Experiment 20000071 PARAMETER Experiment Name: At_100uM_ABA_Mutants_cDNA_P Parameter: Timepoint (hr) Value: 6
  misc_feature: MA Experiment 20000071 PARAMETER Experiment Name: At_100uM_ABA_Mutants_cDNA_P Parameter: Tissue Value: Aerial
  misc_feature: MA Experiment 20000071 PARAMETER Experiment Name: At_100uM_ABA_Mutants_cDNA_P Parameter: Treatment Value: 100uM ABA vs. No Treatment
  misc_feature: MA Experiment ID: 20000072 Result: Down-regulated in Transcription
  misc_feature: MA Experiment 20000072 PARAMETER Experiment Name: At_100uM_ABA_Mutants_cDNA_P Parameter: Plant Line Value: CS8105
  misc_feature: MA Experiment 20000072 PARAMETER Experiment Name: At_100uM_ABA_Mutants_cDNA_P Parameter: Timepoint (hr) Value: 6
  misc_feature: MA Experiment 20000072 PARAMETER Experiment Name: At_100uM_ABA_Mutants_cDNA_P Parameter: Tissue Value: Aerial
  misc_feature: MA Experiment 20000072 PARAMETER Experiment Name: At_100uM_ABA_Mutants_cDNA_P Parameter: Treatment Value: 100uM ABA vs. No Treatment
  misc_feature: MA Experiment ID: 20000089 Result: Down-regulated in Transcription
  misc_feature: MA Experiment ID: 20000264 Result: Up-regulated in Transcription
  misc_feature: MA Experiment 20000264 PARAMETER Experiment Name: At_Open_Flower_P Parameter: Age (day) Value: 21
  misc_feature: MA Experiment 20000264 PARAMETER Experiment Name: At_Open_Flower_P Parameter: Plant Line Value: WS
  misc_feature: MA Experiment 20000264 PARAMETER Experiment Name: At_Open_Flower_P Parameter: Tissue Value: Open Flower vs. Whole Plant
  misc_feature: MA Experiment ID: 20000286 Result: Up-regulated in Transcription
  misc_feature: MA Experiment 20000286 PARAMETER Experiment Name: At_Open_Flower_P Parameter: Age (day) Value: 21
  misc_feature: MA Experiment 20000286 PARAMETER Experiment Name: At_Open_Flower_P Parameter: Plant Line Value: WS
  misc_feature: MA Experiment 20000286 PARAMETER Experiment Name: At_Open_Flower_P Parameter: Tissue Value: Half Open vs. Whole Plant
aagatgaaaagtaatacccttcctctcttgccctttttgctggtctgggtgaaacatagaaaagtttctcttgctcaagttaatgataaaaggttgttgtaggatttgttgctctggctctggtggtaggtctatgaaatcaacccatatcgtgaatggactgcaacatggtatcttcgtcccagtgggattgggagcatttgatcatgtccaatccgtcaaggactgaagatgacagcaaacagctacctactgagtgggaaattgaaaaaggtgaaggaattgaatctatagttccacatttctcaggccttgagagagtcagtagtggctctgccaccagcttctggcacactgctgtatcgaaaagctcacagtcgacctctatcaactcatcatctcccgaagccaaacgatgcaagcttgcatcagaaagttcccctggagattcttgcagcaacatagactttgtccaggtgaaggctcccacagctctcgaggtatccgttgcctcagctgaatcagatctttgtttaaaactaggaaagcggacatactctgaagaatactggggtagaaacaataatgaaatttcagcggtttctatgaagttgttaactccatctgttgtcgctgggaaatccaaattgtgtggtcagagcatgccagtcccgcgttgccaaattgatggctgtgaactggatctctcatctgctaagggttatcatcgtaagcacaaagtctgcgaaaagcattcaaagtgcccaaaagttagcgtgagtggcctggaacgtcggttctgccaacagtgtagcaggttccatgctgtctctgaatttgatgagaagaaacgaagctgccgaaaacgtctttctcatcataatgcgaggcgtcgtaagccacaaggagtattttcaatgaatcccgagagggtgtatgatcgaagacagcatacaaatatgttgtggaatggggtgtcccttaacgcgagatctgaagaaatgtatgaatggggtaataacacttatgatacaaagcctagacaaacggaaaaaagctttactctgagcttccagagaggtaatggctctgaggaccagctggttgctagtagcagccgtatgttctctacatctcaaacctcaggtgggttcccagcaggaaagtccaagtttcaacttcatggcgaagatgtgggagaatactcaggagtcctccatgaatctcaagatatccaccgtgctctctctcttctgtcaacctcttcggatcccctggcccaaccacatgtgcagccattttctctactctgttcatatgatgttgtaccaaaatagatgagtaagtaatgtgtaatttgtaaacctgttactcagttggtggatacttttcc

SEQ ID NO: 106836 - protein, 393 aa, Arabidopsis thaliana; identical to SEQ ID NO: 24209
  peptide (1)..(393): Ceres Seq. ID no. 13620592
  misc_feature (174)..(252): Pfam Name: SBP domain Pfam Description: SBP domain
  misc_feature (1)..(393): Homolog of NCBI NO: 18396302 NR Description: squamosa-promoter binding protein 2 -related
  misc_feature (5)..(393): Homolog of NCBI NO: 25403307 NR Description: protein F17L21.14 [imported] - Arabidopsis >gi|9802531|gb|AAF99733.1|AC004557_12 F17L21.14 [Arabidopsis
  misc_feature (1)..(378): Homolog of NCBI NO: 22329813 NR Description: squamosa-promoter binding protein 2 -related thaliana] >gi|25456667|pir||T52596 squamosa promoter binding
  misc_feature (1)..(378): Homolog of NCBI NO: 18650611 NR Description: At1g27370/F17L21_16 [Arabidopsis thaliana]
  misc_feature (5)..(378): Homolog of NCBI NO: 9802546 NR Description: F17L21.15 [Arabidopsis thaliana]
  misc_feature (1)..(371): Homolog of NCBI NO: 25456646 NR Description: squamosa promoter binding protein 2 [imported] -
  misc_feature (1)..(291): Homolog of NCBI NO: 15239820 NR Description: squamosa promoter binding protein-related 2 [Arabidopsis thaliana] >gi|30694251|ref|NP_851122.1| squamosa
  misc_feature (117)..(381): Homolog of NCBI NO: 18423163 NR Description: expressed protein [Arabidopsis thaliana] expressed protein [Arabidopsis thaliana] expressed protein [Arabidopsis thaliana]
  misc_feature (117)..(381): Homolog of NCBI NO: 21536841 NR Description: unknown [Arabidopsis thaliana]
  misc_feature (127)..(373): Homolog of NCBI NO: 15227896 NR Description: squamosa-promoter binding protein -related

SEQ ID NO: 106837 - protein, 389 aa, Arabidopsis thaliana; identical to SEQ ID NO: 24210
  peptide (1)..(389): Ceres Seq. ID no. 13620593
  misc_feature (170)..(248): Pfam Name: SBP domain Pfam Description: SBP domain
  misc_feature (1)..(389): Homolog of NCBI NO: 18396302 NR Description: squamosa-promoter binding protein 2 -related
  misc_feature (1)..(389): Homolog of NCBI NO: 25403307 NR Description: protein F17L21.14 [imported] - Arabidopsis >gi|9802531|gb|AAF99733.1|AC004557_12 F17L21.14 [Arabidopsis
  misc_feature (1)..(374): Homolog of NCBI NO: 22329813 NR Description: squamosa-promoter binding protein 2 -related thaliana] >gi|25456667|pir||T52596 squamosa promoter binding
  misc_feature (1)..(374): Homolog of NCBI NO: 18650611 NR Description: At1g27370/F17L21_16 [Arabidopsis thaliana]
  misc_feature (1)..(374): Homolog of NCBI NO: 9802546 NR Description: F17L21.15 [Arabidopsis thaliana]
  misc_feature (1)..(367): Homolog of NCBI NO: 25456646 NR Description: squamosa promoter binding protein 2 [imported] -
  misc_feature (1)..(287): Homolog of NCBI NO: 15239820 NR Description: squamosa promoter binding protein-related 2 [Arabidopsis thaliana] >gi|30694251|ref|NP_851122.1| squamosa
  misc_feature (113)..(377): Homolog of NCBI NO: 18423163 NR Description: expressed protein [Arabidopsis thaliana] expressed protein [Arabidopsis thaliana] expressed protein [Arabidopsis thaliana]
  misc_feature (113)..(377): Homolog of NCBI NO: 21536841 NR Description: unknown [Arabidopsis thaliana]
  misc_feature (123)..(369): Homolog of NCBI NO: 15227896 NR Description: squamosa-promoter binding protein -related

SEQ ID NO: 106838 - protein, 376 aa, Arabidopsis thaliana; identical to SEQ ID NO: 24211
  peptide (1)..(376): Ceres Seq. ID no. 13620594
  misc_feature (157)..(235): Pfam Name: SBP domain Pfam Description: SBP domain
  misc_feature (1)..(376): Homolog of NCBI NO: 18396302 NR Description: squamosa-promoter binding protein 2 -related
  misc_feature (1)..(376): Homolog of NCBI NO: 25403307 NR Description: protein F17L21.14 [imported] - Arabidopsis >gi|9802531|gb|AAF99733.1|AC004557_12 F17L21.14 [Arabidopsis
  misc_feature (1)..(361): Homolog of NCBI NO: 22329813 NR Description: squamosa-promoter binding protein 2 -related thaliana] >gi|25456667|pir||T52596 squamosa promoter binding
  misc_feature (1)..(361): Homolog of NCBI NO: 18650611 NR Description: At1g27370/F17L21_16 [Arabidopsis thaliana]
  misc_feature (1)..(361): Homolog of NCBI NO: 9802546 NR Description: F17L21.15 [Arabidopsis thaliana]
  misc_feature (1)..(354): Homolog of NCBI NO: 25456646 NR Description: squamosa promoter binding protein 2 [imported] -
  misc_feature (1)..(274): Homolog of NCBI NO: 15239820 NR Description: squamosa promoter binding protein-related 2 [Arabidopsis thaliana] >gi|30694251|ref|NP_851122.1| squamosa
  misc_feature (100)..(364): Homolog of NCBI NO: 18423163 NR Description: expressed protein [Arabidopsis thaliana] expressed protein [Arabidopsis thaliana] expressed protein [Arabidopsis thaliana]
  misc_feature (100)..(364): Homolog of NCBI NO: 21536841 NR Description: unknown [Arabidopsis thaliana]
  misc_feature (110)..(356): Homolog of NCBI NO: 15227896 NR Description: squamosa-promoter binding protein -related

SEQ ID NO: 106839 - DNA, 904 bp, Arabidopsis thaliana
  misc_feature (1)..(904): Ceres Seq. ID no. 13620595
  misc_feature: MA Experiment ID: 108434 Result: Down-regulated in Transcription
  misc_feature: MA Experiment 108434 PARAMETER Experiment Name: At_Root_Tips_cDNA_P Parameter: Tissue Value: Root Tips
  misc_feature: MA Experiment ID: 108464 Result: Up-regulated in Transcription
  misc_feature: MA Experiment 108464 PARAMETER Experiment Name: At_Germinating_Seeds_cDNA_P Parameter: Age (day) Value: 4 vs. 0
  misc_feature: MA Experiment 108464 PARAMETER Experiment Name: At_Germinating_Seeds_cDNA_P Parameter: Tissue Value: Germinating Seeds
  misc_feature: MA Experiment ID: 108576 Result: Up-regulated in Transcription
  misc_feature: MA Experiment 108576 PARAMETER Experiment Name: At_42deg_Heat_cDNA_P Parameter: Temperature (deg C) Value: 42 vs. 22
  misc_feature: MA Experiment 108576 PARAMETER Experiment Name: At_42deg_Heat_cDNA_P Parameter: Timepoint (hr) Value: 1
  misc_feature: MA Experiment 108576 PARAMETER Experiment Name: At_42deg_Heat_cDNA_P Parameter: Tissue Value: Aerial
  misc_feature: MA Experiment ID: 108605 Result: Down-regulated in Transcription
  misc_feature: MA Experiment 108605 PARAMETER Experiment Name: At_100uM_ABA_cDNA_P Parameter: Timepoint (hr) Value: 6
  misc_feature: MA Experiment 108605 PARAMETER Experiment Name: At_100uM_ABA_cDNA_P Parameter: Tissue Value: Aerial
  misc_feature: MA Experiment 108605 PARAMETER Experiment Name: At_100uM_ABA_cDNA_P Parameter: Treatment Value: 100uM ABA vs. No Treatment
  misc_feature: MA Experiment ID: 108607 Result: Down-regulated in Transcription
  misc_feature: MA Experiment 108607 PARAMETER Experiment Name: At_100uM_ABA_cDNA_P Parameter: Timepoint (hr) Value: 4
  misc_feature: MA Experiment 108607 PARAMETER Experiment Name: At_100uM_ABA_cDNA_P Parameter: Tissue Value: Aerial
  misc_feature: MA Experiment 108607 PARAMETER Experiment Name: At_100uM_ABA_cDNA_P Parameter: Treatment Value: 100uM ABA vs. No Treatment
  misc_feature: MA Experiment ID: 20000093 Result: Up-regulated in Transcription
  misc_feature: MA Experiment 20000093 PARAMETER Experiment Name: At_42deg_Heat_cDNA_P Parameter: Temperature (deg C) Value: 42 vs. 22
  misc_feature: MA Experiment 20000093 PARAMETER Experiment Name: At_42deg_Heat_cDNA_P Parameter: Timepoint (hr) Value: 0.5
  misc_feature: MA Experiment 20000093 PARAMETER Experiment Name: At_42deg_Heat_cDNA_P Parameter: Tissue Value: Aerial
  misc_feature: MA Experiment ID: 20000111 Result: Up-regulated in Transcription
  misc_feature: MA Experiment 20000111 PARAMETER Experiment Name: At_42deg_Heat_cDNA_P Parameter: Temperature (deg C) Value: 42 vs. 22
  misc_feature: MA Experiment 20000111 PARAMETER Experiment Name: At_42deg_Heat_cDNA_P Parameter: Timepoint (hr) Value: 6
  misc_feature: MA Experiment 20000111 PARAMETER Experiment Name: At_42deg_Heat_cDNA_P Parameter: Tissue Value: Aerial
  misc_feature: MA Experiment ID: 20000112 Result: Up-regulated in Transcription
  misc_feature: MA Experiment 20000112 PARAMETER Experiment Name: At_42deg_Heat_cDNA_P Parameter: Temperature (deg C) Value: 42 vs. 22
  misc_feature: MA Experiment 20000112 PARAMETER Experiment Name: At_42deg_Heat_cDNA_P Parameter: Timepoint (hr) Value: 2
  misc_feature: MA Experiment 20000112 PARAMETER Experiment Name: At_42deg_Heat_cDNA_P Parameter: Tissue Value: Aerial
  misc_feature: MA Experiment ID: 20000144 Result: Up-regulated in Transcription
  misc_feature: MA Experiment 20000144 PARAMETER Experiment Name: At_42deg_Heat_cDNA_P Parameter: Temperature (deg C) Value: 42 vs. 22
  misc_feature: MA Experiment 20000144 PARAMETER Experiment Name: At_42deg_Heat_cDNA_P Parameter: Timepoint (hr) Value: 1
  misc_feature: MA Experiment 20000144 PARAMETER Experiment Name: At_42deg_Heat_cDNA_P Parameter: Tissue Value: Aerial
  misc_feature: MA Experiment ID: 20000171 Result: Up-regulated in Transcription
  misc_feature: MA Experiment 20000171 PARAMETER Experiment Name: At_42deg_Heat_P Parameter: Age (day) Value: 14
  misc_feature: MA Experiment 20000171 PARAMETER Experiment Name: At_42deg_Heat_P Parameter: Organism Value: A. thaliana
  misc_feature: MA Experiment 20000171 PARAMETER Experiment Name: At_42deg_Heat_P Parameter: Plant Line Value: WS
  misc_feature: MA Experiment 20000171 PARAMETER Experiment Name: At_42deg_Heat_P Parameter: Temperature (deg C) Value: 42 vs. 22
  misc_feature: MA Experiment 20000171 PARAMETER Experiment Name: At_42deg_Heat_P Parameter: Timepoint (hr) Value: 1
  misc_feature: MA Experiment 20000171 PARAMETER Experiment Name: At_42deg_Heat_P Parameter: Tissue Value: Aerial
  misc_feature: MA Experiment ID: 20000173 Result: Up-regulated in Transcription
  misc_feature: MA Experiment 20000173 PARAMETER Experiment Name: At_42deg_Heat_P Parameter: Age (day) Value: 14
  misc_feature: MA Experiment 20000173 PARAMETER Experiment Name: At_42deg_Heat_P Parameter: Organism Value: A. thaliana
  misc_feature: MA Experiment 20000173 PARAMETER Experiment Name: At_42deg_Heat_P Parameter: Plant Line Value: WS
  misc_feature: MA Experiment 20000173 PARAMETER Experiment Name: At_42deg_Heat_P Parameter: Temperature (deg C) Value: 42 vs. 22
  misc_feature: MA Experiment 20000173 PARAMETER Experiment Name: At_42deg_Heat_P Parameter: Timepoint (hr) Value: 6
  misc_feature: MA Experiment 20000173 PARAMETER Experiment Name: At_42deg_Heat_P Parameter: Tissue Value: Aerial
  misc_feature: MA Experiment ID: 20000227 Result: Down-regulated in Transcription
  misc_feature: MA Experiment 20000227 PARAMETER Experiment Name: At_Root-Tips-vs-Tops_P Parameter: Tissue Value: Root Tips vs. Root Tops
  misc_feature: MA Experiment ID: 20000234 Result: Down-regulated in Transcription
  misc_feature: MA Experiment 20000234 PARAMETER Experiment Name: At_Siliques_P Parameter: Age (day) Value: 21
  misc_feature: MA Experiment 20000234 PARAMETER Experiment Name: At_Siliques_P Parameter: Organism Value: A. thaliana
  misc_feature: MA Experiment 20000234 PARAMETER Experiment Name: At_Siliques_P Parameter: Plant Line Value: WS
  misc_feature: MA Experiment 20000234 PARAMETER Experiment Name: At_Siliques_P Parameter: Tissue Value: Less Than 5mm Siliques vs. Whole Plant
  misc_feature: MA Experiment ID: 20000235 Result: Down-regulated in Transcription
  misc_feature: MA Experiment 20000235 PARAMETER Experiment Name: At_Siliques_P Parameter: Age (day) Value: 21
  misc_feature: MA Experiment 20000235 PARAMETER Experiment Name: At_Siliques_P Parameter: Organism Value: A. thaliana
  misc_feature: MA Experiment 20000235 PARAMETER Experiment Name: At_Siliques_P Parameter: Plant Line Value: WS
  misc_feature: MA Experiment 20000235 PARAMETER Experiment Name: At_Siliques_P Parameter: Tissue Value: 5-10mm Siliques vs. Whole Plant
  misc_feature: MA Experiment ID: 20000264 Result: Down-regulated in Transcription
  misc_feature: MA Experiment 20000264 PARAMETER Experiment Name: At_Open_Flower_P Parameter: Age (day) Value: 21
  misc_feature: MA Experiment 20000264 PARAMETER Experiment Name: At_Open_Flower_P Parameter: Plant Line Value: WS
  misc_feature: MA Experiment 20000264 PARAMETER Experiment Name: At_Open_Flower_P Parameter: Tissue Value: Open Flower vs. Whole Plant
  misc_feature: MA Experiment ID: 20000265 Result: Down-regulated in Transcription
  misc_feature: MA Experiment 20000265 PARAMETER Experiment Name: At_Open_Flower_P Parameter: Age (day) Value: 21
  misc_feature: MA Experiment 20000265 PARAMETER Experiment Name: At_Open_Flower_P Parameter: Plant Line Value: WS
  misc_feature: MA Experiment 20000265 PARAMETER Experiment Name: At_Open_Flower_P Parameter: Tissue Value: Closed Flower vs. Whole Plant
  misc_feature: MA Experiment ID: 20000286 Result: Down-regulated in Transcription
  misc_feature: MA Experiment 20000286 PARAMETER Experiment Name: At_Open_Flower_P Parameter: Age (day) Value: 21
  misc_feature: MA Experiment 20000286 PARAMETER Experiment Name: At_Open_Flower_P Parameter: Plant Line Value: WS
  misc_feature: MA Experiment 20000286 PARAMETER Experiment Name: At_Open_Flower_P Parameter: Tissue Value: Half Open vs. Whole Plant
  misc_feature: MA Experiment ID: 20000438 Result: Down-regulated in Transcription
  misc_feature: MA Experiment 20000438 PARAMETER Experiment Name: At_Shoots__P Parameter: Age (day) Value: 14
  misc_feature: MA Experiment 20000438 PARAMETER Experiment Name: At_Shoots__P Parameter: Tissue Value: Shoots vs. Whole Plant
  misc_feature: MA Experiment ID: 20000573 Result: Down-regulated in Transcription
  misc_feature: MA Experiment 20000573 PARAMETER Experiment Name: At_100uM_ABA_Mutants__P Parameter: Organism Value: A. thaliana
  misc_feature: MA Experiment 20000573 PARAMETER Experiment Name: At_100uM_ABA_Mutants__P Parameter: Plant Line Value: CS22 vs. Ler wt
  misc_feature: MA Experiment 20000573 PARAMETER Experiment Name: At_100uM_ABA_Mutants__P Parameter: Timepoint (hr) Value: N/A
  misc_feature: MA Experiment 20000573 PARAMETER Experiment Name: At_100uM_ABA_Mutants__P Parameter: Tissue Value: Whole Plant
  misc_feature: MA Experiment 20000573 PARAMETER Experiment Name: At_100uM_ABA_Mutants__P Parameter: Treatment Value: None
  misc_feature: MA Experiment ID: 20000794 Result: Down-regulated in Transcription
  misc_feature: MA Experiment 20000794 PARAMETER Experiment Name: At_Petals_P Parameter: Age (day) Value: 23-25 days
  misc_feature: MA Experiment 20000794 PARAMETER Experiment Name: At_Petals_P Parameter: Plant Line Value: WS
  misc_feature: MA Experiment 20000794 PARAMETER Experiment Name: At_Petals_P Parameter: Tissue Value: Petals vs. Whole plant
aaaacaaacaactctttaactatcatcagatcaataaaaaccagaagaagtcatggctcagaacgatacagtgaagctgataggttcttggtctagcccttattcccttagggcacgtgtggctctacacttgaaatctgtcaagtacgagtacttagacgaacctgatgttcttaaagaaaagagtgaactccttctcaaatctaaccccatccacaagaaagtccctgtcctcctccatggtgacctctccatctctgagtccctcaacgttgttcaatacgtcgacgaggcttggccctccgttccttcaatccttccttctgatgcctatgatcgcgcatctgctcggttttgggctcagtacatcgatgacaagtgttttgcggcggtggatgcggtggtcggagcaaaagacgacgaagggaaaatggcggcggtgggaaagctgatggagtgtttggcgatacttgaagaaacgtttcagaagagcagcaaaggattagggttctttggaggagagaccatcggctaccttgacattgcttgttcggctcttttaggtccgatctctgtgatcgaggcgttttccggcgtcaagtttctccggcaagagacaacacctgggttgatcaaatgggccgagaggtttagggcccatgaagctgttaagccctacatgccaaccgtcgaagaggtcgttgcattcgcaaagcaaaagttcaatgttcagtgatgcgttttttgcttttaaaagcaaaagcaatgttgttgaatacgaataaaatgatgtttgttgtctttgagaaactttaaatttgtctgtgttttgtgccaaaacttctgattaattggtttttggtctttgtgcgttactattatcaattttattcttattatttgc

SEQ ID NO: 106840 - protein, 227 aa, Arabidopsis thaliana
  peptide (1)..(227): Ceres Seq. ID no. 13620596
  misc_feature (1)..(227): Homolog of NCBI NO: 15223432 NR Description: glutathione transferase, putative [Arabidopsis
  misc_feature (1)..(227): Homolog of NCBI NO: 25403291 NR Description: protein T7N9.20 [imported] - Arabidopsis thaliana
  misc_feature (1)..(227): Homolog of NCBI NO: 21592561 NR Description: glutathione transferase, putative [Arabidopsis
  misc_feature (1)..(223): Homolog of NCBI NO: 15223440 NR Description: glutathione transferase, putative [Arabidopsis
  misc_feature (1)..(115): Homolog of NCBI NO: 25403291 NR Description: protein T7N9.20 [imported] - Arabidopsis thaliana
  misc_feature (109)..(223): Homolog of NCBI NO: 25403291 NR Description: protein T7N9.20 [imported] - Arabidopsis thaliana
  misc_feature (1)..(226): Homolog of NCBI NO: 15222497 NR Description: glutathione transferase, putative [Arabidopsis
  misc_feature (1)..(226): Homolog of NCBI NO: 38454100 NR Description: At1g69920 [Arabidopsis thaliana]
  misc_feature (2)..(225): Homolog of NCBI NO: 15222499 NR Description: glutathione transferase, putative [Arabidopsis
  misc_feature (1)..(221): Homolog of NCBI NO: 6856103 NR Description: glutathione S-transferase [Gossypium hirsutum]
MAQNDTVKLIGSWSSPYSLRARVALHLKSVKYEYLDEPDVLKEKSELLLKSNPIHKKVPVLLHGDLSISESLNVVQYVDEAWPSVPSILPSDAYDRASARFWAQYIDDKCFAAVDAVVGAKDDEGKMAAVGKLMECLAILEETFQKSSKGLGFFGGETIGYLDIACSALLGPISVIEAFSGVKFLRQETTPGLIKWAERFRAHEAVKPYMPTVEEVVAFAKQKFNVQ

SEQ ID NO: 106841 - DNA, 1446 bp, Arabidopsis thaliana
  misc_feature (1)..(1446): Ceres Seq. ID no. 13650727
  misc_feature: MA Experiment ID: 20000171 Result: Down-regulated in Transcription
  misc_feature: MA Experiment 20000171 PARAMETER Experiment Name: At_42deg_Heat_P Parameter: Age (day) Value: 14
  misc_feature: MA Experiment 20000171 PARAMETER Experiment Name: At_42deg_Heat_P Parameter: Organism Value: A. thaliana
  misc_feature: MA Experiment 20000171 PARAMETER Experiment Name: At_42deg_Heat_P Parameter: Plant Line Value: WS
  misc_feature: MA Experiment 20000171 PARAMETER Experiment Name: At_42deg_Heat_P Parameter: Temperature (deg C) Value: 42 vs. 22
  misc_feature: MA Experiment 20000171 PARAMETER Experiment Name: At_42deg_Heat_P Parameter: Timepoint (hr) Value: 1
  misc_feature: MA Experiment 20000171 PARAMETER Experiment Name: At_42deg_Heat_P Parameter: Tissue Value: Aerial
  misc_feature: MA Experiment ID: 20000173 Result: Down-regulated in Transcription
  misc_feature: MA Experiment 20000173 PARAMETER Experiment Name: At_42deg_Heat_P Parameter: Age (day) Value: 14
  misc_feature: MA Experiment 20000173 PARAMETER Experiment Name: At_42deg_Heat_P Parameter: Organism Value: A. thaliana
  misc_feature: MA Experiment 20000173 PARAMETER Experiment Name: At_42deg_Heat_P Parameter: Plant Line Value: WS
  misc_feature: MA Experiment 20000173 PARAMETER Experiment Name: At_42deg_Heat_P Parameter: Temperature (deg C) Value: 42 vs. 22
  misc_feature: MA Experiment 20000173 PARAMETER Experiment Name: At_42deg_Heat_P Parameter: Timepoint (hr) Value: 6
  misc_feature: MA Experiment 20000173 PARAMETER Experiment Name: At_42deg_Heat_P Parameter: Tissue Value: Aerial
  misc_feature: MA Experiment ID: 20000495 Result: Up-regulated in Transcription
  misc_feature: MA Experiment 20000495 PARAMETER Experiment Name: At_Guard_Cells_P Parameter: Harvest Date Value: 8/2/2002
  misc_feature: MA Experiment 20000495 PARAMETER Experiment Name: At_Guard_Cells_P Parameter: Organism Value: A. thaliana
  misc_feature: MA Experiment 20000495 PARAMETER Experiment Name: At_Guard_Cells_P Parameter: Tissue Value: Guard Cells vs. Leaves
  misc_feature: MA Experiment ID: 20000573 Result: Down-regulated in Transcription
  misc_feature: MA Experiment 20000573 PARAMETER Experiment Name: At_100uM_ABA_Mutants__P Parameter: Organism Value: A. thaliana
  misc_feature: MA Experiment 20000573 PARAMETER Experiment Name: At_100uM_ABA_Mutants__P Parameter: Plant Line Value: CS22 vs. Ler wt
  misc_feature: MA Experiment 20000573 PARAMETER Experiment Name: At_100uM_ABA_Mutants__P Parameter: Timepoint (hr) Value: N/A
  misc_feature: MA Experiment 20000573 PARAMETER Experiment Name: At_100uM_ABA_Mutants__P Parameter: Tissue Value: Whole Plant
  misc_feature: MA Experiment 20000573 PARAMETER Experiment Name: At_100uM_ABA_Mutants__P Parameter: Treatment Value: None
  misc_feature: MA Experiment ID: 20001451 Result: Up-regulated in Transcription
  misc_feature: MA Experiment 20001451 PARAMETER Experiment Name: At_Far-red-induction_P Parameter: Age (day) Value: 7
  misc_feature: MA Experiment 20001451 PARAMETER Experiment Name: At_Far-red-induction_P Parameter: Light Value: Far-red vs. White
  misc_feature: MA Experiment 20001451 PARAMETER Experiment Name: At_Far-red-induction_P Parameter: Organism Value: A. thaliana
  misc_feature: MA Experiment 20001451 PARAMETER Experiment Name: At_Far-red-induction_P Parameter: Plant Line Value: Columbia
  misc_feature: MA Experiment 20001451 PARAMETER Experiment Name: At_Far-red-induction_P Parameter: Timepoint (hr) Value: 24
  misc_feature: MA Experiment 20001451 PARAMETER Experiment Name: At_Far-red-induction_P Parameter: Tissue Value: Whole Plant
  misc_feature: MA Experiment ID: 20001757 Result: Down-regulated in Transcription
  misc_feature: MA Experiment 20001757 PARAMETER Experiment Name: At_50mM_NH4NO3_L-to-H_P Parameter: Timepoint (hr) Value: 6
  misc_feature: MA Experiment 20001757 PARAMETER Experiment Name: At_50mM_NH4NO3_L-to-H_P Parameter: Tissue Value: Leaf
  misc_feature: MA Experiment 20001757 PARAMETER Experiment Name: At_50mM_NH4NO3_L-to-H_P Parameter: Treatment Value: 50mM NH4NO3 vs 100mM Mannitol
  misc_feature: MA Experiment ID: 20001911 Result: Up-regulated in Transcription
  misc_feature: MA Experiment 20001911 PARAMETER Experiment Name: At_Drought_Reproduction_P Parameter: Age (day) Value: 40
  misc_feature: MA Experiment 20001911 PARAMETER Experiment Name: At_Drought_Reproduction_P Parameter: Organism Value: A. thaliana
  misc_feature: MA Experiment 20001911 PARAMETER Experiment Name: At_Drought_Reproduction_P Parameter: Plant Line Value: WS
  misc_feature: MA Experiment 20001911 PARAMETER Experiment Name: At_Drought_Reproduction_P Parameter: Timepoint (day) Value: 10
  misc_feature: MA Experiment 20001911 PARAMETER Experiment Name: At_Drought_Reproduction_P Parameter: Tissue Value: Flowers
  misc_feature: MA Experiment 20001911 PARAMETER Experiment Name: At_Drought_Reproduction_P Parameter: Treatment Value: Drought vs. No Drought
gtggcatcttaatcaaattcttcttcgccttcactttcaattgtctctccaatatcctcaccagatctgaaaccggcaccggcgacgtgtttccgaggttaaacactctcaattgcgccggacctctcttcttccctccactccctgtactcttctccgccgtatctagcgccgctaaacatcccttcactatatcgtctatgtaagtgaaatccctagccaccgttccgtgattcgccgattcgaatatcgaaatcgatttgccttttagaatatctttagtgaagaagaaatacgccatgtctggtcttccccaaggtccatacacggtgaaaaatcttaatccggttagagataatccatagatgtggttgtaggtatgtgcgatctcttcgccggcttttttagtggcggcgtataaactcgccggttgatctgttttatctttctccgagaacggaactttggtgttgagtccgtagacggagctagacgaagcccagactatagcaggttgtggattcacagatttgcagatctcgaggagattgacgaatccggcgatgttgctatgaacgtacgagctagggttttccattgcgtaccgtacaccagcttgagctgctaaatgcataacgtgtgtgaaggagacgatcttgaatagcttacggagtaattcgacgtcgtttatgtctccttctacgatgaagatcccacttctctcgagtaaagctcgtcttgctcgtttcagagatggatcgtagtaatcgttgaagttgtcgaggccgattacgccgtctccgcggcgttttaatgcggcggagacgtgtgttccgacgaaaccagctgctccggttactaaaactgtgattccgttgtttgttgaggttcggattcgagctgaggatctgagacgtttttcccaagctggtcctccgtaggtgttggttcggagtgaacggcgagatggatcggacggtgaagaagggttaatggacggtggagatcggaggaagagtagagagatgagacagaggaggaagaaggagaaaaatgcaaactttgtgagagaagattggaatctgagacgatgcaagtaggaagatttctccatcttgaatttgcctgggcttgaagaacatggggattgaagattttagagatccaaatcatagggaaaatatgaagaagaagaagaagaagaagaagaagaagaagaagaagaagaagaagaagagagtcaaaaaaattactgtaaaaatttgttgactcttctaaagatttgttgtcgagtcttgaaatttgattggtgagatactaatactccaagattttcgggaagccactcgtcccaaaagttttgaatttgaaccaaagttttaaacttttgttaatagatttgttgcggatagttgctaaatacaaaaatggactctaaatttgaat

SEQ ID NO: 106842 - protein, 67 aa, Arabidopsis thaliana; identical to SEQ ID NO: 250
  peptide (1)..(67): Ceres Seq. ID no. 13650728

SEQ ID NO: 106843 - protein, 42 aa, Arabidopsis thaliana
  peptide (1)..(42): Ceres Seq. ID no. 13650729
MGIEDFRDPNHRENMKKKKKKKKKKKKKKKKKRVKKITVKIC

SEQ ID NO: 106844 - protein, 35 aa, Arabidopsis thaliana; identical to SEQ ID NO: 69360
  peptide (1)..(35): Ceres Seq. ID no. 13650730

SEQ ID NO: 106845 - DNA, 645 bp, Arabidopsis thaliana
  misc_feature (1)..(645): Ceres Seq. ID no. 13620618
  misc_feature: MA Experiment ID: 20000184 Result: Up-regulated in Transcription
  misc_feature: MA Experiment 20000184 PARAMETER Experiment Name: At_Shoots__P Parameter: Age (day) Value: 7
  misc_feature: MA Experiment 20000184 PARAMETER Experiment Name: At_Shoots__P Parameter: Tissue Value: Shoots vs. Whole Plant
  misc_feature: MA Experiment ID: 20000437 Result: Up-regulated in Transcription
  misc_feature: MA Experiment 20000437 PARAMETER Experiment Name: At_Drought_P Parameter: Age (day) Value: 8
  misc_feature: MA Experiment 20000437 PARAMETER Experiment Name: At_Drought_P Parameter: Organism Value: A. thaliana
  misc_feature: MA Experiment 20000437 PARAMETER Experiment Name: At_Drought_P Parameter: Plant Line Value: WS
  misc_feature: MA Experiment 20000437 PARAMETER Experiment Name: At_Drought_P Parameter: Timepoint (hr) Value: 24
  misc_feature: MA Experiment 20000437 PARAMETER Experiment Name: At_Drought_P Parameter: Tissue Value: Whole Plant
  misc_feature: MA Experiment 20000437 PARAMETER Experiment Name: At_Drought_P Parameter: Treatment Value: Drought vs. No Drought
tgatttctaaattacaaacggcttctcnagctagctcttttttctaaaactttcacaaagaacgatctcttaatttgtggctgacatagcttggttcttaataaagaagttgtggaaatgggaagcctcaagtacttaggagttgctttctttgttttagttgtttttgacgtctgtttagcagctagatcaccaaaagctcttggtagagggtccggttcaggttctggatatggttcaggctctgggggaggtaacggtggtgggggaggtggtggtggcggagggggaggcggcggaggaggtggtggtggagatggatcaggttcagggagtggttacgggtcagggtatgggtccggtagtggttatggaggaggaaacaacggtggtggcggtggaggtgggggcagaggtggtggaggaggaggcggaaatggaggttccggaaacgggtcaggttatggaagcggctctggatatggaagtggtgctggtagaggtggtggtgggggaggcggcggtggaggaggaggaggtggtggtggaggtagccgcggaaatggatccggctatggaagtggatatggtgaagggtatggaagcggatacggtggtggagataattacggtgactcaccctaa

SEQ ID NO: 106846 - protein, 175 aa, Arabidopsis thaliana
  peptide (1)..(175): Ceres Seq. ID no. 13620619
  misc_feature (41)..(171): Pfam Name: Herpesvirus latent membrane protein 1 (LMP1) Pfam Description: Herpesvirus latent membrane protein 1 (LMP1)
  misc_feature (1)..(175): Homolog of NCBI NO: 15228967 NR Description: glycine-rich protein [Arabidopsis thaliana]
  misc_feature (29)..(172): Homolog of NCBI NO: 30679126 NR Description: expressed protein [Arabidopsis thaliana]
  misc_feature (1)..(171): Homolog of NCBI NO: 232183 NR Description: Glycine-rich cell wall structural protein 2
  misc_feature (30)..(172): Homolog of NCBI NO: 15234690 NR Description: hypothetical protein [Arabidopsis thaliana]
  misc_feature (30)..(168): Homolog of NCBI NO: 37534900 NR Description: putative glycine-rich protein [Oryza sativa
  misc_feature (30)..(172): Homolog of NCBI NO: 30679122 NR Description: expressed protein [Arabidopsis thaliana]
  misc_feature (30)..(172): Homolog of NCBI NO: 30679126 NR Description: expressed protein [Arabidopsis thaliana]
  misc_feature (29)..(172): Homolog of NCBI NO: 30679122 NR Description: expressed protein [Arabidopsis thaliana]
  misc_feature (30)..(171): Homolog of NCBI NO: 37534900 NR Description: putative glycine-rich protein [Oryza sativa
  misc_feature (21)..(172): Homolog of NCBI NO: 15227583 NR Description: glycine-rich protein [Arabidopsis thaliana]
MGSLKYLGVAFFVLVVFDVCLAARSPKALGRGSGSGSGYGSGSGGGNGGGGGGGGGGGGGGGGGGGDGSGSGSGYGSGYGSGSGYGGGNNGGGGGGGGRGGGGGGGNGGSGNGSGYGSGSGYGSGAGRGGGGGGGGGGGGGGGGGSRGNGSGYGSGYGEGYGSGYGGGDNYGDSP

SEQ ID NO: 106847 - protein, 137 aa, Arabidopsis thaliana
  peptide (1)..(137): Ceres Seq. ID no. 13620620
MVQALGEVTVVGEVVVAEGEAAEEVVVEMDQVQGVVTGQGMGPVVVMEEETTVVAVEVGAEVVEEEAEMEVPETGQVMEAALDMEVVLVEVVVGEAAVEEEEVVVEVAAEMDPAMEVDMVKGMEADTVVEIITVTHP

SEQ ID NO: 106848 - protein, 109 aa, Arabidopsis thaliana
  peptide (1)..(109): Ceres Seq. ID no. 13620621
MDQVQGVVTGQGMGPVVVMEEETTVVAVEVGAEVVEEEAEMEVPETGQVMEAALDMEVVLVEVVVGEAAVEEEEVVVEVAAEMDPAMEVDMVKGMEADTVVEIITVTHP

SEQ ID NO: 106849 - DNA, 2837 bp, Arabidopsis thaliana
  misc_feature (1)..(2837): Ceres Seq. ID no. 13620637
  misc_feature: MA Experiment ID: 20000173 Result: Down-regulated in Transcription
  misc_feature: MA Experiment 20000173 PARAMETER Experiment Name: At_42deg_Heat_P Parameter: Age (day) Value: 14
  misc_feature: MA Experiment 20000173 PARAMETER Experiment Name: At_42deg_Heat_P Parameter: Organism Value: A. thaliana
  misc_feature: MA Experiment 20000173 PARAMETER Experiment Name: At_42deg_Heat_P Parameter: Plant Line Value: WS
  misc_feature: MA Experiment 20000173 PARAMETER Experiment Name: At_42deg_Heat_P Parameter: Temperature (deg C) Value: 42 vs. 22
  misc_feature: MA Experiment 20000173 PARAMETER Experiment Name: At_42deg_Heat_P Parameter: Timepoint (hr) Value: 6
  misc_feature: MA Experiment 20000173 PARAMETER Experiment Name: At_42deg_Heat_P Parameter: Tissue Value: Aerial
  misc_feature: MA Experiment ID: 20000495 Result: Up-regulated in Transcription
  misc_feature: MA Experiment 20000495 PARAMETER Experiment Name: At_Guard_Cells_P Parameter: Harvest Date Value: 8/2/2002
  misc_feature: MA Experiment 20000495 PARAMETER Experiment Name: At_Guard_Cells_P Parameter: Organism Value: A. thaliana
  misc_feature: MA Experiment 20000495 PARAMETER Experiment Name: At_Guard_Cells_P Parameter: Tissue Value: Guard Cells vs. Leaves
  misc_feature: MA Experiment ID: 20001247 Result: Down-regulated in Transcription
  misc_feature: MA Experiment 20001247 PARAMETER Experiment Name: At_Far-red-induction_P Parameter: Age (day) Value: 7
  misc_feature: MA Experiment 20001247 PARAMETER Experiment Name: At_Far-red-induction_P Parameter: Light Value: Far-red vs. White
  misc_feature: MA Experiment 20001247 PARAMETER Experiment Name: At_Far-red-induction_P Parameter: Organism Value: A. thaliana
  misc_feature: MA Experiment 20001247 PARAMETER Experiment Name: At_Far-red-induction_P Parameter: Plant Line Value: Columbia
  misc_feature: MA Experiment 20001247 PARAMETER Experiment Name: At_Far-red-induction_P Parameter: Timepoint (hr) Value: 1
  misc_feature: MA Experiment 20001247 PARAMETER Experiment Name: At_Far-red-induction_P Parameter: Tissue Value: Whole Plant
aatggcgatatgcagactagagtgtcatcacctttcatctctagagctctttcgtcgtcatctaacctcaatgagcttcgtcgaattcacgcccttgtgatctctcttggtcttgacagctccgacttcttctccggtaagcttatcgacaagtactctcactttcgtgaacccgcctcttccctctctgttttccgacgagtttctccggccaaaaatgtttacctctggaattcaatcatcagagctttttctaagaatggtttgttccctgaagccctcgagttttacgggaaactccgggaatccaaggtttctcctgataagtacacgtttccttcggttatcaaagcctgcgcgggattgttcgatgcggagatgggagatttggtttatgaacagatattggatatgggttttgaatcggatttatttgtaggtaatgcacttgtggatatgtattcgagaatgggattgttaactagagcacgacaagtgttcgacgaaatgcctgtgagagatctcgtgtcctggaacagtttgatttctgggtatagttcccatggttactatgaggaagctttggaaatttatcatgagttgaagaattcgtggattgtaccagattccttcacggtttcaagtgttttgcctgcatttgggaatttgctggttgtcaaacaaggacagggacttcatggttttgctctgaagtcaggtgttaattccgttgtggtggttaacaatggactagttgcaatgtacttgaaatttcgcagaccaacggatgcaagacgagtttttgatgagatggatgttcgagattctgttagttacaatactatgatctgcggatatctcaagttagagatggttgaagaatccgtgaggatgtttttggaaaacttggatcagttcaagcctgatctcttaacagttagttctgttctccgtgcctgcggacacttacgggacttgagcttggcaaagtacatttacaactatatgttgaaagctggatttgttcttgaatctactgttagaaacattctaattgacgtgtatgcaaagtgtggtgacatgatcaccgcaagagatgttttcaacagcatggaatgcaaggatactgtttcgtggaactcgataatcagtggatatatacaaagcggagatcttatggaagccatgaaactcttcaagatgatgatgatcatggaagagcaggcggatcacatcacttatttgatgcttatatctgtctccacacgtctagcagacttgaaatttgggaaagggctacactcaaatgggataaaatctggaatttgtatcgatctttctgttagtaatgctttgattgatatgtatgcgaagtgcggggaagtaggagattccttgaagatattcagtagtatgggaactggggatacggtaacatggaacacggttatttcagcatgtgttcgttttggggatttcgcaaccggtttgcaggtaactactcaaatgaggaagagcgaagtggtgcctgatatggctactttcttagttacattgcctatgtgtgcttcacttgctgcaaaacgactaggcaaggagatccattgttgtctgttgaggtttggatatgaatcagagttgcaaatagggaatgcactaattgaaatgtactcaaaatgtggttgtttggagaattcgtctagagtctttgaacgtatgagtagaagagatgttgtgacatggacaggaatgatctatgcatatggaatgtatggcgaaggtgagaaagctcttgaaacttttgcggatatggaaaaatccggtattgttcccgatagtgttgtcttcattgccatcatatatgcttgcagccactctggtttggtagacgaaggcttggcttgctttgagaagatgaaaactcactacaaaattgacccgatgattgaacattatgcttgtgtggtcgatttgctgtcccggtcacagaagatttcaaaagccgaagaatttatccaagcaatgccgataaaaccagatgcaagcatatgggcatctgtgctaagagcttgtcgaacaagtggggacatggagactgctgaaagagtatctaggaggatcattgaactgaacccggatgatccaggttactcgattctagcatcaaacgcatatgcagccttgagaaaatgggacaaagtgagtctaatccgcaaatccttgaaagataaacacatcacgaagaatcctggatatagctggatcgaagtcggtaaaaacgttcacgtgttcagctcaggagatgattcagctcctcagtcagaagccatctacaagtcactggagatactttacagtctgatggctaaagaaggctacattcccgatccaagggaagtgtcacagaatctagaggaagaagaagagaagagacgtttaatctgtgggcacagcgagagacttgctattgcgtttggactgttgaacacagaaccagggactccattgcaggtgatgaagaaccttcgtgtttgtggtgactgtcatgaagtcacgaagctgatatcgaagattgtgggacgtgagatattagtgcgggatgctaatcgattccatctcttcaaagacggcacttgtagctgcaaagatcggtggtgaatagtttatttgatgtaatttagagcatggatttgcgaaaattagactgaaaatatacaaagaaaatagtagaagaagagaacgattacgaaatatcttgaacaagctctgaaaattttccatggccctcaataatgctgtgagaattgaaaagtgatttattatcatccaaaatcatg

SEQ ID NO: 106850 - protein, 885 aa, Arabidopsis thaliana
  peptide (1)..(885): Ceres Seq. ID no. 13620638
  misc_feature (176)..(210): Pfam Name: PPR repeat Pfam Description: PPR repeat
  misc_feature (78)..(885): Homolog of NCBI NO: 15234006 NR Description: pentatricopeptide (PPR) repeat-containing protein
  misc_feature (26)..(885): Homolog of NCBI NO: 15236324 NR Description: pentatricopeptide (PPR) repeat-containing protein
  misc_feature (27)..(885): Homolog of NCBI NO: 18394615 NR Description: pentatricopeptide (PPR) repeat-containing protein
  misc_feature (349)..(885): Homolog of NCBI NO: 15237421 NR Description: pentatricopeptide (PPR) repeat-containing protein
  misc_feature (8)..(361): Homolog of NCBI NO: 15237421 NR Description: pentatricopeptide (PPR) repeat-containing protein
  misc_feature (148)..(885): Homolog of NCBI NO: 15232837 NR Description: pentatricopeptide (PPR) repeat-containing protein thaliana] >gi|6091739|gb|AAF03451.1|AC010797_27 hypothetical [Arabidopsis thaliana] >gi|6513930|gb|AAF14834.1|AC011664_16
  misc_feature (134)..(207): Homolog of NCBI NO: 15232837 NR Description: pentatricopeptide (PPR) repeat-containing protein thaliana] >gi|6091739|gb|AAF03451.1|AC010797_27 hypothetical [Arabidopsis thaliana] >gi|6513930|gb|AAF14834.1|AC011664_16
  misc_feature (139)..(885): Homolog of NCBI NO: 11281371 NR Description: hypothetical protein T8H10.30 - Arabidopsis >gi|6706414|emb|CAB66100.1| putative protein [Arabidopsis
  misc_feature (139)..(885): Homolog of NCBI NO: 30794008 NR Description: unknown protein [Arabidopsis thaliana]
  misc_feature (139)..(885): Homolog of NCBI NO: 30694644 NR Description: pentatricopeptide (PPR) repeat-containing protein
NGDMQTRVSSPFISRALSSSSNLNELRRIHALVISLGLDSSDFFSGKLIDKYSHFREPASSLSVFRRVSPAKNVYLWNSIIRAFSKNGLFPEALEFYGKLRESKVSPDKYTFPSVIKACAGLFDAEMGDLVYEQILDMGFESDLFVGNALVDMYSRMGLLTRARQVFDEMPVRDLVSWNSLISGYSSHGYYEEALEIYHELKNSWIVPDSFTVSSVLPAFGNLLVVKQGQGLHGFALKSGVNSVVVVNNGLVAMYLKFRRPTDARRVFDEMDVRDSVSYNTMICGYLKLEMVEESVRMFLENLDQFKPDLLTVSSVLRACGHLRDLSLAKYIYNYMLKAGFVLESTVRNILIDVYAKCGDMITARDVFNSMECKDTVSWNSIISGYIQSGDLMEAMKLFKMMMIMEEQADHITYLMLISVSTRLADLKFGKGLHSNGIKSGICIDLSVSNALIDMYAKCGEVGDSLKIFSSMGTGDTVTWNTVISACVRFGDFATGLQVTTQMRKSEVVPDMATFLVTLPMCASLAAKRLGKEIHCCLLRFGYESELQIGNALIEMYSKCGCLENSSRVFERMSRRDVVTWTGMIYAYGMYGEGEKALETFADMEKSGIVPDSVVFIAIIYACSHSGLVDEGLACFEKMKTHYKIDPMIEHYACVVDLLSRSQKISKAEEFIQAMPIKPDASIWASVLRACRTSGDMETAERVSRRIIELNPDDPGYSILASNAYAALRKWDKVSLIRKSLKDKHITKNPGYSWIEVGKNVHVFSSGDDSAPQSEAIYKSLEILYSLMAKEGYIPDPREVSQNLEEEEEKRRLICGHSERLAIAFGLLNTEPGTPLQVMKNLRVCGDCHEVTKLISKIVGREILVRDANRFHLFKDGTCSCKDRW

SEQ ID NO: 106851 - protein, 882 aa, Arabidopsis thaliana
  peptide (1)..(882): Ceres Seq. ID no. 13620639
  misc_feature (173)..(207): Pfam Name: PPR repeat Pfam Description: PPR repeat
  misc_feature (75)..(882): Homolog of NCBI NO: 15234006 NR Description: pentatricopeptide (PPR) repeat-containing protein
  misc_feature (23)..(882): Homolog of NCBI NO: 15236324 NR Description: pentatricopeptide (PPR) repeat-containing protein
  misc_feature (24)..(882): Homolog of NCBI NO: 18394615 NR Description: pentatricopeptide (PPR) repeat-containing protein
  misc_feature (346)..(882): Homolog of NCBI NO: 15237421 NR Description: pentatricopeptide (PPR) repeat-containing protein
  misc_feature (5)..(358): Homolog of NCBI NO: 15237421 NR Description: pentatricopeptide (PPR) repeat-containing protein
  misc_feature (145)..(882): Homolog of NCBI NO: 15232837 NR Description: pentatricopeptide (PPR) repeat-containing protein thaliana] >gi|6091739|gb|AAF03451.1|AC010797_27 hypothetical [Arabidopsis thaliana] >gi|6513930|gb|AAF14834.1|AC011664_16
  misc_feature (131)..(204): Homolog of NCBI NO: 15232837 NR Description: pentatricopeptide (PPR) repeat-containing protein thaliana] >gi|6091739|gb|AAF03451.1|AC010797_27 hypothetical [Arabidopsis thaliana] >gi|6513930|gb|AAF14834.1|AC011664_16
  misc_feature (136)..(882): Homolog of NCBI NO: 11281371 NR Description: hypothetical protein T8H10.30 - Arabidopsis >gi|6706414|emb|CAB66100.1| putative protein [Arabidopsis
  misc_feature (136)..(882): Homolog of NCBI NO: 30694644 NR Description: pentatricopeptide (PPR) repeat-containing protein
  misc_feature (136)..(882): Homolog of NCBI NO: 30794008 NR Description: unknown protein [Arabidopsis thaliana]
MQTRVSSPFISRALSSSSNLNELRRIHALVISLGLDSSDFFSGKLIDKYSHFREPASSLSVFRRVSPAKNVYLWNSIIRAFSKNGLFPEALEFYGKLRESKVSPDKYTFPSVIKACAGLFDAEMGDLVYEQILDMGFESDLFVGNALVDMYSRMGLLTRARQVFDEMPVRDLVSWNSLISGYSSHGYYEEALEIYHELKNSWIVPDSFTVSSVLPAFGNLLVVKQGQGLHGFALKSGVNSVVVVNNGLVAMYLKFRRPTDARRVFDEMDVRDSVSYNTMICGYLKLEMVEESVRMFLENLDQFKPDLLTVSSVLRACGHLRDLSLAKYIYNYMLKAGFVLESTVRNILIDVYAKCGDMITARDVFNSMECKDTVSWNSIISGYIQSGDLMEAMKLFKMMMIMEEQADHITYLMLISVSTRLADLKFGKGLHSNGIKSGICIDLSVSNALIDMYAKCGEVGDSLKIFSSMGTGDTVTWNTVISACVRFGDFATGLQVTTQMRKSEVVPDMATFLVTLPMCASLAAKRLGKEIHCCLLRFGYESELQIGNALIEMYSKCGCLENSSRVFERMSRRDVVTWTGMIYAYGMYGEGEKALETFADMEKSGIVPDSVVFIAIIYACSHSGLVDEGLACFEKMKTHYKIDPMIEHYACVVDLLSRSQKISKAEEFIQAMPIKPDASIWASVLRACRTSGDMETAERVSRRIIELNPDDPGYSILASNAYAALRKWDKVSLIRKSLKDKHITKNPGYSWIEVGKNVHVFSSGDDSAPQSEAIYKSLEILYSLMAKEGYIPDPREVSQNLEEEEEKRRLICGHSERLAIAFGLLNTEPGTPLQVMKNLRVCGDCHEVTKLISKIVGREILVRDANRFHLFKDGTCSCKDRW

SEQ ID NO: 106852 - protein, 759 aa, Arabidopsis thaliana
  peptide (1)..(759): Ceres Seq. ID no. 13620640
  misc_feature (50)..(84): Pfam Name: PPR repeat Pfam Description: PPR repeat
  misc_feature (1)..(759): Homolog of NCBI NO: 15234006 NR Description: pentatricopeptide (PPR) repeat-containing protein
  misc_feature (1)..(759): Homolog of NCBI NO: 15236324 NR Description: pentatricopeptide (PPR) repeat-containing protein
  misc_feature (1)..(759): Homolog of NCBI NO: 18394615 NR Description: pentatricopeptide (PPR) repeat-containing protein
  misc_feature (223)..(759): Homolog of NCBI NO: 15237421 NR Description: pentatricopeptide (PPR) repeat-containing protein
  misc_feature (1)..(235): Homolog of NCBI NO: 15237421 NR Description: pentatricopeptide (PPR) repeat-containing protein
  misc_feature (22)..(759): Homolog of NCBI NO: 15232837 NR Description: pentatricopeptide (PPR) repeat-containing protein thaliana] >gi|6091739|gb|AAF03451.1|AC010797_27 hypothetical [Arabidopsis thaliana] >gi|6513930|gb|AAF14834.1|AC011664_16
  misc_feature (8)..(81): Homolog of NCBI NO: 15232837 NR Description: pentatricopeptide (PPR) repeat-containing protein thaliana] >gi|6091739|gb|AAF03451.1|AC010797_27 hypothetical [Arabidopsis thaliana] >gi|6513930|gb|AAF14834.1|AC011664_16
  misc_feature (13)..(759): Homolog of NCBI NO: 11281371 NR Description: hypothetical protein T8H10.30 - Arabidopsis >gi|6706414|emb|CAB66100.1| putative protein [Arabidopsis
  misc_feature (13)..(759): Homolog of NCBI NO: 30694644 NR Description: pentatricopeptide (PPR) repeat-containing protein
  misc_feature (13)..(759): Homolog of NCBI NO: 30794008 NR Description: unknown protein [Arabidopsis thaliana]
MGDLVYEQILDMGFESDLFVGNALVDMYSRMGLLTRARQVFDEMPVRDLVSWNSLISGYSSHGYYEEALEIYHELKNSWIVPDSFTVSSVLPAFGNLLVVKQGQGLHGFALKSGVNSVVVVNNGLVAMYLKFRRPTDARRVFDEMDVRDSVSYNTMICGYLKLEMVEESVRMFLENLDQFKPDLLTVSSVLRACGHLRDLSLAKYIYNYMLKAGFVLESTVRNILIDVYAKCGDMITARDVFNSMECKDTVSWNSIISGYIQSGDLMEAMKLFKMMMIMEEQADHITYLMLISVSTRLADLKFGKGLHSNGIKSGICIDLSVSNALIDMYAKCGEVGDSLKIFSSMGTGDTVTWNTVISACVRFGDFATGLQVTTQMRKSEVVPDMATFLVTLPMCASLAAKRLGKEIHCCLLRFGYESELQIGNALIEMYSKCGCLENSSRVFERMSRRDVVTWTGMIYAYGMYGEGEKALETFADMEKSGIVPDSVVFIAIIYACSHSGLVDEGLACFEKMKTHYKIDPMIEHYACVVDLLSRSQKISKAEEFIQAMPIKPDASIWASVLRACRTSGDMETAERVSRRIIELNPDDPGYSILASNAYAALRKWDKVSLIRKSLKDKHITKNPGYSWIEVGKNVHVFSSGDDSAPQSEAIYKSLEILYSLMAKEGYIPDPREVSQNLEEEEEKRRLICGHSERLAIAFGLLNTEPGTPLQVMKNLRVCGDCHEVTKLISKIVGREILVRDANRFHLFKDGTCSCKDRW

SEQ ID NO: 106853 - DNA, 1483 bp, Arabidopsis thaliana
  misc_feature (1)..(1483): Ceres Seq. ID no. 13620652
  misc_feature: MA Experiment ID: 20000315 Result: Up-regulated in Transcription
  misc_feature: MA Experiment 20000315 PARAMETER Experiment Name: At_14day_Shoots-Roots_Sub_P Parameter: Age (day) Value: 14
  misc_feature: MA Experiment 20000315 PARAMETER Experiment Name: At_14day_Shoots-Roots_Sub_P Parameter: Organism Value: A. thaliana
  misc_feature: MA Experiment 20000315 PARAMETER Experiment Name: At_14day_Shoots-Roots_Sub_P Parameter: Plant Line Value: WS
  misc_feature: MA Experiment 20000315 PARAMETER Experiment Name: At_14day_Shoots-Roots_Sub_P Parameter: Tissue Value: Shoots vs. Whole Plant
cttaacctgaagaacgaagaaccgtctctaaaactccgacgaacgaaaaatgaagtcattagcttcgccgccgtgtctccgcctgataccgacggcacaccgtcagctcaattcgcgtcaatcttcctccgcctgttatatacacggtggctcttctgtgaacaaatccaataatctctcattctcctcatccacatccggatttgcgtcaccactagctgtagagaaggaattacgctcttcattcgtacagacggctgctgttcgccatgttacggggtctcttatcagaggcgaaggtcttagattcgccatcgtggtagctcgtttcaatgaggttgtgactaagttgcttttggaaggagcgattgagactttcaagaagtattcagtcagagaagaagacattgaagttatttgggttcctggcagctttgaaattggtgttgttgcacaaaatcttgggaaatcgggaaaatttcatgctgttttatgtatcggcgctgtgataagaggagataccacacattatgatgctgttgccaactctgctgcgtctggagtactttctgctagcataaattcaggcgttccatgcatatttggtgtactgacttgcgaggacatggatcaggctctgaatcgatctggtggcaaagccggcaataagggagctgaaactgctttgaccacgttctcgagaaccggcttaatccacaaaaaggggggaaaaaaacacacgaacatttctgtttgagagaaaaaaattaatggaaggtcttttgcagtttctattagccaaaatcattttgttggctttagcatcttcgtttgtatattgttacgacccatctcctcttcaagactactgtgttgccaccaacgaaactaatggagtttatgtaaatggagagttctgcaaagatccaaaacgtgtaacaaccaatgatttttatacttccggcctaaacgtccccggaaacaccatcatcgggcccggcgctagaaacaccgtcgtggatgtcgaaagactgcctggtctcaacactcttggggtcgacattgcccgctatgactttgccccgggcggtctagacccacctcacacacacccgcgtggcagccagatcttcttagtcatgaagggcaagcttttcgttggttttgtgtcgtcaaatgaatacaactacacgctcttcaccaaagttctttatccgggagatgtatttgtgtttcccaaaggtttgatacattttcatgcgaatattggggagacaaatgccgttgtgatttctgcgggtgggagccaagaccccggtaggatcataataggtgatgcggttttcggatcaaaacctttgattgatcccaaggttttggctaaagcttttgcgttggactacaacaaagtgaaatatcttcaggcagtgttttcttgatgacatactagcttaagagaataatgataaaatatagttatgcg

SEQ ID NO: 106854 - protein, 235 aa, Arabidopsis thaliana
  peptide (1)..(235): Ceres Seq. ID no. 13620653
  misc_feature (82)..(221): Pfam Name: 6,7-dimethyl-8-ribityllumazine synthase Pfam Description: 6,7-dimethyl-8-ribityllumazine synthase
  misc_feature (1)..(221): Homolog of NCBI NO: 15224809 NR Description: 6,7-dimethyl-8-ribityllumazine synthase precursor
  misc_feature (25)..(221): Homolog of NCBI NO: 38345388 NR Description: OSJNBa0067K08.17 [Oryza sativa (japonica
  misc_feature (75)..(213): Homolog of NCBI NO: 32034734 NR Description: hypothetical protein [Actinobacillus
  misc_feature (86)..(222): Homolog of NCBI NO: 31340367 NR Description: 6,7-dimethyl-8-ribityllumazine synthase (DMRL (Lumazine synthase) (Riboflavin synthase beta chain)
  misc_feature (75)..(222): Homolog of NCBI NO: 31195341 NR Description: ENSANGP00000000996 [Anopheles gambiae]
  misc_feature (74)..(224): Homolog of NCBI NO: 22994891 NR Description: hypothetical protein [Xylella fastidiosa Dixon]
  misc_feature (86)..(226): Homolog of NCBI NO: 32265537 NR Description: riboflavin synthase beta-chain [Helicobacter
  misc_feature (89)..(214): Homolog of NCBI NO: 31194207 NR Description: ENSANGP00000000293 [Anopheles gambiae]
  misc_feature (80)..(222): Homolog of NCBI NO: 32491212 NR Description: ribH [Wigglesworthia glossinidia endosymbiont of
  misc_feature (82)..(227): Homolog of NCBI NO: 22984927 NR Description: hypothetical protein [Burkholderia fungorum]
MKSLASPPCLRLIPTAHRQLNSRQSSSACYIHGGSSVNKSNNLSFSSSTSGFASPLAVEKELRSSFVQTAAVRHVTGSLIRGEGLRFAIVVARFNEVVTKLLLEGAIETFKKYSVREEDIEVIWVPGSFEIGVVAQNLGKSGKFHAVLCIGAVIRGDTTHYDAVANSAASGVLSASINSGVPCIFGVLTCEDMDQALNRSGGKAGNKGAETALTTFSRTGLIHKKGGKKHTNISV

SEQ ID NO: 106855 - protein, 222 aa, Arabidopsis thaliana
  peptide (1)..(222): Ceres Seq. ID no. 13620654
  misc_feature (64)..(215): Pfam Name: Cupin Pfam Description: Cupin
  misc_feature (1)..(222): Homolog of NCBI NO: 15229243 NR Description: germin-like protein, putative [Arabidopsis
  misc_feature (1)..(222): Homolog of NCBI NO: 15229245 NR Description: germin-like protein, putative [Arabidopsis
  misc_feature (1)..(222): Homolog of NCBI NO: 15229234 NR Description: germin-like protein, putative [Arabidopsis
  misc_feature (6)..(222): Homolog of NCBI NO: 15229241 NR Description: germin-like protein, putative [Arabidopsis
  misc_feature (1)..(222): Homolog of NCBI NO: 15230587 NR Description: germin-like protein, putative [Arabidopsis
  misc_feature (1)..(221): Homolog of NCBI NO: 15229247 NR Description: germin-like protein, putative [Arabidopsis
  misc_feature (9)..(221): Homolog of NCBI NO: 15241662 NR Description: germin-like protein (AtGER2) [Arabidopsis
  misc_feature (9)..(221): Homolog of NCBI NO: 15241640 NR Description: germin-like protein (AtGER2) [Arabidopsis
  misc_feature (9)..(221): Homolog of NCBI NO: 22327459 NR Description: germin-like protein (GLP2a) (GLP5A) [Arabidopsis
  misc_feature (26)..(222): Homolog of NCBI NO: 21741995 NR Description: OSJNBa0058K23.2 [Oryza sativa (japonica
MEGLLQFLLAKIILLALASSFVYCYDPSPLQDYCVATNETNGVYVNGEFCKDPKRVTTNDFYTSGLNVPGNTIIGPGARNTVVDVERLPGLNTLGVDIARYDFAPGGLDPPHTHPRGSQIFLVMKGKLFVGFVSSNEYNYTLFTKVLYPGDVFVFPKGLIHFHANIGETNAVVISAGGSQDPGRIIIGDAVFGSKPLIDPKVLAKAFALDYNKVKYLQAVFS

SEQ ID NO: 106856 - DNA, 825 bp, Arabidopsis thaliana
  misc_feature (1)..(825): Ceres Seq. ID no. 13620655
  misc_feature: MA Experiment ID: 20000171 Result: Up-regulated in Transcription
  misc_feature: MA Experiment 20000171 PARAMETER Experiment Name: At_42deg_Heat_P Parameter: Age (day) Value: 14
  misc_feature: MA Experiment 20000171 PARAMETER Experiment Name: At_42deg_Heat_P Parameter: Organism Value: A. thaliana
  misc_feature: MA Experiment 20000171 PARAMETER Experiment Name: At_42deg_Heat_P Parameter: Plant Line Value: WS
  misc_feature: MA Experiment 20000171 PARAMETER Experiment Name: At_42deg_Heat_P Parameter: Temperature (deg C) Value: 42 vs. 22
  misc_feature: MA Experiment 20000171 PARAMETER Experiment Name: At_42deg_Heat_P Parameter: Timepoint (hr) Value: 1
  misc_feature: MA Experiment 20000171 PARAMETER Experiment Name: At_42deg_Heat_P Parameter: Tissue Value: Aerial
  misc_feature: MA Experiment ID: 20001761 Result: Down-regulated in Transcription
  misc_feature: MA Experiment 20001761 PARAMETER Experiment Name: At_50mM_NH4NO3_L-to-H_P Parameter: Timepoint (hr) Value: 4
  misc_feature: MA Experiment 20001761 PARAMETER Experiment Name: At_50mM_NH4NO3_L-to-H_P Parameter: Tissue Value: Siliques
  misc_feature: MA Experiment 20001761 PARAMETER Experiment Name: At_50mM_NH4NO3_L-to-H_P Parameter: Treatment Value: 50mM NH4NO3 vs 100mM Mannitol
  misc_feature: MA Experiment ID: 20001906 Result: Up-regulated in Transcription
  misc_feature: MA Experiment 20001906 PARAMETER Experiment Name: At_Drought_Reproduction_P Parameter: Age (day) Value: 35
  misc_feature: MA Experiment 20001906 PARAMETER Experiment Name: At_Drought_Reproduction_P Parameter: Organism Value: A. thaliana
  misc_feature: MA Experiment 20001906 PARAMETER Experiment Name: At_Drought_Reproduction_P Parameter: Plant Line Value: WS
  misc_feature: MA Experiment 20001906 PARAMETER Experiment Name: At_Drought_Reproduction_P Parameter: Timepoint (day) Value: 5
  misc_feature: MA Experiment 20001906 PARAMETER Experiment Name: At_Drought_Reproduction_P Parameter: Tissue Value: Siliques
  misc_feature: MA Experiment 20001906 PARAMETER Experiment Name: At_Drought_Reproduction_P Parameter: Treatment Value: Drought vs. No Drought
agaaaaaaatatatgatggaagtgcttcttcgcttgcttgtaactcaagttatcttattggctttagcaacttcatttgtatcttgttacgatccaaatcctcttcaagacttttgtgttgccgccagcgaaactaatagagttttcgtgaatggcaaattctgtaaagatccaaaatcagtaacggccaatgatttctcttattcgggactcaacatcgcccgaaacaccaccaacttcctcggttctaatgtcacaaccgtagatgtcaacaaaatccctggcctcaacaccctcggagtctccctcgctcgcttagactttgctcagggaggtcaaaacccaccgcacatacatccacgcgccactgaaatactcgtagtcaccaaaggaaaactcctggttgggtttgtgtcttcgaaccaagacaacaatagactgttctacaaggttcttaaacgaggagacgtttttgtgtttcccattggtttgatacattttcaaatgaacgttcggaggacaagggcggtcgcgtttgctgggtttgggagccagaatcctggtaccattaggattgcagacgcggtttttggatcgaacccttcgattcctcaagaggtgttggctaaagcttttcaattagacgttaaattggttagatttctccacatagtgtttggtccgccattatggtagtaagttttaagattgatgataaaatttgtgagttaatcacatgatatacatacatgtatttaaatcccaaacttataaatttgtattttttatttgttttctaaatgaatgtaaaattagttcaaccct

SEQ ID NO: 106857 - protein, 231 aa, Arabidopsis thaliana
  peptide (1)..(231): Ceres Seq. ID no. 13620656
  misc_feature (69)..(220): Pfam Name: Cupin Pfam Description: Cupin
  misc_feature (5)..(231): Homolog of NCBI NO: 15229247 NR Description: germin-like protein, putative [Arabidopsis
  misc_feature (6)..(226): Homolog of NCBI NO: 15230587 NR Description: germin-like protein, putative [Arabidopsis
  misc_feature (6)..(226): Homolog of NCBI NO: 15229234 NR Description: germin-like protein, putative [Arabidopsis
  misc_feature (19)..(227): Homolog of NCBI NO: 15241662 NR Description: germin-like protein (AtGER2) [Arabidopsis
  misc_feature (19)..(227): Homolog of NCBI NO: 22327459 NR Description: germin-like protein (GLP2a) (GLP5A) [Arabidopsis
  misc_feature (19)..(227): Homolog of NCBI NO: 15241640 NR Description: germin-like protein (AtGER2) [Arabidopsis
  misc_feature (17)..(226): Homolog of NCBI NO: 18202454 NR Description: Germin-like protein subfamily 1 member 13
  misc_feature (17)..(226): Homolog of NCBI NO: 15241636 NR Description: germin-like protein (GLP6) [Arabidopsis thaliana]
  misc_feature (6)..(226): Homolog of NCBI NO: 15229245 NR Description: germin-like protein, putative [Arabidopsis
  misc_feature (19)..(227): Homolog of NCBI NO: 2129594 NR Description: germin type 2 - Arabidopsis thaliana
RKKYMMEVLLRLLVTQVILLALATSFVSCYDPNPLQDFCVAASETNRVFVNGKFCKDPKSVTANDFSYSGLNIARNTTNFLGSNVTTVDVNKIPGLNTLGVSLARLDFAQGGQNPPHIHPRATEILVVTKGKLLVGFVSSNQDNNRLFYKVLKRGDVFVFPIGLIHFQMNVRRTRAVAFAGFGSQNPGTIRIADAVFGSNPSIPQEVLAKAFQLDVKLVRFLHIVFGPPLW

SEQ ID NO: 106858 - protein, 227 aa, Arabidopsis thaliana
  peptide (1)..(227): Ceres Seq. ID no. 13620657
  misc_feature (65)..(216): Pfam Name: Cupin Pfam Description: Cupin
  misc_feature (1)..(227): Homolog of NCBI NO: 15229247 NR Description: germin-like protein, putative [Arabidopsis
  misc_feature (2)..(222): Homolog of NCBI NO: 15230587 NR Description: germin-like protein, putative [Arabidopsis
  misc_feature (2)..(222): Homolog of NCBI NO: 15229234 NR Description: germin-like protein, putative [Arabidopsis
  misc_feature (15)..(223): Homolog of NCBI NO: 15241662 NR Description: germin-like protein (AtGER2) [Arabidopsis
  misc_feature (15)..(223): Homolog of NCBI NO: 22327459 NR Description: germin-like protein (GLP2a) (GLP5A) [Arabidopsis
  misc_feature (15)..(223): Homolog of NCBI NO: 15241640 NR Description: germin-like protein (AtGER2) [Arabidopsis
  misc_feature (13)..(222): Homolog of NCBI NO: 18202454 NR Description: Germin-like protein subfamily 1 member 13
  misc_feature (13)..(222): Homolog of NCBI NO: 15241636 NR Description: germin-like protein (GLP6) [Arabidopsis thaliana]
  misc_feature (2)..(222): Homolog of NCBI NO: 15229245 NR Description: germin-like protein, putative [Arabidopsis
  misc_feature (15)..(223): Homolog of NCBI NO: 2129594 NR Description: germin type 2 - Arabidopsis thaliana
MMEVLLRLLVTQVILLALATSFVSCYDPNPLQDFCVAASETNRVFVNGKFCKDPKSVTANDFSYSGLNIARNTTNFLGSNVTTVDVNKIPGLNTLGVSLARLDFAQGGQNPPHIHPRATEILVVTKGKLLVGFVSSNQDNNRLFYKVLKRGDVFVFPIGLIHFQMNVRRTRAVAFAGFGSQNPGTIRIADAVFGSNPSIPQEVLAKAFQLDVKLVRFLHIVFGPPLW

SEQ ID NO: 106859 - protein, 226 aa, Arabidopsis thaliana
  peptide (1)..(226): Ceres Seq. ID no. 13620658
  misc_feature (64)..(215): Pfam Name: Cupin Pfam Description: Cupin
  misc_feature (1)..(226): Homolog of NCBI NO: 15229247 NR Description: germin-like protein, putative [Arabidopsis
  misc_feature (1)..(221): Homolog of NCBI NO: 15230587 NR Description: germin-like protein, putative [Arabidopsis
  misc_feature (1)..(221): Homolog of NCBI NO: 15229234 NR Description: germin-like protein, putative [Arabidopsis
  misc_feature (14)..(222): Homolog of NCBI NO: 15241662 NR Description: germin-like protein (AtGER2) [Arabidopsis
  misc_feature (14)..(222): Homolog of NCBI NO: 22327459 NR Description: germin-like protein (GLP2a) (GLP5A) [Arabidopsis
  misc_feature (14)..(222): Homolog of NCBI NO: 15241640 NR Description: germin-like protein (AtGER2) [Arabidopsis
  misc_feature (12)..(221): Homolog of NCBI NO: 18202454 NR Description: Germin-like protein subfamily 1 member 13
  misc_feature (12)..(221): Homolog of NCBI NO: 15241636 NR Description: germin-like protein (GLP6) [Arabidopsis thaliana]
  misc_feature (1)..(221): Homolog of NCBI NO: 15229245 NR Description: germin-like protein, putative [Arabidopsis
  misc_feature (14)..(222): Homolog of NCBI NO: 2129594 NR Description: germin type 2 - Arabidopsis thaliana
MEVLLRLLVTQVILLALATSFVSCYDPNPLQDFCVAASETNRVFVNGKFCKDPKSVTANDFSYSGLNIARNTTNFLGSNVTTVDVNKIPGLNTLGVSLARLDFAQGGQNPPHIHPRATEILVVTKGKLLVGFVSSNQDNNRLFYKVLKRGDVFVFPIGLIHFQMNVRRTRAVAFAGFGSQNPGTIRIADAVFGSNPSIPQEVLAKAFQLDVKLVRFLHIVFGPPLW

SEQ ID NO: 106860 - DNA, 1438 bp, Arabidopsis thaliana
  misc_feature (1)..(1438): Ceres Seq. ID no. 13620680
  misc_feature: MA Experiment ID: 20000180 Result: Up-regulated in Transcription
  misc_feature: MA Experiment 20000180 PARAMETER Experiment Name: At_Germinating_Seeds_P Parameter: Age (hr) Value: 24 vs. 0
  misc_feature: MA Experiment 20000180 PARAMETER Experiment Name: At_Germinating_Seeds_P Parameter: Tissue Value: Germinating Seeds
  misc_feature: MA Experiment ID: 20000182 Result: Down-regulated in Transcription
  misc_feature: MA Experiment 20000182 PARAMETER Experiment Name: At_2mM_SA_P Parameter: Age (day) Value: 14
  misc_feature: MA Experiment 20000182 PARAMETER Experiment Name: At_2mM_SA_P Parameter: Organism Value: A. thaliana
  misc_feature: MA Experiment 20000182 PARAMETER Experiment Name: At_2mM_SA_P Parameter: Plant Line Value: WS
  misc_feature: MA Experiment 20000182 PARAMETER Experiment Name: At_2mM_SA_P Parameter: Timepoint (hr) Value: 6
  misc_feature: MA Experiment 20000182 PARAMETER Experiment Name: At_2mM_SA_P Parameter: Tissue Value: Aerial
  misc_feature: MA Experiment 20000182 PARAMETER Experiment Name: At_2mM_SA_P Parameter: Treatment Value: 2mM SA vs. No Treatment
  misc_feature: MA Experiment ID: 20000185 Result: Down-regulated in Transcription
  misc_feature: MA Experiment 20000185 PARAMETER Experiment Name: At_Roots__P Parameter: Age (day) Value: 7 vs. 21
  misc_feature: MA Experiment 20000185 PARAMETER Experiment Name: At_Roots__P Parameter: Organism Value: A. thaliana
  misc_feature: MA Experiment 20000185 PARAMETER Experiment Name: At_Roots__P Parameter: Tissue Value: Roots vs. Whole Plant
  misc_feature: MA Experiment ID: 20000437 Result: Down-regulated in Transcription
  misc_feature: MA Experiment 20000437 PARAMETER Experiment Name: At_Drought_P Parameter: Age (day) Value: 8
  misc_feature: MA Experiment 20000437 PARAMETER Experiment Name: At_Drought_P Parameter: Organism Value: A. thaliana
  misc_feature: MA Experiment 20000437 PARAMETER Experiment Name: At_Drought_P Parameter: Plant Line Value: WS
  misc_feature: MA Experiment 20000437 PARAMETER Experiment Name: At_Drought_P Parameter: Timepoint (hr) Value: 24
  misc_feature: MA Experiment 20000437 PARAMETER Experiment Name: At_Drought_P Parameter: Tissue Value: Whole Plant
  misc_feature: MA Experiment 20000437 PARAMETER Experiment Name: At_Drought_P Parameter: Treatment Value: Drought vs. No Drought
  misc_feature: MA Experiment ID: 20000438 Result: Up-regulated in Transcription
  misc_feature: MA Experiment 20000438 PARAMETER Experiment Name: At_Shoots__P Parameter: Age (day) Value: 14
  misc_feature: MA Experiment 20000438 PARAMETER Experiment Name: At_Shoots__P Parameter: Tissue Value: Shoots vs. Whole Plant
  misc_feature: MA Experiment ID: 20000439 Result: Down-regulated in Transcription
  misc_feature: MA Experiment 20000439 PARAMETER Experiment Name: At_Roots__P Parameter: Age (day) Value: 14 vs. 21
  misc_feature: MA Experiment 20000439 PARAMETER Experiment Name: At_Roots__P Parameter: Organism Value: A. thaliana
  misc_feature: MA Experiment 20000439 PARAMETER Experiment Name: At_Roots__P Parameter: Tissue Value: Roots vs. Whole Plant
aaacacaacataaaacgtacttcttcttcaaaacgcgaaaccacactgtaagttacgtacaccaccacctatcctcaccattcatcatcgacacgtggctggtttaactcaaatcaacgctgaatccaaatacccatttccatttttaaccgtggttggattgttttgagagttgaaggaagaagatgacgtctgacggagcaacgtcgacgtcagctgcagctgcagcagcagcgatggcgacgaggaggaaaccgtcgtggagagagagggagaacaatcggagaagagagcggcggagaagagctgttgcggcgaagatttatactggtcttagagctcaaggtaactacaatcttccaaaacattgtgacaacaatgaggttcttaaggctctttgttctgaagctggttgggttgttgaagaagacggaactacttatcgcaagggacacaagcctctacctggtgacatggctggatcatcttctcgagcaactccttactcttcccataaccaaagtcctctttcttccacttttgatagccccatcttatcttaccaagtcagtccttcctcttcttcattcccgagtccttctcgagttggtgatccacacaatatctccacaatcttccctttcctcaggaatggtggtattccttcatcgcttcctccacttagaatctcaaacagtgctcctgtcactccaccagtgtcatccccaacttctagaaaccccaaaccattgcctacttgggaatcttttaccaaacaatccatgtccatggctgctaaacagtcaatgacttctttgaactacccgttttatgcggtgtctgcacctgccagtcctactcatcatcgccagttccatgctccggctactatacctgaatgtgatgagtctgactcttccactgttgattctggtcattggataagctttcaaaagtttgcacaacaacagccattctctgcctctatggtgccaacctcgcctaccttcaatctcgtgaaacctgcaccacagcaattgtctccaaacacagcagcaatccaagagattggtcaaagctccgagtttaagtttgagaacagccaagttaagccatgggaaggggagaggatccatgatgtggctatggaggatctagagctcacgcttggaaatggtaaagctcatagttgagatgaagtatacatgaacctgttatgtcatgtcggaaggaaggattggagaatgagaattagtgtgttgttcattcagttcatggttttggttcttgttctagaatcgatattcattgtaccagtgagtttgtttcacaacgcattatttgtagatagaatgtttaagatgtatgtttctattatcattccttttaggtcttgaaaacattacaaatatattacatgattaagtggcttgaaatg

SEQ ID NO: 106861 - protein, 335 aa, Arabidopsis thaliana; identical to SEQ ID NO: 21341
  peptide (1)..(335): Ceres Seq. ID no. 13620681
  misc_feature (1)..(335): Homolog of NCBI NO: 18394728 NR Description: expressed protein [Arabidopsis thaliana]
  misc_feature (1)..(335): Homolog of NCBI NO: 6651069 NR Description: 107 protein [Arabidopsis thaliana]
  misc_feature (1)..(335): Homolog of NCBI NO: 21592457 NR Description: unknown [Arabidopsis thaliana]
  misc_feature (1)..(333): Homolog of NCBI NO: 18410764 NR Description: expressed protein [Arabidopsis thaliana] BZR1 protein [Arabidopsis thaliana] >gi|21592862|gb|AAM64812.1|
  misc_feature (1)..(333): Homolog of NCBI NO: 18086461 NR Description: At1g75080/F9E10_7 [Arabidopsis thaliana]
  misc_feature (1)..(333): Homolog of NCBI NO: 25352558 NR Description: unknown protein F9E10.7 [imported] - Arabidopsis
  misc_feature (22)..(333): Homolog of NCBI NO: 15215731 NR Description: AT4g36780/C7A10_580 [Arabidopsis thaliana]
  misc_feature (21)..(280): Homolog of NCBI NO: 14626761 NR Description: mature anther-specific protein LAT61
  misc_feature (9)..(273): Homolog of NCBI NO: 33146833 NR Description: putative mature anther-specific protein LAT61
  misc_feature (200)..(335): Homolog of NCBI NO: 13937167 NR Description: At1g19350/F18O14_4 [Arabidopsis thaliana]

SEQ ID NO: 106862 - protein, 318 aa, Arabidopsis thaliana; identical to SEQ ID NO: 21342
  peptide (1)..(318): Ceres Seq. ID no. 13620682
  misc_feature (1)..(318): Homolog of NCBI NO: 18394728 NR Description: expressed protein [Arabidopsis thaliana]
  misc_feature (1)..(318): Homolog of NCBI NO: 6651069 NR Description: 107 protein [Arabidopsis thaliana]
  misc_feature (1)..(318): Homolog of NCBI NO: 21592457 NR Description: unknown [Arabidopsis thaliana]
  misc_feature (1)..(316): Homolog of NCBI NO: 18410764 NR Description: expressed protein [Arabidopsis thaliana] BZR1 protein [Arabidopsis thaliana] >gi|21592862|gb|AAM64812.1|
  misc_feature (1)..(316): Homolog of NCBI NO: 18086461 NR Description: At1g75080/F9E10_7 [Arabidopsis thaliana]
  misc_feature (1)..(316): Homolog of NCBI NO: 25352558 NR Description: unknown protein F9E10.7 [imported] - Arabidopsis
  misc_feature (5)..(316): Homolog of NCBI NO: 15215731 NR Description: AT4g36780/C7A10_580 [Arabidopsis thaliana]
  misc_feature (4)..(263): Homolog of NCBI NO: 14626761 NR Description: mature anther-specific protein LAT61
  misc_feature (1)..(256): Homolog of NCBI NO: 33146833 NR Description: putative mature anther-specific protein LAT61
  misc_feature (183)..(318): Homolog of NCBI NO: 13937167 NR Description: At1g19350/F18O14_4 [Arabidopsis thaliana]

SEQ ID NO: 106863 - protein, 239 aa, Arabidopsis thaliana; identical to SEQ ID NO: 21343
  peptide (1)..(239): Ceres Seq. ID no. 13620683
  misc_feature (1)..(239): Homolog of NCBI NO: 18394728 NR Description: expressed protein [Arabidopsis thaliana]
  misc_feature (1)..(239): Homolog of NCBI NO: 6651069 NR Description: 107 protein [Arabidopsis thaliana]
  misc_feature (1)..(239): Homolog of NCBI NO: 21592457 NR Description: unknown [Arabidopsis thaliana]
  misc_feature (1)..(237): Homolog of NCBI NO: 18410764 NR Description: expressed protein [Arabidopsis thaliana] BZR1 protein [Arabidopsis thaliana] >gi|21592862|gb|AAM64812.1|
  misc_feature (1)..(237): Homolog of NCBI NO: 18086461 NR Description: At1g75080/F9E10_7 [Arabidopsis thaliana]
  misc_feature (1)..(237): Homolog of NCBI NO: 25352558 NR Description: unknown protein F9E10.7 [imported] - Arabidopsis
  misc_feature (1)..(237): Homolog of NCBI NO: 15215731 NR Description: AT4g36780/C7A10_580 [Arabidopsis thaliana]
  misc_feature (1)..(184): Homolog of NCBI NO: 14626761 NR Description: mature anther-specific protein LAT61
  misc_feature (1)..(177): Homolog of NCBI NO: 33146833 NR Description: putative mature anther-specific protein LAT61
  misc_feature (104)..(239): Homolog of NCBI NO: 13937167 NR Description: At1g19350/F18O14_4 [Arabidopsis thaliana]

SEQ ID NO: 106864 - DNA, 887 bp, Arabidopsis thaliana
  misc_feature (1)..(887): Ceres Seq. ID no. 13620691
  misc_feature: MA Experiment ID: 20000173 Result: Up-regulated in Transcription
  misc_feature: MA Experiment 20000173 PARAMETER Experiment Name: At_42deg_Heat_P Parameter: Age (day) Value: 14
  misc_feature: MA Experiment 20000173 PARAMETER Experiment Name: At_42deg_Heat_P Parameter: Organism Value: A. thaliana
  misc_feature: MA Experiment 20000173 PARAMETER Experiment Name: At_42deg_Heat_P Parameter: Plant Line Value: WS
  misc_feature: MA Experiment 20000173 PARAMETER Experiment Name: At_42deg_Heat_P Parameter: Temperature (deg C) Value: 42 vs. 22
  misc_feature: MA Experiment 20000173 PARAMETER Experiment Name: At_42deg_Heat_P Parameter: Timepoint (hr) Value: 6
  misc_feature: MA Experiment 20000173 PARAMETER Experiment Name: At_42deg_Heat_P Parameter: Tissue Value: Aerial
  misc_feature: MA Experiment ID: 20000182 Result: Down-regulated in Transcription
  misc_feature: MA Experiment 20000182 PARAMETER Experiment Name: At_2mM_SA_P Parameter: Age (day) Value: 14
  misc_feature: MA Experiment 20000182 PARAMETER Experiment Name: At_2mM_SA_P Parameter: Organism Value: A. thaliana
  misc_feature: MA Experiment 20000182 PARAMETER Experiment Name: At_2mM_SA_P Parameter: Plant Line Value: WS
  misc_feature: MA Experiment 20000182 PARAMETER Experiment Name: At_2mM_SA_P Parameter: Timepoint (hr) Value: 6
  misc_feature: MA Experiment 20000182 PARAMETER Experiment Name: At_2mM_SA_P Parameter: Tissue Value: Aerial
  misc_feature: MA Experiment 20000182 PARAMETER Experiment Name: At_2mM_SA_P Parameter: Treatment Value: 2mM SA vs. No Treatment
  misc_feature: MA Experiment ID: 20000184 Result: Down-regulated in Transcription
  misc_feature: MA Experiment 20000184 PARAMETER Experiment Name: At_Shoots__P Parameter: Age (day) Value: 7
  misc_feature: MA Experiment 20000184 PARAMETER Experiment Name: At_Shoots__P Parameter: Tissue Value: Shoots vs. Whole Plant
  misc_feature: MA Experiment ID: 20000185 Result: Down-regulated in Transcription
  misc_feature: MA Experiment 20000185 PARAMETER Experiment Name: At_Roots__P Parameter: Age (day) Value: 7 vs. 21
  misc_feature: MA Experiment 20000185 PARAMETER Experiment Name: At_Roots__P Parameter: Organism Value: A. thaliana
  misc_feature: MA Experiment 20000185 PARAMETER Experiment Name: At_Roots__P Parameter: Tissue Value: Roots vs. Whole Plant
  misc_feature: MA Experiment ID: 20000264 Result: Down-regulated in Transcription
  misc_feature: MA Experiment 20000264 PARAMETER Experiment Name: At_Open_Flower_P Parameter: Age (day) Value: 21
  misc_feature: MA Experiment 20000264 PARAMETER Experiment Name: At_Open_Flower_P Parameter: Plant Line Value: WS
  misc_feature: MA Experiment 20000264 PARAMETER Experiment Name: At_Open_Flower_P Parameter: Tissue Value: Open Flower vs. Whole Plant
  misc_feature: MA Experiment ID: 20000265 Result: Down-regulated in Transcription
  misc_feature: MA Experiment 20000265 PARAMETER Experiment Name: At_Open_Flower_P Parameter: Age (day) Value: 21
  misc_feature: MA Experiment 20000265 PARAMETER Experiment Name: At_Open_Flower_P Parameter: Plant Line Value: WS
  misc_feature: MA Experiment 20000265 PARAMETER Experiment Name: At_Open_Flower_P Parameter: Tissue Value: Closed Flower vs. Whole Plant
  misc_feature: MA Experiment ID: 20000286 Result: Down-regulated in Transcription
  misc_feature: MA Experiment 20000286 PARAMETER Experiment Name: At_Open_Flower_P Parameter: Age (day) Value: 21
  misc_feature: MA Experiment 20000286 PARAMETER Experiment Name: At_Open_Flower_P Parameter: Plant Line Value: WS
  misc_feature: MA Experiment 20000286 PARAMETER Experiment Name: At_Open_Flower_P Parameter: Tissue Value: Half Open vs. Whole Plant
  misc_feature: MA Experiment ID: 20000438 Result: Down-regulated in Transcription
  misc_feature: MA Experiment 20000438 PARAMETER Experiment Name: At_Shoots__P Parameter: Age (day) Value: 14
  misc_feature: MA Experiment 20000438 PARAMETER Experiment Name: At_Shoots__P Parameter: Tissue Value: Shoots vs. Whole Plant
  misc_feature: MA Experiment ID: 20000439 Result: Down-regulated in Transcription
  misc_feature: MA Experiment 20000439 PARAMETER Experiment Name: At_Roots__P Parameter: Age (day) Value: 14 vs. 21
  misc_feature: MA Experiment 20000439 PARAMETER Experiment Name: At_Roots__P Parameter: Organism Value: A. thaliana
  misc_feature: MA Experiment 20000439 PARAMETER Experiment Name: At_Roots__P Parameter: Tissue Value: Roots vs. Whole Plant
  misc_feature: MA Experiment ID: 20000460 Result: Up-regulated in Transcription
  misc_feature: MA Experiment 20000460 PARAMETER Experiment Name: At_10percent_PEG_P Parameter: Age (day) Value: 12
  misc_feature: MA Experiment 20000460 PARAMETER Experiment Name: At_10percent_PEG_P Parameter: Organism Value: A. thaliana
  misc_feature: MA Experiment 20000460 PARAMETER Experiment Name: At_10percent_PEG_P Parameter: Plant Line Value: WS
  misc_feature: MA Experiment 20000460 PARAMETER Experiment Name: At_10percent_PEG_P Parameter: Timepoint (day) Value: 12
  misc_feature: MA Experiment 20000460 PARAMETER Experiment Name: At_10percent_PEG_P Parameter: Tissue Value: Whole Plant
  misc_feature: MA Experiment 20000460 PARAMETER Experiment Name: At_10percent_PEG_P Parameter: Treatment Value: 10percent PEG vs. No Treatment
  misc_feature: MA Experiment ID: 20000527 Result: Up-regulated in Transcription
  misc_feature: MA Experiment 20000527 PARAMETER Experiment Name: At_10percent_PEG_P Parameter: Age (day) Value: 20
  misc_feature: MA Experiment 20000527 PARAMETER Experiment Name: At_10percent_PEG_P Parameter: Organism Value: A. thaliana
  misc_feature: MA Experiment 20000527 PARAMETER Experiment Name: At_10percent_PEG_P Parameter: Plant Line Value: WS
  misc_feature: MA Experiment 20000527 PARAMETER Experiment Name: At_10percent_PEG_P Parameter: Timepoint (day) Value: 20
  misc_feature: MA Experiment 20000527 PARAMETER Experiment Name: At_10percent_PEG_P Parameter: Tissue Value: Whole Plant
  misc_feature: MA Experiment 20000527 PARAMETER Experiment Name: At_10percent_PEG_P Parameter: Treatment Value: 10percent PEG vs. No Treatment
  misc_feature: MA Experiment ID: 20000794 Result: Down-regulated in Transcription
  misc_feature: MA Experiment 20000794 PARAMETER Experiment Name: At_Petals_P Parameter: Age (day) Value: 23-25 days
  misc_feature: MA Experiment 20000794 PARAMETER Experiment Name: At_Petals_P Parameter: Plant Line Value: WS
  misc_feature: MA Experiment 20000794 PARAMETER Experiment Name: At_Petals_P Parameter: Tissue Value: Petals vs. Whole plant
  misc_feature: MA Experiment ID: 20001558 Result: Down-regulated in Transcription
  misc_feature: MA Experiment 20001558 PARAMETER Experiment Name: At_Drought_Soil_Dry_P Parameter: Age (day) Value: 27
  misc_feature: MA Experiment 20001558 PARAMETER Experiment Name: At_Drought_Soil_Dry_P Parameter: Organism Value: A. thaliana
  misc_feature: MA Experiment 20001558 PARAMETER Experiment Name: At_Drought_Soil_Dry_P Parameter: Plant Line Value: WS
  misc_feature: MA Experiment 20001558 PARAMETER Experiment Name: At_Drought_Soil_Dry_P Parameter: Post Timepoint (hr) Value: 6
  misc_feature: MA Experiment 20001558 PARAMETER Experiment Name: At_Drought_Soil_Dry_P Parameter: Post-Treatment Value: Re-Water vs. No Drought
  misc_feature: MA Experiment 20001558 PARAMETER Experiment Name: At_Drought_Soil_Dry_P Parameter: Timepoint (day) Value: 13
  misc_feature: MA Experiment 20001558 PARAMETER Experiment Name: At_Drought_Soil_Dry_P Parameter: Treatment Value: Drought vs. No Drought
  misc_feature: MA Experiment ID: 20001911 Result: Up-regulated in Transcription
  misc_feature: MA Experiment 20001911 PARAMETER Experiment Name: At_Drought_Reproduction_P Parameter: Age (day) Value: 40
  misc_feature: MA Experiment 20001911 PARAMETER Experiment Name: At_Drought_Reproduction_P Parameter: Organism Value: A. thaliana
  misc_feature: MA Experiment 20001911 PARAMETER Experiment Name: At_Drought_Reproduction_P Parameter: Plant Line Value: WS
  misc_feature: MA Experiment 20001911 PARAMETER Experiment Name: At_Drought_Reproduction_P Parameter: Timepoint (day) Value: 10
  misc_feature: MA Experiment 20001911 PARAMETER Experiment Name: At_Drought_Reproduction_P Parameter: Tissue Value: Flowers
  misc_feature: MA Experiment 20001911 PARAMETER Experiment Name: At_Drought_Reproduction_P Parameter: Treatment Value: Drought vs. No Drought
aattcgtcgagaaccgaaaaatcgaaaatcaatgggaactccagaatcatcgagagagccatgtccggatcggatcctagatgatgtcggaggtgcgtttgcgatgggtgctgttggtggatcagcgtatcacctcataagaggaatctacaactctcccggcggagctcgtctctccggcggcgttcaagctttgagaatgagcgggccgagaagcggaggaagcttctccgtgtggggtggtctttactcaaccttcgattgtgcgttggtgtacgcaagacaaaaggaagatccatggaactcgatcttatctggtgcagccactggaggattcctctcgttgcgtcaaggcttaggcgcgtctgctagatcggctttagtcggaggtgtgttgttggctatgatagaaggagttggtatcatgttaaacaaagttcagagtactgcgcataacgagcagttcatggaggatcatgcagctacttctttaccatatggtatgggtcagatatctggtcagtccgtaccggtaccggagacttcttcttcttcttctggttcggtatcttggtttgggagtttgtttaagaagaagaaagaaacagaggatcatcattcagagagcagaactcacattttggagagctttgatgctcctcctgtgcctacttatgagtttaagtgatggaattattgaggtctgaattttacttttaatgttaagagcttagtaactagaattatatattctgcaataagttttatataataatattatgaattagagactattgtcaatttggattgatataataccgtctggttttatgtataatttaccaattgttacaacatgattagcgtgaaggttaacttcttgtgat

SEQ ID NO: 106865 - protein, 228 aa, Arabidopsis thaliana
  peptide (1)..(228): Ceres Seq. ID no. 13620692
  misc_feature (11)..(228): Homolog of NCBI NO: 15217923 NR Description: mitochondrial inner membrane translocase
  misc_feature (11)..(173): Homolog of NCBI NO: 15228131 NR Description: protein translocase -related [Arabidopsis >gi|12643851|sp|Q9SP35|IM17_ARATH Mitochondrial import inner translocase subunit TIM17 >gi|25408549|pir||D84792 probable
  misc_feature (168)..(228): Homolog of NCBI NO: 15228131 NR Description: protein translocase -related [Arabidopsis >gi|12643851|sp|Q9SP35|IM17_ARATH Mitochondrial import inner translocase subunit TIM17 >gi|25408549|pir||D84792 probable
  misc_feature (11)..(173): Homolog of NCBI NO: 38678772 NR Description: mitochondrial inner membrane translocase TM17-2
  misc_feature (168)..(228): Homolog of NCBI NO: 38678772 NR Description: mitochondrial inner membrane translocase TM17-2
  misc_feature (11)..(173): Homolog of NCBI NO: 6103722 NR Description: TIM17 [Arabidopsis thaliana]
  misc_feature (168)..(228): Homolog of NCBI NO: 6103722 NR Description: TIM17 [Arabidopsis thaliana]
  misc_feature (11)..(228): Homolog of NCBI NO: 34394571 NR Description: translocase inner membrane-like protein [Oryza
  misc_feature (15)..(169): Homolog of NCBI NO: 30923567 NR Description: CG40451-PA [Drosophila melanogaster]
  misc_feature (15)..(153): Homolog of NCBI NO: 24644195 NR Description: CG1158-PA [Drosophila melanogaster]
IRREPKNRKSMGTPESSREPCPDRILDDVGGAFAMGAVGGSAYHLIRGIYNSPGGARLSGGVQALRMSGPRSGGSFSVWGGLYSTFDCALVYARQKEDPWNSILSGAATGGFLSLRQGLGASARSALVGGVLLAMIEGVGIMLNKVQSTAHNEQFMEDHAATSLPYGMGQISGQSVPVPETSSSSSGSVSWFGSLFKKKKETEDHHSESRTHILESFDAPPVPTYEFK

SEQ ID NO: 106866 - protein, 218 aa, Arabidopsis thaliana
  peptide (1)..(218): Ceres Seq. ID no. 13620693
  misc_feature (1)..(218): Homolog of NCBI NO: 15217923 NR Description: mitochondrial inner membrane translocase
  misc_feature (1)..(163): Homolog of NCBI NO: 15228131 NR Description: protein translocase -related [Arabidopsis >gi|12643851|sp|Q9SP35|IM17_ARATH Mitochondrial import inner translocase subunit TIM17 >gi|25408549|pir||D84792 probable
  misc_feature (158)..(218): Homolog of NCBI NO: 15228131 NR Description: protein translocase -related [Arabidopsis >gi|12643851|sp|Q9SP35|IM17_ARATH Mitochondrial import inner translocase subunit TIM17 >gi|25408549|pir||D84792 probable
  misc_feature (1)..(163): Homolog of NCBI NO: 38678772 NR Description: mitochondrial inner membrane translocase TM17-2
  misc_feature (158)..(218): Homolog of NCBI NO: 38678772 NR Description: mitochondrial inner membrane translocase TM17-2
  misc_feature (1)..(163): Homolog of NCBI NO: 6103722 NR Description: TIM17 [Arabidopsis thaliana]
  misc_feature (158)..(218): Homolog of NCBI NO: 6103722 NR Description: TIM17 [Arabidopsis thaliana]
  misc_feature (1)..(218): Homolog of NCBI NO: 34394571 NR Description: translocase inner membrane-like protein [Oryza
  misc_feature (5)..(159): Homolog of NCBI NO: 30923567 NR Description: CG40451-PA [Drosophila melanogaster]
  misc_feature (5)..(143): Homolog of NCBI NO: 24644195 NR Description: CG1158-PA [Drosophila melanogaster]
MGTPESSREPCPDRILDDVGGAFAMGAVGGSAYHLIRGIYNSPGGARLSGGVQALRMSGPRSGGSFSVWGGLYSTFDCALVYARQKEDPWNSILSGAATGGFLSLRQGLGASARSALVGGVLLAMIEGVGIMLNKVQSTAHNEQFMEDHAATSLPYGMGQISGQSVPVPETSSSSSGSVSWFGSLFKKKKETEDHHSESRTHILESFDAPPVPTYEFK

SEQ ID NO: 106867 - protein, 194 aa, Arabidopsis thaliana
  peptide (1)..(194): Ceres Seq. ID no. 13620694
  misc_feature (1)..(194): Homolog of NCBI NO: 15217923 NR Description: mitochondrial inner membrane translocase
  misc_feature (1)..(139): Homolog of NCBI NO: 15228131 NR Description: protein translocase -related [Arabidopsis >gi|12643851|sp|Q9SP35|IM17_ARATH Mitochondrial import inner translocase subunit TIM17 >gi|25408549|pir||D84792 probable
  misc_feature (134)..(194): Homolog of NCBI NO: 15228131 NR Description: protein translocase -related [Arabidopsis >gi|12643851|sp|Q9SP35|IM17_ARATH Mitochondrial import inner translocase subunit TIM17 >gi|25408549|pir||D84792 probable
  misc_feature (1)..(139): Homolog of NCBI NO: 38678772 NR Description: mitochondrial inner membrane translocase TM17-2
  misc_feature (134)..(194): Homolog of NCBI NO: 38678772 NR Description: mitochondrial inner membrane translocase TM17-2
  misc_feature (1)..(139): Homolog of NCBI NO: 6103722 NR Description: TIM17 [Arabidopsis thaliana]
  misc_feature (134)..(194): Homolog of NCBI NO: 6103722 NR Description: TIM17 [Arabidopsis thaliana]
  misc_feature (1)..(194): Homolog of NCBI NO: 34394571 NR Description: translocase inner membrane-like protein [Oryza
  misc_feature (1)..(135): Homolog of NCBI NO: 30923567 NR Description: CG40451-PA [Drosophila melanogaster]
  misc_feature (1)..(119): Homolog of NCBI NO: 24644195 NR Description: CG1158-PA [Drosophila melanogaster]
MGAVGGSAYHLIRGIYNSPGGARLSGGVQALRMSGPRSGGSFSVWGGLYSTFDCALVYARQKEDPWNSILSGAATGGFLSLRQGLGASARSALVGGVLLAMIEGVGIMLNKVQSTAHNEQFMEDHAATSLPYGMGQISGQSVPVPETSSSSSGSVSWFGSLFKKKKETEDHHSESRTHILESFDAPPVPTYEFK

SEQ ID NO: 106868 - DNA, 2745 bp, Arabidopsis thaliana
  misc_feature (1)..(2745): Ceres Seq. ID no. 13620713
  misc_feature: MA Experiment ID: 20000306 Result: Up-regulated in Transcription
  misc_feature: MA Experiment 20000306 PARAMETER Experiment Name: At_Germinating_Seeds_Sub_P Parameter: Age (hr) Value: 6 vs. 0
  misc_feature: MA Experiment 20000306 PARAMETER Experiment Name: At_Germinating_Seeds_Sub_P Parameter: Organism Value: A. thaliana
  misc_feature: MA Experiment 20000306 PARAMETER Experiment Name: At_Germinating_Seeds_Sub_P Parameter: Plant Line Value: WS
  misc_feature: MA Experiment 20000306 PARAMETER Experiment Name: At_Germinating_Seeds_Sub_P Parameter: Tissue Value: Germinating Seeds
  misc_feature: MA Experiment ID: 20000307 Result: Up-regulated in Transcription
  misc_feature: MA Experiment 20000307 PARAMETER Experiment Name: At_Germinating_Seeds_Sub_P Parameter: Age (hr) Value: 24 vs. 0
  misc_feature: MA Experiment 20000307 PARAMETER Experiment Name: At_Germinating_Seeds_Sub_P Parameter: Organism Value: A. thaliana
  misc_feature: MA Experiment 20000307 PARAMETER Experiment Name: At_Germinating_Seeds_Sub_P Parameter: Plant Line Value: WS
  misc_feature: MA Experiment 20000307 PARAMETER Experiment Name: At_Germinating_Seeds_Sub_P Parameter: Tissue Value: Germinating Seeds
  misc_feature: MA Experiment ID: 20000314 Result: Up-regulated in Transcription
  misc_feature: MA Experiment 20000314 PARAMETER Experiment Name: At_14day_Shoots-Roots_Sub_P Parameter: Age (day) Value: 14
  misc_feature: MA Experiment 20000314 PARAMETER Experiment Name: At_14day_Shoots-Roots_Sub_P Parameter: Organism Value: A. thaliana
  misc_feature: MA Experiment 20000314 PARAMETER Experiment Name: At_14day_Shoots-Roots_Sub_P Parameter: Plant Line Value: WS
  misc_feature: MA Experiment 20000314 PARAMETER Experiment Name: At_14day_Shoots-Roots_Sub_P Parameter: Tissue Value: Roots vs. Whole Plant
  misc_feature: MA Experiment ID: 20000315 Result: Down-regulated in Transcription
  misc_feature: MA Experiment 20000315 PARAMETER Experiment Name: At_14day_Shoots-Roots_Sub_P Parameter: Age (day) Value: 14
  misc_feature: MA Experiment 20000315 PARAMETER Experiment Name: At_14day_Shoots-Roots_Sub_P Parameter: Organism Value: A. thaliana
  misc_feature: MA Experiment 20000315 PARAMETER Experiment Name: At_14day_Shoots-Roots_Sub_P Parameter: Plant Line Value: WS
  misc_feature: MA Experiment 20000315 PARAMETER Experiment Name: At_14day_Shoots-Roots_Sub_P Parameter: Tissue Value: Shoots vs. Whole Plant
  misc_feature: MA Experiment ID: 20000328 Result: Down-regulated in Transcription
  misc_feature: MA Experiment 20000328 PARAMETER Experiment Name: At_42deg_Heat_Sub_P Parameter: Age (day) Value: 14
  misc_feature: MA Experiment 20000328 PARAMETER Experiment Name: At_42deg_Heat_Sub_P Parameter: Organism Value: A. thaliana
  misc_feature: MA Experiment 20000328 PARAMETER Experiment Name: At_42deg_Heat_Sub_P Parameter: Plant Line Value: WS
  misc_feature: MA Experiment 20000328 PARAMETER Experiment Name: At_42deg_Heat_Sub_P Parameter: Temperature (deg C) Value: 42 vs. 22
  misc_feature: MA Experiment 20000328 PARAMETER Experiment Name: At_42deg_Heat_Sub_P Parameter: Timepoint (hr) Value: 6
  misc_feature: MA Experiment 20000328 PARAMETER Experiment Name: At_42deg_Heat_Sub_P Parameter: Tissue Value: Aerial
  misc_feature: MA Experiment ID: 20000355 Result: Up-regulated in Transcription
  misc_feature: MA Experiment 20000355 PARAMETER Experiment Name: At_Siliques_Sub_P Parameter: Age (day) Value: 21
  misc_feature: MA Experiment 20000355 PARAMETER Experiment Name: At_Siliques_Sub_P Parameter: Organism Value: A. thaliana
  misc_feature: MA Experiment 20000355 PARAMETER Experiment Name: At_Siliques_Sub_P Parameter: Plant Line Value: WS
  misc_feature: MA Experiment 20000355 PARAMETER Experiment Name: At_Siliques_Sub_P Parameter: Tissue Value: Less Than 5mm Siliques vs. Whole Plant
  misc_feature: MA Experiment ID: 20000440 Result: Up-regulated in Transcription
  misc_feature: MA Experiment 20000440 PARAMETER Experiment Name: At_Closed-Flower__Sub_P Parameter: Tissue Value: Closed Flower vs. Whole Plant
acagagcagaaaaagcttacactcatatcactgagctgctttggcttcgccaatcgccattgttgtttcgaaatataattactgcttctcaaaacccttttgttggtttttgttttcgttgtcgatcattgcttcaatctctttcctttcgatctgaatcatctgatctctgatcttcttcgagatctcactaataggattttgagattgagttttgtccacagaatcacgaggttttgttgatttggtgtaccgtaattggcaattacgagttagttatggatttggcgttcagtgactaatggtctttcctgatttggaatattcttgaagttttgggtaatgattcaatgtgaaacaaatgttgcctatacatgagaataaatggcttgattaggtaaatgttagttggagttttaggtaaatgagaagccttttagggacagaaagaggagttggttgttgtatagtgtagagatttgcttacaataaaagctcttgttttgaacctgggaccatgaaggttgcctcagttattggtcttagaccaaggatcagtggtttacttttcttaaccctcggtgttattgctctcattaccattttagtaccaaattcagattcttcttctacaacttcaactacgcgagtaccgccaagcaacatttatagtaactatgggagggttaaggaacaagcagctgttgattatctagatctaaggtttttctccttaggggttaatcggttaaaagagtttcctttatgtggtaaagaaagagacaattatgttccttgttataacgtaacagagagtgatcggaattgtgagtttgcaagagaagaggaaagatgtctagttcgtcctccaagggattataagataccacttagatggcctgttggtagagatatcatatggactgggaatgtgaagattactaaagatcagtttctttcatcaggaactatgactaaaaggctaatgttgcttgaagagaatcaaattacgtttcactcggatgatggcttgatctttgatggggttaaagattacgcttttcaaattgctgagatgattggattaggaagcgatactgagtttcctcaagctggtatacggactgtgttggacatcggttgcggatttggtagctttggtgcacatctagtgtctttgaacgtgatgcctatatgtatagcagagtatgagacaagtggaagccaagtccaattagctctagagagaggccttcctgcaatgattggaaatttcttttcgaaacagcttccatatccagctttatcatttgacatggtccactgtgctcaatgtgggattacttgggatataaaagatgcaatgctacttttagaagtggatcgtgttctcaagcctgggggttattttgttttgacctctcctacaagcaaagcacagggaaattctcctgatactaagaaaacaagtatctcaacacgagtggatgagttatctaagaaaatctgctggagtctctcaggtcagcaagatgagacgtttctttggcagaaaacagcagacccaaattgctactcatctcgctcgcaagcttctatacctgtttgcaaagatgatgatagtgttccatattaccatcctcttgttccatgtataagtggaaccaagagtaaacgctggattcctattcagaataggtctagagcttcaggaacaagtttgtctgagcttgaaattcatggtattaaacctgaagaattcgatgaggatatacaagtatggagatcagcccttaaaaactattggtccttgcttacacctttgattttctcagaccacccaaaaagacctggcgatgaagatcctgtcccacctttttacatgatacgcaatgctatggacatgaatgctcgttatgggaatctgaatcaggccttacttaaccaagggaaatcagtttgggtgatgaatgttgtcccagtcaaagcacgtaatactcttcctataatacttgatcgaggttttaccggcgctctacatgactggtgtgaaccattccctacctatcctcgaacatatgacatgcttcatgccaatgaacttctcacacatcttagctcagaacggtgcagcctaatggacttgttcttggaaatggaccggattctccgccctgagggatgggttgtgctaagtgataagcttggagtgatagagatggcgcgtacacttgctgctcgtgtacgctgggaagcaagagtcatcgatattcaagacggtagtgaccaacggctccttgtttgtcaaaaaccattattaaaaaaataactcaaaagaaaagaagcaaaattagcaaactgtcaacgagtttgcttctctgcaccatcgacactaagtacagtttttttaataggtaatctctctctctctctctttctctttctcttttctctgagctttgaaaacttaaagaacacacaaatatcttaatctttatacattgagggtatctctgcgtaattcattagattgaatcagagtttcactttagtttacagatccaagtactgatgcttgcagattctggagagaaatcaagacgatgaaaatgggagacttctgcgactttcttagcagtgcaacggttattcaaattacgacattctttacattttttctgtttgcaaacaagaattgttctcagttttattttttgttcgtttcgtaattattcattaagaatc

SEQ ID NO: 106869 - protein, 603 aa, Arabidopsis thaliana
  peptide (1)..(603): Ceres Seq. ID no. 13620714
  misc_feature (90)..(587): Pfam Name: Putative methyltransferase Pfam Description: Putative methyltransferase
  misc_feature (3)..(603): Homolog of NCBI NO: 25411012 NR Description: hypothetical protein At2g03480 [imported] -
  misc_feature (224)..(603): Homolog of NCBI NO: 18395560 NR Description: dehydration-induced protein-related [Arabidopsis >gi|20197738|gb|AAD17428.2| expressed protein [Arabidopsis
  misc_feature (224)..(602): Homolog of NCBI NO: 14532450 NR Description: At2g03480/T4M8.9 [Arabidopsis thaliana]
  misc_feature (224)..(602): Homolog of NCBI NO: 24111341 NR Description: At2g03480/T4M8.9 [Arabidopsis thaliana]
  misc_feature (79)..(402): Homolog of NCBI NO: 8052540 NR Description: F3F9.21 [Arabidopsis thaliana]
  misc_feature (363)..(510): Homolog of NCBI NO: 8052540 NR Description: F3F9.21 [Arabidopsis thaliana]
  misc_feature (554)..(603): Homolog of NCBI NO: 8052540 NR Description: F3F9.21 [Arabidopsis thaliana]
  misc_feature (234)..(603): Homolog of NCBI NO: 12324243 NR Description: unknown protein, 5' partial; 69506-67937
  misc_feature (16)..(201): Homolog of NCBI NO: 8052540 NR Description: F3F9.21 [Arabidopsis thaliana]
  misc_feature (18)..(600): Homolog of NCBI NO: 22326809 NR Description: dehydration-induced protein-related [Arabidopsis >gi|17380666|gb|AAL36163.1| unknown protein [Arabidopsis >gi|21280807|gb|AAM45045.1| unknown protein [Arabidopsis
MKVASVIGLRPRISGLLFLTLGVIALITILVPNSDSSSTTSTTRVPPSNIYSNYGRVKEQAAVDYLDLRFFSLGVNRLKEFPLCGKERDNYVPCYNVTESDRNCEFAREEERCLVRPPRDYKIPLRWPVGRDIIWTGNVKITKDQFLSSGTMTKRLMLLEENQITFHSDDGLIFDGVKDYAFQIAEMIGLGSDTEFPQAGIRTVLDIGCGFGSFGAHLVSLNVMPICIAEYETSGSQVQLALERGLPAMIGNFFSKQLPYPALSFDMVHCAQCGITWDIKDAMLLLEVDRVLKPGGYFVLTSPTSKAQGNSPDTKKTSISTRVDELSKKICWSLSGQQDETFLWQKTADPNCYSSRSQASIPVCKDDDSVPYYHPLVPCISGTKSKRWIPIQNRSRASGTSLSELEIHGIKPEEFDEDIQVWRSALKNYWSLLTPLIFSDHPKRPGDEDPVPPFYMIRNAMDMNARYGNLNQALLNQGKSVWVMNVVPVKARNTLPIILDRGFTGALHDWCEPFPTYPRTYDMLHANELLTHLSSERCSLMDLFLEMDRILRPEGWVVLSDKLGVIEMARTLAARVRWEARVIDIQDGSDQRLLVCQKPLLKK

SEQ ID NO: 106870 - protein, 452 aa, Arabidopsis thaliana
  peptide (1)..(452): Ceres Seq. ID no. 13620715
  misc_feature (1)..(436): Pfam Name: Putative methyltransferase Pfam Description: Putative methyltransferase
  misc_feature (1)..(452): Homolog of NCBI NO: 25411012 NR Description: hypothetical protein At2g03480 [imported] -
  misc_feature (73)..(452): Homolog of NCBI NO: 18395560 NR Description: dehydration-induced protein-related [Arabidopsis >gi|20197738|gb|AAD17428.2| expressed protein [Arabidopsis
  misc_feature (73)..(451): Homolog of NCBI NO: 14532450 NR Description: At2g03480/T4M8.9 [Arabidopsis thaliana]
  misc_feature (73)..(451): Homolog of NCBI NO: 24111341 NR Description: At2g03480/T4M8.9 [Arabidopsis thaliana]
  misc_feature (1)..(251): Homolog of NCBI NO: 8052540 NR Description: F3F9.21 [Arabidopsis thaliana]
  misc_feature (212)..(359): Homolog of NCBI NO: 8052540 NR Description: F3F9.21 [Arabidopsis thaliana]
  misc_feature (403)..(452): Homolog of NCBI NO: 8052540 NR Description: F3F9.21 [Arabidopsis thaliana]
  misc_feature (83)..(452): Homolog of NCBI NO: 12324243 NR Description: unknown protein, 5' partial; 69506-67937
  misc_feature (1)..(50): Homolog of NCBI NO: 8052540 NR Description: F3F9.21 [Arabidopsis thaliana]
  misc_feature (1)..(449): Homolog of NCBI NO: 22326809 NR Description: dehydration-induced protein-related [Arabidopsis >gi|17380666|gb|AAL36163.1| unknown protein [Arabidopsis >gi|21280807|gb|AAM45045.1| unknown protein [Arabidopsis
MTKRLMLLEENQITFHSDDGLIFDGVKDYAFQIAEMIGLGSDTEFPQAGIRTVLDIGCGFGSFGAHLVSLNVMPICIAEYETSGSQVQLALERGLPAMIGNFFSKQLPYPALSFDMVHCAQCGITWDIKDAMLLLEVDRVLKPGGYFVLTSPTSKAQGNSPDTKKTSISTRVDELSKKICWSLSGQQDETFLWQKTADPNCYSSRSQASIPVCKDDDSVPYYHPLVPCISGTKSKRWIPIQNRSRASGTSLSELEIHGIKPEEFDEDIQVWRSALKNYWSLLTPLIFSDHPKRPGDEDPVPPFYMIRNAMDMNARYGNLNQALLNQGKSVWVMNVVPVKARNTLPIILDRGFTGALHDWCEPFPTYPRTYDMLHANELLTHLSSERCSLMDLFLEMDRILRPEGWVVLSDKLGVIEMARTLAARVRWEARVIDIQDGSDQRLLVCQKPLLKK

SEQ ID NO: 106871 - protein, 447 aa, Arabidopsis thaliana
  peptide (1)..(447): Ceres Seq. ID no. 13620716
  misc_feature (1)..(431): Pfam Name: Putative methyltransferase Pfam Description: Putative methyltransferase
  misc_feature (1)..(447): Homolog of NCBI NO: 25411012 NR Description: hypothetical protein At2g03480 [imported] -
  misc_feature (68)..(447): Homolog of NCBI NO: 18395560 NR Description: dehydration-induced protein-related [Arabidopsis >gi|20197738|gb|AAD17428.2| expressed protein [Arabidopsis
  misc_feature (68)..(446): Homolog of NCBI NO: 14532450 NR Description: At2g03480/T4M8.9 [Arabidopsis thaliana]
  misc_feature (68)..(446): Homolog of NCBI NO: 24111341 NR Description: At2g03480/T4M8.9 [Arabidopsis thaliana]
  misc_feature (1)..(246): Homolog of NCBI NO: 8052540 NR Description: F3F9.21 [Arabidopsis thaliana]
  misc_feature (207)..(354): Homolog of NCBI NO: 8052540 NR Description: F3F9.21 [Arabidopsis thaliana]
  misc_feature (398)..(447): Homolog of NCBI NO: 8052540 NR Description: F3F9.21 [Arabidopsis thaliana]
  misc_feature (78)..(447): Homolog of NCBI NO: 12324243 NR Description: unknown protein, 5' partial; 69506-67937
  misc_feature (1)..(45): Homolog of NCBI NO: 8052540 NR Description: F3F9.21 [Arabidopsis thaliana]
  misc_feature (1)..(444): Homolog of NCBI NO: 22326809 NR Description: dehydration-induced protein-related [Arabidopsis >gi|17380666|gb|AAL36163.1| unknown protein [Arabidopsis >gi|21280807|gb|AAM45045.1| unknown protein [Arabidopsis
MLLEENQITFHSDDGLIFDGVKDYAFQIAEMIGLGSDTEFPQAGIRTVLDIGCGFGSFGAHLVSLNVMPICIAEYETSGSQVQLALERGLPAMIGNFFSKQLPYPALSFDMVHCAQCGITWDIKDAMLLLEVDRVLKPGGYFVLTSPTSKAQGNSPDTKKTSISTRVDELSKKICWSLSGQQDETFLWQKTADPNCYSSRSQASIPVCKDDDSVPYYHPLVPCISGTKSKRWIPIQNRSRASGTSLSELEIHGIKPEEFDEDIQVWRSALKNYWSLLTPLIFSDHPKRPGDEDPVPPFYMIRNAMDMNARYGNLNQALLNQGKSVWVMNVVPVKARNTLPIILDRGFTGALHDWCEPFPTYPRTYDMLHANELLTHLSSERCSLMDLFLEMDRILRPEGWVVLSDKLGVIEMARTLAARVRWEARVIDIQDGSDQRLLVCQKPLLKK

SEQ ID NO: 106872 - DNA, 2012 bp, Arabidopsis thaliana
  misc_feature (1)..(2012): Ceres Seq. ID no. 13620721
  misc_feature: MA Experiment ID: 20000182 Result: Down-regulated in Transcription
  misc_feature: MA Experiment 20000182 PARAMETER Experiment Name: At_2mM_SA_P Parameter: Age (day) Value: 14
  misc_feature: MA Experiment 20000182 PARAMETER Experiment Name: At_2mM_SA_P Parameter: Organism Value: A. thaliana
  misc_feature: MA Experiment 20000182 PARAMETER Experiment Name: At_2mM_SA_P Parameter: Plant Line Value: WS
  misc_feature: MA Experiment 20000182 PARAMETER Experiment Name: At_2mM_SA_P Parameter: Timepoint (hr) Value: 6
  misc_feature: MA Experiment 20000182 PARAMETER Experiment Name: At_2mM_SA_P Parameter: Tissue Value: Aerial
  misc_feature: MA Experiment 20000182 PARAMETER Experiment Name: At_2mM_SA_P Parameter: Treatment Value: 2mM SA vs. No Treatment
  misc_feature: MA Experiment ID: 20000234 Result: Up-regulated in Transcription
  misc_feature: MA Experiment 20000234 PARAMETER Experiment Name: At_Siliques_P Parameter: Age (day) Value: 21
  misc_feature: MA Experiment 20000234 PARAMETER Experiment Name: At_Siliques_P Parameter: Organism Value: A. thaliana
  misc_feature: MA Experiment 20000234 PARAMETER Experiment Name: At_Siliques_P Parameter: Plant Line Value: WS
  misc_feature: MA Experiment 20000234 PARAMETER Experiment Name: At_Siliques_P Parameter: Tissue Value: Less Than 5mm Siliques vs. Whole Plant
  misc_feature: MA Experiment ID: 20000436 Result: Down-regulated in Transcription
  misc_feature: MA Experiment 20000436 PARAMETER Experiment Name: At_Drought_P Parameter: Age (day) Value: 7
  misc_feature: MA Experiment 20000436 PARAMETER Experiment Name: At_Drought_P Parameter: Organism Value: A. thaliana
  misc_feature: MA Experiment 20000436 PARAMETER Experiment Name: At_Drought_P Parameter: Plant Line Value: WS
  misc_feature: MA Experiment 20000436 PARAMETER Experiment Name: At_Drought_P Parameter: Timepoint (hr) Value: 12
  misc_feature: MA Experiment 20000436 PARAMETER Experiment Name: At_Drought_P Parameter: Tissue Value: Whole Plant
  misc_feature: MA Experiment 20000436 PARAMETER Experiment Name: At_Drought_P Parameter: Treatment Value: Drought vs. No Drought
  misc_feature: MA Experiment ID: 20000437 Result: Down-regulated in Transcription
  misc_feature: MA Experiment 20000437 PARAMETER Experiment Name: At_Drought_P Parameter: Age (day) Value: 8
  misc_feature: MA Experiment 20000437 PARAMETER Experiment Name: At_Drought_P Parameter: Organism Value: A. thaliana
  misc_feature: MA Experiment 20000437 PARAMETER Experiment Name: At_Drought_P Parameter: Plant Line Value: WS
  misc_feature: MA Experiment 20000437 PARAMETER Experiment Name: At_Drought_P Parameter: Timepoint (hr) Value: 24
  misc_feature: MA Experiment 20000437 PARAMETER Experiment Name: At_Drought_P Parameter: Tissue Value: Whole Plant
  misc_feature: MA Experiment 20000437 PARAMETER Experiment Name: At_Drought_P Parameter: Treatment Value: Drought vs. No Drought
  misc_feature: MA Experiment ID: 20001451 Result: Down-regulated in Transcription
  misc_feature: MA Experiment 20001451 PARAMETER Experiment Name: At_Far-red-induction_P Parameter: Age (day) Value: 7
  misc_feature: MA Experiment 20001451 PARAMETER Experiment Name: At_Far-red-induction_P Parameter: Light Value: Far-red vs. White
  misc_feature: MA Experiment 20001451 PARAMETER Experiment Name: At_Far-red-induction_P Parameter: Organism Value: A. thaliana
  misc_feature: MA Experiment 20001451 PARAMETER Experiment Name: At_Far-red-induction_P Parameter: Plant Line Value: Columbia
  misc_feature: MA Experiment 20001451 PARAMETER Experiment Name: At_Far-red-induction_P Parameter: Timepoint (hr) Value: 24
  misc_feature: MA Experiment 20001451 PARAMETER Experiment Name: At_Far-red-induction_P Parameter: Tissue Value: Whole Plant
  misc_feature: MA Experiment ID: 20001458 Result: Up-regulated in Transcription
  misc_feature: MA Experiment 20001458 PARAMETER Experiment Name: At_50mM_NH4NO3_L-to-H_P Parameter: Age (day) Value: Undefined
  misc_feature: MA Experiment 20001458 PARAMETER Experiment Name: At_50mM_NH4NO3_L-to-H_P Parameter: Organism Value: Undefined
  misc_feature: MA Experiment 20001458 PARAMETER Experiment Name: At_50mM_NH4NO3_L-to-H_P Parameter: Plant Line Value: Undefined
  misc_feature: MA Experiment 20001458 PARAMETER Experiment Name: At_50mM_NH4NO3_L-to-H_P Parameter: Timepoint (hr) Value: 2
  misc_feature: MA Experiment 20001458 PARAMETER Experiment Name: At_50mM_NH4NO3_L-to-H_P Parameter: Tissue Value: Siliques
  misc_feature: MA Experiment 20001458 PARAMETER Experiment Name: At_50mM_NH4NO3_L-to-H_P Parameter: Treatment Value: 50mM NH4NO3 vs. 100mM Manitol
  misc_feature: MA Experiment ID: 20001555 Result: Up-regulated in Transcription
  misc_feature: MA Experiment 20001555 PARAMETER Experiment Name: At_Drought_Soil_Dry_P Parameter: Age (day) Value: 24
  misc_feature: MA Experiment 20001555 PARAMETER Experiment Name: At_Drought_Soil_Dry_P Parameter: Organism Value: A. thaliana
  misc_feature: MA Experiment 20001555 PARAMETER Experiment Name: At_Drought_Soil_Dry_P Parameter: Plant Line Value: WS
  misc_feature: MA Experiment 20001555 PARAMETER Experiment Name: At_Drought_Soil_Dry_P Parameter: Post Timepoint (hr) Value: None
  misc_feature: MA Experiment 20001555 PARAMETER Experiment Name: At_Drought_Soil_Dry_P Parameter: Post-Treatment Value: None
  misc_feature: MA Experiment 20001555 PARAMETER Experiment Name: At_Drought_Soil_Dry_P Parameter: Timepoint (day) Value: 10
  misc_feature: MA Experiment 20001555 PARAMETER Experiment Name: At_Drought_Soil_Dry_P Parameter: Treatment Value: Drought vs. No Drought
  misc_feature: MA Experiment ID: 20001556 Result: Up-regulated in Transcription
  misc_feature: MA Experiment 20001556 PARAMETER Experiment Name: At_Drought_Soil_Dry_P Parameter: Age (day) Value: 26
  misc_feature: MA Experiment 20001556 PARAMETER Experiment Name: At_Drought_Soil_Dry_P Parameter: Organism Value: A. thaliana
  misc_feature: MA Experiment 20001556 PARAMETER Experiment Name: At_Drought_Soil_Dry_P Parameter: Plant Line Value: WS
  misc_feature: MA Experiment 20001556 PARAMETER Experiment Name: At_Drought_Soil_Dry_P Parameter: Post Timepoint (hr) Value: None
  misc_feature: MA Experiment 20001556 PARAMETER Experiment Name: At_Drought_Soil_Dry_P Parameter: Post-Treatment Value: None
  misc_feature: MA Experiment 20001556 PARAMETER Experiment Name: At_Drought_Soil_Dry_P Parameter: Timepoint (day) Value: 12
  misc_feature: MA Experiment 20001556 PARAMETER Experiment Name: At_Drought_Soil_Dry_P Parameter: Treatment Value: Drought vs. No Drought
  misc_feature: MA Experiment ID: 20001557 Result: Up-regulated in Transcription
  misc_feature: MA Experiment 20001557 PARAMETER Experiment Name: At_Drought_Soil_Dry_P Parameter: Age (day) Value: 27
  misc_feature: MA Experiment 20001557 PARAMETER Experiment Name: At_Drought_Soil_Dry_P Parameter: Organism Value: A. thaliana
  misc_feature: MA Experiment 20001557 PARAMETER Experiment Name: At_Drought_Soil_Dry_P Parameter: Plant Line Value: WS
  misc_feature: MA Experiment 20001557 PARAMETER Experiment Name: At_Drought_Soil_Dry_P Parameter: Post Timepoint (hr) Value: 3
  misc_feature: MA Experiment 20001557 PARAMETER Experiment Name: At_Drought_Soil_Dry_P Parameter: Post-Treatment Value: Re-Water vs. No Drought
  misc_feature: MA Experiment 20001557 PARAMETER Experiment Name: At_Drought_Soil_Dry_P Parameter: Timepoint (day) Value: 13
  misc_feature: MA Experiment 20001557 PARAMETER Experiment Name: At_Drought_Soil_Dry_P Parameter: Treatment Value: Drought vs. No Drought
  misc_feature: MA Experiment ID: 20001558 Result: Up-regulated in Transcription
  misc_feature: MA Experiment 20001558 PARAMETER Experiment Name: At_Drought_Soil_Dry_P Parameter: Age (day) Value: 27
  misc_feature: MA Experiment 20001558 PARAMETER Experiment Name: At_Drought_Soil_Dry_P Parameter: Organism Value: A. thaliana
  misc_feature: MA Experiment 20001558 PARAMETER Experiment Name: At_Drought_Soil_Dry_P Parameter: Plant Line Value: WS
  misc_feature: MA Experiment 20001558 PARAMETER Experiment Name: At_Drought_Soil_Dry_P Parameter: Post Timepoint (hr) Value: 6
  misc_feature: MA Experiment 20001558 PARAMETER Experiment Name: At_Drought_Soil_Dry_P Parameter: Post-Treatment Value: Re-Water vs. No Drought
  misc_feature: MA Experiment 20001558 PARAMETER Experiment Name: At_Drought_Soil_Dry_P Parameter: Timepoint (day) Value: 13
  misc_feature: MA Experiment 20001558 PARAMETER Experiment Name: At_Drought_Soil_Dry_P Parameter: Treatment Value: Drought vs. No Drought
  misc_feature: MA Experiment ID: 20001560 Result: Up-regulated in Transcription
  misc_feature: MA Experiment 20001560 PARAMETER Experiment Name: At_Drought_Soil_Dry_P Parameter: Age (day) Value: 28
  misc_feature: MA Experiment 20001560 PARAMETER Experiment Name: At_Drought_Soil_Dry_P Parameter: Organism Value: A. thaliana
  misc_feature: MA Experiment 20001560 PARAMETER Experiment Name: At_Drought_Soil_Dry_P Parameter: Plant Line Value: WS
  misc_feature: MA Experiment 20001560 PARAMETER Experiment Name: At_Drought_Soil_Dry_P Parameter: Post Timepoint (hr) Value: None
  misc_feature: MA Experiment 20001560 PARAMETER Experiment Name: At_Drought_Soil_Dry_P Parameter: Post-Treatment Value: None
  misc_feature: MA Experiment 20001560 PARAMETER Experiment Name: At_Drought_Soil_Dry_P Parameter: Timepoint (day) Value: 14
  misc_feature: MA Experiment 20001560 PARAMETER Experiment Name: At_Drought_Soil_Dry_P Parameter: Treatment Value: Drought vs. No Drought
  misc_feature: MA Experiment ID: 20001757 Result: Up-regulated in Transcription
  misc_feature: MA Experiment 20001757 PARAMETER Experiment Name: At_50mM_NH4NO3_L-to-H_P Parameter: Timepoint (hr) Value: 6
  misc_feature: MA Experiment 20001757 PARAMETER Experiment Name: At_50mM_NH4NO3_L-to-H_P Parameter: Tissue Value: Leaf
  misc_feature: MA Experiment 20001757 PARAMETER Experiment Name: At_50mM_NH4NO3_L-to-H_P Parameter: Treatment Value: 50mM NH4NO3 vs 100mM Mannitol
atggaggggtttaagctatacaagacgaagaagataggtcgacgcaaacacgatgtcgttttgaaatctattcacactgttctctcttatcaacagattcagaaattagcacccgactcgggctccgtttcaatgttggccgcgacgcctgctcatggactcaggtacgtggtggtgcccacacgctcatggcttcataggtttcgatgctgctcgtcttctctcgctcctctctccccttctgaattctcgggcggtaataaagcccagaagaagctcaacgacgagaacaacaccaacgtaagcaatgagaaaacggcgccgtattatccgaaacgaggagaaacagtggagcttgtgtgcgagagtttaggattcaaaggcaaaggaatctgtaaagttgatggaactggctacgtcgttatgtgtgaccgagctcttcccggcgaacgttttcttggccgtgtcactcgccgcaaaggcagctatgctgaagtgacaaaaatgaagacaatatctccacataaggacttagtagaagctccatgtgagtatgcatcttactgtggtggttgcaaaactcagaatctctcttatgaagctcagcttagagctaaagaagagcaagttcatgagcttatcagacatgttggaaggttttctgataacaatcctggccttgagattgtcttgaagcctattgttgcttgcgatattcaattccattatcggaataagatggagttttcatttggtccacaaagatggcttccgattgaaatgttaaacgagagacaagatggtcctaagaactttgcattggggctccatgcacctggattttttgataaggttttaaatgttgataagtgcttattacagagcgagccaggaaacttggttcttgctgctgtccaagattgctggagagatcctgaattaagtctttcaccatatgattgtcgttcacatgttgggtttcttaaacatttgatgctgagaactggaaggaatgtggagactggttcactagaacttatggtcaattttgtgacatcgtcttataagccagagctgttgaaacccctggttgataggatttcatcaattcctcaagtggtaagcattatgaataatgtaaattcttcggtaggaaacacatccgttggcgaaaaggaatatactctttatgggaaggatacaatcacagaggtcttaagagggcttacatttcaaatttcagccaactctttctttcagactaacactcatcaggctgaagttttatataagcttattgaggaatctgctggacttaaaggagatggctcagaagtcgtgctcgatcttttctgtggaactggtaccataggccttacacttgccagaagggcgaaacacgtgtatggttatgaagtagtaccacaagcaataacagatgcacacaagaatgcccaaataaacggcatagagaatgcaacattcatccaaggggatctaaacaaaataggagaagattttgggaacaatttccctaagcctgatatcgttatttctgatcccaatcgacctggtatgcacatgaagttgatcaagtttctgctaaagcttaaatctccacggatcatttatgtttcctgtaatcctgcaacctgcgccagggatctcgattacctctgtcacggcgtggaggagaagaatctaaaaggttgctacaaactgatgagtgttcagccagtggatatgttccctcacactcctcacatcgaatgtgtctgcttgttagagcttgcttgagctctattgtcaccatggctgcttcatttggtctctaatcagatgagagacaaatgaaaacagagatttttttagattgagggagttttggttttccattagagttaagtatctgtaatctttttcatcgagttctttaatagcattcatagacaagaatgtaaacgttttttaaaaagttaaaatcccaccaaggcaagtggtctttaagagtt

SEQ ID NO: 106873 - protein, 598 aa, Arabidopsis thaliana
  peptide (1)..(598): Ceres Seq. ID no. 13620722
  misc_feature (198)..(598): Pfam Name: tRNA (Uracil-5-)-methyltransferase Pfam Description: tRNA (Uracil-5-)-methyltransferase
  misc_feature (35)..(598): Homolog of NCBI NO: 19310570 NR Description: unknown protein [Arabidopsis thaliana]
  misc_feature (45)..(598): Homolog of NCBI NO: 9280234 NR Description: RNA methyltransferase-like protein [Arabidopsis
  misc_feature (109)..(597): Homolog of NCBI NO: 34903506 NR Description: putative RNA methyltransferase [Oryza sativa
  misc_feature (112)..(598): Homolog of NCBI NO: 21672850 NR Description: RNA methyltransferase, TrmA family [Chlorobium TLS] >gi|21645898|gb|AAM71257.1| RNA methyltransferase, TrmA
  misc_feature (275)..(597): Homolog of NCBI NO: 15613250 NR Description: RNA methyltransferase [Bacillus halodurans]
  misc_feature (103)..(252): Homolog of NCBI NO: 15613250 NR Description: RNA methyltransferase [Bacillus halodurans]
  misc_feature (127)..(597): Homolog of NCBI NO: 29346053 NR Description: RNA methyltransferase [Bacteroides VPI- 5482] >gi|29337947|gb|AAO75750.1| RNA methyltransferase
  misc_feature (112)..(595): Homolog of NCBI NO: 23136902 NR Description: hypothetical protein [Cytophaga hutchinsonii]
  misc_feature (124)..(595): Homolog of NCBI NO: 34540828 NR Description: RNA methyltransferase, TrmA family [Porphyromonas W83] >gi|34397142|gb|AAQ66206.1| RNA methyltransferase, TrmA
  misc_feature (262)..(597): Homolog of NCBI NO: 30018572 NR Description: tRNA (Uracil-5-) -methyltransferase [Bacillus
MEGFKLYKTKKIGRRKHDVVLKSIHTVLSYQQIQKLAPDSGSVSMLAATPAHGLRYVVVPTRSWLHRFRCCSSSLAPLSPSEFSGGNKAQKKLNDENNTNVSNEKTAPYYPKRGETVELVCESLGFKGKGICKVDGTGYVVMCDRALPGERFLGRVTRRKGSYAEVTKMKTISPHKDLVEAPCEYASYCGGCKTQNLSYEAQLRAKEEQVHELIRHVGRFSDNNPGLEIVLKPIVACDIQFHYRNKMEFSFGPQRWLPIEMLNERQDGPKNFALGLHAPGFFDKVLNVDKCLLQSEPGNLVLAAVQDCWRDPELSLSPYDCRSHVGFLKHLMLRTGRNVETGSLELMVNFVTSSYKPELLKPLVDRISSIPQVVSIMNNVNSSVGNTSVGEKEYTLYGKDTITEVLRGLTFQISANSFFQTNTHQAEVLYKLIEESAGLKGDGSEVVLDLFCGTGTIGLTLARRAKHVYGYEVVPQAITDAHKNAQINGIENATFIQGDLNKIGEDFGNNFPKPDIVISDPNRPGMHMKLIKFLLKLKSPRIIYVSCNPATCARDLDYLCHGVEEKNLKGCYKLMSVQPVDMFPHTPHIECVCLLELA

SEQ ID NO: 106874 - protein, 554 aa, Arabidopsis thaliana; identical to SEQ ID NO: 72338
  peptide (1)..(554): Ceres Seq. ID no. 13620723
  misc_feature (154)..(554): Pfam Name: tRNA (Uracil-5-)-methyltransferase Pfam Description: tRNA (Uracil-5-)-methyltransferase
  misc_feature (1)..(554): Homolog of NCBI NO: 19310570 NR Description: unknown protein [Arabidopsis thaliana]
  misc_feature (1)..(554): Homolog of NCBI NO: 9280234 NR Description: RNA methyltransferase-like protein [Arabidopsis
  misc_feature (65)..(553): Homolog of NCBI NO: 34903506 NR Description: putative RNA methyltransferase [Oryza sativa
  misc_feature (68)..(554): Homolog of NCBI NO: 21672850 NR Description: RNA methyltransferase, TrmA family [Chlorobium TLS] >gi|21645898|gb|AAM71257.1| RNA methyltransferase, TrmA
  misc_feature (231)..(553): Homolog of NCBI NO: 15613250 NR Description: RNA methyltransferase [Bacillus halodurans]
  misc_feature (59)..(208): Homolog of NCBI NO: 15613250 NR Description: RNA methyltransferase [Bacillus halodurans]
  misc_feature (83)..(553): Homolog of NCBI NO: 29346053 NR Description: RNA methyltransferase [Bacteroides VPI- 5482] >gi|29337947|gb|AAO75750.1| RNA methyltransferase
  misc_feature (68)..(551): Homolog of NCBI NO: 23136902 NR Description: hypothetical protein [Cytophaga hutchinsonii]
  misc_feature (80)..(551): Homolog of NCBI NO: 34540828 NR Description: RNA methyltransferase, TrmA family [Porphyromonas W83] >gi|34397142|gb|AAQ66206.1| RNA methyltransferase, TrmA
  misc_feature (218)..(553): Homolog of NCBI NO: 30018572 NR Description: tRNA (Uracil-5-) -methyltransferase [Bacillus

SEQ ID NO: 106875 - protein, 457 aa, Arabidopsis thaliana; identical to SEQ ID NO: 72339
  peptide (1)..(457): Ceres Seq. ID no. 13620724
  misc_feature (57)..(457): Pfam Name: tRNA (Uracil-5-)-methyltransferase Pfam Description: tRNA (Uracil-5-)-methyltransferase
  misc_feature (1)..(457): Homolog of NCBI NO: 19310570 NR Description: unknown protein [Arabidopsis thaliana]
  misc_feature (1)..(457): Homolog of NCBI NO: 9280234 NR Description: RNA methyltransferase-like protein [Arabidopsis
  misc_feature (1)..(456): Homolog of NCBI NO: 34903506 NR Description: putative RNA methyltransferase [Oryza sativa
  misc_feature (1)..(457): Homolog of NCBI NO: 21672850 NR Description: RNA methyltransferase, TrmA family [Chlorobium TLS] >gi|21645898|gb|AAM71257.1| RNA methyltransferase, TrmA
  misc_feature (134)..(456): Homolog of NCBI NO: 15613250 NR Description: RNA methyltransferase [Bacillus halodurans]
  misc_feature (1)..(111): Homolog of NCBI NO: 15613250 NR Description: RNA methyltransferase [Bacillus halodurans]
  misc_feature (1)..(456): Homolog of NCBI NO: 29346053 NR Description: RNA methyltransferase [Bacteroides VPI- 5482] >gi|29337947|gb|AAO75750.1| RNA methyltransferase
  misc_feature (1)..(454): Homolog of NCBI NO: 23136902 NR Description: hypothetical protein [Cytophaga hutchinsonii]
  misc_feature (1)..(454): Homolog of NCBI NO: 34540828 NR Description: RNA methyltransferase, TrmA family [Porphyromonas W83] >gi|34397142|gb|AAQ66206.1| RNA methyltransferase, TrmA
  misc_feature (121)..(456): Homolog of NCBI NO: 30018572 NR Description: tRNA (Uracil-5-) -methyltransferase [Bacillus

SEQ ID NO: 106876 - DNA, 1598 bp, Arabidopsis thaliana
  misc_feature (1)..(1598): Ceres Seq. ID no. 13620729
  misc_feature: MA Experiment ID: 20000185 Result: Down-regulated in Transcription
  misc_feature: MA Experiment 20000185 PARAMETER Experiment Name: At_Roots__P Parameter: Age (day) Value: 7 vs. 21
  misc_feature: MA Experiment 20000185 PARAMETER Experiment Name: At_Roots__P Parameter: Organism Value: A. thaliana
  misc_feature: MA Experiment 20000185 PARAMETER Experiment Name: At_Roots__P Parameter: Tissue Value: Roots vs. Whole Plant
  misc_feature: MA Experiment ID: 20000439 Result: Down-regulated in Transcription
  misc_feature: MA Experiment 20000439 PARAMETER Experiment Name: At_Roots__P Parameter: Age (day) Value: 14 vs. 21
  misc_feature: MA Experiment 20000439 PARAMETER Experiment Name: At_Roots__P Parameter: Organism Value: A. thaliana
  misc_feature: MA Experiment 20000439 PARAMETER Experiment Name: At_Roots__P Parameter: Tissue Value: Roots vs. Whole Plant
  misc_feature: MA Experiment ID: 20001558 Result: Down-regulated in Transcription
  misc_feature: MA Experiment 20001558 PARAMETER Experiment Name: At_Drought_Soil_Dry_P Parameter: Age (day) Value: 27
  misc_feature: MA Experiment 20001558 PARAMETER Experiment Name: At_Drought_Soil_Dry_P Parameter: Organism Value: A. thaliana
  misc_feature: MA Experiment 20001558 PARAMETER Experiment Name: At_Drought_Soil_Dry_P Parameter: Plant Line Value: WS
  misc_feature: MA Experiment 20001558 PARAMETER Experiment Name: At_Drought_Soil_Dry_P Parameter: Post Timepoint (hr) Value: 6
  misc_feature: MA Experiment 20001558 PARAMETER Experiment Name: At_Drought_Soil_Dry_P Parameter: Post-Treatment Value: Re-Water vs. No Drought
  misc_feature: MA Experiment 20001558 PARAMETER Experiment Name: At_Drought_Soil_Dry_P Parameter: Timepoint (day) Value: 13
  misc_feature: MA Experiment 20001558 PARAMETER Experiment Name: At_Drought_Soil_Dry_P Parameter: Treatment Value: Drought vs. No Drought
atcaaagagattgtgaaaatactaagattagaaaataatttgagaaaacatcagaaaaaaaatggcggaactgttgttggtggaaactccaatcccacagcaaaagcactacgaatccaaaccattcccggcggtgatatcaccaccgtctgcttcgattccaattcctgctctgtctctcccactattcactcaaactatcaaaactcagaaacactatctcgattctctcttgcacgaatccggagcagtgctattcagaggttttccggtgaattccgccgatgatttcaacgacgtcgttgaagctttcggtttcgatgagcttccttacgtcggaggcgctgctcctcgcactagcgtcgtcggtcgtgtcttcactgctaatgaatctcctcctgatcagaagattccttttcaccacgagatggctcaggttcgtgagtttccatcaaagttgttcttttactgtgagattgagcctaagtgtggtggagagactccaattgtgttgagtcatgttgtgtatgagagaatgaaagataaacatccagagtttgttcagagattagaggaacatggtttgctttatgttagggttttaggtgaagatgatgatccttcatctcccattggacgtggttggaaatctacattcttaacccatgacaagaaccttgctgagcaaagggcggttgatttgggaatgaaactggaatggacagaggatggtggagccaagacggtaatgggtccgattccggctatcaaatatgacgagtcgagaaaccgtaaagtatggtttaacagcatggtagctgcttatacgggatgggaggataagcggaatgatccaagaaaggctgtgacttttggggatggaaagcctttacctgcggatatagtccatgattgtcttaggattcttgaagaggaatgtgttgctgttccgtggcagagaggagatgttttgcttatagataactgggcggttcttcattctcgaagaccgtttgatcctcctcgtcgagttcttgcatcactctgcaaatagattatgttgtctttcatgcataaatcaaagctttggatttcgaatttagaggcaacaacaacactgtacatattttggatacatatatgtgggtacatagtaacccatttccttattctaaacatgtcttaactacactgcagcagaaactatacaacataagaagaaaccaaagacaaactcgtcgtccttcttttattgtccgcgggattgaagcttttgctttaagatcttgcaaagaaactcgactcagagctcctcgtgtagctttgaggacttagatggtttcaggcctggtttgaggaattcagaaagccattttgcggattctttctccatacgagtcaagttgttcttgaagtctatgtagtaaactccgaacctagctgtgtacccgtcttgccactcgaagttgtccattaaagaccacaagaaatacgatgtaacattcaccttgtcttcactgcaagatacaaaaaattgaatctaaatggaaaaaaacatttgtacttaaaagatcaaagcttacaacaaagtgaggaac

SEQ ID NO: 106877 - protein, 330 aa, Arabidopsis thaliana
  peptide (1)..(330): Ceres Seq. ID no. 13620730
  misc_feature (1)..(330): Homolog of NCBI NO: 15232542 NR Description: expressed protein [Arabidopsis thaliana]
  misc_feature (8)..(328): Homolog of NCBI NO: 34906388 NR Description: P0710E05.6 [Oryza sativa (japonica
  misc_feature (4)..(330): Homolog of NCBI NO: 22985582 NR Description: hypothetical protein [Burkholderia fungorum]
  misc_feature (48)..(330): Homolog of NCBI NO: 23128425 NR Description: hypothetical protein [Nostoc punctiforme]
  misc_feature (28)..(330): Homolog of NCBI NO: 23468981 NR Description: hypothetical protein [Pseudomonas syringae pv.
  misc_feature (28)..(330): Homolog of NCBI NO: 23106239 NR Description: hypothetical protein [Azotobacter vinelandii]
  misc_feature (34)..(330): Homolog of NCBI NO: 26990914 NR Description: syrP protein, putative [Pseudomonas putida >gi|24985933|gb|AAN69803.1|AE016619_1 syrP protein, putative
  misc_feature (53)..(330): Homolog of NCBI NO: 9937235 NR Description: SyrP-like protein [Streptomyces verticillus]
  misc_feature (28)..(330): Homolog of NCBI NO: 28869349 NR Description: pyoverdine biosynthesis regulatory gene, putative syringae pv. tomato str. DC3000] >gi|28852590|gb|AAO55663.1| biosynthesis regulatory gene, putative [Pseudomonas syringae pv.
  misc_feature (55)..(328): Homolog of NCBI NO: 15597499 NR Description: hypothetical protein [Pseudomonas aeruginosa PA01]
MAELLLVETPIPQQKHYESKPFPAVISPPSASIPIPALSLPLFTQTIKTQKHYLDSLLHESGAVLFRGFPVNSADDFNDVVEAFGFDELPYVGGAAPRTSVVGRVFTANESPPDQKIPFHHEMAQVREFPSKLFFYCEIEPKCGGETPIVLSHVVYERMKDKHPEFVQRLEEHGLLYVRVLGEDDDPSSPIGRGWKSTFLTHDKNLAEQRAVDLGMKLEWTEDGGAKTVMGPIPAIKYDESRNRKVWFNSMVAAYTGWEDKRNDPRKAVTFGDGKPLPADIVHDCLRILEEECVAVPWQRGDVLLIDNWAVLHSRRPFDPPRRVLASLCK

SEQ ID NO: 106878 - protein, 208 aa, Arabidopsis thaliana
  peptide (1)..(208): Ceres Seq. ID no. 13620731
  misc_feature (1)..(208): Homolog of NCBI NO: 15232542 NR Description: expressed protein [Arabidopsis thaliana]
  misc_feature (1)..(206): Homolog of NCBI NO: 34906388 NR Description: P0710E05.6 [Oryza sativa (japonica
  misc_feature (1)..(208): Homolog of NCBI NO: 22985582 NR Description: hypothetical protein [Burkholderia fungorum]
  misc_feature (1)..(208): Homolog of NCBI NO: 23128425 NR Description: hypothetical protein [Nostoc punctiforme]
  misc_feature (1)..(208): Homolog of NCBI NO: 23468981 NR Description: hypothetical protein [Pseudomonas syringae pv.
  misc_feature (1)..(208): Homolog of NCBI NO: 23106239 NR Description: hypothetical protein [Azotobacter vinelandii]
  misc_feature (1)..(208): Homolog of NCBI NO: 26990914 NR Description: syrP protein, putative [Pseudomonas putida >gi|24985933|gb|AAN69803.1|AE016619_1 syrP protein, putative
  misc_feature (1)..(208): Homolog of NCBI NO: 9937235 NR Description: SyrP-like protein [Streptomyces verticillus]
  misc_feature (1)..(208): Homolog of NCBI NO: 28869349 NR Description: pyoverdine biosynthesis regulatory gene, putative syringae pv. tomato str. DC3000] >gi|28852590|gb|AAO55663.1| biosynthesis regulatory gene, putative [Pseudomonas syringae pv.
  misc_feature (1)..(206): Homolog of NCBI NO: 15597499 NR Description: hypothetical protein [Pseudomonas aeruginosa PA01]
MAQVREFPSKLFFYCEIEPKCGGETPIVLSHVVYERMKDKHPEFVQRLEEHGLLYVRVLGEDDDPSSPIGRGWKSTFLTHDKNLAEQRAVDLGMKLEWTEDGGAKTVMGPIPAIKYDESRNRKVWFNSMVAAYTGWEDKRNDPRKAVTFGDGKPLPADIVHDCLRILEEECVAVPWQRGDVLLIDNWAVLHSRRPFDPPRRVLASLCK

SEQ ID NO: 106879 - protein, 172 aa, Arabidopsis thaliana; identical to SEQ ID NO: 43625
  peptide (1)..(172): Ceres Seq. ID no. 13620732
  misc_feature (1)..(172): Homolog of NCBI NO: 15232542 NR Description: expressed protein [Arabidopsis thaliana]
  misc_feature (1)..(170): Homolog of NCBI NO: 34906388 NR Description: P0710E05.6 [Oryza sativa (japonica
  misc_feature (1)..(172): Homolog of NCBI NO: 22985582 NR Description: hypothetical protein [Burkholderia fungorum]
  misc_feature (1)..(172): Homolog of NCBI NO: 23128425 NR Description: hypothetical protein [Nostoc punctiforme]
  misc_feature (1)..(172): Homolog of NCBI NO: 23468981 NR Description: hypothetical protein [Pseudomonas syringae pv.
  misc_feature (1)..(172): Homolog of NCBI NO: 23106239 NR Description: hypothetical protein [Azotobacter vinelandii]
  misc_feature (1)..(172): Homolog of NCBI NO: 26990914 NR Description: syrP protein, putative [Pseudomonas putida >gi|24985933|gb|AAN69803.1|AE016619_1 syrP protein, putative
  misc_feature (1)..(172): Homolog of NCBI NO: 9937235 NR Description: SyrP-like protein [Streptomyces verticillus]
  misc_feature (1)..(172): Homolog of NCBI NO: 28869349 NR Description: pyoverdine biosynthesis regulatory gene, putative syringae pv. tomato str. DC3000] >gi|28852590|gb|AAO55663.1| biosynthesis regulatory gene, putative [Pseudomonas syringae pv.
  misc_feature (1)..(170): Homolog of NCBI NO: 15597499 NR Description: hypothetical protein [Pseudomonas aeruginosa PA01]

SEQ ID NO: 106880 - DNA, 1147 bp, Arabidopsis thaliana
  misc_feature (1)..(1147): Ceres Seq. ID no. 13620741
  misc_feature: MA Experiment ID: 108585 Result: Up-regulated in Transcription
  misc_feature: MA Experiment 108585 PARAMETER Experiment Name: At_5mM_NaNP_cDNA_P Parameter: Timepoint (hr) Value: 6
  misc_feature: MA Experiment 108585 PARAMETER Experiment Name: At_5mM_NaNP_cDNA_P Parameter: Tissue Value: Aerial
  misc_feature: MA Experiment 108585 PARAMETER Experiment Name: At_5mM_NaNP_cDNA_P Parameter: Treatment Value: null
  misc_feature: MA Experiment ID: 20000112 Result: Up-regulated in Transcription
  misc_feature: MA Experiment 20000112 PARAMETER Experiment Name: At_42deg_Heat_cDNA_P Parameter: Temperature (deg C) Value: 42 vs. 22
  misc_feature: MA Experiment 20000112 PARAMETER Experiment Name: At_42deg_Heat_cDNA_P Parameter: Timepoint (hr) Value: 2
  misc_feature: MA Experiment 20000112 PARAMETER Experiment Name: At_42deg_Heat_cDNA_P Parameter: Tissue Value: Aerial
  misc_feature: MA Experiment ID: 20000173 Result: Down-regulated in Transcription
  misc_feature: MA Experiment 20000173 PARAMETER Experiment Name: At_42deg_Heat_P Parameter: Age (day) Value: 14
  misc_feature: MA Experiment 20000173 PARAMETER Experiment Name: At_42deg_Heat_P Parameter: Organism Value: A. thaliana
  misc_feature: MA Experiment 20000173 PARAMETER Experiment Name: At_42deg_Heat_P Parameter: Plant Line Value: WS
  misc_feature: MA Experiment 20000173 PARAMETER Experiment Name: At_42deg_Heat_P Parameter: Temperature (deg C) Value: 42 vs. 22
  misc_feature: MA Experiment 20000173 PARAMETER Experiment Name: At_42deg_Heat_P Parameter: Timepoint (hr) Value: 6
  misc_feature: MA Experiment 20000173 PARAMETER Experiment Name: At_42deg_Heat_P Parameter: Tissue Value: Aerial
  misc_feature: MA Experiment ID: 20000264 Result: Up-regulated in Transcription
  misc_feature: MA Experiment 20000264 PARAMETER Experiment Name: At_Open_Flower_P Parameter: Age (day) Value: 21
  misc_feature: MA Experiment 20000264 PARAMETER Experiment Name: At_Open_Flower_P Parameter: Plant Line Value: WS
  misc_feature: MA Experiment 20000264 PARAMETER Experiment Name: At_Open_Flower_P Parameter: Tissue Value: Open Flower vs. Whole Plant
  misc_feature: MA Experiment ID: 20000265 Result: Up-regulated in Transcription
  misc_feature: MA Experiment 20000265 PARAMETER Experiment Name: At_Open_Flower_P Parameter: Age (day) Value: 21
  misc_feature: MA Experiment 20000265 PARAMETER Experiment Name: At_Open_Flower_P Parameter: Plant Line Value: WS
  misc_feature: MA Experiment 20000265 PARAMETER Experiment Name: At_Open_Flower_P Parameter: Tissue Value: Closed Flower vs. Whole Plant
  misc_feature: MA Experiment ID: 20000453 Result: Down-regulated in Transcription
  misc_feature: MA Experiment 20000453 PARAMETER Experiment Name: At_100uM_ABA_P Parameter: Age (day) Value: 15
  misc_feature: MA Experiment 20000453 PARAMETER Experiment Name: At_100uM_ABA_P Parameter: Organism Value: A. thaliana
  misc_feature: MA Experiment 20000453 PARAMETER Experiment Name: At_100uM_ABA_P Parameter: Plant Line Value: WS
  misc_feature: MA Experiment 20000453 PARAMETER Experiment Name: At_100uM_ABA_P Parameter: Timepoint (hr) Value: 24
  misc_feature: MA Experiment 20000453 PARAMETER Experiment Name: At_100uM_ABA_P Parameter: Tissue Value: Aerial
  misc_feature: MA Experiment 20000453 PARAMETER Experiment Name: At_100uM_ABA_P Parameter: Treatment Value: 100uM ABA vs. No Treatment
  misc_feature: MA Experiment ID: 20000794 Result: Up-regulated in Transcription
  misc_feature: MA Experiment 20000794 PARAMETER Experiment Name: At_Petals_P Parameter: Age (day) Value: 23-25 days
  misc_feature: MA Experiment 20000794 PARAMETER Experiment Name: At_Petals_P Parameter: Plant Line Value: WS
  misc_feature: MA Experiment 20000794 PARAMETER Experiment Name: At_Petals_P Parameter: Tissue Value: Petals vs. Whole plant
  misc_feature: MA Experiment ID: 20001905 Result: Up-regulated in Transcription
  misc_feature: MA Experiment 20001905 PARAMETER Experiment Name: At_Drought_Reproduction_P Parameter: Age (day) Value: 40
  misc_feature: MA Experiment 20001905 PARAMETER Experiment Name: At_Drought_Reproduction_P Parameter: Organism Value: A. thaliana
  misc_feature: MA Experiment 20001905 PARAMETER Experiment Name: At_Drought_Reproduction_P Parameter: Plant Line Value: WS
  misc_feature: MA Experiment 20001905 PARAMETER Experiment Name: At_Drought_Reproduction_P Parameter: Timepoint (day) Value: 10
  misc_feature: MA Experiment 20001905 PARAMETER Experiment Name: At_Drought_Reproduction_P Parameter: Tissue Value: Rosettes
  misc_feature: MA Experiment 20001905 PARAMETER Experiment Name: At_Drought_Reproduction_P Parameter: Treatment Value: Drought vs. No Drought
  misc_feature: MA Experiment ID: 20001910 Result: Up-regulated in Transcription
  misc_feature: MA Experiment 20001910 PARAMETER Experiment Name: At_Drought_Reproduction_P Parameter: Age (day) Value: 37
  misc_feature: MA Experiment 20001910 PARAMETER Experiment Name: At_Drought_Reproduction_P Parameter: Organism Value: A. thaliana
  misc_feature: MA Experiment 20001910 PARAMETER Experiment Name: At_Drought_Reproduction_P Parameter: Plant Line Value: WS
  misc_feature: MA Experiment 20001910 PARAMETER Experiment Name: At_Drought_Reproduction_P Parameter: Timepoint (day) Value: 7
  misc_feature: MA Experiment 20001910 PARAMETER Experiment Name: At_Drought_Reproduction_P Parameter: Tissue Value: Flowers
  misc_feature: MA Experiment 20001910 PARAMETER Experiment Name: At_Drought_Reproduction_P Parameter: Treatment Value: Drought vs. No Drought
catctcttcttgaagctgctttcttcctcaaattcttttttttccagattcttctcctttcttcttccttcttccttatttcgatttcgaattttgaattttctcaatggctcaatcgtgtcttaaaattgttcgaatcaacaatctaaggaacagagtgaatcgtcggattttgattctccgacgattcacacggttgttatggagtagaatcgttgcttgtactcctggcaaatctcggagatatctcttgctttctcgcgctcttccgtctccgactgtttctcgtccttctccttctccgatccccgccgtcgatgtcgtcgtcggtggtggtggtggtggtggtgagtttgttcgtcgttcgtcggttgtttacgataatgataacagtcatcggagatcggattctgatttggtttctttgaagattagtctcttaggagatccagaaatcggaaaaactagcttcctggcgaaatatgttggagaagagaaagaagtagaaatgagagaattggagaaaggtataaattgtacggacaagacgttatacatgggaggtgctcgcatttcatatagtatctgggaattagaagctgagagatcacgagatcaaatccctgtggcttgcaaggactctgttgccattctctttatgtttgatttaaccagtcgttgcacgcttaatagtgtcattagctggtatcaacaagctaggaagtctaatcagacggcgataccagttatggtaggaaccaagtttgatgagtttattcagcttcctattgatctgcaatggacaattgctagccaggcgagaacatatgcgaaggctttaaacgcgacgctcttcttctcgagtgcttcatacaacataaacgtgaataagatctttaagtttgtgacggcgaagctcttcgacttaccatggacggtggagcgcaatctcacaatcggagaaccaatcatcgacttctagaatatgtatttgtatataatataaaagaagcgaatcctgaagaatgcgttttttttttttttttttaattcaccgctaaagcttgtcgccgtgggactgatcggactagtcgaatttaagcgaaatggagagatgaagcggcggagatttcgcccgcttttctcc

SEQ ID NO: 106881 - protein, 291 aa, Arabidopsis thaliana; identical to SEQ ID NO: 21663
  peptide (1)..(291): Ceres Seq. ID no. 13620742
  misc_feature (111)..(273): Pfam Name: Ras family Pfam Description: Ras family
  misc_feature (1)..(291): Homolog of NCBI NO: 18403119 NR Description: SGP1 monomeric G-protein -related [Arabidopsis
  misc_feature (1)..(291): Homolog of NCBI NO: 30686351 NR Description: SGP1 monomeric G-protein -related [Arabidopsis
  misc_feature (1)..(237): Homolog of NCBI NO: 30686347 NR Description: SGP1 monomeric G-protein -related [Arabidopsis
  misc_feature (5)..(291): Homolog of NCBI NO: 15239761 NR Description: SGP1 monomeric G-protein (emb|CAB54517.1)
  misc_feature (21)..(291): Homolog of NCBI NO: 33146727 NR Description: putative Septum-promoting GTP-binding protein 1
  misc_feature (55)..(289): Homolog of NCBI NO: 38105787 NR Description: hypothetical protein MG04862.4 [Magnaporthe
  misc_feature (55)..(289): Homolog of NCBI NO: 32421653 NR Description: hypothetical protein [Neurospora crassa]
  misc_feature (105)..(291): Homolog of NCBI NO: 2408103 NR Description: sid3 [Schizosaccharomyces pombe]
  misc_feature (105)..(291): Homolog of NCBI NO: 19114197 NR Description: sid3 protein; gtpase; inducer of septum formation
  misc_feature (102)..(291): Homolog of NCBI NO: 28396142 NR Description: Tem-1-like protein [Giardia intestinalis]

SEQ ID NO: 106882 - protein, 157 aa, Arabidopsis thaliana; identical to SEQ ID NO: 21664
  peptide (1)..(157): Ceres Seq. ID no. 13620743
  misc_feature (1)..(139): Pfam Name: Ras family Pfam Description: Ras family
  misc_feature (1)..(157): Homolog of NCBI NO: 18403119 NR Description: SGP1 monomeric G-protein -related [Arabidopsis
  misc_feature (1)..(157): Homolog of NCBI NO: 30686351 NR Description: SGP1 monomeric G-protein -related [Arabidopsis
  misc_feature (1)..(103): Homolog of NCBI NO: 30686347 NR Description: SGP1 monomeric G-protein -related [Arabidopsis
  misc_feature (1)..(157): Homolog of NCBI NO: 15239761 NR Description: SGP1 monomeric G-protein (emb|CAB54517.1)
  misc_feature (1)..(157): Homolog of NCBI NO: 33146727 NR Description: putative Septum-promoting GTP-binding protein 1
  misc_feature (1)..(155): Homolog of NCBI NO: 38105787 NR Description: hypothetical protein MG04862.4 [Magnaporthe
  misc_feature (1)..(155): Homolog of NCBI NO: 32421653 NR Description: hypothetical protein [Neurospora crassa]
  misc_feature (1)..(157): Homolog of NCBI NO: 2408103 NR Description: sid3 [Schizosaccharomyces pombe]
  misc_feature (1)..(157): Homolog of NCBI NO: 19114197 NR Description: sid3 protein; gtpase; inducer of septum formation
  misc_feature (1)..(157): Homolog of NCBI NO: 28396142 NR Description: Tem-1-like protein [Giardia intestinalis]

SEQ ID NO: 106883 - DNA, 890 bp, Arabidopsis thaliana
  misc_feature (1)..(890): Ceres Seq. ID no. 13620744
  misc_feature: MA Experiment ID: 20000306 Result: Down-regulated in Transcription
  misc_feature: MA Experiment 20000306 PARAMETER Experiment Name: At_Germinating_Seeds_Sub_P Parameter: Age (hr) Value: 6 vs. 0
  misc_feature: MA Experiment 20000306 PARAMETER Experiment Name: At_Germinating_Seeds_Sub_P Parameter: Organism Value: A. thaliana
  misc_feature: MA Experiment 20000306 PARAMETER Experiment Name: At_Germinating_Seeds_Sub_P Parameter: Plant Line Value: WS
  misc_feature: MA Experiment 20000306 PARAMETER Experiment Name: At_Germinating_Seeds_Sub_P Parameter: Tissue Value: Germinating Seeds
  misc_feature: MA Experiment ID: 20000307 Result: Down-regulated in Transcription
  misc_feature: MA Experiment 20000307 PARAMETER Experiment Name: At_Germinating_Seeds_Sub_P Parameter: Age (hr) Value: 24 vs. 0
  misc_feature: MA Experiment 20000307 PARAMETER Experiment Name: At_Germinating_Seeds_Sub_P Parameter: Organism Value: A. thaliana
  misc_feature: MA Experiment 20000307 PARAMETER Experiment Name: At_Germinating_Seeds_Sub_P Parameter: Plant Line Value: WS
  misc_feature: MA Experiment 20000307 PARAMETER Experiment Name: At_Germinating_Seeds_Sub_P Parameter: Tissue Value: Germinating Seeds
  misc_feature: MA Experiment ID: 20000314 Result: Down-regulated in Transcription
  misc_feature: MA Experiment 20000314 PARAMETER Experiment Name: At_14day_Shoots-Roots_Sub_P Parameter: Age (day) Value: 14
  misc_feature: MA Experiment 20000314 PARAMETER Experiment Name: At_14day_Shoots-Roots_Sub_P Parameter: Organism Value: A. thaliana
  misc_feature: MA Experiment 20000314 PARAMETER Experiment Name: At_14day_Shoots-Roots_Sub_P Parameter: Plant Line Value: WS
  misc_feature: MA Experiment 20000314 PARAMETER Experiment Name: At_14day_Shoots-Roots_Sub_P Parameter: Tissue Value: Roots vs. Whole Plant
  misc_feature: MA Experiment ID: 20000355 Result: Down-regulated in Transcription
  misc_feature: MA Experiment 20000355 PARAMETER Experiment Name: At_Siliques_Sub_P Parameter: Age (day) Value: 21
  misc_feature: MA Experiment 20000355 PARAMETER Experiment Name: At_Siliques_Sub_P Parameter: Organism Value: A. thaliana
  misc_feature: MA Experiment 20000355 PARAMETER Experiment Name: At_Siliques_Sub_P Parameter: Plant Line Value: WS
  misc_feature: MA Experiment 20000355 PARAMETER Experiment Name: At_Siliques_Sub_P Parameter: Tissue Value: Less Than 5mm Siliques vs. Whole Plant
attttaaaacaccccacttggaaacacaaataaataaaaataaattcaaaacaatgtattcttcatcatctgtatcaaaacgcttcgttctagtccctattgtggtcgtggtgaccacacaactcctcctggtacgtaacgtttcttcactaaaccttaccaattcgtatcttcaccacaaatgcgtagtcaatcaagggaaatacaagccaggaagcaagtacgagaaatccctcgatgatatcatccaaagcttttcgaataaagataaagattcgtatggttttcgtaccggttacagcatgaaggcctacggtaaagaacctgatatggtctccatcacctaccagtgccgtatcgactctcgtgggcccaagtgccagtcctgcgttgtcacggccggttatgagcttcttcgtaagagatgtccgagatataaagaggcaataatatggtacgaccaatgtcttgtggagttttcttcgttagatacttctgggcagatcaattacgacgacaacttctgtatgcctagcgcgaagaacctgatcggcaattcaatctctcttgaagaaaggttgcatctcctcaacaatcttacaaagatagccgtcacgaaaatagataaaaacatagaaggtataaaaaaaccagtactgtatgcggcgggggagaagagactcgggacgaaaagtctatacggaatggtgcaatgttcggctgacttatctgttcagggttgtaatgagtgtatgttatattatatagtgcattttcaagagtgctgggaaaataaacaaggagtaagagttttgagtagaagctgtaactttaggtatgagctttacccttttattaaccctaagggtccttattatacaaagttctaa

SEQ ID NO: 106884 - protein, 295 aa, Arabidopsis thaliana
  peptide (1)..(295): Ceres Seq. ID no. 13620745
  misc_feature (232)..(286): Pfam Name: Domain of unknown function DUF26 Pfam Description: Domain of unknown function DUF26
  misc_feature (1)..(295): Homolog of NCBI NO: 15233207 NR Description: receptor-like protein kinase-related [Arabidopsis
  misc_feature (18)..(295): Homolog of NCBI NO: 15233204 NR Description: pollen coat receptor kinase, putative thaliana] >gi|9279743|dbj|BAB01369.1| contains similarity to protein kinase~gene_id:MZN24.4 [Arabidopsis thaliana]
  misc_feature (18)..(295): Homolog of NCBI NO: 9279744 NR Description: contains similarity to receptor protein
  misc_feature (18)..(290): Homolog of NCBI NO: 15233201 NR Description: receptor-like protein kinase-related [Arabidopsis >gi|9279742|dbj|BAB01368.1| contains similarity to receptor
  misc_feature (107)..(295): Homolog of NCBI NO: 11994709 NR Description: contains similarity to receptor protein
  misc_feature (20)..(99): Homolog of NCBI NO: 11994709 NR Description: contains similarity to receptor protein
  misc_feature (18)..(285): Homolog of NCBI NO: 15233236 NR Description: receptor-like protein kinase-related [Arabidopsis >gi|9279757|dbj|BAB01383.1| contains similarity to receptor
  misc_feature (18)..(285): Homolog of NCBI NO: 15233368 NR Description: receptor-like protein kinase-related [Arabidopsis
  misc_feature (18)..(285): Homolog of NCBI NO: 15233238 NR Description: receptor-like protein kinase-related [Arabidopsis >gi|9279758|dbj|BAB01384.1| contains similarity to receptor
  misc_feature (156)..(289): Homolog of NCBI NO: 9279741 NR Description: gene_id:MZN24.2~pir||T10609~similar to unknown
FKTPHLETQINKNKFKTMYSSSSVSKRFVLVPIVVVVTTQLLLVRNVSSLNLTNSYLHHKCVVNQGKYKPGSKYEKSLDDIIQSFSNKDKDSYGFRTGYSMKAYGKEPDMVSITYQCRIDSRGPKCQSCVVTAGYELLRKRCPRYKEAIIWYDQCLVEFSSLDTSGQINYDDNFCMPSAKNLIGNSISLEERLHLLNNLTKIAVTKIDKNIEGIKKPVLYAAGEKRLGTKSLYGMVQCSADLSVQGCNECMLYYIVHFQECWENKQGVRVLSRSCNFRYELYPFINPKGPYYTKF

SEQ ID NO: 106885 - protein, 278 aa, Arabidopsis thaliana
  peptide (1)..(278): Ceres Seq. ID no. 13620746
  misc_feature (215)..(269): Pfam Name: Domain of unknown function DUF26 Pfam Description: Domain of unknown function DUF26
  misc_feature (1)..(278): Homolog of NCBI NO: 15233207 NR Description: receptor-like protein kinase-related [Arabidopsis
  misc_feature (1)..(278): Homolog of NCBI NO: 15233204 NR Description: pollen coat receptor kinase, putative thaliana] >gi|9279743|dbj|BAB01369.1| contains similarity to protein kinase~gene_id:MZN24.4 [Arabidopsis thaliana]
  misc_feature (1)..(278): Homolog of NCBI NO: 9279744 NR Description: contains similarity to receptor protein
  misc_feature (1)..(273): Homolog of NCBI NO: 15233201 NR Description: receptor-like protein kinase-related [Arabidopsis >gi|9279742|dbj|BAB01368.1| contains similarity to receptor
  misc_feature (90)..(278): Homolog of NCBI NO: 11994709 NR Description: contains similarity to receptor protein
  misc_feature (3)..(82): Homolog of NCBI NO: 11994709 NR Description: contains similarity to receptor protein
  misc_feature (1)..(268): Homolog of NCBI NO: 15233236 NR Description: receptor-like protein kinase-related [Arabidopsis >gi|9279757|dbj|BAB01383.1| contains similarity to receptor
  misc_feature (1)..(268): Homolog of NCBI NO: 15233368 NR Description: receptor-like protein kinase-related [Arabidopsis
  misc_feature (1)..(268): Homolog of NCBI NO: 15233238 NR Description: receptor-like protein kinase-related [Arabidopsis >gi|9279758|dbj|BAB01384.1| contains similarity to receptor
  misc_feature (139)..(272): Homolog of NCBI NO: 9279741 NR Description: gene_id:MZN24.2~pir||T10609~similar to unknown
MYSSSSVSKRFVLVPIVVVVTTQLLLVRNVSSLNLTNSYLHHKCVVNQGKYKPGSKYEKSLDDIIQSFSNKDKDSYGFRTGYSMKAYGKEPDMVSITYQCRIDSRGPKCQSCVVTAGYELLRKRCPRYKEAIIWYDQCLVEFSSLDTSGQINYDDNFCMPSAKNLIGNSISLEERLHLLNNLTKIAVTKIDKNIEGIKKPVLYAAGEKRLGTKSLYGMVQCSADLSVQGCNECMLYYIVHFQECWENKQGVRVLSRSCNFRYELYPFINPKGPYYTKF

SEQ ID NO: 106886 - protein, 195 aa, Arabidopsis thaliana
  peptide (1)..(195): Ceres Seq. ID no. 13620747
  misc_feature (132)..(186): Pfam Name: Domain of unknown function DUF26 Pfam Description: Domain of unknown function DUF26
  misc_feature (1)..(195): Homolog of NCBI NO: 15233207 NR Description: receptor-like protein kinase-related [Arabidopsis
  misc_feature (1)..(195): Homolog of NCBI NO: 15233204 NR Description: pollen coat receptor kinase, putative thaliana] >gi|9279743|dbj|BAB01369.1| contains similarity to protein kinase~gene_id:MZN24.4 [Arabidopsis thaliana]
  misc_feature (1)..(195): Homolog of NCBI NO: 9279744 NR Description: contains similarity to receptor protein
  misc_feature (1)..(190): Homolog of NCBI NO: 15233201 NR Description: receptor-like protein kinase-related [Arabidopsis >gi|9279742|dbj|BAB01368.1| contains similarity to receptor
  misc_feature (7)..(195): Homolog of NCBI NO: 11994709 NR Description: contains similarity to receptor protein
  misc_feature (1)..(185): Homolog of NCBI NO: 15233236 NR Description: receptor-like protein kinase-related [Arabidopsis >gi|9279757|dbj|BAB01383.1| contains similarity to receptor
  misc_feature (1)..(185): Homolog of NCBI NO: 15233368 NR Description: receptor-like protein kinase-related [Arabidopsis
  misc_feature (1)..(185): Homolog of NCBI NO: 15233238 NR Description: receptor-like protein kinase-related [Arabidopsis >gi|9279758|dbj|BAB01384.1| contains similarity to receptor
  misc_feature (56)..(189): Homolog of NCBI NO: 9279741 NR Description: gene_id:MZN24.2~pir||T10609~similar to unknown
  misc_feature (1)..(33): Homolog of NCBI NO: 9279741 NR Description: gene_id:MZN24.2~pir||T10609~similar to unknown
MKAYGKEPDMVSITYQCRIDSRGPKCQSCVVTAGYELLRKRCPRYKEAIIWYDQCLVEFSSLDTSGQINYDDNFCMPSAKNLIGNSISLEERLHLLNNLTKIAVTKIDKNIEGIKKPVLYAAGEKRLGTKSLYGMVQCSADLSVQGCNECMLYYIVHFQECWENKQGVRVLSRSCNFRYELYPFINPKGPYYTKF

SEQ ID NO: 106887 - DNA, 925 bp, Arabidopsis thaliana
  misc_feature (1)..(925): Ceres Seq. ID no. 13620748
  misc_feature: MA Experiment ID: 20000171 Result: Up-regulated in Transcription
  misc_feature: MA Experiment 20000171 PARAMETER Experiment Name: At_42deg_Heat_P Parameter: Age (day) Value: 14
  misc_feature: MA Experiment 20000171 PARAMETER Experiment Name: At_42deg_Heat_P Parameter: Organism Value: A. thaliana
  misc_feature: MA Experiment 20000171 PARAMETER Experiment Name: At_42deg_Heat_P Parameter: Plant Line Value: WS
  misc_feature: MA Experiment 20000171 PARAMETER Experiment Name: At_42deg_Heat_P Parameter: Temperature (deg C) Value: 42 vs. 22
  misc_feature: MA Experiment 20000171 PARAMETER Experiment Name: At_42deg_Heat_P Parameter: Timepoint (hr) Value: 1
  misc_feature: MA Experiment 20000171 PARAMETER Experiment Name: At_42deg_Heat_P Parameter: Tissue Value: Aerial
  misc_feature: MA Experiment ID: 20000173 Result: Up-regulated in Transcription
  misc_feature: MA Experiment 20000173 PARAMETER Experiment Name: At_42deg_Heat_P Parameter: Age (day) Value: 14
  misc_feature: MA Experiment 20000173 PARAMETER Experiment Name: At_42deg_Heat_P Parameter: Organism Value: A. thaliana
  misc_feature: MA Experiment 20000173 PARAMETER Experiment Name: At_42deg_Heat_P Parameter: Plant Line Value: WS
  misc_feature: MA Experiment 20000173 PARAMETER Experiment Name: At_42deg_Heat_P Parameter: Temperature (deg C) Value: 42 vs. 22
  misc_feature: MA Experiment 20000173 PARAMETER Experiment Name: At_42deg_Heat_P Parameter: Timepoint (hr) Value: 6
  misc_feature: MA Experiment 20000173 PARAMETER Experiment Name: At_42deg_Heat_P Parameter: Tissue Value: Aerial
  misc_feature: MA Experiment ID: 20000437 Result: Up-regulated in Transcription
  misc_feature: MA Experiment 20000437 PARAMETER Experiment Name: At_Drought_P Parameter: Age (day) Value: 8
  misc_feature: MA Experiment 20000437 PARAMETER Experiment Name: At_Drought_P Parameter: Organism Value: A. thaliana
  misc_feature: MA Experiment 20000437 PARAMETER Experiment Name: At_Drought_P Parameter: Plant Line Value: WS
  misc_feature: MA Experiment 20000437 PARAMETER Experiment Name: At_Drought_P Parameter: Timepoint (hr) Value: 24
  misc_feature: MA Experiment 20000437 PARAMETER Experiment Name: At_Drought_P Parameter: Tissue Value: Whole Plant
  misc_feature: MA Experiment 20000437 PARAMETER Experiment Name: At_Drought_P Parameter: Treatment Value: Drought vs. No Drought
aaaaacggaacataacataacaaaacagagagatgagtcaagaagaacaaccaaagcggccacaagagccagtcacttacggtgacgtttttgaagtctccggtgaactcgctgataagcctatagcgccggaggatgcaaacatgatgcaagcagcggagacacgtgtgtttggccacactcagaaaggcggtgcagcggcagtcatgcagtctgcagccactgctaataaacgcggtggctttgtccatccaggtgacacaactgatctcgccgctgaacgaggcgtcacagtggcgcaaactgacgtccctggtgcacgtgtcacaacagaattcgtcggtggacaggtcgttggacaatacgtcgagcctaggccagtggcgactgcggcagctatggaagcagaagttgtgggtttgagtttacaaagtgcaataacgattggagaagcattggaagcgactgtgcaaaccgctggaaacaaaccggtggatcaaagcgacgcagcagcgattcaagcggcagaggttagagcttgtggcactaatgtgattgctcctggtggaatcgccgcttctgctcaatcagcagcaaatcacaacgctaccatagaccgtgatgaggataaaatcaagctcattgatgttttggcgggtgcgaccgggaagttagccgcagataaagctgtgaccaggcaggacgcagagggagtggtgagcgctgagctgaggaacaatcctaatttgtctactcaccctggtggtgtagcggcttctattactgccgccgctaggcttaacgagagagctgatatatgaaaaatcctgcgagagggagatgttttggttctgttgttcaaaaaagttcagtcataatgtaaaaaaatggtcactttccggttataaagttgaaatctttctct

SEQ ID NO: 106888 - protein, 262 aa, Arabidopsis thaliana
  peptide (1)..(262): Ceres Seq. ID no. 13620749
  misc_feature (199)..(262): Pfam Name: Seed maturation protein Pfam Description: Seed maturation protein
  misc_feature (1)..(262): Homolog of NCBI NO: 15228768 NR Description: LEA protein -related [Arabidopsis thaliana]
  misc_feature (1)..(262): Homolog of NCBI NO: 15228770 NR Description: LEA protein -related [Arabidopsis thaliana] LEA protein in group 5 [Arabidopsis thaliana] AT3g22500/F16J14_6 [Arabidopsis thaliana]
  misc_feature (1)..(209): Homolog of NCBI NO: 2129632 NR Description: embryonic protein LEA.D34 homolog type 1 - thaliana >gi|1113094|emb|CAA63085.1| LEA D34 protein homologue
  misc_feature (1)..(262): Homolog of NCBI NO: 1526422 NR Description: LEA protein in group 5 [Arabidopsis thaliana]
  misc_feature (1)..(261): Homolog of NCBI NO: 126078 NR Description: LATE EMBRYOGENESIS ABUNDANT PROTEIN D-34 (LEA
MSQEEQPKRPQEPVTYGDVFEVSGELADKPIAPEDANMMQAAETRVFGHTQKGGAAAVMQSAATANKRGGFVHPGDTTDLAAERGVTVAQTDVPGARVTTEFVGGQVVGQYVEPRPVATAAAMEAEVVGLSLQSAITIGEALEATVQTAGNKPVDQSDAAAIQAAEVRACGTNVIAPGGIAASAQSAANHNATIDRDEDKIKLIDVLAGATGKLAADKAVTRQDAEGVVSAELRNNPNLSTHPGGVAASITAAARLNERADI

SEQ ID NO: 106889 - protein, 225 aa, Arabidopsis thaliana
  peptide (1)..(225): Ceres Seq. ID no. 13620750
  misc_feature (162)..(225): Pfam Name: Seed maturation protein Pfam Description: Seed maturation protein
  misc_feature (1)..(225): Homolog of NCBI NO: 15228768 NR Description: LEA protein -related [Arabidopsis thaliana]
  misc_feature (1)..(225): Homolog of NCBI NO: 15228770 NR Description: LEA protein -related [Arabidopsis thaliana] LEA protein in group 5 [Arabidopsis thaliana] AT3g22500/F16J14_6 [Arabidopsis thaliana]
  misc_feature (1)..(172): Homolog of NCBI NO: 2129632 NR Description: embryonic protein LEA.D34 homolog type 1 - thaliana >gi|1113094|emb|CAA63085.1| LEA D34 protein homologue
  misc_feature (1)..(225): Homolog of NCBI NO: 1526422 NR Description: LEA protein in group 5 [Arabidopsis thaliana]
  misc_feature (1)..(224): Homolog of NCBI NO: 126078 NR Description: LATE EMBRYOGENESIS ABUNDANT PROTEIN D-34 (LEA
MMQAAETRVFGHTQKGGAAAVMQSAATANKRGGFVHPGDTTDLAAERGVTVAQTDVPGARVTTEFVGGQVVGQYVEPRPVATAAAMEAEVVGLSLQSAITIGEALEATVQTAGNKPVDQSDAAAIQAAEVRACGTNVIAPGGIAASAQSAANHNATIDRDEDKIKLIDVLAGATGKLAADKAVTRQDAEGVVSAELRNNPNLSTHPGGVAASITAAARLNERADI

SEQ ID NO: 106890 - protein, 224 aa, Arabidopsis thaliana
  peptide (1)..(224): Ceres Seq. ID no. 13620751
  misc_feature (161)..(224): Pfam Name: Seed maturation protein Pfam Description: Seed maturation protein
  misc_feature (1)..(224): Homolog of NCBI NO: 15228768 NR Description: LEA protein -related [Arabidopsis thaliana]
  misc_feature (1)..(224): Homolog of NCBI NO: 15228770 NR Description: LEA protein -related [Arabidopsis thaliana] LEA protein in group 5 [Arabidopsis thaliana] AT3g22500/F16J14_6 [Arabidopsis thaliana]
  misc_feature (1)..(171): Homolog of NCBI NO: 2129632 NR Description: embryonic protein LEA.D34 homolog type 1 - thaliana >gi|1113094|emb|CAA63085.1| LEA D34 protein homologue
  misc_feature (1)..(224): Homolog of NCBI NO: 1526422 NR Description: LEA protein in group 5 [Arabidopsis thaliana]
  misc_feature (1)..(223): Homolog of NCBI NO: 126078 NR Description: LATE EMBRYOGENESIS ABUNDANT PROTEIN D-34 (LEA
MQAAETRVFGHTQKGGAAAVMQSAATANKRGGFVHPGDTTDLAAERGVTVAQTDVPGARVTTEFVGGQVVGQYVEPRPVATAAAMEAEVVGLSLQSAITIGEALEATVQTAGNKPVDQSDAAAIQAAEVRACGTNVIAPGGIAASAQSAANHNATIDRDEDKIKLIDVLAGATGKLAADKAVTRQDAEGVVSAELRNNPNLSTHPGGVAASITAAARLNERADI

SEQ ID NO: 106891 - DNA, 2411 bp, Arabidopsis thaliana
  misc_feature (1)..(2411): Ceres Seq. ID no. 13620770
  misc_feature: MA Experiment ID: 20000184 Result: Down-regulated in Transcription
  misc_feature: MA Experiment 20000184 PARAMETER Experiment Name: At_Shoots__P Parameter: Age (day) Value: 7
  misc_feature: MA Experiment 20000184 PARAMETER Experiment Name: At_Shoots__P Parameter: Tissue Value: Shoots vs. Whole Plant
  misc_feature: MA Experiment ID: 20000185 Result: Down-regulated in Transcription
  misc_feature: MA Experiment 20000185 PARAMETER Experiment Name: At_Roots__P Parameter: Age (day) Value: 7 vs. 21
  misc_feature: MA Experiment 20000185 PARAMETER Experiment Name: At_Roots__P Parameter: Organism Value: A. thaliana
  misc_feature: MA Experiment 20000185 PARAMETER Experiment Name: At_Roots__P Parameter: Tissue Value: Roots vs. Whole Plant
  misc_feature: MA Experiment ID: 20000234 Result: Up-regulated in Transcription
  misc_feature: MA Experiment 20000234 PARAMETER Experiment Name: At_Siliques_P Parameter: Age (day) Value: 21
  misc_feature: MA Experiment 20000234 PARAMETER Experiment Name: At_Siliques_P Parameter: Organism Value: A. thaliana
  misc_feature: MA Experiment 20000234 PARAMETER Experiment Name: At_Siliques_P Parameter: Plant Line Value: WS
  misc_feature: MA Experiment 20000234 PARAMETER Experiment Name: At_Siliques_P Parameter: Tissue Value: Less Than 5mm Siliques vs. Whole Plant
  misc_feature: MA Experiment ID: 20000264 Result: Up-regulated in Transcription
  misc_feature: MA Experiment 20000264 PARAMETER Experiment Name: At_Open_Flower_P Parameter: Age (day) Value: 21
  misc_feature: MA Experiment 20000264 PARAMETER Experiment Name: At_Open_Flower_P Parameter: Plant Line Value: WS
  misc_feature: MA Experiment 20000264 PARAMETER Experiment Name: At_Open_Flower_P Parameter: Tissue Value: Open Flower vs. Whole Plant
  misc_feature: MA Experiment ID: 20000265 Result: Up-regulated in Transcription
  misc_feature: MA Experiment 20000265 PARAMETER Experiment Name: At_Open_Flower_P Parameter: Age (day) Value: 21
  misc_feature: MA Experiment 20000265 PARAMETER Experiment Name: At_Open_Flower_P Parameter: Plant Line Value: WS
  misc_feature: MA Experiment 20000265 PARAMETER Experiment Name: At_Open_Flower_P Parameter: Tissue Value: Closed Flower vs. Whole Plant
  misc_feature: MA Experiment ID: 20000286 Result: Up-regulated in Transcription
  misc_feature: MA Experiment 20000286 PARAMETER Experiment Name: At_Open_Flower_P Parameter: Age (day) Value: 21
  misc_feature: MA Experiment 20000286 PARAMETER Experiment Name: At_Open_Flower_P Parameter: Plant Line Value: WS
  misc_feature: MA Experiment 20000286 PARAMETER Experiment Name: At_Open_Flower_P Parameter: Tissue Value: Half Open vs. Whole Plant
  misc_feature: MA Experiment ID: 20000438 Result: Down-regulated in Transcription
  misc_feature: MA Experiment 20000438 PARAMETER Experiment Name: At_Shoots__P Parameter: Age (day) Value: 14
  misc_feature: MA Experiment 20000438 PARAMETER Experiment Name: At_Shoots__P Parameter: Tissue Value: Shoots vs. Whole Plant
  misc_feature: MA Experiment ID: 20000439 Result: Down-regulated in Transcription
  misc_feature: MA Experiment 20000439 PARAMETER Experiment Name: At_Roots__P Parameter: Age (day) Value: 14 vs. 21
  misc_feature: MA Experiment 20000439 PARAMETER Experiment Name: At_Roots__P Parameter: Organism Value: A. thaliana
  misc_feature: MA Experiment 20000439 PARAMETER Experiment Name: At_Roots__P Parameter: Tissue Value: Roots vs. Whole Plant
  misc_feature: MA Experiment ID: 20000794 Result: Up-regulated in Transcription
  misc_feature: MA Experiment 20000794 PARAMETER Experiment Name: At_Petals_P Parameter: Age (day) Value: 23-25 days
  misc_feature: MA Experiment 20000794 PARAMETER Experiment Name: At_Petals_P Parameter: Plant Line Value: WS
  misc_feature: MA Experiment 20000794 PARAMETER Experiment Name: At_Petals_P Parameter: Tissue Value: Petals vs. Whole plant
acactcccaaggaggctacgtaaccttcgacggaggagtccataaaactcacattctcatttttttctcaaaagaacaacgaacagctcttatatttttttacaataattcttcagagctgtttaagttcaacaacaatttgattaagagaaaaccacataaatattaattagtgtaacgaaaaacacaaaacaaatatgtcgtacggatacgacgatgaatccaagaggaagaggaggtacattgttatcaccatctcctctgttcttttgatctcgatggtggttgcggttaccgttggtgtcagcctcaataagcatgacggtgactctaaaggtaaagcagaggtaaatgcttccgtcaaggccgtcaaggatgtttgtgcaccaactgattacagaaagacttgtgaagacactctgattaagaacgggaagaacacaaccgacccgatggagttggttaagactgcgtttaatgttacgatgaagcagatcacggacgcagctaagaagtcgcagacgattatggagcttcagaaggattcaaggactaggatggcgcttgatcaatgcaaggagcttatggattacgcgttggacgaactaagtaactctttcgaggagcttggaaaatttgagttccacctgctcgacgaggctttgatcaatctgaggatttggcttagcgcagcgatcagccacgaggagacttgtcttgaagggtttcaaggaacacaagggaatgctggagagacaatgaagaaagcgttgaagactgcaatcgagttgacccacaacgggctagcgatcatcagcgaaatgtcgaattttgttggccaaatgcagattccggggctgaacagtcgtcgacttttggctgaaggattcccttcgtgggtagaccagcgtgggcgtaaactcctacaagctgctgccgcatattccgatgtgaagcctgatattgtggtggcacaggacgggagcggtcaatacaagacgatcaatgaagcgttgcagtttgtccccaagaagaggaacacaactttcgtggttcacattaaggctggactctacaaggagtatgttcaggtgaacaagaccatgtcgcatcttgtgttcatcggtgatggtcccgacaaaactatcatttccggcaacaaaaattacaaggatggtatcaccacctaccgtaccgccactgtcgccattgttggaaactacttcattgccaagaacattgggttcgaaaacaccgctggggcaataaaacatcaagcggttgcagttagggttcaatcagatgagtccatatttttcaactgtagattcgatggctaccaagacacgctctacactcactcccaccgtcagttcttccgtgattgtaccatttcaggcaccattgatttcctctttggagatgcggctgctgtattccaaaactgtacgttgttggtgaggaagccactcccaaaccaagcatgccctatcacagcccacggtcgaaaagacccaagggaatccactggatttgtgttccaagggtgcaccattgccggtgaaccagattacttggctgtcaaggaaaccagcaaagcctatctcggtaggccatggaaggaatattcaaggactatcatcatgaacactttcatcccagattttgttcagcctcaaggatggcaaccatggctcggggacttcggcctcaagacattgttctactctgaggtccaaaacacaggaccgggatccgcccttgcaaaccgggttacttgggctggaatcaagacattgagcgaagaagatatcctcaagttcacaccggctcagtacatccaaggtgacgactggattccaggcaaaggtgttccgtacactacaggccttttggctgggaacccggccgctgcaaccaccaccccaagcgtctcagctgctgctccaggtttctccaccttcacggatacaagtggcgctgactcaattgctccaacagcttccccagcagcttccccggaaagttcaattagcatggcttacacggggacagcttctccggaaagttcgattaaggtgtcttcttcaacggagacggcttccccggaaagttcatttacggaggcttcaacggcttccccagaaagttcaattatggtggcttcaacggagagctctggttcgtttttttcaatgtttacctaaaagattgattaagatggcataaaatgtgttttttctttactctaattcaagcaaaacctgaaaggaacaaaaatatttgcacaaccttgaggacttcaggattattggtattccaaattgttgacattaatgtttagctttgtaaactcatgtttaatatatcagtatattaaaatgctgtttataaatctattattattaact

SEQ ID NO: 106892 - protein, 669 aa, Arabidopsis thaliana
  peptide (1)..(669): Ceres Seq. ID no. 13620771
  misc_feature (255)..(551): Pfam Name: Pectinesterase Pfam Description: Pectinesterase
  misc_feature (1)..(669): Homolog of NCBI NO: 15241079 NR Description: pectinesterase family [Arabidopsis thaliana]
  misc_feature (4)..(561): Homolog of NCBI NO: 15239814 NR Description: pectinesterase family [Arabidopsis thaliana] pectin methylesterase [Arabidopsis thaliana] AT5g49180/K21P3_5 [Arabidopsis thaliana]
  misc_feature (17)..(566): Homolog of NCBI NO: 34394412 NR Description: putative pectin methylesterase [Oryza sativa
  misc_feature (8)..(562): Homolog of NCBI NO: 7549630 NR Description: pectin methylesterase, putative [Arabidopsis
  misc_feature (8)..(562): Homolog of NCBI NO: 39104585 NR Description: putative pectin methylesterase [Arabidopsis
  misc_feature (8)..(562): Homolog of NCBI NO: 22330893 NR Description: pectin methylesterase, putative [Arabidopsis >gi|26451728|dbj|BAC42959.1| putative pectin methylesterase
  misc_feature (17)..(566): Homolog of NCBI NO: 34898180 NR Description: contains EST C73169(E3252)~pectin
  misc_feature (217)..(561): Homolog of NCBI NO: 15234768 NR Description: pectinesterase family [Arabidopsis thaliana]
  misc_feature (14)..(225): Homolog of NCBI NO: 15234768 NR Description: pectinesterase family [Arabidopsis thaliana]
  misc_feature (58)..(611): Homolog of NCBI NO: 8745179 NR Description: pectin methyl-esterase PER [Medicago truncatula]
MSYGYDDESKRKRRYIVITISSVLLISMVVAVTVGVSLNKHDGDSKGKAEVNASVKAVKDVCAPTDYRKTCEDTLIKNGKNTTDPMELVKTAFNVTMKQITDAAKKSQTIMELQKDSRTRMALDQCKELMDYALDELSNSFEELGKFEFHLLDEALINLRIWLSAAISHEETCLEGFQGTQGNAGETMKKALKTAIELTHNGLAIISEMSNFVGQMQIPGLNSRRLLAEGFPSWVDQRGRKLLQAAAAYSDVKPDIVVAQDGSGQYKTINEALQFVPKKRNTTFVVHIKAGLYKEYVQVNKTMSHLVFIGDGPDKTIISGNKNYKDGITTYRTATVAIVGNYFIAKNIGFENTAGAIKHQAVAVRVQSDESIFFNCRFDGYQDTLYTHSHRQFFRDCTISGTIDFLFGDAAAVFQNCTLLVRKPLPNQACPITAHGRKDPRESTGFVFQGCTIAGEPDYLAVKETSKAYLGRPWKEYSRTIIMNTFIPDFVQPQGWQPWLGDFGLKTLFYSEVQNTGPGSALANRVTWAGIKTLSEEDILKFTPAQYIQGDDWIPGKGVPYTTGLLAGNPAAATTTPSVSAAAPGFSTFTDTSGADSIAPTASPAASPESSISMAYTGTASPESSIKVSSSTETASPESSFTEASTASPESSIMVASTESSGSFFSMFT

SEQ ID NO: 106893 - protein, 642 aa, Arabidopsis thaliana
  peptide (1)..(642): Ceres Seq. ID no. 13620772
  misc_feature (228)..(524): Pfam Name: Pectinesterase Pfam Description: Pectinesterase
  misc_feature (1)..(642): Homolog of NCBI NO: 15241079 NR Description: pectinesterase family [Arabidopsis thaliana]
  misc_feature (1)..(534): Homolog of NCBI NO: 15239814 NR Description: pectinesterase family [Arabidopsis thaliana] pectin methylesterase [Arabidopsis thaliana] AT5g49180/K21P3_5 [Arabidopsis thaliana]
  misc_feature (1)..(539): Homolog of NCBI NO: 34394412 NR Description: putative pectin methylesterase [Oryza sativa
  misc_feature (1)..(535): Homolog of NCBI NO: 7549630 NR Description: pectin methylesterase, putative [Arabidopsis
  misc_feature (1)..(535): Homolog of NCBI NO: 39104585 NR Description: putative pectin methylesterase [Arabidopsis
  misc_feature (1)..(535): Homolog of NCBI NO: 22330893 NR Description: pectin methylesterase, putative [Arabidopsis >gi|26451728|dbj|BAC42959.1| putative pectin methylesterase
  misc_feature (1)..(539): Homolog of NCBI NO: 34898180 NR Description: contains EST C73169(E3252)~pectin
  misc_feature (190)..(534): Homolog of NCBI NO: 15234768 NR Description: pectinesterase family [Arabidopsis thaliana]
  misc_feature (1)..(198): Homolog of NCBI NO: 15234768 NR Description: pectinesterase family [Arabidopsis thaliana]
  misc_feature (31)..(584): Homolog of NCBI NO: 8745179 NR Description: pectin methyl-esterase PER [Medicago truncatula]
MVVAVTVGVSLNKHDGDSKGKAEVNASVKAVKDVCAPTDYRKTCEDTLIKNGKNTTDPMELVKTAFNVTMKQITDAAKKSQTIMELQKDSRTRMALDQCKELMDYALDELSNSFEELGKFEFHLLDEALINLRIWLSAAISHEETCLEGFQGTQGNAGETMKKALKTAIELTHNGLAIISEMSNFVGQMQIPGLNSRRLLAEGFPSWVDQRGRKLLQAAAAYSDVKPDIVVAQDGSGQYKTINEALQFVPKKRNTTFVVHIKAGLYKEYVQVNKTMSHLVFIGDGPDKTIISGNKNYKDGITTYRTATVAIVGNYFIAKNIGFENTAGAIKHQAVAVRVQSDESIFFNCRFDGYQDTLYTHSHRQFFRDCTISGTIDFLFGDAAAVFQNCTLLVRKPLPNQACPITAHGRKDPRESTGFVFQGCTIAGEPDYLAVKETSKAYLGRPWKEYSRTIIMNTFIPDFVQPQGWQPWLGDFGLKTLFYSEVQNTGPGSALANRVTWAGIKTLSEEDILKFTPAQYIQGDDWIPGKGVPYTTGLLAGNPAAATTTPSVSAAAPGFSTFTDTSGADSIAPTASPAASPESSISMAYTGTASPESSIKVSSSTETASPESSFTEASTASPESSIMVASTESSGSFFSMFT

SEQ ID NO: 106894 - protein, 584 aa, Arabidopsis thaliana
  peptide (1)..(584): Ceres Seq. ID no. 13620773
  misc_feature (170)..(466): Pfam Name: Pectinesterase Pfam Description: Pectinesterase
  misc_feature (1)..(584): Homolog of NCBI NO: 15241079 NR Description: pectinesterase family [Arabidopsis thaliana]
  misc_feature (1)..(476): Homolog of NCBI NO: 15239814 NR Description: pectinesterase family [Arabidopsis thaliana] pectin methylesterase [Arabidopsis thaliana] AT5g49180/K21P3_5 [Arabidopsis thaliana]
  misc_feature (1)..(481): Homolog of NCBI NO: 34394412 NR Description: putative pectin methylesterase [Oryza sativa
  misc_feature (1)..(477): Homolog of NCBI NO: 7549630 NR Description: pectin methylesterase, putative [Arabidopsis
  misc_feature (1)..(477): Homolog of NCBI NO: 39104585 NR Description: putative pectin methylesterase [Arabidopsis
  misc_feature (1)..(477): Homolog of NCBI NO: 22330893 NR Description: pectin methylesterase, putative [Arabidopsis >gi|26451728|dbj|BAC42959.1| putative pectin methylesterase
  misc_feature (1)..(481): Homolog of NCBI NO: 34898180 NR Description: contains EST C73169(E3252)~pectin
  misc_feature (132)..(476): Homolog of NCBI NO: 15234768 NR Description: pectinesterase family [Arabidopsis thaliana]
  misc_feature (1)..(140): Homolog of NCBI NO: 15234768 NR Description: pectinesterase family [Arabidopsis thaliana]
  misc_feature (1)..(526): Homolog of NCBI NO: 8745179 NR Description: pectin methyl-esterase PER [Medicago truncatula]
MELVKTAFNVTMKQITDAAKKSQTIMELQKDSRTRMALDQCKELMDYALDELSNSFEELGKFEFHLLDEALINLRIWLSAAISHEETCLEGFQGTQGNAGETMKKALKTAIELTHNGLAIISEMSNFVGQMQIPGLNSRRLLAEGFPSWVDQRGRKLLQAAAAYSDVKPDIVVAQDGSGQYKTINEALQFVPKKRNTTFVVHIKAGLYKEYVQVNKTMSHLVFIGDGPDKTIISGNKNYKDGITTYRTATVAIVGNYFIAKNIGFENTAGAIKHQAVAVRVQSDESIFFNCRFDGYQDTLYTHSHRQFFRDCTISGTIDFLFGDAAAVFQNCTLLVRKPLPNQACPITAHGRKDPRESTGFVFQGCTIAGEPDYLAVKETSKAYLGRPWKEYSRTIIMNTFIPDFVQPQGWQPWLGDFGLKTLFYSEVQNTGPGSALANRVTWAGIKTLSEEDILKFTPAQYIQGDDWIPGKGVPYTTGLLAGNPAAATTTPSVSAAAPGFSTFTDTSGADSIAPTASPAASPESSISMAYTGTASPESSIKVSSSTETASPESSFTEASTASPESSIMVASTESSGSFFSMFT

SEQ ID NO: 106895 - DNA, 1229 bp, Arabidopsis thaliana
  misc_feature (1)..(1229): Ceres Seq. ID no. 13620793
  misc_feature: MA Experiment ID: 20000180 Result: Up-regulated in Transcription
  misc_feature: MA Experiment 20000180 PARAMETER Experiment Name: At_Germinating_Seeds_P Parameter: Age (hr) Value: 24 vs. 0
  misc_feature: MA Experiment 20000180 PARAMETER Experiment Name: At_Germinating_Seeds_P Parameter: Tissue Value: Germinating Seeds
  misc_feature: MA Experiment ID: 20000182 Result: Up-regulated in Transcription
  misc_feature: MA Experiment 20000182 PARAMETER Experiment Name: At_2mM_SA_P Parameter: Age (day) Value: 14
  misc_feature: MA Experiment 20000182 PARAMETER Experiment Name: At_2mM_SA_P Parameter: Organism Value: A. thaliana
  misc_feature: MA Experiment 20000182 PARAMETER Experiment Name: At_2mM_SA_P Parameter: Plant Line Value: WS
  misc_feature: MA Experiment 20000182 PARAMETER Experiment Name: At_2mM_SA_P Parameter: Timepoint (hr) Value: 6
  misc_feature: MA Experiment 20000182 PARAMETER Experiment Name: At_2mM_SA_P Parameter: Tissue Value: Aerial
  misc_feature: MA Experiment 20000182 PARAMETER Experiment Name: At_2mM_SA_P Parameter: Treatment Value: 2mM SA vs. No Treatment
  misc_feature: MA Experiment ID: 20000264 Result: Down-regulated in Transcription
  misc_feature: MA Experiment 20000264 PARAMETER Experiment Name: At_Open_Flower_P Parameter: Age (day) Value: 21
  misc_feature: MA Experiment 20000264 PARAMETER Experiment Name: At_Open_Flower_P Parameter: Plant Line Value: WS
  misc_feature: MA Experiment 20000264 PARAMETER Experiment Name: At_Open_Flower_P Parameter: Tissue Value: Open Flower vs. Whole Plant
  misc_feature: MA Experiment ID: 20000438 Result: Down-regulated in Transcription
  misc_feature: MA Experiment 20000438 PARAMETER Experiment Name: At_Shoots__P Parameter: Age (day) Value: 14
  misc_feature: MA Experiment 20000438 PARAMETER Experiment Name: At_Shoots__P Parameter: Tissue Value: Shoots vs. Whole Plant
  misc_feature: MA Experiment ID: 20000453 Result: Up-regulated in Transcription
  misc_feature: MA Experiment 20000453 PARAMETER Experiment Name: At_100uM_ABA_P Parameter: Age (day) Value: 15
  misc_feature: MA Experiment 20000453 PARAMETER Experiment Name: At_100uM_ABA_P Parameter: Organism Value: A. thaliana
  misc_feature: MA Experiment 20000453 PARAMETER Experiment Name: At_100uM_ABA_P Parameter: Plant Line Value: WS
  misc_feature: MA Experiment 20000453 PARAMETER Experiment Name: At_100uM_ABA_P Parameter: Timepoint (hr) Value: 24
  misc_feature: MA Experiment 20000453 PARAMETER Experiment Name: At_100uM_ABA_P Parameter: Tissue Value: Aerial
  misc_feature: MA Experiment 20000453 PARAMETER Experiment Name: At_100uM_ABA_P Parameter: Treatment Value: 100uM ABA vs. No Treatment
  misc_feature: MA Experiment ID: 20000496 Result: Up-regulated in Transcription
  misc_feature: MA Experiment 20000496 PARAMETER Experiment Name: At_Guard_Cells_P Parameter: Harvest Date Value: 7/19/2002
  misc_feature: MA Experiment 20000496 PARAMETER Experiment Name: At_Guard_Cells_P Parameter: Organism Value: Canola
  misc_feature: MA Experiment 20000496 PARAMETER Experiment Name: At_Guard_Cells_P Parameter: Tissue Value: Guard Cells vs. Leaves
  misc_feature: MA Experiment ID: 20000527 Result: Down-regulated in Transcription
  misc_feature: MA Experiment 20000527 PARAMETER Experiment Name: At_10percent_PEG_P Parameter: Age (day) Value: 20
  misc_feature: MA Experiment 20000527 PARAMETER Experiment Name: At_10percent_PEG_P Parameter: Organism Value: A. thaliana
  misc_feature: MA Experiment 20000527 PARAMETER Experiment Name: At_10percent_PEG_P Parameter: Plant Line Value: WS
  misc_feature: MA Experiment 20000527 PARAMETER Experiment Name: At_10percent_PEG_P Parameter: Timepoint (day) Value: 20
  misc_feature: MA Experiment 20000527 PARAMETER Experiment Name: At_10percent_PEG_P Parameter: Tissue Value: Whole Plant
  misc_feature: MA Experiment 20000527 PARAMETER Experiment Name: At_10percent_PEG_P Parameter: Treatment Value: 10percent PEG vs. No Treatment
  misc_feature: MA Experiment ID: 20001557 Result: Down-regulated in Transcription
  misc_feature: MA Experiment 20001557 PARAMETER Experiment Name: At_Drought_Soil_Dry_P Parameter: Age (day) Value: 27
  misc_feature: MA Experiment 20001557 PARAMETER Experiment Name: At_Drought_Soil_Dry_P Parameter: Organism Value: A. thaliana
  misc_feature: MA Experiment 20001557 PARAMETER Experiment Name: At_Drought_Soil_Dry_P Parameter: Plant Line Value: WS
  misc_feature: MA Experiment 20001557 PARAMETER Experiment Name: At_Drought_Soil_Dry_P Parameter: Post Timepoint (hr) Value: 3
  misc_feature: MA Experiment 20001557 PARAMETER Experiment Name: At_Drought_Soil_Dry_P Parameter: Post-Treatment Value: Re-Water vs. No Drought
  misc_feature: MA Experiment 20001557 PARAMETER Experiment Name: At_Drought_Soil_Dry_P Parameter: Timepoint (day) Value: 13
  misc_feature: MA Experiment 20001557 PARAMETER Experiment Name: At_Drought_Soil_Dry_P Parameter: Treatment Value: Drought vs. No Drought
  misc_feature: MA Experiment ID: 20001558 Result: Down-regulated in Transcription
  misc_feature: MA Experiment 20001558 PARAMETER Experiment Name: At_Drought_Soil_Dry_P Parameter: Age (day) Value: 27
  misc_feature: MA Experiment 20001558 PARAMETER Experiment Name: At_Drought_Soil_Dry_P Parameter: Organism Value: A. thaliana
  misc_feature: MA Experiment 20001558 PARAMETER Experiment Name: At_Drought_Soil_Dry_P Parameter: Plant Line Value: WS
  misc_feature: MA Experiment 20001558 PARAMETER Experiment Name: At_Drought_Soil_Dry_P Parameter: Post Timepoint (hr) Value: 6
  misc_feature: MA Experiment 20001558 PARAMETER Experiment Name: At_Drought_Soil_Dry_P Parameter: Post-Treatment Value: Re-Water vs. No Drought
  misc_feature: MA Experiment 20001558 PARAMETER Experiment Name: At_Drought_Soil_Dry_P Parameter: Timepoint (day) Value: 13
  misc_feature: MA Experiment 20001558 PARAMETER Experiment Name: At_Drought_Soil_Dry_P Parameter: Treatment Value: Drought vs. No Drought
gtataggacacaatttactttaaacacttttcatgcaatacaatatgtatatatactaatcaatgatcgttatatatgtccatcgtactcaacctcaaacatcttaaataatgactctaataaatcgctcaaaaccatttgtacttctcgtaggcttctcaattatctcaagtttgctattatgggtctcacaagcttccgttgtttcatcaggagattttaacaaagacttctttgtgacatggtctcctacccacgttaacacctccaatgatggtcgatcaagaacccttaaactcgatcaagaatctggagcttctttttcttccattcagacgttcttgttcggccaaatagatatgaagatcaaacttatccgtggaagttctcaaggaaccgtggttgcttattatatgtcctcagatcagcctaaccgggatgagattgactttgagttcctcggaaacgttaatgggcagccttacattctccagacaaatgtctatgccgagggacttgataaccgcgaagaaaggatccatctctggttcgacccagccaaggactttcacacttactctatcttgtggaacattcaccaaattgtatttatggtggatcagattccgataaggttgtatagaaaccatggggagaaaggcgtagcctacccaaggttgcaacctatgagtgtacaggcgagtctatggaacggtgagagctgggctacgcgcggtggacatgacaagattgattggtcaaagggtccatttgtggcttcctttggggattacaagatagacgcttgtatttggataggcaatacaagtttttgtaatggagagagcactgaaaactggtggaacaagaatgagttcagttctttgacaagagtgcaaaagagatggtttaaatgggtgagaaaatatcacttgatttatgattattgccaagattatggaaggttcaataacaagctaccgaaggaatgttctcttcctaaatattgaatttgctcaaatcttgggttcacctccttttctattagccaataacattatgccatgttagactgaatttaaataaaaataattaagtaaaactaaatcagaaaaaccaaaaatggaaagaaaattcttgtatgtatttaacgtaccttaacgtcaaggttgacatcttctcctctttttttattatttaatgtaactattttaatatgagcaaatttg

SEQ ID NO: 106896 - protein, 299 aa, Arabidopsis thaliana
  peptide (1)..(299): Ceres Seq. ID no. 13620794
  misc_feature (37)..(218): Pfam Name: Glycosyl hydrolases family 16 Pfam Description: Glycosyl hydrolases family 16
  misc_feature (1)..(299): Homolog of NCBI NO: 15225976 NR Description: xyloglucan endotransglycosylase, putative thaliana] >gi|25313550|pir||D84519 probable endoxyloglucan
  misc_feature (24)..(294): Homolog of NCBI NO: 5070246 NR Description: xyloglucan endo-transglycosylase-like protein
  misc_feature (23)..(296): Homolog of NCBI NO: 8886867 NR Description: xyloglucan endotransglycosylase XET2 [Asparagus
  misc_feature (23)..(297): Homolog of NCBI NO: 29500891 NR Description: putative xyloglucan endotransglycosylase [Cucumis >gi|29500899|emb|CAD87533.1| putative xyloglucan
  misc_feature (15)..(294): Homolog of NCBI NO: 30841326 NR Description: xyloglucan endotransglycosylase [Gossypium
  misc_feature (18)..(294): Homolog of NCBI NO: 7447418 NR Description: probable endo-xyloglucan transferase - upland
  misc_feature (21)..(295): Homolog of NCBI NO: 15235714 NR Description: xyloglucan endotransglycosylase, putative
  misc_feature (16)..(294): Homolog of NCBI NO: 18424986 NR Description: xyloglucan endotransglycosylase, putative thaliana] >gi|15982913|gb|AAL09803.1| AT5g65730/MPA24_8 thaliana] >gi|20334766|gb|AAM16244.1| AT5g65730/MPA24_8
  misc_feature (37)..(294): Homolog of NCBI NO: 7447407 NR Description: xyloglucan endo-1,4-beta-D-glucanase (EC 3.2.1.-)
  misc_feature (22)..(295): Homolog of NCBI NO: 22947852 NR Description: xyloglucan endotransglycosylase [Malus x
MTLINRSKPFVLLVGFSIISSLLLWVSQASVVSSGDFNKDFFVTWSPTHVNTSNDGRSRTLKLDQESGASFSSIQTFLFGQIDMKIKLIRGSSQGTVVAYYMSSDQPNRDEIDFEFLGNVNGQPYILQTNVYAEGLDNREERIHLWFDPAKDFHTYSILWNIHQIVFMVDQIPIRLYRNHGEKGVAYPRLQPMSVQASLWNGESWATRGGHDKIDWSKGPFVASFGDYKIDACIWIGNTSFCNGESTENWWNKNEFSSLTRVQKRWFKWVRKYHLIYDYCQDYGRFNNKLPKECSLPKY

SEQ ID NO: 106897 - protein, 216 aa, Arabidopsis thaliana
  peptide (1)..(216): Ceres Seq. ID no. 13620795
  misc_feature (1)..(135): Pfam Name: Glycosyl hydrolases family 16 Pfam Description: Glycosyl hydrolases family 16
  misc_feature (1)..(216): Homolog of NCBI NO: 15225976 NR Description: xyloglucan endotransglycosylase, putative thaliana] >gi|25313550|pir||D84519 probable endoxyloglucan
  misc_feature (1)..(211): Homolog of NCBI NO: 5070246 NR Description: xyloglucan endo-transglycosylase-like protein
  misc_feature (1)..(213): Homolog of NCBI NO: 8886867 NR Description: xyloglucan endotransglycosylase XET2 [Asparagus
  misc_feature (1)..(214): Homolog of NCBI NO: 29500891 NR Description: putative xyloglucan endotransglycosylase [Cucumis >gi|29500899|emb|CAD87533.1| putative xyloglucan
  misc_feature (1)..(211): Homolog of NCBI NO: 30841326 NR Description: xyloglucan endotransglycosylase [Gossypium
  misc_feature (1)..(211): Homolog of NCBI NO: 7447418 NR Description: probable endo-xyloglucan transferase - upland
  misc_feature (1)..(212): Homolog of NCBI NO: 15235714 NR Description: xyloglucan endotransglycosylase, putative
  misc_feature (1)..(211): Homolog of NCBI NO: 18424986 NR Description: xyloglucan endotransglycosylase, putative thaliana] >gi|15982913|gb|AAL09803.1| AT5g65730/MPA24_8 thaliana] >gi|20334766|gb|AAM16244.1| AT5g65730/MPA24_8
  misc_feature (1)..(211): Homolog of NCBI NO: 7447407 NR Description: xyloglucan endo-1,4-beta-D-glucanase (EC 3.2.1.-)
  misc_feature (1)..(212): Homolog of NCBI NO: 22947852 NR Description: xyloglucan endotransglycosylase [Malus x
MKIKLIRGSSQGTVVAYYMSSDQPNRDEIDFEFLGNVNGQPYILQTNVYAEGLDNREERIHLWFDPAKDFHTYSILWNIHQIVFMVDQIPIRLYRNHGEKGVAYPRLQPMSVQASLWNGESWATRGGHDKIDWSKGPFVASFGDYKIDACIWIGNTSFCNGESTENWWNKNEFSSLTRVQKRWFKWVRKYHLIYDYCQDYGRFNNKLPKECSLPKY

SEQ ID NO: 106898 - protein, 198 aa, Arabidopsis thaliana
  peptide (1)..(198): Ceres Seq. ID no. 13620796
  misc_feature (1)..(117): Pfam Name: Glycosyl hydrolases family 16 Pfam Description: Glycosyl hydrolases family 16
  misc_feature (1)..(198): Homolog of NCBI NO: 15225976 NR Description: xyloglucan endotransglycosylase, putative thaliana] >gi|25313550|pir||D84519 probable endoxyloglucan
  misc_feature (1)..(193): Homolog of NCBI NO: 5070246 NR Description: xyloglucan endo-transglycosylase-like protein
  misc_feature (1)..(195): Homolog of NCBI NO: 8886867 NR Description: xyloglucan endotransglycosylase XET2 [Asparagus
  misc_feature (1)..(196): Homolog of NCBI NO: 29500891 NR Description: putative xyloglucan endotransglycosylase [Cucumis >gi|29500899|emb|CAD87533.1| putative xyloglucan
  misc_feature (1)..(193): Homolog of NCBI NO: 30841326 NR Description: xyloglucan endotransglycosylase [Gossypium
  misc_feature (1)..(193): Homolog of NCBI NO: 7447418 NR Description: probable endo-xyloglucan transferase - upland
  misc_feature (1)..(194): Homolog of NCBI NO: 15235714 NR Description: xyloglucan endotransglycosylase, putative
  misc_feature (1)..(193): Homolog of NCBI NO: 18424986 NR Description: xyloglucan endotransglycosylase, putative thaliana] >gi|15982913|gb|AAL09803.1| AT5g65730/MPA24_8 thaliana] >gi|20334766|gb|AAM16244.1| AT5g65730/MPA24_8
  misc_feature (1)..(193): Homolog of NCBI NO: 7447407 NR Description: xyloglucan endo-1,4-beta-D-glucanase (EC 3.2.1.-)
  misc_feature (1)..(194): Homolog of NCBI NO: 22947852 NR Description: xyloglucan endotransglycosylase [Malus x
MSSDQPNRDEIDFEFLGNVNGQPYILQTNVYAEGLDNREERIHLWFDPAKDFHTYSILWNIHQIVFMVDQIPIRLYRNHGEKGVAYPRLQPMSVQASLWNGESWATRGGHDKIDWSKGPFVASFGDYKIDACIWIGNTSFCNGESTENWWNKNEFSSLTRVQKRWFKWVRKYHLIYDYCQDYGRFNNKLPKECSLPKY

SEQ ID NO: 106899 - DNA, 1246 bp, Arabidopsis thaliana
  misc_feature (1)..(1246): Ceres Seq. ID no. 13620805
  misc_feature: MA Experiment ID: 108434 Result: Up-regulated in Transcription
  misc_feature: MA Experiment 108434 PARAMETER Experiment Name: At_Root_Tips_cDNA_P Parameter: Tissue Value: Root Tips
  misc_feature: MA Experiment ID: 108462 Result: Down-regulated in Transcription
  misc_feature: MA Experiment 108462 PARAMETER Experiment Name: At_Germinating_Seeds_cDNA_P Parameter: Age (day) Value: 2 vs. 0
  misc_feature: MA Experiment 108462 PARAMETER Experiment Name: At_Germinating_Seeds_cDNA_P Parameter: Tissue Value: Germinating Seeds
  misc_feature: MA Experiment ID: 108463 Result: Down-regulated in Transcription
  misc_feature: MA Experiment 108463 PARAMETER Experiment Name: At_Germinating_Seeds_cDNA_P Parameter: Age (day) Value: 3 vs. 0
  misc_feature: MA Experiment 108463 PARAMETER Experiment Name: At_Germinating_Seeds_cDNA_P Parameter: Tissue Value: Germinating Seeds
  misc_feature: MA Experiment ID: 108464 Result: Down-regulated in Transcription
  misc_feature: MA Experiment 108464 PARAMETER Experiment Name: At_Germinating_Seeds_cDNA_P Parameter: Age (day) Value: 4 vs. 0
  misc_feature: MA Experiment 108464 PARAMETER Experiment Name: At_Germinating_Seeds_cDNA_P Parameter: Tissue Value: Germinating Seeds
  misc_feature: MA Experiment ID: 108501 Result: Up-regulated in Transcription
  misc_feature: MA Experiment 108501 PARAMETER Experiment Name: At_ap2_floral_buds_cDNA_P Parameter: Plant Line Value: ap2 (Ler.)
  misc_feature: MA Experiment 108501 PARAMETER Experiment Name: At_ap2_floral_buds_cDNA_P Parameter: Tissue Value: Closed Flower
  misc_feature: MA Experiment ID: 108569 Result: Up-regulated in Transcription
  misc_feature: MA Experiment 108569 PARAMETER Experiment Name: At_0.001%_MeJA__cDNA_P Parameter: Timepoint (hr) Value: 6
  misc_feature: MA Experiment 108569 PARAMETER Experiment Name: At_0.001%_MeJA__cDNA_P Parameter: Tissue Value: Aerial
  misc_feature: MA Experiment 108569 PARAMETER Experiment Name: At_0.001%_MeJA__cDNA_P Parameter: Treatment Value: 0.001% MeJA vs. No Treatment
ccaaatttcttcttcttctccggcgaagaaatcgaaaagtcattaccctaagagtcccagagtcgtcagaaggaacagcttttgaaatggacggtgtcacctaccaaagattcccaacggtgaagatccgtgagcttaaagatgactacgccaagttcgagcttcgtgaaaccgacgtttcaatggccaacgctctccgtcgcgtaatgatctccgaagtccccaccatggcaatccatctcgtcaaaatcgaggttaattcctctgttctcaacgacgagttcattgctcaacgacttagtctcatccctctcactagcgagcgtgctatgagcatgcggttctgtcaagattgtgaagattgtaatggagatgaacattgcgagttctgctctgttgagtttccccttagtgctaagtgtgttactgaccaaaccctagatgttactagtagggatctctacagtgctgatcctactgttactcctgttgatttcactagtaactcatctacttctgattcaagcgagcacaagggaattatcattgcgaaactacgcaggggacaagagttgaagcttaaagcattagctaggaaaggaattgggaaagatcatgcgaaatggtctcctgcagctactgttacgtatatgtatgagcctgacattattatcaatgaagagatgatgaacactttgacagatgaggaaaaaattgacttgattgagagcagtcctaccaaagtgtttggcattgacccagtcaccggacaggttgtggtggttgatcctgaagcatacacttacgatgaagaagtgatcaagaaagctgaagcaatggggaaaccgggactcattgagatccatccgaaacatgatagttttgtattcactgttgagtccacaggtgcattgaaggcttctcagctggtactaaatgccattgatatcctgaagcagaagcttgatgcaatccgtctctcagataacactgtagaagccgatgatcagtttggtgaactcggtgcccatatgcgtgaaggatgaaatcgtagctctttttttacctgtttgatcagggtttaagtttcttctagaccagactaatatattaaccgtagcggcactgccttgtttgatagcaacatgtaaagtggcagtcttgtctttgttcccgacctctgactgatccttgtgttcctgaaccttgttatgttgggttatttttagtcgttgaactctctcgt

SEQ ID NO: 106900 - protein, 347 aa, Arabidopsis thaliana
  peptide (1)..(347): Ceres Seq. ID no. 13620806
  misc_feature (81)..(209): Pfam Name: RNA polymerase Rpb3/RpoA insert domain Pfam Description: RNA polymerase Rpb3/RpoA insert domain
  misc_feature (29)..(347): Homolog of NCBI NO: 15226509 NR Description: DNA-directed RNA polymerase II, third largest
  misc_feature (29)..(347): Homolog of NCBI NO: 2129725 NR Description: DNA-directed RNA polymerase (EC 2.7.7.6) II 35.5K B - Arabidopsis thaliana >gi|514320|gb|AAB03740.1| RNA polymerase
  misc_feature (29)..(347): Homolog of NCBI NO: 15226523 NR Description: DNA-directed RNA polymerase II, third largest
  misc_feature (29)..(347): Homolog of NCBI NO: 21593370 NR Description: DNA-directed RNA polymerase II, third largest
  misc_feature (34)..(221): Homolog of NCBI NO: 28278474 NR Description: Similar to polymerase (RNA) II (DNA directed)
  misc_feature (244)..(334): Homolog of NCBI NO: 28278474 NR Description: Similar to polymerase (RNA) II (DNA directed)
  misc_feature (34)..(228): Homolog of NCBI NO: 40645083 NR Description: homologue of DNA-directed RNA polymerase II
  misc_feature (290)..(321): Homolog of NCBI NO: 40645083 NR Description: homologue of DNA-directed RNA polymerase II
  misc_feature (42)..(341): Homolog of NCBI NO: 116575 NR Description: Conjugation stage-specific protein
  misc_feature (34)..(221): Homolog of NCBI NO: 31229547 NR Description: ENSANGP00000017124 [Anopheles gambiae]
KFLLLLRRRNRKVITLRVPESSEGTAFEMDGVTYQRFPTVKIRELKDDYAKFELRETDVSMANALRRVMISEVPTMAIHLVKIEVNSSVLNDEFIAQRLSLIPLTSERAMSMRFCQDCEDCNGDEHCEFCSVEFPLSAKCVTDQTLDVTSRDLYSADPTVTPVDFTSNSSTSDSSEHKGIIIAKLRRGQELKLKALARKGIGKDHAKWSPAATVTYMYEPDIIINEEMMNTLTDEEKIDLIESSPTKVFGIDPVTGQVVVVDPEAYTYDEEVIKKAEAMGKPGLIEIHPKHDSFVFTVESTGALKASQLVLNAIDILKQKLDAIRLSDNTVEADDQFGELGAHMREG

SEQ ID NO: 106901 - protein, 319 aa, Arabidopsis thaliana
  peptide (1)..(319): Ceres Seq. ID no. 13620807
  misc_feature (53)..(181): Pfam Name: RNA polymerase Rpb3/RpoA insert domain Pfam Description: RNA polymerase Rpb3/RpoA insert domain
  misc_feature (1)..(319): Homolog of NCBI NO: 15226509 NR Description: DNA-directed RNA polymerase II, third largest
  misc_feature (1)..(319): Homolog of NCBI NO: 2129725 NR Description: DNA-directed RNA polymerase (EC 2.7.7.6) II 35.5K B - Arabidopsis thaliana >gi|514320|gb|AAB03740.1| RNA polymerase
  misc_feature (1)..(319): Homolog of NCBI NO: 15226523 NR Description: DNA-directed RNA polymerase II, third largest
  misc_feature (1)..(319): Homolog of NCBI NO: 21593370 NR Description: DNA-directed RNA polymerase II, third largest
  misc_feature (6)..(193): Homolog of NCBI NO: 28278474 NR Description: Similar to polymerase (RNA) II (DNA directed)
  misc_feature (216)..(306): Homolog of NCBI NO: 28278474 NR Description: Similar to polymerase (RNA) II (DNA directed)
  misc_feature (6)..(200): Homolog of NCBI NO: 40645083 NR Description: homologue of DNA-directed RNA polymerase II
  misc_feature (262)..(293): Homolog of NCBI NO: 40645083 NR Description: homologue of DNA-directed RNA polymerase II
  misc_feature (14)..(313): Homolog of NCBI NO: 116575 NR Description: Conjugation stage-specific protein
  misc_feature (6)..(193): Homolog of NCBI NO: 31229547 NR Description: ENSANGP00000017124 [Anopheles gambiae]
MDGVTYQRFPTVKIRELKDDYAKFELRETDVSMANALRRVMISEVPTMAIHLVKIEVNSSVLNDEFIAQRLSLIPLTSERAMSMRFCQDCEDCNGDEHCEFCSVEFPLSAKCVTDQTLDVTSRDLYSADPTVTPVDFTSNSSTSDSSEHKGIIIAKLRRGQELKLKALARKGIGKDHAKWSPAATVTYMYEPDIIINEEMMNTLTDEEKIDLIESSPTKVFGIDPVTGQVVVVDPEAYTYDEEVIKKAEAMGKPGLIEIHPKHDSFVFTVESTGALKASQLVLNAIDILKQKLDAIRLSDNTVEADDQFGELGAHMREG

SEQ ID NO: 106902 - protein, 287 aa, Arabidopsis thaliana
  peptide (1)..(287): Ceres Seq. ID no. 13620808
  misc_feature (21)..(149): Pfam Name: RNA polymerase Rpb3/RpoA insert domain Pfam Description: RNA polymerase Rpb3/RpoA insert domain
  misc_feature (1)..(287): Homolog of NCBI NO: 15226509 NR Description: DNA-directed RNA polymerase II, third largest
  misc_feature (1)..(287): Homolog of NCBI NO: 2129725 NR Description: DNA-directed RNA polymerase (EC 2.7.7.6) II 35.5K B - Arabidopsis thaliana >gi|514320|gb|AAB03740.1| RNA polymerase
  misc_feature (1)..(287): Homolog of NCBI NO: 15226523 NR Description: DNA-directed RNA polymerase II, third largest
  misc_feature (1)..(287): Homolog of NCBI NO: 21593370 NR Description: DNA-directed RNA polymerase II, third largest
  misc_feature (1)..(161): Homolog of NCBI NO: 28278474 NR Description: Similar to polymerase (RNA) II (DNA directed)
  misc_feature (184)..(274): Homolog of NCBI NO: 28278474 NR Description: Similar to polymerase (RNA) II (DNA directed)
  misc_feature (1)..(168): Homolog of NCBI NO: 40645083 NR Description: homologue of DNA-directed RNA polymerase II
  misc_feature (230)..(261): Homolog of NCBI NO: 40645083 NR Description: homologue of DNA-directed RNA polymerase II
  misc_feature (1)..(281): Homolog of NCBI NO: 116575 NR Description: Conjugation stage-specific protein
  misc_feature (1)..(161): Homolog of NCBI NO: 31229547 NR Description: ENSANGP00000017124 [Anopheles gambiae]
MANALRRVMISEVPTMAIHLVKIEVNSSVLNDEFIAQRLSLIPLTSERAMSMRFCQDCEDCNGDEHCEFCSVEFPLSAKCVTDQTLDVTSRDLYSADPTVTPVDFTSNSSTSDSSEHKGIIIAKLRRGQELKLKALARKGIGKDHAKWSPAATVTYMYEPDIIINEEMMNTLTDEEKIDLIESSPTKVFGIDPVTGQVVVVDPEAYTYDEEVIKKAEAMGKPGLIEIHPKHDSFVFTVESTGALKASQLVLNAIDILKQKLDAIRLSDNTVEADDQFGELGAHMREG

SEQ ID NO: 106903 - DNA, 1323 bp, Arabidopsis thaliana
  misc_feature (1)..(1323): Ceres Seq. ID no. 13620834
  misc_feature: MA Experiment ID: 20000171 Result: Up-regulated in Transcription
  misc_feature: MA Experiment 20000171 PARAMETER Experiment Name: At_42deg_Heat_P Parameter: Age (day) Value: 14
  misc_feature: MA Experiment 20000171 PARAMETER Experiment Name: At_42deg_Heat_P Parameter: Organism Value: A. thaliana
  misc_feature: MA Experiment 20000171 PARAMETER Experiment Name: At_42deg_Heat_P Parameter: Plant Line Value: WS
  misc_feature: MA Experiment 20000171 PARAMETER Experiment Name: At_42deg_Heat_P Parameter: Temperature (deg C) Value: 42 vs. 22
  misc_feature: MA Experiment 20000171 PARAMETER Experiment Name: At_42deg_Heat_P Parameter: Timepoint (hr) Value: 1
  misc_feature: MA Experiment 20000171 PARAMETER Experiment Name: At_42deg_Heat_P Parameter: Tissue Value: Aerial
  misc_feature: MA Experiment ID: 20000173 Result: Up-regulated in Transcription
  misc_feature: MA Experiment 20000173 PARAMETER Experiment Name: At_42deg_Heat_P Parameter: Age (day) Value: 14
  misc_feature: MA Experiment 20000173 PARAMETER Experiment Name: At_42deg_Heat_P Parameter: Organism Value: A. thaliana
  misc_feature: MA Experiment 20000173 PARAMETER Experiment Name: At_42deg_Heat_P Parameter: Plant Line Value: WS
  misc_feature: MA Experiment 20000173 PARAMETER Experiment Name: At_42deg_Heat_P Parameter: Temperature (deg C) Value: 42 vs. 22
  misc_feature: MA Experiment 20000173 PARAMETER Experiment Name: At_42deg_Heat_P Parameter: Timepoint (hr) Value: 6
  misc_feature: MA Experiment 20000173 PARAMETER Experiment Name: At_42deg_Heat_P Parameter: Tissue Value: Aerial
  misc_feature: MA Experiment ID: 20000234 Result: Up-regulated in Transcription
  misc_feature: MA Experiment 20000234 PARAMETER Experiment Name: At_Siliques_P Parameter: Age (day) Value: 21
  misc_feature: MA Experiment 20000234 PARAMETER Experiment Name: At_Siliques_P Parameter: Organism Value: A. thaliana
  misc_feature: MA Experiment 20000234 PARAMETER Experiment Name: At_Siliques_P Parameter: Plant Line Value: WS
  misc_feature: MA Experiment 20000234 PARAMETER Experiment Name: At_Siliques_P Parameter: Tissue Value: Less Than 5mm Siliques vs. Whole Plant
  misc_feature: MA Experiment ID: 20000495 Result: Up-regulated in Transcription
  misc_feature: MA Experiment 20000495 PARAMETER Experiment Name: At_Guard_Cells_P Parameter: Harvest Date Value: 8/2/2002
  misc_feature: MA Experiment 20000495 PARAMETER Experiment Name: At_Guard_Cells_P Parameter: Organism Value: A. thaliana
  misc_feature: MA Experiment 20000495 PARAMETER Experiment Name: At_Guard_Cells_P Parameter: Tissue Value: Guard Cells vs. Leaves
  misc_feature: MA Experiment ID: 20001451 Result: Up-regulated in Transcription
  misc_feature: MA Experiment 20001451 PARAMETER Experiment Name: At_Far-red-induction_P Parameter: Age (day) Value: 7
  misc_feature: MA Experiment 20001451 PARAMETER Experiment Name: At_Far-red-induction_P Parameter: Light Value: Far-red vs. White
  misc_feature: MA Experiment 20001451 PARAMETER Experiment Name: At_Far-red-induction_P Parameter: Organism Value: A. thaliana
  misc_feature: MA Experiment 20001451 PARAMETER Experiment Name: At_Far-red-induction_P Parameter: Plant Line Value: Columbia
  misc_feature: MA Experiment 20001451 PARAMETER Experiment Name: At_Far-red-induction_P Parameter: Timepoint (hr) Value: 24
  misc_feature: MA Experiment 20001451 PARAMETER Experiment Name: At_Far-red-induction_P Parameter: Tissue Value: Whole Plant
aagtgacgatggtcggtggtgatgaatctatctcaccgtgtcggttcgagattccacacggcgagcctcgaggcttcgtcttcagctaataatcccttcgccgagggttccggcgagatgtctccgggaccatcaatcccgctccgccgagctgctctatttctagctgccatctccatctcctgcttcgtcctttacagagccgctgattccttgtctttctcccctcccattttcgatctctcttcttatctggataatgaggaacctaagctagaagatgttctgagtaaagctgcaacgagagacaggacagttgttttgacaactttgaatgcagcatgggcagctccaggatctgttattgatctcttctttgagagttttagaattggggaagaaactagtcaaatcttggatcatttggtgattgttgcattggatgctaaggcttattcgcgttgcttagaactgcataagcattgtttcagtcttgttacggaaggagttgatttttccagagaagcttattttatgactcggtcttacttgaagatgatgtggagaaggattgatctcctaaggtctgttctcgagatgggatacaattttgttttcacggatgctgatgtgatgtggttcaggaacccgtttccacggttttacatgtatgcagatttccagattgcttgcgatcattacctcggaagatcaaacgacctacataatagaccaaacggagggtttaactttgtgcggtccaacaatcgaactatacttttctacaaatactggtatgcttcaagactcagattcccgggatatcatgatcaggatgtgcttaactttctcaaggcagaaccttttgttttccggattgggttaaagatgagattcttgaacactgcttatttcggcggtttatgtgagcctagcagagatctgaacttggttcgtacaatgcatgccaattgctgctacggtatggagagtaagcttcatgatctcagaatcatgcttcaagattggaaagatttcatgtctttaccacttcatctaaaacaatcttctggtttctcctggaaagtccctcagaattgcagtcttgattctcttcgacgctatgatgaatctgtggaggatgatgaagagagtgatccaccaggagaatctcaagactgaaaagtgtgacactttttgtacatgagattcttgatgatttttctagaaagaaagagaaaatcgaatttttgaaggggtaaaaaaaacacgaacacacggcttttttggtgataattttgaaatctcaatggaaattagttt

SEQ ID NO: 106904 - protein, 386 aa, Arabidopsis thaliana
  peptide (1)..(386): Ceres Seq. ID no. 13620835
  misc_feature (1)..(386): Homolog of NCBI NO: 15223826 NR Description: expressed protein [Arabidopsis thaliana]
  misc_feature (41)..(384): Homolog of NCBI NO: 18395292 NR Description: hypothetical protein [Arabidopsis thaliana]
  misc_feature (38)..(362): Homolog of NCBI NO: 38344278 NR Description: OSJNBa0013K16.10 [Oryza sativa (japonica
  misc_feature (64)..(372): Homolog of NCBI NO: 23306127 NR Description: Putataive InsB from Escherichia coli [Oryza
  misc_feature (54)..(361): Homolog of NCBI NO: 15235236 NR Description: hypothetical protein common family [Arabidopsis
  misc_feature (64)..(363): Homolog of NCBI NO: 21536907 NR Description: regulatory protein [Arabidopsis thaliana]
  misc_feature (98)..(360): Homolog of NCBI NO: 6063544 NR Description: similar to Arabidopsis thaliana chromosome 2, BAC
  misc_feature (43)..(357): Homolog of NCBI NO: 15235236 NR Description: hypothetical protein common family [Arabidopsis
  misc_feature (70)..(360): Homolog of NCBI NO: 18414558 NR Description: hypothetical protein common family [Arabidopsis
  misc_feature (85)..(360): Homolog of NCBI NO: 34897442 NR Description: putative regulatory protein [Oryza sativa
MNLSHRVGSRFHTASLEASSSANNPFAEGSGEMSPGPSIPLRRAALFLAAISISCFVLYRAADSLSFSPPIFDLSSYLDNEEPKLEDVLSKAATRDRTVVLTTLNAAWAAPGSVIDLFFESFRIGEETSQILDHLVIVALDAKAYSRCLELHKHCFSLVTEGVDFSREAYFMTRSYLKMMWRRIDLLRSVLEMGYNFVFTDADVMWFRNPFPRFYMYADFQIACDHYLGRSNDLHNRPNGGFNFVRSNNRTILFYKYWYASRLRFPGYHDQDVLNFLKAEPFVFRIGLKMRFLNTAYFGGLCEPSRDLNLVRTMHANCCYGMESKLHDLRIMLQDWKDFMSLPLHLKQSSGFSWKVPQNCSLDSLRRYDESVEDDEESDPPGESQD

SEQ ID NO: 106905 - protein, 354 aa, Arabidopsis thaliana
  peptide (1)..(354): Ceres Seq. ID no. 13620836
  misc_feature (1)..(354): Homolog of NCBI NO: 15223826 NR Description: expressed protein [Arabidopsis thaliana]
  misc_feature (9)..(352): Homolog of NCBI NO: 18395292 NR Description: hypothetical protein [Arabidopsis thaliana]
  misc_feature (6)..(330): Homolog of NCBI NO: 38344278 NR Description: OSJNBa0013K16.10 [Oryza sativa (japonica
  misc_feature (32)..(340): Homolog of NCBI NO: 23306127 NR Description: Putataive InsB from Escherichia coli [Oryza
  misc_feature (22)..(329): Homolog of NCBI NO: 15235236 NR Description: hypothetical protein common family [Arabidopsis
  misc_feature (32)..(331): Homolog of NCBI NO: 21536907 NR Description: regulatory protein [Arabidopsis thaliana]
  misc_feature (66)..(328): Homolog of NCBI NO: 6063544 NR Description: similar to Arabidopsis thaliana chromosome 2, BAC
  misc_feature (11)..(325): Homolog of NCBI NO: 15235236 NR Description: hypothetical protein common family [Arabidopsis
  misc_feature (38)..(328): Homolog of NCBI NO: 18414558 NR Description: hypothetical protein common family [Arabidopsis
  misc_feature (53)..(328): Homolog of NCBI NO: 34897442 NR Description: putative regulatory protein [Oryza sativa
MSPGPSIPLRRAALFLAAISISCFVLYRAADSLSFSPPIFDLSSYLDNEEPKLEDVLSKAATRDRTVVLTTLNAAWAAPGSVIDLFFESFRIGEETSQILDHLVIVALDAKAYSRCLELHKHCFSLVTEGVDFSREAYFMTRSYLKMMWRRIDLLRSVLEMGYNFVFTDADVMWFRNPFPRFYMYADFQIACDHYLGRSNDLHNRPNGGFNFVRSNNRTILFYKYWYASRLRFPGYHDQDVLNFLKAEPFVFRIGLKMRFLNTAYFGGLCEPSRDLNLVRTMHANCCYGMESKLHDLRIMLQDWKDFMSLPLHLKQSSGFSWKVPQNCSLDSLRRYDESVEDDEESDPPGESQD

SEQ ID NO: 106906 - protein, 215 aa, Arabidopsis thaliana
  peptide (1)..(215): Ceres Seq. ID no. 13620837
  misc_feature (1)..(215): Homolog of NCBI NO: 15223826 NR Description: expressed protein [Arabidopsis thaliana]
  misc_feature (1)..(213): Homolog of NCBI NO: 18395292 NR Description: hypothetical protein [Arabidopsis thaliana]
  misc_feature (1)..(191): Homolog of NCBI NO: 38344278 NR Description: OSJNBa0013K16.10 [Oryza sativa (japonica
  misc_feature (1)..(201): Homolog of NCBI NO: 23306127 NR Description: Putataive InsB from Escherichia coli [Oryza
  misc_feature (1)..(190): Homolog of NCBI NO: 15235236 NR Description: hypothetical protein common family [Arabidopsis
  misc_feature (1)..(192): Homolog of NCBI NO: 21536907 NR Description: regulatory protein [Arabidopsis thaliana]
  misc_feature (1)..(189): Homolog of NCBI NO: 6063544 NR Description: similar to Arabidopsis thaliana chromosome 2, BAC
  misc_feature (1)..(186): Homolog of NCBI NO: 15235236 NR Description: hypothetical protein common family [Arabidopsis
  misc_feature (1)..(189): Homolog of NCBI NO: 18414558 NR Description: hypothetical protein common family [Arabidopsis
  misc_feature (1)..(189): Homolog of NCBI NO: 34897442 NR Description: putative regulatory protein [Oryza sativa
MTRSYLKMMWRRIDLLRSVLEMGYNFVFTDADVMWFRNPFPRFYMYADFQIACDHYLGRSNDLHNRPNGGFNFVRSNNRTILFYKYWYASRLRFPGYHDQDVLNFLKAEPFVFRIGLKMRFLNTAYFGGLCEPSRDLNLVRTMHANCCYGMESKLHDLRIMLQDWKDFMSLPLHLKQSSGFSWKVPQNCSLDSLRRYDESVEDDEESDPPGESQD

SEQ ID NO: 106907 - DNA, 1129 bp, Arabidopsis thaliana
  misc_feature (1)..(1129): Ceres Seq. ID no. 13620842
  misc_feature: MA Experiment ID: 20000179 Result: Up-regulated in Transcription
  misc_feature: MA Experiment 20000179 PARAMETER Experiment Name: At_Germinating_Seeds_P Parameter: Age (hr) Value: 6 vs. 0
  misc_feature: MA Experiment 20000179 PARAMETER Experiment Name: At_Germinating_Seeds_P Parameter: Tissue Value: Germinating Seeds
  misc_feature: MA Experiment ID: 20001248 Result: Up-regulated in Transcription
  misc_feature: MA Experiment 20001248 PARAMETER Experiment Name: At_Far-red-induction_P Parameter: Age (day) Value: 7
  misc_feature: MA Experiment 20001248 PARAMETER Experiment Name: At_Far-red-induction_P Parameter: Light Value: Far-red vs. White
  misc_feature: MA Experiment 20001248 PARAMETER Experiment Name: At_Far-red-induction_P Parameter: Organism Value: A. thaliana
  misc_feature: MA Experiment 20001248 PARAMETER Experiment Name: At_Far-red-induction_P Parameter: Plant Line Value: Columbia
  misc_feature: MA Experiment 20001248 PARAMETER Experiment Name: At_Far-red-induction_P Parameter: Timepoint (hr) Value: 4
  misc_feature: MA Experiment 20001248 PARAMETER Experiment Name: At_Far-red-induction_P Parameter: Tissue Value: Whole Plant
aacgctttttgtcttatctcaaatcttttgttcactcaccccatcataacttcataactcctatccaatctttgcttataactattatcaaacaattcttaacttcgatctctaacctgcaaaaacattcattacactcttcagatcctccttccctttagccgccaaagcaaaaccgtcatcgatctctcttcttttatacagtcaaaaattagattcagattcttcaagaactctgtttttctagtagcatggtgtgtttggtctcccgtacgggtcgtcaatcccaaagatacaacaagggacggcgtcaagtcgtcgggtgtattccatacagactcaagatttcgagtgatggcacaattagcgacgaatttgaggttcttgttatttcatcacaaaagggtcacgctctgatgttcccaaagggtggttgggagcttgatgaatctgtagaagaagctgcgtcaagagaatctctagaagaagctggagttgttggaaacgttgagagacaacttggaaaatgggatttcttaagcaaaagcaaaggaacattctatgaaggattcatgttcccaatgcttgtgaaagaagagcttgagctttggcctgaacaacatcttcgtcaaagaatttggatgaaagttgatgaagcaagagacgcttgtagagattggtggatgaaggaagcgttagatgttttggtccaaaggctttctttactatcattgaagcctatggaagaagacgagaaccttccactgatctctatctactgatcaaaaaaaaaacaatcagacgtgttcttgatcactttgtatataacatcttacgcctgcctttccatgaagagtctactctactgctgcaggaaaagtatgtacagtgaaactttaggtgtgaacttggccgagatttgtttggatttcggtttggtttaacaaaaaggttttgtaattgttgtcatgatgtatccgcaactgcttaggatgggaggaagaagacagaagcaaagagtgcaaacaaaaaactgtacaataacgtttcctctctttgcatctctcctcatcttcaaatgaatctatgatctaaatgaaactaataaagagaatttacagaaaatcac

SEQ ID NO: 106908 - protein, 176 aa, Arabidopsis thaliana
  peptide (1)..(176): Ceres Seq. ID no. 13620843
  misc_feature (19)..(155): Pfam Name: NUDIX domain Pfam Description: NUDIX domain
  misc_feature (1)..(176): Homolog of NCBI NO: 15223919 NR Description: MutT/nudix family protein [Arabidopsis thaliana]
  misc_feature (1)..(166): Homolog of NCBI NO: 18379275 NR Description: MutT/nudix family protein [Arabidopsis thaliana]
  misc_feature (1)..(166): Homolog of NCBI NO: 21595695 NR Description: unknown [Arabidopsis thaliana]
  misc_feature (22)..(157): Homolog of NCBI NO: 31747031 NR Description: MutT-like protein [Cucumis sativus]
  misc_feature (1)..(153): Homolog of NCBI NO: 15221055 NR Description: MutT/nudix family protein [Arabidopsis thaliana] F15H18.18 [Arabidopsis thaliana] T10O22.27 [Arabidopsis thaliana] >gi|27765008|gb|AAO23625.1|
  misc_feature (1)..(155): Homolog of NCBI NO: 22330598 NR Description: MutT/nudix family protein [Arabidopsis thaliana] unknown protein [Arabidopsis thaliana]
  misc_feature (1)..(155): Homolog of NCBI NO: 25367539 NR Description: unknown protein [imported] - Arabidopsis thaliana
  misc_feature (2)..(149): Homolog of NCBI NO: 38175436 NR Description: MutT-like protein [Oryza sativa (japonica
  misc_feature (4)..(176): Homolog of NCBI NO: 15231598 NR Description: MutT/nudix family protein [Arabidopsis thaliana]
  misc_feature (2)..(149): Homolog of NCBI NO: 34900054 NR Description: MutT-like protein~contains ESTs
MVCLVSRTGRQSQRYNKGRRQVVGCIPYRLKISSDGTISDEFEVLVISSQKGHALMFPKGGWELDESVEEAASRESLEEAGVVGNVERQLGKWDFLSKSKGTFYEGFMFPMLVKEELELWPEQHLRQRIWMKVDEARDACRDWWMKEALDVLVQRLSLLSLKPMEEDENLPLISIY

SEQ ID NO: 106909 - protein, 121 aa, Arabidopsis thaliana
  peptide (1)..(121): Ceres Seq. ID no. 13620844
  misc_feature (1)..(100): Pfam Name: NUDIX domain Pfam Description: NUDIX domain
  misc_feature (1)..(121): Homolog of NCBI NO: 15223919 NR Description: MutT/nudix family protein [Arabidopsis thaliana]
  misc_feature (1)..(111): Homolog of NCBI NO: 18379275 NR Description: MutT/nudix family protein [Arabidopsis thaliana]
  misc_feature (1)..(111): Homolog of NCBI NO: 21595695 NR Description: unknown [Arabidopsis thaliana]
  misc_feature (1)..(102): Homolog of NCBI NO: 31747031 NR Description: MutT-like protein [Cucumis sativus]
  misc_feature (1)..(98): Homolog of NCBI NO: 15221055 NR Description: MutT/nudix family protein [Arabidopsis thaliana] F15H18.18 [Arabidopsis thaliana] T10O22.27 [Arabidopsis thaliana] >gi|27765008|gb|AAO23625.1|
  misc_feature (1)..(100): Homolog of NCBI NO: 22330598 NR Description: MutT/nudix family protein [Arabidopsis thaliana] unknown protein [Arabidopsis thaliana]
  misc_feature (1)..(100): Homolog of NCBI NO: 25367539 NR Description: unknown protein [imported] - Arabidopsis thaliana
  misc_feature (1)..(94): Homolog of NCBI NO: 38175436 NR Description: MutT-like protein [Oryza sativa (japonica
  misc_feature (1)..(121): Homolog of NCBI NO: 15231598 NR Description: MutT/nudix family protein [Arabidopsis thaliana]
  misc_feature (1)..(94): Homolog of NCBI NO: 34900054 NR Description: MutT-like protein~contains ESTs
MFPKGGWELDESVEEAASRESLEEAGVVGNVERQLGKWDFLSKSKGTFYEGFMFPMLVKEELELWPEQHLRQRIWMKVDEARDACRDWWMKEALDVLVQRLSLLSLKPMEEDENLPLISIY

SEQ ID NO: 106910 - DNA, 750 bp, Arabidopsis thaliana
  misc_feature (1)..(750): Ceres Seq. ID no. 13620845
  misc_feature: MA Experiment ID: 20000173 Result: Down-regulated in Transcription
  misc_feature: MA Experiment 20000173 PARAMETER Experiment Name: At_42deg_Heat_P Parameter: Age (day) Value: 14
  misc_feature: MA Experiment 20000173 PARAMETER Experiment Name: At_42deg_Heat_P Parameter: Organism Value: A. thaliana
  misc_feature: MA Experiment 20000173 PARAMETER Experiment Name: At_42deg_Heat_P Parameter: Plant Line Value: WS
  misc_feature: MA Experiment 20000173 PARAMETER Experiment Name: At_42deg_Heat_P Parameter: Temperature (deg C) Value: 42 vs. 22
  misc_feature: MA Experiment 20000173 PARAMETER Experiment Name: At_42deg_Heat_P Parameter: Timepoint (hr) Value: 6
  misc_feature: MA Experiment 20000173 PARAMETER Experiment Name: At_42deg_Heat_P Parameter: Tissue Value: Aerial
  misc_feature: MA Experiment ID: 20000182 Result: Up-regulated in Transcription
  misc_feature: MA Experiment 20000182 PARAMETER Experiment Name: At_2mM_SA_P Parameter: Age (day) Value: 14
  misc_feature: MA Experiment 20000182 PARAMETER Experiment Name: At_2mM_SA_P Parameter: Organism Value: A. thaliana
  misc_feature: MA Experiment 20000182 PARAMETER Experiment Name: At_2mM_SA_P Parameter: Plant Line Value: WS
  misc_feature: MA Experiment 20000182 PARAMETER Experiment Name: At_2mM_SA_P Parameter: Timepoint (hr) Value: 6
  misc_feature: MA Experiment 20000182 PARAMETER Experiment Name: At_2mM_SA_P Parameter: Tissue Value: Aerial
  misc_feature: MA Experiment 20000182 PARAMETER Experiment Name: At_2mM_SA_P Parameter: Treatment Value: 2mM SA vs. No Treatment
  misc_feature: MA Experiment ID: 20000184 Result: Down-regulated in Transcription
  misc_feature: MA Experiment 20000184 PARAMETER Experiment Name: At_Shoots__P Parameter: Age (day) Value: 7
  misc_feature: MA Experiment 20000184 PARAMETER Experiment Name: At_Shoots__P Parameter: Tissue Value: Shoots vs. Whole Plant
  misc_feature: MA Experiment ID: 20000185 Result: Down-regulated in Transcription
  misc_feature: MA Experiment 20000185 PARAMETER Experiment Name: At_Roots__P Parameter: Age (day) Value: 7 vs. 21
  misc_feature: MA Experiment 20000185 PARAMETER Experiment Name: At_Roots__P Parameter: Organism Value: A. thaliana
  misc_feature: MA Experiment 20000185 PARAMETER Experiment Name: At_Roots__P Parameter: Tissue Value: Roots vs. Whole Plant
  misc_feature: MA Experiment ID: 20000213 Result: Up-regulated in Transcription
  misc_feature: MA Experiment 20000213 PARAMETER Experiment Name: At_4deg_Cold_P Parameter: Timepoint (hr) Value: 2
  misc_feature: MA Experiment ID: 20000234 Result: Down-regulated in Transcription
  misc_feature: MA Experiment 20000234 PARAMETER Experiment Name: At_Siliques_P Parameter: Age (day) Value: 21
  misc_feature: MA Experiment 20000234 PARAMETER Experiment Name: At_Siliques_P Parameter: Organism Value: A. thaliana
  misc_feature: MA Experiment 20000234 PARAMETER Experiment Name: At_Siliques_P Parameter: Plant Line Value: WS
  misc_feature: MA Experiment 20000234 PARAMETER Experiment Name: At_Siliques_P Parameter: Tissue Value: Less Than 5mm Siliques vs. Whole Plant
  misc_feature: MA Experiment ID: 20000235 Result: Down-regulated in Transcription
  misc_feature: MA Experiment 20000235 PARAMETER Experiment Name: At_Siliques_P Parameter: Age (day) Value: 21
  misc_feature: MA Experiment 20000235 PARAMETER Experiment Name: At_Siliques_P Parameter: Organism Value: A. thaliana
  misc_feature: MA Experiment 20000235 PARAMETER Experiment Name: At_Siliques_P Parameter: Plant Line Value: WS
  misc_feature: MA Experiment 20000235 PARAMETER Experiment Name: At_Siliques_P Parameter: Tissue Value: 5-10mm Siliques vs. Whole Plant
  misc_feature: MA Experiment ID: 20000264 Result: Down-regulated in Transcription
  misc_feature: MA Experiment 20000264 PARAMETER Experiment Name: At_Open_Flower_P Parameter: Age (day) Value: 21
  misc_feature: MA Experiment 20000264 PARAMETER Experiment Name: At_Open_Flower_P Parameter: Plant Line Value: WS
  misc_feature: MA Experiment 20000264 PARAMETER Experiment Name: At_Open_Flower_P Parameter: Tissue Value: Open Flower vs. Whole Plant
  misc_feature: MA Experiment ID: 20000265 Result: Down-regulated in Transcription
  misc_feature: MA Experiment 20000265 PARAMETER Experiment Name: At_Open_Flower_P Parameter: Age (day) Value: 21
  misc_feature: MA Experiment 20000265 PARAMETER Experiment Name: At_Open_Flower_P Parameter: Plant Line Value: WS
  misc_feature: MA Experiment 20000265 PARAMETER Experiment Name: At_Open_Flower_P Parameter: Tissue Value: Closed Flower vs. Whole Plant
  misc_feature: MA Experiment ID: 20000286 Result: Down-regulated in Transcription
  misc_feature: MA Experiment 20000286 PARAMETER Experiment Name: At_Open_Flower_P Parameter: Age (day) Value: 21
  misc_feature: MA Experiment 20000286 PARAMETER Experiment Name: At_Open_Flower_P Parameter: Plant Line Value: WS
  misc_feature: MA Experiment 20000286 PARAMETER Experiment Name: At_Open_Flower_P Parameter: Tissue Value: Half Open vs. Whole Plant
  misc_feature: MA Experiment ID: 20000438 Result: Down-regulated in Transcription
  misc_feature: MA Experiment 20000438 PARAMETER Experiment Name: At_Shoots__P Parameter: Age (day) Value: 14
  misc_feature: MA Experiment 20000438 PARAMETER Experiment Name: At_Shoots__P Parameter: Tissue Value: Shoots vs. Whole Plant
  misc_feature: MA Experiment ID: 20000439 Result: Down-regulated in Transcription
  misc_feature: MA Experiment 20000439 PARAMETER Experiment Name: At_Roots__P Parameter: Age (day) Value: 14 vs. 21
  misc_feature: MA Experiment 20000439 PARAMETER Experiment Name: At_Roots__P Parameter: Organism Value: A. thaliana
  misc_feature: MA Experiment 20000439 PARAMETER Experiment Name: At_Roots__P Parameter: Tissue Value: Roots vs. Whole Plant
  misc_feature: MA Experiment ID: 20000453 Result: Down-regulated in Transcription
  misc_feature: MA Experiment 20000453 PARAMETER Experiment Name: At_100uM_ABA_P Parameter: Age (day) Value: 15
  misc_feature: MA Experiment 20000453 PARAMETER Experiment Name: At_100uM_ABA_P Parameter: Organism Value: A. thaliana
  misc_feature: MA Experiment 20000453 PARAMETER Experiment Name: At_100uM_ABA_P Parameter: Plant Line Value: WS
  misc_feature: MA Experiment 20000453 PARAMETER Experiment Name: At_100uM_ABA_P Parameter: Timepoint (hr) Value: 24
  misc_feature: MA Experiment 20000453 PARAMETER Experiment Name: At_100uM_ABA_P Parameter: Tissue Value: Aerial
  misc_feature: MA Experiment 20000453 PARAMETER Experiment Name: At_100uM_ABA_P Parameter: Treatment Value: 100uM ABA vs. No Treatment
  misc_feature: MA Experiment ID: 20000455 Result: Down-regulated in Transcription
  misc_feature: MA Experiment 20000455 PARAMETER Experiment Name: At_100uM_ABA_P Parameter: Age (day) Value: 16
  misc_feature: MA Experiment 20000455 PARAMETER Experiment Name: At_100uM_ABA_P Parameter: Organism Value: A. thaliana
  misc_feature: MA Experiment 20000455 PARAMETER Experiment Name: At_100uM_ABA_P Parameter: Plant Line Value: WS
  misc_feature: MA Experiment 20000455 PARAMETER Experiment Name: At_100uM_ABA_P Parameter: Timepoint (hr) Value: 48
  misc_feature: MA Experiment 20000455 PARAMETER Experiment Name: At_100uM_ABA_P Parameter: Tissue Value: Aerial
  misc_feature: MA Experiment 20000455 PARAMETER Experiment Name: At_100uM_ABA_P Parameter: Treatment Value: 100uM ABA vs. No Treatment
  misc_feature: MA Experiment ID: 20000460 Result: Down-regulated in Transcription
  misc_feature: MA Experiment 20000460 PARAMETER Experiment Name: At_10percent_PEG_P Parameter: Age (day) Value: 12
  misc_feature: MA Experiment 20000460 PARAMETER Experiment Name: At_10percent_PEG_P Parameter: Organism Value: A. thaliana
  misc_feature: MA Experiment 20000460 PARAMETER Experiment Name: At_10percent_PEG_P Parameter: Plant Line Value: WS
  misc_feature: MA Experiment 20000460 PARAMETER Experiment Name: At_10percent_PEG_P Parameter: Timepoint (day) Value: 12
  misc_feature: MA Experiment 20000460 PARAMETER Experiment Name: At_10percent_PEG_P Parameter: Tissue Value: Whole Plant
  misc_feature: MA Experiment 20000460 PARAMETER Experiment Name: At_10percent_PEG_P Parameter: Treatment Value: 10percent PEG vs. No Treatment
  misc_feature: MA Experiment ID: 20000495 Result: Down-regulated in Transcription
  misc_feature: MA Experiment 20000495 PARAMETER Experiment Name: At_Guard_Cells_P Parameter: Harvest Date Value: 8/2/2002
  misc_feature: MA Experiment 20000495 PARAMETER Experiment Name: At_Guard_Cells_P Parameter: Organism Value: A. thaliana
  misc_feature: MA Experiment 20000495 PARAMETER Experiment Name: At_Guard_Cells_P Parameter: Tissue Value: Guard Cells vs. Leaves
  misc_feature: MA Experiment ID: 20000527 Result: Down-regulated in Transcription
  misc_feature: MA Experiment 20000527 PARAMETER Experiment Name: At_10percent_PEG_P Parameter: Age (day) Value: 20
  misc_feature: MA Experiment 20000527 PARAMETER Experiment Name: At_10percent_PEG_P Parameter: Organism Value: A. thaliana
  misc_feature: MA Experiment 20000527 PARAMETER Experiment Name: At_10percent_PEG_P Parameter: Plant Line Value: WS
  misc_feature: MA Experiment 20000527 PARAMETER Experiment Name: At_10percent_PEG_P Parameter: Timepoint (day) Value: 20
  misc_feature: MA Experiment 20000527 PARAMETER Experiment Name: At_10percent_PEG_P Parameter: Tissue Value: Whole Plant
  misc_feature: MA Experiment 20000527 PARAMETER Experiment Name: At_10percent_PEG_P Parameter: Treatment Value: 10percent PEG vs. No Treatment
  misc_feature: MA Experiment ID: 20000573 Result: Up-regulated in Transcription
  misc_feature: MA Experiment 20000573 PARAMETER Experiment Name: At_100uM_ABA_Mutants__P Parameter: Organism Value: A. thaliana
  misc_feature: MA Experiment 20000573 PARAMETER Experiment Name: At_100uM_ABA_Mutants__P Parameter: Plant Line Value: CS22 vs. Ler wt
  misc_feature: MA Experiment 20000573 PARAMETER Experiment Name: At_100uM_ABA_Mutants__P Parameter: Timepoint (hr) Value: N/A
  misc_feature: MA Experiment 20000573 PARAMETER Experiment Name: At_100uM_ABA_Mutants__P Parameter: Tissue Value: Whole Plant
  misc_feature: MA Experiment 20000573 PARAMETER Experiment Name: At_100uM_ABA_Mutants__P Parameter: Treatment Value: None
  misc_feature: MA Experiment ID: 20000574 Result: Up-regulated in Transcription
  misc_feature: MA Experiment 20000574 PARAMETER Experiment Name: At_100uM_ABA_Mutants__P Parameter: Organism Value: A. thaliana
  misc_feature: MA Experiment 20000574 PARAMETER Experiment Name: At_100uM_ABA_Mutants__P Parameter: Plant Line Value: CS23 vs. Ler wt
  misc_feature: MA Experiment 20000574 PARAMETER Experiment Name: At_100uM_ABA_Mutants__P Parameter: Timepoint (hr) Value: N/A
  misc_feature: MA Experiment 20000574 PARAMETER Experiment Name: At_100uM_ABA_Mutants__P Parameter: Tissue Value: Whole Plant
  misc_feature: MA Experiment 20000574 PARAMETER Experiment Name: At_100uM_ABA_Mutants__P Parameter: Treatment Value: None
  misc_feature: MA Experiment ID: 20000575 Result: Down-regulated in Transcription
  misc_feature: MA Experiment 20000575 PARAMETER Experiment Name: At_100uM_ABA_Mutants__P Parameter: Organism Value: A. thaliana
  misc_feature: MA Experiment 20000575 PARAMETER Experiment Name: At_100uM_ABA_Mutants__P Parameter: Plant Line Value: CS22
  misc_feature: MA Experiment 20000575 PARAMETER Experiment Name: At_100uM_ABA_Mutants__P Parameter: Timepoint (hr) Value: 6
  misc_feature: MA Experiment 20000575 PARAMETER Experiment Name: At_100uM_ABA_Mutants__P Parameter: Tissue Value: Whole Plant
  misc_feature: MA Experiment 20000575 PARAMETER Experiment Name: At_100uM_ABA_Mutants__P Parameter: Treatment Value: 1uM ABA vs. No Treatment
  misc_feature: MA Experiment ID: 20000576 Result: Down-regulated in Transcription
  misc_feature: MA Experiment 20000576 PARAMETER Experiment Name: At_100uM_ABA_Mutants__P Parameter: Organism Value: A. thaliana
  misc_feature: MA Experiment 20000576 PARAMETER Experiment Name: At_100uM_ABA_Mutants__P Parameter: Plant Line Value: CS23
  misc_feature: MA Experiment 20000576 PARAMETER Experiment Name: At_100uM_ABA_Mutants__P Parameter: Timepoint (hr) Value: 6
  misc_feature: MA Experiment 20000576 PARAMETER Experiment Name: At_100uM_ABA_Mutants__P Parameter: Tissue Value: Whole Plant
  misc_feature: MA Experiment 20000576 PARAMETER Experiment Name: At_100uM_ABA_Mutants__P Parameter: Treatment Value: 1uM ABA vs. No Treatment
  misc_feature: MA Experiment ID: 20000606 Result: Up-regulated in Transcription
  misc_feature: MA Experiment 20000606 PARAMETER Experiment Name: At_CS8548_Mutant_P Parameter: Age (day) Value: 14
  misc_feature: MA Experiment 20000606 PARAMETER Experiment Name: At_CS8548_Mutant_P Parameter: Plant Line Value: CS8548 vs. wt
  misc_feature: MA Experiment 20000606 PARAMETER Experiment Name: At_CS8548_Mutant_P Parameter: Tissue Value: Whole Plant
  misc_feature: MA Experiment ID: 20000709 Result: Down-regulated in Transcription
  misc_feature: MA Experiment 20000709 PARAMETER Experiment Name: At_15mM_NH4NO3_L-to-H_P Parameter: Age (hr) Value: 14
  misc_feature: MA Experiment 20000709 PARAMETER Experiment Name: At_15mM_NH4NO3_L-to-H_P Parameter: Organism Value: A. thaliana
  misc_feature: MA Experiment 20000709 PARAMETER Experiment Name: At_15mM_NH4NO3_L-to-H_P Parameter: Plant Line Value: WS
  misc_feature: MA Experiment 20000709 PARAMETER Experiment Name: At_15mM_NH4NO3_L-to-H_P Parameter: Timepoint (hr) Value: 4
  misc_feature: MA Experiment 20000709 PARAMETER Experiment Name: At_15mM_NH4NO3_L-to-H_P Parameter: Tissue Value: Aerial
  misc_feature: MA Experiment 20000709 PARAMETER Experiment Name: At_15mM_NH4NO3_L-to-H_P Parameter: Treatment Value: 15mM NH4NO3 vs. 30mM Mannitol
  misc_feature: MA Experiment ID: 20000794 Result: Down-regulated in Transcription
  misc_feature: MA Experiment 20000794 PARAMETER Experiment Name: At_Petals_P Parameter: Age (day) Value: 23-25 days
  misc_feature: MA Experiment 20000794 PARAMETER Experiment Name: At_Petals_P Parameter: Plant Line Value: WS
  misc_feature: MA Experiment 20000794 PARAMETER Experiment Name: At_Petals_P Parameter: Tissue Value: Petals vs. Whole plant
  misc_feature: MA Experiment ID: 20001554 Result: Down-regulated in Transcription
  misc_feature: MA Experiment 20001554 PARAMETER Experiment Name: At_Drought_Soil_Dry_P Parameter: Age (day) Value: 21
  misc_feature: MA Experiment 20001554 PARAMETER Experiment Name: At_Drought_Soil_Dry_P Parameter: Organism Value: A. thaliana
  misc_feature: MA Experiment 20001554 PARAMETER Experiment Name: At_Drought_Soil_Dry_P Parameter: Plant Line Value: WS
  misc_feature: MA Experiment 20001554 PARAMETER Experiment Name: At_Drought_Soil_Dry_P Parameter: Post Timepoint (hr) Value: None
  misc_feature: MA Experiment 20001554 PARAMETER Experiment Name: At_Drought_Soil_Dry_P Parameter: Post-Treatment Value: None
  misc_feature: MA Experiment 20001554 PARAMETER Experiment Name: At_Drought_Soil_Dry_P Parameter: Timepoint (day) Value: 7
  misc_feature: MA Experiment 20001554 PARAMETER Experiment Name: At_Drought_Soil_Dry_P Parameter: Treatment Value: Drought vs. No Drought
  misc_feature: MA Experiment ID: 20001555 Result: Down-regulated in Transcription
  misc_feature: MA Experiment 20001555 PARAMETER Experiment Name: At_Drought_Soil_Dry_P Parameter: Age (day) Value: 24
  misc_feature: MA Experiment 20001555 PARAMETER Experiment Name: At_Drought_Soil_Dry_P Parameter: Organism Value: A. thaliana
  misc_feature: MA Experiment 20001555 PARAMETER Experiment Name: At_Drought_Soil_Dry_P Parameter: Plant Line Value: WS
  misc_feature: MA Experiment 20001555 PARAMETER Experiment Name: At_Drought_Soil_Dry_P Parameter: Post Timepoint (hr) Value: None
  misc_feature: MA Experiment 20001555 PARAMETER Experiment Name: At_Drought_Soil_Dry_P Parameter: Post-Treatment Value: None
  misc_feature: MA Experiment 20001555 PARAMETER Experiment Name: At_Drought_Soil_Dry_P Parameter: Timepoint (day) Value: 10
  misc_feature: MA Experiment 20001555 PARAMETER Experiment Name: At_Drought_Soil_Dry_P Parameter: Treatment Value: Drought vs. No Drought
  misc_feature: MA Experiment ID: 20001556 Result: Down-regulated in Transcription
  misc_feature: MA Experiment 20001556 PARAMETER Experiment Name: At_Drought_Soil_Dry_P Parameter: Age (day) Value: 26
  misc_feature: MA Experiment 20001556 PARAMETER Experiment Name: At_Drought_Soil_Dry_P Parameter: Organism Value: A. thaliana
  misc_feature: MA Experiment 20001556 PARAMETER Experiment Name: At_Drought_Soil_Dry_P Parameter: Plant Line Value: WS
  misc_feature: MA Experiment 20001556 PARAMETER Experiment Name: At_Drought_Soil_Dry_P Parameter: Post Timepoint (hr) Value: None
  misc_feature: MA Experiment 20001556 PARAMETER Experiment Name: At_Drought_Soil_Dry_P Parameter: Post-Treatment Value: None
  misc_feature: MA Experiment 20001556 PARAMETER Experiment Name: At_Drought_Soil_Dry_P Parameter: Timepoint (day) Value: 12
  misc_feature: MA Experiment 20001556 PARAMETER Experiment Name: At_Drought_Soil_Dry_P Parameter: Treatment Value: Drought vs. No Drought
  misc_feature: MA Experiment ID: 20001557 Result: Down-regulated in Transcription
  misc_feature: MA Experiment 20001557 PARAMETER Experiment Name: At_Drought_Soil_Dry_P Parameter: Age (day) Value: 27
  misc_feature: MA Experiment 20001557 PARAMETER Experiment Name: At_Drought_Soil_Dry_P Parameter: Organism Value: A. thaliana
  misc_feature: MA Experiment 20001557 PARAMETER Experiment Name: At_Drought_Soil_Dry_P Parameter: Plant Line Value: WS
  misc_feature: MA Experiment 20001557 PARAMETER Experiment Name: At_Drought_Soil_Dry_P Parameter: Post Timepoint (hr) Value: 3
  misc_feature: MA Experiment 20001557 PARAMETER Experiment Name: At_Drought_Soil_Dry_P Parameter: Post-Treatment Value: Re-Water vs. No Drought
  misc_feature: MA Experiment 20001557 PARAMETER Experiment Name: At_Drought_Soil_Dry_P Parameter: Timepoint (day) Value: 13
  misc_feature: MA Experiment 20001557 PARAMETER Experiment Name: At_Drought_Soil_Dry_P Parameter: Treatment Value: Drought vs. No Drought
  misc_feature: MA Experiment ID: 20001558 Result: Down-regulated in Transcription
  misc_feature: MA Experiment 20001558 PARAMETER Experiment Name: At_Drought_Soil_Dry_P Parameter: Age (day) Value: 27
  misc_feature: MA Experiment 20001558 PARAMETER Experiment Name: At_Drought_Soil_Dry_P Parameter: Organism Value: A. thaliana
  misc_feature: MA Experiment 20001558 PARAMETER Experiment Name: At_Drought_Soil_Dry_P Parameter: Plant Line Value: WS
  misc_feature: MA Experiment 20001558 PARAMETER Experiment Name: At_Drought_Soil_Dry_P Parameter: Post Timepoint (hr) Value: 6
  misc_feature: MA Experiment 20001558 PARAMETER Experiment Name: At_Drought_Soil_Dry_P Parameter: Post-Treatment Value: Re-Water vs. No Drought
  misc_feature: MA Experiment 20001558 PARAMETER Experiment Name: At_Drought_Soil_Dry_P Parameter: Timepoint (day) Value: 13
  misc_feature: MA Experiment 20001558 PARAMETER Experiment Name: At_Drought_Soil_Dry_P Parameter: Treatment Value: Drought vs. No Drought
  misc_feature: MA Experiment ID: 20001560 Result: Down-regulated in Transcription
  misc_feature: MA Experiment 20001560 PARAMETER Experiment Name: At_Drought_Soil_Dry_P Parameter: Age (day) Value: 28
  misc_feature: MA Experiment 20001560 PARAMETER Experiment Name: At_Drought_Soil_Dry_P Parameter: Organism Value: A. thaliana
  misc_feature: MA Experiment 20001560 PARAMETER Experiment Name: At_Drought_Soil_Dry_P Parameter: Plant Line Value: WS
  misc_feature: MA Experiment 20001560 PARAMETER Experiment Name: At_Drought_Soil_Dry_P Parameter: Post Timepoint (hr) Value: None
  misc_feature: MA Experiment 20001560 PARAMETER Experiment Name: At_Drought_Soil_Dry_P Parameter: Post-Treatment Value: None
  misc_feature: MA Experiment 20001560 PARAMETER Experiment Name: At_Drought_Soil_Dry_P Parameter: Timepoint (day) Value: 14
  misc_feature: MA Experiment 20001560 PARAMETER Experiment Name: At_Drought_Soil_Dry_P Parameter: Treatment Value: Drought vs. No Drought
  misc_feature: MA Experiment ID: 20001755 Result: Down-regulated in Transcription
  misc_feature: MA Experiment 20001755 PARAMETER Experiment Name: At_50mM_NH4NO3_L-to-H_P Parameter: Timepoint (hr) Value: 2
  misc_feature: MA Experiment 20001755 PARAMETER Experiment Name: At_50mM_NH4NO3_L-to-H_P Parameter: Tissue Value: Leaf
  misc_feature: MA Experiment 20001755 PARAMETER Experiment Name: At_50mM_NH4NO3_L-to-H_P Parameter: Treatment Value: 50mM NH4NO3 vs 100mM Mannitol
  misc_feature: MA Experiment ID: 20001757 Result: Up-regulated in Transcription
  misc_feature: MA Experiment 20001757 PARAMETER Experiment Name: At_50mM_NH4NO3_L-to-H_P Parameter: Timepoint (hr) Value: 6
  misc_feature: MA Experiment 20001757 PARAMETER Experiment Name: At_50mM_NH4NO3_L-to-H_P Parameter: Tissue Value: Leaf
  misc_feature: MA Experiment 20001757 PARAMETER Experiment Name: At_50mM_NH4NO3_L-to-H_P Parameter: Treatment Value: 50mM NH4NO3 vs 100mM Mannitol
  misc_feature: MA Experiment ID: 20001768 Result: Up-regulated in Transcription
  misc_feature: MA Experiment 20001768 PARAMETER Experiment Name: At_Far-red-enriched-adult_P Parameter: Age (day) Value: 28
  misc_feature: MA Experiment 20001768 PARAMETER Experiment Name: At_Far-red-enriched-adult_P Parameter: Light Value: Far-red enriched vs. White
  misc_feature: MA Experiment 20001768 PARAMETER Experiment Name: At_Far-red-enriched-adult_P Parameter: Organism Value: A. thaliana
  misc_feature: MA Experiment 20001768 PARAMETER Experiment Name: At_Far-red-enriched-adult_P Parameter: Plant Line Value: Columbia
  misc_feature: MA Experiment 20001768 PARAMETER Experiment Name: At_Far-red-enriched-adult_P Parameter: Timepoint (hr) Value: 1
  misc_feature: MA Experiment 20001768 PARAMETER Experiment Name: At_Far-red-enriched-adult_P Parameter: Tissue Value: Aerial
  misc_feature: MA Experiment ID: 20001773 Result: Down-regulated in Transcription
  misc_feature: MA Experiment 20001773 PARAMETER Experiment Name: At_Far-red-enriched-adult_P Parameter: Age (day) Value: 30
  misc_feature: MA Experiment 20001773 PARAMETER Experiment Name: At_Far-red-enriched-adult_P Parameter: Light Value: Far-red enriched vs. White
  misc_feature: MA Experiment 20001773 PARAMETER Experiment Name: At_Far-red-enriched-adult_P Parameter: Organism Value: A. thaliana
  misc_feature: MA Experiment 20001773 PARAMETER Experiment Name: At_Far-red-enriched-adult_P Parameter: Plant Line Value: Columbia
  misc_feature: MA Experiment 20001773 PARAMETER Experiment Name: At_Far-red-enriched-adult_P Parameter: Timepoint (hr) Value: 48
  misc_feature: MA Experiment 20001773 PARAMETER Experiment Name: At_Far-red-enriched-adult_P Parameter: Tissue Value: Aerial
  misc_feature: MA Experiment ID: 20001904 Result: Down-regulated in Transcription
  misc_feature: MA Experiment 20001904 PARAMETER Experiment Name: At_Drought_Reproduction_P Parameter: Age (day) Value: 37
  misc_feature: MA Experiment 20001904 PARAMETER Experiment Name: At_Drought_Reproduction_P Parameter: Organism Value: A. thaliana
  misc_feature: MA Experiment 20001904 PARAMETER Experiment Name: At_Drought_Reproduction_P Parameter: Plant Line Value: WS
  misc_feature: MA Experiment 20001904 PARAMETER Experiment Name: At_Drought_Reproduction_P Parameter: Timepoint (day) Value: 7
  misc_feature: MA Experiment 20001904 PARAMETER Experiment Name: At_Drought_Reproduction_P Parameter: Tissue Value: Rosettes
  misc_feature: MA Experiment 20001904 PARAMETER Experiment Name: At_Drought_Reproduction_P Parameter: Treatment Value: Drought vs. No Drought
  misc_feature: MA Experiment ID: 20001905 Result: Down-regulated in Transcription
  misc_feature: MA Experiment 20001905 PARAMETER Experiment Name: At_Drought_Reproduction_P Parameter: Age (day) Value: 40
  misc_feature: MA Experiment 20001905 PARAMETER Experiment Name: At_Drought_Reproduction_P Parameter: Organism Value: A. thaliana
  misc_feature: MA Experiment 20001905 PARAMETER Experiment Name: At_Drought_Reproduction_P Parameter: Plant Line Value: WS
  misc_feature: MA Experiment 20001905 PARAMETER Experiment Name: At_Drought_Reproduction_P Parameter: Timepoint (day) Value: 10
  misc_feature: MA Experiment 20001905 PARAMETER Experiment Name: At_Drought_Reproduction_P Parameter: Tissue Value: Rosettes
  misc_feature: MA Experiment 20001905 PARAMETER Experiment Name: At_Drought_Reproduction_P Parameter: Treatment Value: Drought vs. No Drought
  misc_feature: MA Experiment ID: 20001909 Result: Down-regulated in Transcription
  misc_feature: MA Experiment 20001909 PARAMETER Experiment Name: At_Drought_Reproduction_P Parameter: Age (day) Value: 35
  misc_feature: MA Experiment 20001909 PARAMETER Experiment Name: At_Drought_Reproduction_P Parameter: Organism Value: A. thaliana
  misc_feature: MA Experiment 20001909 PARAMETER Experiment Name: At_Drought_Reproduction_P Parameter: Plant Line Value: WS
  misc_feature: MA Experiment 20001909 PARAMETER Experiment Name: At_Drought_Reproduction_P Parameter: Timepoint (day) Value: 5
  misc_feature: MA Experiment 20001909 PARAMETER Experiment Name: At_Drought_Reproduction_P Parameter: Tissue Value: Flowers
  misc_feature: MA Experiment 20001909 PARAMETER Experiment Name: At_Drought_Reproduction_P Parameter: Treatment Value: Drought vs. No Drought
attgctttctatttaaaaacctctttatttttctctccatggaagctcaacttcatgccaagcctcatgctcaaggagaatggtccacaggcttctgtgattgcttctctgactgccgaaactgttgtatcacattatgttgtccatgtatcacatttggccaagtcgctgagattgtagatcgaggatccaaatcgtgttgtgcggctggagcattatacatgttgatagacttaataacaagttgtgggcgtatgtacgcgtgtttctatagtggaaagatgagagctcaatacaatattaaaggagatggttgtactgattgccttaaacatttttgctgtaacctctgtgctttgacccaacaataccgtgaactcaagcaccgcggtttcgatatgagccttggatgggcagggaacgcagagaaacaacaaaatcaaggtggagtggcgatgggtgctccagccttccaaggcggcatgacccgctaagattgatttctctatgtgatcatcatttgtcttatgtgtaataaaaacgaggtttaatcctctgtcgtgtgtgtatgtgttgtgtaatcttctgtttgtttttgaaagtttgaacatgagtatttctttaatgtatatcccaatgtaatggatcacaattgttacgagtgttaaattacaacgtcgataaagttacaccaaaacaatacttacgtcctttttatggatgttaggttatttggtcgttctattcgtc

SEQ ID NO: 106911 - protein, 163 aa, Arabidopsis thaliana
  peptide (1)..(163): Ceres Seq. ID no. 13620846
  misc_feature (23)..(127): Pfam Name: Protein of unknown function, DUF614 Pfam Description: Protein of unknown function, DUF614
  misc_feature (13)..(163): Homolog of NCBI NO: 15223921 NR Description: expressed protein [Arabidopsis thaliana] F10B6.29 [Arabidopsis thaliana] >gi|26452733|dbj|BAC43448.1| protein [Arabidopsis thaliana] >gi|28973517|gb|AAO64083.1|
  misc_feature (13)..(163): Homolog of NCBI NO: 15223920 NR Description: expressed protein [Arabidopsis thaliana] F10B6.27 [Arabidopsis thaliana] >gi|18252925|gb|AAL62389.1| protein [Arabidopsis thaliana] >gi|21389643|gb|AAM48020.1|
  misc_feature (65)..(163): Homolog of NCBI NO: 22327352 NR Description: expressed protein [Arabidopsis thaliana]
  misc_feature (13)..(44): Homolog of NCBI NO: 22327352 NR Description: expressed protein [Arabidopsis thaliana]
  misc_feature (19)..(158): Homolog of NCBI NO: 34897268 NR Description: unknown protein [Oryza sativa (japonica
  misc_feature (21)..(158): Homolog of NCBI NO: 34897274 NR Description: hypothetical protein [Oryza sativa (japonica group)] >gi|28372695|gb|AAO39879.1| hypothetical protein [Oryza
  misc_feature (26)..(163): Homolog of NCBI NO: 15221456 NR Description: hypothetical protein [Arabidopsis thaliana]
  misc_feature (11)..(163): Homolog of NCBI NO: 8272628 NR Description: ORFX [Lycopersicon pennellii]
  misc_feature (27)..(163): Homolog of NCBI NO: 8272626 NR Description: ORFX [Lycopersicon esculentum] fw2.2 [Lycopersicon esculentum] >gi|27413997|gb|AAO12186.1| fw2.2 esculentum] >gi|27413999|gb|AAO12187.1| fw2.2 [Lycopersicon
  misc_feature (27)..(163): Homolog of NCBI NO: 27414005 NR Description: fw2.2 [Lycopersicon pimpinellifolium] fw2.2 [Lycopersicon pimpinellifolium] >gi|27414009|gb|AAO12192.1| [Lycopersicon pimpinellifolium] >gi|27414011|gb|AAO12193.1| fw2.2
CFLFKNLFIFLSMEAQLHAKPHAQGEWSTGFCDCFSDCRNCCITLCCPCITFGQVAEIVDRGSKSCCAAGALYMLIDLITSCGRMYACFYSGKMRAQYNIKGDGCTDCLKHFCCNLCALTQQYRELKHRGFDMSLGWAGNAEKQQNQGGVAMGAPAFQGGMTR

SEQ ID NO: 106912 - protein, 151 aa, Arabidopsis thaliana
  peptide (1)..(151): Ceres Seq. ID no. 13620847
  misc_feature (11)..(115): Pfam Name: Protein of unknown function, DUF614 Pfam Description: Protein of unknown function, DUF614
  misc_feature (1)..(151): Homolog of NCBI NO: 15223921 NR Description: expressed protein [Arabidopsis thaliana] F10B6.29 [Arabidopsis thaliana] >gi|26452733|dbj|BAC43448.1| protein [Arabidopsis thaliana] >gi|28973517|gb|AAO64083.1|
  misc_feature (1)..(151): Homolog of NCBI NO: 15223920 NR Description: expressed protein [Arabidopsis thaliana] F10B6.27 [Arabidopsis thaliana] >gi|18252925|gb|AAL62389.1| protein [Arabidopsis thaliana] >gi|21389643|gb|AAM48020.1|
  misc_feature (53)..(151): Homolog of NCBI NO: 22327352 NR Description: expressed protein [Arabidopsis thaliana]
  misc_feature (1)..(32): Homolog of NCBI NO: 22327352 NR Description: expressed protein [Arabidopsis thaliana]
  misc_feature (7)..(146): Homolog of NCBI NO: 34897268 NR Description: unknown protein [Oryza sativa (japonica
  misc_feature (9)..(146): Homolog of NCBI NO: 34897274 NR Description: hypothetical protein [Oryza sativa (japonica group)] >gi|28372695|gb|AAO39879.1| hypothetical protein [Oryza
  misc_feature (14)..(151): Homolog of NCBI NO: 15221456 NR Description: hypothetical protein [Arabidopsis thaliana]
  misc_feature (1)..(151): Homolog of NCBI NO: 8272628 NR Description: ORFX [Lycopersicon pennellii]
  misc_feature (15)..(151): Homolog of NCBI NO: 8272626 NR Description: ORFX [Lycopersicon esculentum] fw2.2 [Lycopersicon esculentum] >gi|27413997|gb|AAO12186.1| fw2.2 esculentum] >gi|27413999|gb|AAO12187.1| fw2.2 [Lycopersicon
  misc_feature (15)..(151): Homolog of NCBI NO: 27414017 NR Description: fw2.2 [Lycopersicon pennellii]
MEAQLHAKPHAQGEWSTGFCDCFSDCRNCCITLCCPCITFGQVAEIVDRGSKSCCAAGALYMLIDLITSCGRMYACFYSGKMRAQYNIKGDGCTDCLKHFCCNLCALTQQYRELKHRGFDMSLGWAGNAEKQQNQGGVAMGAPAFQGGMTR

SEQ ID NO: 106913 - protein, 90 aa, Arabidopsis thaliana
  peptide (1)..(90): Ceres Seq. ID no. 13620848
  misc_feature (1)..(54): Pfam Name: Protein of unknown function, DUF614 Pfam Description: Protein of unknown function, DUF614
  misc_feature (1)..(90): Homolog of NCBI NO: 15223921 NR Description: expressed protein [Arabidopsis thaliana] F10B6.29 [Arabidopsis thaliana] >gi|26452733|dbj|BAC43448.1| protein [Arabidopsis thaliana] >gi|28973517|gb|AAO64083.1|
  misc_feature (1)..(90): Homolog of NCBI NO: 15223920 NR Description: expressed protein [Arabidopsis thaliana] F10B6.27 [Arabidopsis thaliana] >gi|18252925|gb|AAL62389.1| protein [Arabidopsis thaliana] >gi|21389643|gb|AAM48020.1|
  misc_feature (1)..(90): Homolog of NCBI NO: 22327352 NR Description: expressed protein [Arabidopsis thaliana]
  misc_feature (1)..(85): Homolog of NCBI NO: 34897268 NR Description: unknown protein [Oryza sativa (japonica
  misc_feature (1)..(85): Homolog of NCBI NO: 34897274 NR Description: hypothetical protein [Oryza sativa (japonica group)] >gi|28372695|gb|AAO39879.1| hypothetical protein [Oryza
  misc_feature (1)..(90): Homolog of NCBI NO: 15221456 NR Description: hypothetical protein [Arabidopsis thaliana]
  misc_feature (1)..(90): Homolog of NCBI NO: 8272628 NR Description: ORFX [Lycopersicon pennellii]
  misc_feature (1)..(90): Homolog of NCBI NO: 8272626 NR Description: ORFX [Lycopersicon esculentum] fw2.2 [Lycopersicon esculentum] >gi|27413997|gb|AAO12186.1| fw2.2 esculentum] >gi|27413999|gb|AAO12187.1| fw2.2 [Lycopersicon
  misc_feature (1)..(90): Homolog of NCBI NO: 27414017 NR Description: fw2.2 [Lycopersicon pennellii]
  misc_feature (1)..(90): Homolog of NCBI NO: 27414005 NR Description: fw2.2 [Lycopersicon pimpinellifolium] fw2.2 [Lycopersicon pimpinellifolium] >gi|27414009|gb|AAO12192.1| [Lycopersicon pimpinellifolium] >gi|27414011|gb|AAO12193.1| fw2.2
MLIDLITSCGRMYACFYSGKMRAQYNIKGDGCTDCLKHFCCNLCALTQQYRELKHRGFDMSLGWAGNAEKQQNQGGVAMGAPAFQGGMTR

SEQ ID NO: 106914 - DNA, 1622 bp, Arabidopsis thaliana
  misc_feature (1)..(1622): Ceres Seq. ID no. 13620865
  misc_feature: MA Experiment ID: 20000306 Result: Up-regulated in Transcription
  misc_feature: MA Experiment 20000306 PARAMETER Experiment Name: At_Germinating_Seeds_Sub_P Parameter: Age (hr) Value: 6 vs. 0
  misc_feature: MA Experiment 20000306 PARAMETER Experiment Name: At_Germinating_Seeds_Sub_P Parameter: Organism Value: A. thaliana
  misc_feature: MA Experiment 20000306 PARAMETER Experiment Name: At_Germinating_Seeds_Sub_P Parameter: Plant Line Value: WS
  misc_feature: MA Experiment 20000306 PARAMETER Experiment Name: At_Germinating_Seeds_Sub_P Parameter: Tissue Value: Germinating Seeds
  misc_feature: MA Experiment ID: 20000307 Result: Up-regulated in Transcription
  misc_feature: MA Experiment 20000307 PARAMETER Experiment Name: At_Germinating_Seeds_Sub_P Parameter: Age (hr) Value: 24 vs. 0
  misc_feature: MA Experiment 20000307 PARAMETER Experiment Name: At_Germinating_Seeds_Sub_P Parameter: Organism Value: A. thaliana
  misc_feature: MA Experiment 20000307 PARAMETER Experiment Name: At_Germinating_Seeds_Sub_P Parameter: Plant Line Value: WS
  misc_feature: MA Experiment 20000307 PARAMETER Experiment Name: At_Germinating_Seeds_Sub_P Parameter: Tissue Value: Germinating Seeds
  misc_feature: MA Experiment ID: 20000328 Result: Down-regulated in Transcription
  misc_feature: MA Experiment 20000328 PARAMETER Experiment Name: At_42deg_Heat_Sub_P Parameter: Age (day) Value: 14
  misc_feature: MA Experiment 20000328 PARAMETER Experiment Name: At_42deg_Heat_Sub_P Parameter: Organism Value: A. thaliana
  misc_feature: MA Experiment 20000328 PARAMETER Experiment Name: At_42deg_Heat_Sub_P Parameter: Plant Line Value: WS
  misc_feature: MA Experiment 20000328 PARAMETER Experiment Name: At_42deg_Heat_Sub_P Parameter: Temperature (deg C) Value: 42 vs. 22
  misc_feature: MA Experiment 20000328 PARAMETER Experiment Name: At_42deg_Heat_Sub_P Parameter: Timepoint (hr) Value: 6
  misc_feature: MA Experiment 20000328 PARAMETER Experiment Name: At_42deg_Heat_Sub_P Parameter: Tissue Value: Aerial
  misc_feature: MA Experiment ID: 20000329 Result: Down-regulated in Transcription
  misc_feature: MA Experiment 20000329 PARAMETER Experiment Name: At_4deg_Cold_Sub_P Parameter: Age (day) Value: 14
  misc_feature: MA Experiment 20000329 PARAMETER Experiment Name: At_4deg_Cold_Sub_P Parameter: Organism Value: A. thaliana
  misc_feature: MA Experiment 20000329 PARAMETER Experiment Name: At_4deg_Cold_Sub_P Parameter: Plant Line Value: WS
  misc_feature: MA Experiment 20000329 PARAMETER Experiment Name: At_4deg_Cold_Sub_P Parameter: Temperature (deg C) Value: 4 vs. 22
  misc_feature: MA Experiment 20000329 PARAMETER Experiment Name: At_4deg_Cold_Sub_P Parameter: Timepoint (hr) Value: 6
  misc_feature: MA Experiment 20000329 PARAMETER Experiment Name: At_4deg_Cold_Sub_P Parameter: Tissue Value: Aerial
aggtgcattactagctaagacagcttggttgagagatagagacgaaaatggaagcggcgatgaacaaccacgatggagactgctgcaagagcgggccgggttatgcgacacccctcctcgcgatgtctggtccacgagaaaaactcatctatgttgctgccatatacactggaaccgggcaagcgaagccagattacttagctactgtggatgtggaaccgagttcatccacatactcgagtgttatccacagattaccaatgccttaccttgaagatgaacttcatcactcaggctggaactcatgtagctcttgctatggtgattcttcttgcgagagacgttatctcatcttgccttctcttctgtctggtcgtatttacgtgatcgatacgaaaacaaacccgagggaaccatctttgcacaaattcgtggaccctgcagaggttttggagaagacggggttggcttatccgcatcagcctcattgcttagcttccggagacgttcttgtgtcttgtcttggagacgaagatggaaacgcagaaggcagtgggtttctcttacttgattccgagtttaacatcaaaggaaggtgggagaaggatggaaacagtcctttgtatgggtatgatttctggtaccaacctcggcataagacgatgatcagtacctcatggggagccccggccgcgtttaccaaaggatttgacctcaaagacgtctctgatggcttatatggaaagcatctacatgtctatagctggccccaaggagaattgaaacagattcttgaccttggtgataccggacttttacccttagaggtaagattcttgcatgagccggataaagctacgggatttgcagggtgtgcgttgtcgagtactttagtaagatttttcaagaacgatgatgaaacatggagccacgaggtggctatatcagttgaacctctgaaagttgaaaactggattctcccagaaatgccagggcttatcaccgactttctaatctcacttgacgaccgattcctctattgttccaactggcttcatggagatattcgtcagtacaacatcgaggacccgaaaacccctgttttaactggtcaaatacatgtaggcgggctagtccaaaagggaagtcttgtcttggccttaggagaagaaggaaaagcatttcagtttgatgtccctaagatcaagggtcagcgtctaagaggaggtcctcagatgtttcagctgagcctagatgggaagcgattgtacgtgacgaactcgctgtttagtgtttgggacagacagttttacccggaacttgtggagaaagggtcacacatgttgcagatagatgttgatacagataaaggtggtctctccataaaccctaacttcttcgtcgactttgggaccgaaccggatggtccttcgctcgctcacgagatgagatatccgggtggcgactgcacctcagatatctgggtttagttttttcgctaaatcaaggatttctatggaaatcggaacagaattcagaattgtgttgagtgtgatcaatctaataatgggtaatgtcacatgtgtgagtgtgatcaatctaataaatgttgattacttgct

SEQ ID NO: 106915 - protein, 480 aa, Arabidopsis thaliana
  peptide (1)..(480): Ceres Seq. ID no. 13620866
  misc_feature (13)..(480): Pfam Name: 56kDa selenium binding protein (SBP56) Pfam Description: 56kDa selenium binding protein (SBP56)
  misc_feature (1)..(480): Homolog of NCBI NO: 15229520 NR Description: selenium binding protein -related [Arabidopsis
  misc_feature (1)..(480): Homolog of NCBI NO: 15236385 NR Description: selenium-binding protein like [Arabidopsis
  misc_feature (1)..(480): Homolog of NCBI NO: 13605825 NR Description: AT4g14040/dl3061c [Arabidopsis thaliana]
  misc_feature (1)..(480): Homolog of NCBI NO: 15236386 NR Description: selenium-binding protein like [Arabidopsis
  misc_feature (1)..(480): Homolog of NCBI NO: 22530900 NR Description: selenium-binding protein-like protein
  misc_feature (12)..(480): Homolog of NCBI NO: 15485716 NR Description: selenium binding protein [Lotus japonicus]
  misc_feature (5)..(480): Homolog of NCBI NO: 15485720 NR Description: selenium binding protein [Medicago sativa]
  misc_feature (16)..(480): Homolog of NCBI NO: 15485232 NR Description: selenium binding protein [Arabidopsis thaliana]
MEAAMNNHDGDCCKSGPGYATPLLAMSGPREKLIYVAAIYTGTGQAKPDYLATVDVEPSSSTYSSVIHRLPMPYLEDELHHSGWNSCSSCYGDSSCERRYLILPSLLSGRIYVIDTKTNPREPSLHKFVDPAEVLEKTGLAYPHQPHCLASGDVLVSCLGDEDGNAEGSGFLLLDSEFNIKGRWEKDGNSPLYGYDFWYQPRHKTMISTSWGAPAAFTKGFDLKDVSDGLYGKHLHVYSWPQGELKQILDLGDTGLLPLEVRFLHEPDKATGFAGCALSSTLVRFFKNDDETWSHEVAISVEPLKVENWILPEMPGLITDFLISLDDRFLYCSNWLHGDIRQYNIEDPKTPVLTGQIHVGGLVQKGSLVLALGEEGKAFQFDVPKIKGQRLRGGPQMFQLSLDGKRLYVTNSLFSVWDRQFYPELVEKGSHMLQIDVDTDKGGLSINPNFFVDFGTEPDGPSLAHEMRYPGGDCTSDIWV

SEQ ID NO: 106916 - protein, 476 aa, Arabidopsis thaliana
  peptide (1)..(476): Ceres Seq. ID no. 13620867
  misc_feature (9)..(476): Pfam Name: 56kDa selenium binding protein (SBP56) Pfam Description: 56kDa selenium binding protein (SBP56)
  misc_feature (1)..(476): Homolog of NCBI NO: 15229520 NR Description: selenium binding protein -related [Arabidopsis
  misc_feature (1)..(476): Homolog of NCBI NO: 15236385 NR Description: selenium-binding protein like [Arabidopsis
  misc_feature (1)..(476): Homolog of NCBI NO: 13605825 NR Description: AT4g14040/dl3061c [Arabidopsis thaliana]
  misc_feature (1)..(476): Homolog of NCBI NO: 15236386 NR Description: selenium-binding protein like [Arabidopsis
  misc_feature (1)..(476): Homolog of NCBI NO: 22530900 NR Description: selenium-binding protein-like protein
  misc_feature (8)..(476): Homolog of NCBI NO: 15485716 NR Description: selenium binding protein [Lotus japonicus]
  misc_feature (1)..(476): Homolog of NCBI NO: 15485720 NR Description: selenium binding protein [Medicago sativa]
  misc_feature (12)..(476): Homolog of NCBI NO: 15485232 NR Description: selenium binding protein [Arabidopsis thaliana]
MNNHDGDCCKSGPGYATPLLAMSGPREKLIYVAAIYTGTGQAKPDYLATVDVEPSSSTYSSVIHRLPMPYLEDELHHSGWNSCSSCYGDSSCERRYLILPSLLSGRIYVIDTKTNPREPSLHKFVDPAEVLEKTGLAYPHQPHCLASGDVLVSCLGDEDGNAEGSGFLLLDSEFNIKGRWEKDGNSPLYGYDFWYQPRHKTMISTSWGAPAAFTKGFDLKDVSDGLYGKHLHVYSWPQGELKQILDLGDTGLLPLEVRFLHEPDKATGFAGCALSSTLVRFFKNDDETWSHEVAISVEPLKVENWILPEMPGLITDFLISLDDRFLYCSNWLHGDIRQYNIEDPKTPVLTGQIHVGGLVQKGSLVLALGEEGKAFQFDVPKIKGQRLRGGPQMFQLSLDGKRLYVTNSLFSVWDRQFYPELVEKGSHMLQIDVDTDKGGLSINPNFFVDFGTEPDGPSLAHEMRYPGGDCTSDIWV

SEQ ID NO: 106917 - protein, 455 aa, Arabidopsis thaliana
  peptide (1)..(455): Ceres Seq. ID no. 13620868
  misc_feature (1)..(455): Pfam Name: 56kDa selenium binding protein (SBP56) Pfam Description: 56kDa selenium binding protein (SBP56)
  misc_feature (1)..(455): Homolog of NCBI NO: 15229520 NR Description: selenium binding protein -related [Arabidopsis
  misc_feature (1)..(455): Homolog of NCBI NO: 15236385 NR Description: selenium-binding protein like [Arabidopsis
  misc_feature (1)..(455): Homolog of NCBI NO: 13605825 NR Description: AT4g14040/dl3061c [Arabidopsis thaliana]
  misc_feature (1)..(455): Homolog of NCBI NO: 15236386 NR Description: selenium-binding protein like [Arabidopsis
  misc_feature (1)..(455): Homolog of NCBI NO: 22530900 NR Description: selenium-binding protein-like protein
  misc_feature (1)..(455): Homolog of NCBI NO: 15485716 NR Description: selenium binding protein [Lotus japonicus]
  misc_feature (1)..(455): Homolog of NCBI NO: 15485720 NR Description: selenium binding protein [Medicago sativa]
  misc_feature (1)..(455): Homolog of NCBI NO: 15485232 NR Description: selenium binding protein [Arabidopsis thaliana]
MSGPREKLIYVAAIYTGTGQAKPDYLATVDVEPSSSTYSSVIHRLPMPYLEDELHHSGWNSCSSCYGDSSCERRYLILPSLLSGRIYVIDTKTNPREPSLHKFVDPAEVLEKTGLAYPHQPHCLASGDVLVSCLGDEDGNAEGSGFLLLDSEFNIKGRWEKDGNSPLYGYDFWYQPRHKTMISTSWGAPAAFTKGFDLKDVSDGLYGKHLHVYSWPQGELKQILDLGDTGLLPLEVRFLHEPDKATGFAGCALSSTLVRFFKNDDETWSHEVAISVEPLKVENWILPEMPGLITDFLISLDDRFLYCSNWLHGDIRQYNIEDPKTPVLTGQIHVGGLVQKGSLVLALGEEGKAFQFDVPKIKGQRLRGGPQMFQLSLDGKRLYVTNSLFSVWDRQFYPELVEKGSHMLQIDVDTDKGGLSINPNFFVDFGTEPDGPSLAHEMRYPGGDCTSDIWV

SEQ ID NO: 106918 - DNA, 1008 bp, Arabidopsis thaliana
  misc_feature (1)..(1008): Ceres Seq. ID no. 13620873
  misc_feature: MA Experiment ID: 20000314 Result: Up-regulated in Transcription
  misc_feature: MA Experiment 20000314 PARAMETER Experiment Name: At_14day_Shoots-Roots_Sub_P Parameter: Age (day) Value: 14
  misc_feature: MA Experiment 20000314 PARAMETER Experiment Name: At_14day_Shoots-Roots_Sub_P Parameter: Organism Value: A. thaliana
  misc_feature: MA Experiment 20000314 PARAMETER Experiment Name: At_14day_Shoots-Roots_Sub_P Parameter: Plant Line Value: WS
  misc_feature: MA Experiment 20000314 PARAMETER Experiment Name: At_14day_Shoots-Roots_Sub_P Parameter: Tissue Value: Roots vs. Whole Plant
  misc_feature: MA Experiment ID: 20000315 Result: Down-regulated in Transcription
  misc_feature: MA Experiment 20000315 PARAMETER Experiment Name: At_14day_Shoots-Roots_Sub_P Parameter: Age (day) Value: 14
  misc_feature: MA Experiment 20000315 PARAMETER Experiment Name: At_14day_Shoots-Roots_Sub_P Parameter: Organism Value: A. thaliana
  misc_feature: MA Experiment 20000315 PARAMETER Experiment Name: At_14day_Shoots-Roots_Sub_P Parameter: Plant Line Value: WS
  misc_feature: MA Experiment 20000315 PARAMETER Experiment Name: At_14day_Shoots-Roots_Sub_P Parameter: Tissue Value: Shoots vs. Whole Plant
  misc_feature: MA Experiment ID: 20000327 Result: Down-regulated in Transcription
  misc_feature: MA Experiment 20000327 PARAMETER Experiment Name: At_42deg_Heat_Sub_P Parameter: Age (day) Value: 14
  misc_feature: MA Experiment 20000327 PARAMETER Experiment Name: At_42deg_Heat_Sub_P Parameter: Organism Value: A. thaliana
  misc_feature: MA Experiment 20000327 PARAMETER Experiment Name: At_42deg_Heat_Sub_P Parameter: Plant Line Value: WS
  misc_feature: MA Experiment 20000327 PARAMETER Experiment Name: At_42deg_Heat_Sub_P Parameter: Temperature (deg C) Value: 42 vs. 22
  misc_feature: MA Experiment 20000327 PARAMETER Experiment Name: At_42deg_Heat_Sub_P Parameter: Timepoint (hr) Value: 1
  misc_feature: MA Experiment 20000327 PARAMETER Experiment Name: At_42deg_Heat_Sub_P Parameter: Tissue Value: Aerial
  misc_feature: MA Experiment ID: 20000328 Result: Down-regulated in Transcription
  misc_feature: MA Experiment 20000328 PARAMETER Experiment Name: At_42deg_Heat_Sub_P Parameter: Age (day) Value: 14
  misc_feature: MA Experiment 20000328 PARAMETER Experiment Name: At_42deg_Heat_Sub_P Parameter: Organism Value: A. thaliana
  misc_feature: MA Experiment 20000328 PARAMETER Experiment Name: At_42deg_Heat_Sub_P Parameter: Plant Line Value: WS
  misc_feature: MA Experiment 20000328 PARAMETER Experiment Name: At_42deg_Heat_Sub_P Parameter: Temperature (deg C) Value: 42 vs. 22
  misc_feature: MA Experiment 20000328 PARAMETER Experiment Name: At_42deg_Heat_Sub_P Parameter: Timepoint (hr) Value: 6
  misc_feature: MA Experiment 20000328 PARAMETER Experiment Name: At_42deg_Heat_Sub_P Parameter: Tissue Value: Aerial
  misc_feature: MA Experiment ID: 20000348 Result: Down-regulated in Transcription
  misc_feature: MA Experiment 20000348 PARAMETER Experiment Name: At_100uM_ABA_Sub_P Parameter: Age (day) Value: 14
  misc_feature: MA Experiment 20000348 PARAMETER Experiment Name: At_100uM_ABA_Sub_P Parameter: Organism Value: A. thaliana
  misc_feature: MA Experiment 20000348 PARAMETER Experiment Name: At_100uM_ABA_Sub_P Parameter: Plant Line Value: WS
  misc_feature: MA Experiment 20000348 PARAMETER Experiment Name: At_100uM_ABA_Sub_P Parameter: Timepoint (hr) Value: 1
  misc_feature: MA Experiment 20000348 PARAMETER Experiment Name: At_100uM_ABA_Sub_P Parameter: Tissue Value: Aerial
  misc_feature: MA Experiment 20000348 PARAMETER Experiment Name: At_100uM_ABA_Sub_P Parameter: Treatment Value: 100uM ABA vs. No Treatment
  misc_feature: MA Experiment ID: 20000355 Result: Down-regulated in Transcription
  misc_feature: MA Experiment 20000355 PARAMETER Experiment Name: At_Siliques_Sub_P Parameter: Age (day) Value: 21
  misc_feature: MA Experiment 20000355 PARAMETER Experiment Name: At_Siliques_Sub_P Parameter: Organism Value: A. thaliana
  misc_feature: MA Experiment 20000355 PARAMETER Experiment Name: At_Siliques_Sub_P Parameter: Plant Line Value: WS
  misc_feature: MA Experiment 20000355 PARAMETER Experiment Name: At_Siliques_Sub_P Parameter: Tissue Value: Less Than 5mm Siliques vs. Whole Plant
  misc_feature: MA Experiment ID: 20000440 Result: Down-regulated in Transcription
  misc_feature: MA Experiment 20000440 PARAMETER Experiment Name: At_Closed-Flower__Sub_P Parameter: Tissue Value: Closed Flower vs. Whole Plant
gagaagtaaaattttctattgcagagagaaagagagttagagaaagagagagagagagagagagagagagagatgaaacttgtgcaagaagaataccgtaaaggaccgtggacagaacaggaggacatcctcttggtcaactttgtccacttgttcggagatcgaagatgggattttgtagcgaaagtttcaggtttaaacagaacaggaaagagttgcaggttaaggtgggttaattacctgcatcctggtctcaaacgtggtaagatgactccacaagaagagcgtttagtccttgagcttcacgccaaatggggaaacaggtggtcaaaaattgcccggaaattaccggggagaacagataatgagataaagaactactggaggactcatatgaggaagaaggctcaagagaagaagcgacctatgtctcctacttcctcatcttcaaactgttgctcatcatctatgaccactactactagtcaagacactggaggctccaacgggaaaatgaatcaagaatgcgaagacgggtactactccatggatgacatatggagagagattgatcagtctggagcaaacgttattaaaccggtaaaagacaactactactcagagcaaagctgttacttgaatttccctcctctggcttctccaacatgggaaagttccttggaatctatatggaacatggatgcagatgaaagtaagatgtcttcttttgctattgatcagtttcctctaagttttgaacatggtagtggtcgcctttagtctaggatttgattcatttggaatgtttatatgtgcagcatatatatgttatcaaacgacgactgtagtagtttcctatgacttacatcaaaaatcaccacccactgtactaatctcataagtagtcatcatcttatgcctttgtttagtttgtagagtgagtgaaaagatgtgtaatacaagtcagaactctatttccaaaataaatagacttttgaagtttctgtg

SEQ ID NO: 106919 - protein, 235 aa, Arabidopsis thaliana
  peptide (1)..(235): Ceres Seq. ID no. 13620874
  misc_feature (10)..(57): Pfam Name: Myb-like DNA-binding domain Pfam Description: Myb-like DNA-binding domain
  misc_feature (1)..(235): Homolog of NCBI NO: 15238519 NR Description: myb family transcription factor [Arabidopsis
  misc_feature (1)..(235): Homolog of NCBI NO: 11358547 NR Description: myb-related transcription factor MYB59 [imported] Arabidopsis thaliana >gi|3941480|gb|AAC83616.1| putative
  misc_feature (41)..(235): Homolog of NCBI NO: 30697277 NR Description: myb family transcription factor [Arabidopsis
  misc_feature (66)..(235): Homolog of NCBI NO: 30697275 NR Description: myb family transcription factor [Arabidopsis
  misc_feature (3)..(173): Homolog of NCBI NO: 15231343 NR Description: Myb family transcription factor [Arabidopsis
  misc_feature (9)..(200): Homolog of NCBI NO: 34906070 NR Description: putative Myb factor protein [Oryza sativa
  misc_feature (9)..(200): Homolog of NCBI NO: 11967859 NR Description: Myb factor protein [Oryza sativa (japonica
  misc_feature (3)..(125): Homolog of NCBI NO: 15230095 NR Description: myb family transcription factor [Arabidopsis
  misc_feature (3)..(113): Homolog of NCBI NO: 15236297 NR Description: myb family transcription factor [Arabidopsis
  misc_feature (3)..(113): Homolog of NCBI NO: 1732513 NR Description: snapdragon myb protein 305 homolog [Arabidopsis
MKLVQEEYRKGPWTEQEDILLVNFVHLFGDRRWDFVAKVSGLNRTGKSCRLRWVNYLHPGLKRGKMTPQEERLVLELHAKWGNRWSKIARKLPGRTDNEIKNYWRTHMRKKAQEKKRPMSPTSSSSNCCSSSMTTTTSQDTGGSNGKMNQECEDGYYSMDDIWREIDQSGANVIKPVKDNYYSEQSCYLNFPPLASPTWESSLESIWNMDADESKMSSFAIDQFPLSFEHGSGRL

SEQ ID NO: 106920 - protein, 170 aa, Arabidopsis thaliana
  peptide (1)..(170): Ceres Seq. ID no. 13620875
  misc_feature (1)..(170): Homolog of NCBI NO: 15238519 NR Description: myb family transcription factor [Arabidopsis
  misc_feature (1)..(170): Homolog of NCBI NO: 11358547 NR Description: myb-related transcription factor MYB59 [imported] Arabidopsis thaliana >gi|3941480|gb|AAC83616.1| putative
  misc_feature (1)..(170): Homolog of NCBI NO: 30697277 NR Description: myb family transcription factor [Arabidopsis
  misc_feature (1)..(170): Homolog of NCBI NO: 30697275 NR Description: myb family transcription factor [Arabidopsis
  misc_feature (1)..(108): Homolog of NCBI NO: 15231343 NR Description: Myb family transcription factor [Arabidopsis
  misc_feature (1)..(135): Homolog of NCBI NO: 34906070 NR Description: putative Myb factor protein [Oryza sativa
  misc_feature (1)..(135): Homolog of NCBI NO: 11967859 NR Description: Myb factor protein [Oryza sativa (japonica
  misc_feature (1)..(60): Homolog of NCBI NO: 15230095 NR Description: myb family transcription factor [Arabidopsis
  misc_feature (1)..(48): Homolog of NCBI NO: 15236297 NR Description: myb family transcription factor [Arabidopsis
  misc_feature (1)..(48): Homolog of NCBI NO: 1732513 NR Description: snapdragon myb protein 305 homolog [Arabidopsis
MTPQEERLVLELHAKWGNRWSKIARKLPGRTDNEIKNYWRTHMRKKAQEKKRPMSPTSSSSNCCSSSMTTTTSQDTGGSNGKMNQECEDGYYSMDDIWREIDQSGANVIKPVKDNYYSEQSCYLNFPPLASPTWESSLESIWNMDADESKMSSFAIDQFPLSFEHGSGRL

SEQ ID NO: 106921 - protein, 128 aa, Arabidopsis thaliana
  peptide (1)..(128): Ceres Seq. ID no. 13620876
  misc_feature (1)..(128): Homolog of NCBI NO: 15238519 NR Description: myb family transcription factor [Arabidopsis
  misc_feature (1)..(128): Homolog of NCBI NO: 11358547 NR Description: myb-related transcription factor MYB59 [imported] Arabidopsis thaliana >gi|3941480|gb|AAC83616.1| putative
  misc_feature (1)..(128): Homolog of NCBI NO: 30697277 NR Description: myb family transcription factor [Arabidopsis
  misc_feature (1)..(128): Homolog of NCBI NO: 30697275 NR Description: myb family transcription factor [Arabidopsis
  misc_feature (1)..(66): Homolog of NCBI NO: 15231343 NR Description: Myb family transcription factor [Arabidopsis
  misc_feature (1)..(93): Homolog of NCBI NO: 34906070 NR Description: putative Myb factor protein [Oryza sativa
  misc_feature (1)..(93): Homolog of NCBI NO: 11967859 NR Description: Myb factor protein [Oryza sativa (japonica
  misc_feature (1)..(18): Homolog of NCBI NO: 15230095 NR Description: myb family transcription factor [Arabidopsis
  misc_feature (1)..(26): Homolog of NCBI NO: 30688935 NR Description: myb family transcription factor (ATMYB3) thaliana] >gi|26451911|dbj|BAC43048.1| putative myb family
  misc_feature (1)..(15): Homolog of NCBI NO: 82306 NR Description: myb-related protein 305 - garden snapdragon
MRKKAQEKKRPMSPTSSSSNCCSSSMTTTTSQDTGGSNGKMNQECEDGYYSMDDIWREIDQSGANVIKPVKDNYYSEQSCYLNFPPLASPTWESSLESIWNMDADESKMSSFAIDQFPLSFEHGSGRL

SEQ ID NO: 106922 - DNA, 2587 bp, Arabidopsis thaliana
  misc_feature (1)..(2587): Ceres Seq. ID no. 13620877
  misc_feature: MA Experiment ID: 20000234 Result: Up-regulated in Transcription
  misc_feature: MA Experiment 20000234 PARAMETER Experiment Name: At_Siliques_P Parameter: Age (day) Value: 21
  misc_feature: MA Experiment 20000234 PARAMETER Experiment Name: At_Siliques_P Parameter: Organism Value: A. thaliana
  misc_feature: MA Experiment 20000234 PARAMETER Experiment Name: At_Siliques_P Parameter: Plant Line Value: WS
  misc_feature: MA Experiment 20000234 PARAMETER Experiment Name: At_Siliques_P Parameter: Tissue Value: Less Than 5mm Siliques vs. Whole Plant
  misc_feature: MA Experiment ID: 20000286 Result: Up-regulated in Transcription
  misc_feature: MA Experiment 20000286 PARAMETER Experiment Name: At_Open_Flower_P Parameter: Age (day) Value: 21
  misc_feature: MA Experiment 20000286 PARAMETER Experiment Name: At_Open_Flower_P Parameter: Plant Line Value: WS
  misc_feature: MA Experiment 20000286 PARAMETER Experiment Name: At_Open_Flower_P Parameter: Tissue Value: Half Open vs. Whole Plant
ttaccttttttttcgaattagataacagttgaaggaagagatagagttctggctgaaatcactcaacaaactttaaaagtaattaagttgagactgagactgagcgtgattcgatctatttagcaaatatagcgagagagggagatttatggagaactagtattttgtatatgagtatgacgagaagatattcgagtactcaatactcaaacaaaatgagcctccaaagtttatcatctcttcttctcctcgtcactctctttttctctcctgcttttgctcttaaaaagtcctacatagtgtacttgggatctcacgcccatcttcctcaaatctcttctgcccatctcgatggtgttgctcactcacatcgcacttttctcgcctctttcgttggaagccatgagaatgcaaaagaagccatcttttactcatacaagagacatatcaatggcttcgccgcaattcttgacgaaaatgaagctgcagaaatcgccaagcatcctgatgtagtctctgtattccccaacaaaggaagaaaacttcataccactcattcatggaatttcatgctccttgcgaaaaatggtgttgttcacaagtcctctctttggaataaagcaggatacggagaggatacaatcatcgctaacttagacacaggtgtgtggcctgagtcaaaaagcttcagcgatgaagggtatggagctgttccagctaggtggaaaggtagatgccacaaggatgttccttgcaacaggaagctcatcggtgctagatacttcaacaaaggttacttagcttacacaggccttccttctaacgcctcctatgaaacctgtcgtgaccacgatggtcacggtagccacactctttccaccgcggctggtaactttgttcccggagccaatgtgtttggtatcgggaatggaacagccagtggtggttctcctaaagctagagtcgcggcttacaaggtgtgctggccccctgtggatggcgcggagtgctttgatgctgatattttggcagcgattgaggctgccatcgaagacggcgtggatgttctctcggcttcagtgggaggagatgctggagattacatgagcgatggtatagccattggatccttccacgccgtcaaaaacggggtgacggttgtgtgctctgctggaaattcaggtcctaagtctggcactgtctcaaacgttgcaccatgggttattacagtcggtgctagctccatggatcgggagtttcaagcttttgttgagctcaaaaacggccaaagcttcaagggaacaagcctctcaaagcctttgcctgaagaaaagatgtatagcctcatcagtgctgcagatgctaatgtagccaatggaaatgtgacagatgcattgctatgcaagaaaggtagcctagacccgaagaaggtgaaagggaagatcttggtgtgtctgagaggagacaacgcacgtgtggacaagggaatgcaagcggctgctgctggagctgcgggaatggttctatgcaacgacaaggcgagtggaaacgaaatcatctcagacgctcatgttcttcctgcttcacaaattgactacaaagatggtgaaactttgttttcttacctaagttccacaaaagatcccaaaggttacatcaaagcacctaccgctacgctgaacacaaagcctgctcctttcatggcctctttctcttccagaggaccaaacaccatcacaccagggatcctcaagcccgacatcactgcacccggtgtcaacatcatagccgccttcacggaagccacgggccctacagacttagactctgacaatcgaagaactcctttcaacaccgaatcaggaacttccatgtcctgtcctcacatctccggtgtcgttggtcttttgaaaacacttcaccctcattggagtcctgcagctatccgctcagccatcatgacaacttcaagaaccagaaacaacagacgtaagcccatggttgatgaatccttcaagaaagcaaatcccttcagctacggttcaggccatgtccaacccaataaagccgcccatcctggtcttgtctatgatctcaccacaggagactacttggacttcctctgcgccgttggctacaacaacaccgtggttcaactctttgccgaggacccacagtacacgtgtcgccaaggagccaatcttctcgacttcaactacccttcaatcactgtcccaaacctcacgggctctatcaccgtcacccgaaaactcaaaaacgttggaccacctgctacctacaacgctcgtttccgagagccacttggagttcgcgtctccgtggagccaaaacagctcacgttcaacaaaactggtgaagtgaagatatttcagatgactcttcgtcccttgccagtgacgccttcaggctacgtttttggagagctgacgtggactgattcacatcattacgttaggagtcccatcgtcgtccaactttcaagctagcctcattcttcattctacttcatcgttctcacttttcttctatgaatcattttatatgtttggataatattttaatgttc

SEQ ID NO: 106923 - protein, 778 aa, Arabidopsis thaliana
  peptide (1)..(778): Ceres Seq. ID no. 13620878
  misc_feature (383)..(486): Pfam Name: PA domain Pfam Description: PA domain
  misc_feature (24)..(776): Homolog of NCBI NO: 22325457 NR Description: subtilisin-like serine protease AIR3 [Arabidopsis
  misc_feature (41)..(776): Homolog of NCBI NO: 11358862 NR Description: subtilisin-like proteinase AIR3, auxin-induced
  misc_feature (24)..(759): Homolog of NCBI NO: 20198252 NR Description: subtilisin-like serine protease AIR3 [Arabidopsis
  misc_feature (42)..(774): Homolog of NCBI NO: 24414066 NR Description: OJ1136_A10.14 [Oryza sativa (japonica
  misc_feature (198)..(776): Homolog of NCBI NO: 20198169 NR Description: subtilisin-like serine protease AIR3 [Arabidopsis
  misc_feature (17)..(774): Homolog of NCBI NO: 18425181 NR Description: subtilisin-like serine protease ARA12
  misc_feature (85)..(772): Homolog of NCBI NO: 37533990 NR Description: putative cucumisin-like serine protease [Oryza
  misc_feature (69)..(429): Homolog of NCBI NO: 18415734 NR Description: subtilisin-like serine protease [Arabidopsis
  misc_feature (421)..(775): Homolog of NCBI NO: 18415734 NR Description: subtilisin-like serine protease [Arabidopsis
  misc_feature (42)..(778): Homolog of NCBI NO: 18413345 NR Description: subtilisin-like serine protease [Arabidopsis
MSMTRRYSSTQYSNKMSLQSLSSLLLLVTLFFSPAFALKKSYIVYLGSHAHLPQISSAHLDGVAHSHRTFLASFVGSHENAKEAIFYSYKRHINGFAAILDENEAAEIAKHPDVVSVFPNKGRKLHTTHSWNFMLLAKNGVVHKSSLWNKAGYGEDTIIANLDTGVWPESKSFSDEGYGAVPARWKGRCHKDVPCNRKLIGARYFNKGYLAYTGLPSNASYETCRDHDGHGSHTLSTAAGNFVPGANVFGIGNGTASGGSPKARVAAYKVCWPPVDGAECFDADILAAIEAAIEDGVDVLSASVGGDAGDYMSDGIAIGSFHAVKNGVTVVCSAGNSGPKSGTVSNVAPWVITVGASSMDREFQAFVELKNGQSFKGTSLSKPLPEEKMYSLISAADANVANGNVTDALLCKKGSLDPKKVKGKILVCLRGDNARVDKGMQAAAAGAAGMVLCNDKASGNEIISDAHVLPASQIDYKDGETLFSYLSSTKDPKGYIKAPTATLNTKPAPFMASFSSRGPNTITPGILKPDITAPGVNIIAAFTEATGPTDLDSDNRRTPFNTESGTSMSCPHISGVVGLLKTLHPHWSPAAIRSAIMTTSRTRNNRRKPMVDESFKKANPFSYGSGHVQPNKAAHPGLVYDLTTGDYLDFLCAVGYNNTVVQLFAEDPQYTCRQGANLLDFNYPSITVPNLTGSITVTRKLKNVGPPATYNARFREPLGVRVSVEPKQLTFNKTGEVKIFQMTLRPLPVTPSGYVFGELTWTDSHHYVRSPIVVQLSS

SEQ ID NO: 106924 - protein, 776 aa, Arabidopsis thaliana
  peptide (1)..(776): Ceres Seq. ID no. 13620879
  misc_feature (381)..(484): Pfam Name: PA domain Pfam Description: PA domain
  misc_feature (22)..(774): Homolog of NCBI NO: 22325457 NR Description: subtilisin-like serine protease AIR3 [Arabidopsis
  misc_feature (39)..(774): Homolog of NCBI NO: 11358862 NR Description: subtilisin-like proteinase AIR3, auxin-induced
  misc_feature (22)..(757): Homolog of NCBI NO: 20198252 NR Description: subtilisin-like serine protease AIR3 [Arabidopsis
  misc_feature (40)..(772): Homolog of NCBI NO: 24414066 NR Description: OJ1136_A10.14 [Oryza sativa (japonica
  misc_feature (196)..(774): Homolog of NCBI NO: 20198169 NR Description: subtilisin-like serine protease AIR3 [Arabidopsis
  misc_feature (15)..(772): Homolog of NCBI NO: 18425181 NR Description: subtilisin-like serine protease ARA12
  misc_feature (83)..(770): Homolog of NCBI NO: 37533990 NR Description: putative cucumisin-like serine protease [Oryza
  misc_feature (67)..(427): Homolog of NCBI NO: 18415734 NR Description: subtilisin-like serine protease [Arabidopsis
  misc_feature (419)..(773): Homolog of NCBI NO: 18415734 NR Description: subtilisin-like serine protease [Arabidopsis
  misc_feature (40)..(776): Homolog of NCBI NO: 18413345 NR Description: subtilisin-like serine protease [Arabidopsis
MTRRYSSTQYSNKMSLQSLSSLLLLVTLFFSPAFALKKSYIVYLGSHAHLPQISSAHLDGVAHSHRTFLASFVGSHENAKEAIFYSYKRHINGFAAILDENEAAEIAKHPDVVSVFPNKGRKLHTTHSWNFMLLAKNGVVHKSSLWNKAGYGEDTIIANLDTGVWPESKSFSDEGYGAVPARWKGRCHKDVPCNRKLIGARYFNKGYLAYTGLPSNASYETCRDHDGHGSHTLSTAAGNFVPGANVFGIGNGTASGGSPKARVAAYKVCWPPVDGAECFDADILAAIEAAIEDGVDVLSASVGGDAGDYMSDGIAIGSFHAVKNGVTVVCSAGNSGPKSGTVSNVAPWVITVGASSMDREFQAFVELKNGQSFKGTSLSKPLPEEKMYSLISAADANVANGNVTDALLCKKGSLDPKKVKGKILVCLRGDNARVDKGMQAAAAGAAGMVLCNDKASGNEIISDAHVLPASQIDYKDGETLFSYLSSTKDPKGYIKAPTATLNTKPAPFMASFSSRGPNTITPGILKPDITAPGVNIIAAFTEATGPTDLDSDNRRTPFNTESGTSMSCPHISGVVGLLKTLHPHWSPAAIRSAIMTTSRTRNNRRKPMVDESFKKANPFSYGSGHVQPNKAAHPGLVYDLTTGDYLDFLCAVGYNNTVVQLFAEDPQYTCRQGANLLDFNYPSITVPNLTGSITVTRKLKNVGPPATYNARFREPLGVRVSVEPKQLTFNKTGEVKIFQMTLRPLPVTPSGYVFGELTWTDSHHYVRSPIVVQLSS

SEQ ID NO: 106925 - protein, 763 aa, Arabidopsis thaliana
  peptide (1)..(763): Ceres Seq. ID no. 13620880
  misc_feature (368)..(471): Pfam Name: PA domain Pfam Description: PA domain
  misc_feature (9)..(761): Homolog of NCBI NO: 22325457 NR Description: subtilisin-like serine protease AIR3 [Arabidopsis
  misc_feature (26)..(761): Homolog of NCBI NO: 11358862 NR Description: subtilisin-like proteinase AIR3, auxin-induced
  misc_feature (9)..(744): Homolog of NCBI NO: 20198252 NR Description: subtilisin-like serine protease AIR3 [Arabidopsis
  misc_feature (27)..(759): Homolog of NCBI NO: 24414066 NR Description: OJ1136_A10.14 [Oryza sativa (japonica
  misc_feature (183)..(761): Homolog of NCBI NO: 20198169 NR Description: subtilisin-like serine protease AIR3 [Arabidopsis
  misc_feature (2)..(759): Homolog of NCBI NO: 18425181 NR Description: subtilisin-like serine protease ARA12
  misc_feature (70)..(757): Homolog of NCBI NO: 37533990 NR Description: putative cucumisin-like serine protease [Oryza
  misc_feature (54)..(414): Homolog of NCBI NO: 18415734 NR Description: subtilisin-like serine protease [Arabidopsis
  misc_feature (406)..(760): Homolog of NCBI NO: 18415734 NR Description: subtilisin-like serine protease [Arabidopsis
  misc_feature (27)..(763): Homolog of NCBI NO: 18413345 NR Description: subtilisin-like serine protease [Arabidopsis
MSLQSLSSLLLLVTLFFSPAFALKKSYIVYLGSHAHLPQISSAHLDGVAHSHRTFLASFVGSHENAKEAIFYSYKRHINGFAAILDENEAAEIAKHPDVVSVFPNKGRKLHTTHSWNFMLLAKNGVVHKSSLWNKAGYGEDTIIANLDTGVWPESKSFSDEGYGAVPARWKGRCHKDVPCNRKLIGARYFNKGYLAYTGLPSNASYETCRDHDGHGSHTLSTAAGNFVPGANVFGIGNGTASGGSPKARVAAYKVCWPPVDGAECFDADILAAIEAAIEDGVDVLSASVGGDAGDYMSDGIAIGSFHAVKNGVTVVCSAGNSGPKSGTVSNVAPWVITVGASSMDREFQAFVELKNGQSFKGTSLSKPLPEEKMYSLISAADANVANGNVTDALLCKKGSLDPKKVKGKILVCLRGDNARVDKGMQAAAAGAAGMVLCNDKASGNEIISDAHVLPASQIDYKDGETLFSYLSSTKDPKGYIKAPTATLNTKPAPFMASFSSRGPNTITPGILKPDITAPGVNIIAAFTEATGPTDLDSDNRRTPFNTESGTSMSCPHISGVVGLLKTLHPHWSPAAIRSAIMTTSRTRNNRRKPMVDESFKKANPFSYGSGHVQPNKAAHPGLVYDLTTGDYLDFLCAVGYNNTVVQLFAEDPQYTCRQGANLLDFNYPSITVPNLTGSITVTRKLKNVGPPATYNARFREPLGVRVSVEPKQLTFNKTGEVKIFQMTLRPLPVTPSGYVFGELTWTDSHHYVRSPIVVQLSS

SEQ ID NO: 106926 - DNA, 1151 bp, Arabidopsis thaliana
  misc_feature (1)..(1151): Ceres Seq. ID no. 13620887
  misc_feature: MA Experiment ID: 20000234 Result: Down-regulated in Transcription
  misc_feature: MA Experiment 20000234 PARAMETER Experiment Name: At_Siliques_P Parameter: Age (day) Value: 21
  misc_feature: MA Experiment 20000234 PARAMETER Experiment Name: At_Siliques_P Parameter: Organism Value: A. thaliana
  misc_feature: MA Experiment 20000234 PARAMETER Experiment Name: At_Siliques_P Parameter: Plant Line Value: WS
  misc_feature: MA Experiment 20000234 PARAMETER Experiment Name: At_Siliques_P Parameter: Tissue Value: Less Than 5mm Siliques vs. Whole Plant
  misc_feature: MA Experiment ID: 20000235 Result: Down-regulated in Transcription
  misc_feature: MA Experiment 20000235 PARAMETER Experiment Name: At_Siliques_P Parameter: Age (day) Value: 21
  misc_feature: MA Experiment 20000235 PARAMETER Experiment Name: At_Siliques_P Parameter: Organism Value: A. thaliana
  misc_feature: MA Experiment 20000235 PARAMETER Experiment Name: At_Siliques_P Parameter: Plant Line Value: WS
  misc_feature: MA Experiment 20000235 PARAMETER Experiment Name: At_Siliques_P Parameter: Tissue Value: 5-10mm Siliques vs. Whole Plant
  misc_feature: MA Experiment ID: 20000264 Result: Down-regulated in Transcription
  misc_feature: MA Experiment 20000264 PARAMETER Experiment Name: At_Open_Flower_P Parameter: Age (day) Value: 21
  misc_feature: MA Experiment 20000264 PARAMETER Experiment Name: At_Open_Flower_P Parameter: Plant Line Value: WS
  misc_feature: MA Experiment 20000264 PARAMETER Experiment Name: At_Open_Flower_P Parameter: Tissue Value: Open Flower vs. Whole Plant
  misc_feature: MA Experiment ID: 20000265 Result: Down-regulated in Transcription
  misc_feature: MA Experiment 20000265 PARAMETER Experiment Name: At_Open_Flower_P Parameter: Age (day) Value: 21
  misc_feature: MA Experiment 20000265 PARAMETER Experiment Name: At_Open_Flower_P Parameter: Plant Line Value: WS
  misc_feature: MA Experiment 20000265 PARAMETER Experiment Name: At_Open_Flower_P Parameter: Tissue Value: Closed Flower vs. Whole Plant
  misc_feature: MA Experiment ID: 20000437 Result: Down-regulated in Transcription
  misc_feature: MA Experiment 20000437 PARAMETER Experiment Name: At_Drought_P Parameter: Age (day) Value: 8
  misc_feature: MA Experiment 20000437 PARAMETER Experiment Name: At_Drought_P Parameter: Organism Value: A. thaliana
  misc_feature: MA Experiment 20000437 PARAMETER Experiment Name: At_Drought_P Parameter: Plant Line Value: WS
  misc_feature: MA Experiment 20000437 PARAMETER Experiment Name: At_Drought_P Parameter: Timepoint (hr) Value: 24
  misc_feature: MA Experiment 20000437 PARAMETER Experiment Name: At_Drought_P Parameter: Tissue Value: Whole Plant
  misc_feature: MA Experiment 20000437 PARAMETER Experiment Name: At_Drought_P Parameter: Treatment Value: Drought vs. No Drought
  misc_feature: MA Experiment ID: 20000573 Result: Down-regulated in Transcription
  misc_feature: MA Experiment 20000573 PARAMETER Experiment Name: At_100uM_ABA_Mutants__P Parameter: Organism Value: A. thaliana
  misc_feature: MA Experiment 20000573 PARAMETER Experiment Name: At_100uM_ABA_Mutants__P Parameter: Plant Line Value: CS22 vs. Ler wt
  misc_feature: MA Experiment 20000573 PARAMETER Experiment Name: At_100uM_ABA_Mutants__P Parameter: Timepoint (hr) Value: N/A
  misc_feature: MA Experiment 20000573 PARAMETER Experiment Name: At_100uM_ABA_Mutants__P Parameter: Tissue Value: Whole Plant
  misc_feature: MA Experiment 20000573 PARAMETER Experiment Name: At_100uM_ABA_Mutants__P Parameter: Treatment Value: None
  misc_feature: MA Experiment ID: 20000574 Result: Down-regulated in Transcription
  misc_feature: MA Experiment 20000574 PARAMETER Experiment Name: At_100uM_ABA_Mutants__P Parameter: Organism Value: A. thaliana
  misc_feature: MA Experiment 20000574 PARAMETER Experiment Name: At_100uM_ABA_Mutants__P Parameter: Plant Line Value: CS23 vs. Ler wt
  misc_feature: MA Experiment 20000574 PARAMETER Experiment Name: At_100uM_ABA_Mutants__P Parameter: Timepoint (hr) Value: N/A
  misc_feature: MA Experiment 20000574 PARAMETER Experiment Name: At_100uM_ABA_Mutants__P Parameter: Tissue Value: Whole Plant
  misc_feature: MA Experiment 20000574 PARAMETER Experiment Name: At_100uM_ABA_Mutants__P Parameter: Treatment Value: None
  misc_feature: MA Experiment ID: 20001247 Result: Up-regulated in Transcription
  misc_feature: MA Experiment 20001247 PARAMETER Experiment Name: At_Far-red-induction_P Parameter: Age (day) Value: 7
  misc_feature: MA Experiment 20001247 PARAMETER Experiment Name: At_Far-red-induction_P Parameter: Light Value: Far-red vs. White
  misc_feature: MA Experiment 20001247 PARAMETER Experiment Name: At_Far-red-induction_P Parameter: Organism Value: A. thaliana
  misc_feature: MA Experiment 20001247 PARAMETER Experiment Name: At_Far-red-induction_P Parameter: Plant Line Value: Columbia
  misc_feature: MA Experiment 20001247 PARAMETER Experiment Name: At_Far-red-induction_P Parameter: Timepoint (hr) Value: 1
  misc_feature: MA Experiment 20001247 PARAMETER Experiment Name: At_Far-red-induction_P Parameter: Tissue Value: Whole Plant
agttggcaccacaatctctgctgctcgagtcgcgcgactgtcttccccagggagagagagatccgaatctcgtttcaattctcgatctcttcctctcgatttcgaagaatcttcgtggctatttcttttctattttcactgtgcaatcgaaatcaacaataatttttacgagattacgtttttcactaccgcatagctctccattggatcctcgaagcatagctctctccattgtagaccctgcttcccgagtccttcatatcctctgttttttcttcataaatcaatacgccagctcaattccatggcgcctagatggaaatggaaaggagctgaagcaaaagctcttgcagaacctatttcaaaatcagtctcagagctccagctctctctagccgaaacagagtcctcgggaaccctctcaagttgcaatgtgcttctagcggttgagccagagcaagctgagcttcttgaccgttgttgttttggcagactcgttctatcggcagagaaaatcaagaaatggattcagttatcttttgaagaagctttctttttgcattacaatctcaaatgcatcaaaatctcacttcaaggtcgttgcttggagaatgaagtagacacatggctctacatgaaatcaaaaagaccaaactttccaatgtttttcaaagcttattcacatttacgatcgaagaactgggttttgagatcagggttgcaatacggtgtggattttgtggcataccgtcaccatccatctcttgtccactctgaatactcggttttagttcagtctggtgacagtgatcggttaagagtgtggtcagatatccattgtgctgttaggttaagcggaagtgttgcgaaaacgttgttgactctctacgttaatggtaacttcaaaggagaggatgtgaatctacttgtatgtttggagaacttcacagtggaagaacaaacgataagtagatggagcccagaactcagtcgtgaagatcaatccacaaattcaaaacaacatgttcccaacgtgagtaatttgaacactctttgaggaaccattctcggtaactcatgtctggtttgaatttttcatatcaactttaaattaatttctactctatataaagatgagtagcatttctttc

SEQ ID NO: 106927 - protein, 250 aa, Arabidopsis thaliana
  peptide (1)..(250): Ceres Seq. ID no. 13620888
  misc_feature (118)..(206): Pfam Name: tRNA intron endonuclease, catalytic C-terminal domain Pfam Description: tRNA intron endonuclease, catalytic C-terminal
  misc_feature (1)..(250): Homolog of NCBI NO: 15238643 NR Description: tRNA intron endonuclease - like protein thaliana] >gi|8885574|dbj|BAA97504.1| tRNA intron endonuclease
  misc_feature (1)..(234): Homolog of NCBI NO: 6635256 NR Description: tRNA intron endonuclease [Arabidopsis thaliana]
  misc_feature (1)..(234): Homolog of NCBI NO: 15231186 NR Description: expressed protein [Arabidopsis thaliana]
  misc_feature (70)..(233): Homolog of NCBI NO: 39841065 NR Description: similar to hypothetical protein MGC2776 [Mus
  misc_feature (70)..(233): Homolog of NCBI NO: 39644952 NR Description: MGC2776 protein [Homo sapiens]
  misc_feature (70)..(233): Homolog of NCBI NO: 13376882 NR Description: hypothetical protein MGC2776 [Homo sapiens] Unknown (protein for MGC:2776) [Homo sapiens] Unknown (protein for MGC:4440) [Homo sapiens]
  misc_feature (80)..(233): Homolog of NCBI NO: 22760473 NR Description: unnamed protein product [Homo sapiens]
  misc_feature (71)..(164): Homolog of NCBI NO: 31202529 NR Description: ENSANGP00000010953 [Anopheles gambiae]
  misc_feature (80)..(225): Homolog of NCBI NO: 24584677 NR Description: CG31812-PA [Drosophila melanogaster]
MAPRWKWKGAEAKALAEPISKSVSELQLSLAETESSGTLSSCNVLLAVEPEQAELLDRCCFGRLVLSAEKIKKWIQLSFEEAFFLHYNLKCIKISLQGRCLENEVDTWLYMKSKRPNFPMFFKAYSHLRSKNWVLRSGLQYGVDFVAYRHHPSLVHSEYSVLVQSGDSDRLRVWSDIHCAVRLSGSVAKTLLTLYVNGNFKGEDVNLLVCLENFTVEEQTISRWSPELSREDQSTNSKQHVPNVSNLNTL

SEQ ID NO: 106928 - protein, 140 aa, Arabidopsis thaliana
  peptide (1)..(140): Ceres Seq. ID no. 13620889
  misc_feature (8)..(96): Pfam Name: tRNA intron endonuclease, catalytic C-terminal domain Pfam Description: tRNA intron endonuclease, catalytic C-terminal
  misc_feature (1)..(140): Homolog of NCBI NO: 15238643 NR Description: tRNA intron endonuclease - like protein thaliana] >gi|8885574|dbj|BAA97504.1| tRNA intron endonuclease
  misc_feature (1)..(124): Homolog of NCBI NO: 6635256 NR Description: tRNA intron endonuclease [Arabidopsis thaliana]
  misc_feature (1)..(124): Homolog of NCBI NO: 15231186 NR Description: expressed protein [Arabidopsis thaliana]
  misc_feature (1)..(123): Homolog of NCBI NO: 39841065 NR Description: similar to hypothetical protein MGC2776 [Mus
  misc_feature (1)..(123): Homolog of NCBI NO: 39644952 NR Description: MGC2776 protein [Homo sapiens]
  misc_feature (1)..(123): Homolog of NCBI NO: 13376882 NR Description: hypothetical protein MGC2776 [Homo sapiens] Unknown (protein for MGC:2776) [Homo sapiens] Unknown (protein for MGC:4440) [Homo sapiens]
  misc_feature (1)..(123): Homolog of NCBI NO: 22760473 NR Description: unnamed protein product [Homo sapiens]
  misc_feature (1)..(54): Homolog of NCBI NO: 31202529 NR Description: ENSANGP00000010953 [Anopheles gambiae]
  misc_feature (1)..(115): Homolog of NCBI NO: 24584677 NR Description: CG31812-PA [Drosophila melanogaster]
MKSKRPNFPMFFKAYSHLRSKNWVLRSGLQYGVDFVAYRHHPSLVHSEYSVLVQSGDSDRLRVWSDIHCAVRLSGSVAKTLLTLYVNGNFKGEDVNLLVCLENFTVEEQTISRWSPELSREDQSTNSKQHVPNVSNLNTL

SEQ ID NO: 106929 - protein, 131 aa, Arabidopsis thaliana
  peptide (1)..(131): Ceres Seq. ID no. 13620890
  misc_feature (1)..(87): Pfam Name: tRNA intron endonuclease, catalytic C-terminal domain Pfam Description: tRNA intron endonuclease, catalytic C-terminal
  misc_feature (1)..(131): Homolog of NCBI NO: 15238643 NR Description: tRNA intron endonuclease - like protein thaliana] >gi|8885574|dbj|BAA97504.1| tRNA intron endonuclease
  misc_feature (1)..(115): Homolog of NCBI NO: 6635256 NR Description: tRNA intron endonuclease [Arabidopsis thaliana]
  misc_feature (1)..(115): Homolog of NCBI NO: 15231186 NR Description: expressed protein [Arabidopsis thaliana]
  misc_feature (1)..(114): Homolog of NCBI NO: 39841065 NR Description: similar to hypothetical protein MGC2776 [Mus
  misc_feature (1)..(114): Homolog of NCBI NO: 39644952 NR Description: MGC2776 protein [Homo sapiens]
  misc_feature (1)..(114): Homolog of NCBI NO: 13376882 NR Description: hypothetical protein MGC2776 [Homo sapiens] Unknown (protein for MGC:2776) [Homo sapiens] Unknown (protein for MGC:4440) [Homo sapiens]
  misc_feature (1)..(114): Homolog of NCBI NO: 22760473 NR Description: unnamed protein product [Homo sapiens]
  misc_feature (1)..(45): Homolog of NCBI NO: 31202529 NR Description: ENSANGP00000010953 [Anopheles gambiae]
  misc_feature (1)..(106): Homolog of NCBI NO: 24584677 NR Description: CG31812-PA [Drosophila melanogaster]
MFFKAYSHLRSKNWVLRSGLQYGVDFVAYRHHPSLVHSEYSVLVQSGDSDRLRVWSDIHCAVRLSGSVAKTLLTLYVNGNFKGEDVNLLVCLENFTVEEQTISRWSPELSREDQSTNSKQHVPNVSNLNTL

SEQ ID NO: 106930 - DNA, 915 bp, Arabidopsis thaliana
  misc_feature (1)..(915): Ceres Seq. ID no. 13620903
  misc_feature: MA Experiment ID: 20000307 Result: Up-regulated in Transcription
  misc_feature: MA Experiment 20000307 PARAMETER Experiment Name: At_Germinating_Seeds_Sub_P Parameter: Age (hr) Value: 24 vs. 0
  misc_feature: MA Experiment 20000307 PARAMETER Experiment Name: At_Germinating_Seeds_Sub_P Parameter: Organism Value: A. thaliana
  misc_feature: MA Experiment 20000307 PARAMETER Experiment Name: At_Germinating_Seeds_Sub_P Parameter: Plant Line Value: WS
  misc_feature: MA Experiment 20000307 PARAMETER Experiment Name: At_Germinating_Seeds_Sub_P Parameter: Tissue Value: Germinating Seeds
gaaactctctcttctttttttgttcttcttctcattggttgatcgatacgcgctaaatttctagaaatctcagatccataaaattttccgaggagagattctctaatcagagaacctcacaatggccgcatatagagccgacgacgagtacgattacctcttcaaagttgtgttaattggagactccggcgttggaaaatccaacctcctttctcgattcacgcgcaacgagttcagtctcgaatctaaatccacgatcggtgtagaattcgccactcgtagcatccatgtcgatgataagatcgtcaaagctcagatttgggataccgctggccaagaaagatatcgagcaatcacaagtgcatattacagaggagctgtaggagcgttgcttgtgtacgatgtcacaagacatgtgacgtttgagaacgttgaaagatggttaaaggagcttcgagatcatacagatgccaatatcgtcatcatgttcgttgggaacaaagcggatctccgtcacctacgagctgtttcgactgaagacgctaaggctttcgctgagagagagaacactttcttcatggagacatcagctctcgaatcgatgaacgtcgagaatgctttcactgaagtactttctcagatttaccgtgtggttagccggaaagcgttggatataggagacgacccggctgctcttcccaaaggacagaccatcaatgtcggatcgaaagacgatgtctctgcggtgaaaaaggttggttgctgctcaaattgatggtacgttcgactttcaagaatcggtctcacggtcgatcttgttcatttcttttttgttgttatatgtgaagatcttgttcatttatttgtataatcacacaccttaaaccatattgaataccactgcgtttccatatc

SEQ ID NO: 106931 - protein, 217 aa, Arabidopsis thaliana
  peptide (1)..(217): Ceres Seq. ID no. 13620904
  misc_feature (15)..(176): Pfam Name: Ras family Pfam Description: Ras family
  misc_feature (1)..(217): Homolog of NCBI NO: 15239462 NR Description: GTP-binding protein, putative [Arabidopsis
  misc_feature (1)..(217): Homolog of NCBI NO: 15232477 NR Description: Ras family GTP-binding protein, putative
  misc_feature (1)..(216): Homolog of NCBI NO: 7438432 NR Description: GTP-binding protein - garden pea
  misc_feature (4)..(217): Homolog of NCBI NO: 3024504 NR Description: RAS-RELATED PROTEIN RAB11B
  misc_feature (11)..(216): Homolog of NCBI NO: 7438389 NR Description: GTP-binding protein, ras-like (clone vfa-ypt3a) - bean (fragment) >gi|452357|emb|CAA82708.1| guanine nucleotide
  misc_feature (1)..(217): Homolog of NCBI NO: 1370156 NR Description: RAB11H [Lotus japonicus]
  misc_feature (1)..(216): Homolog of NCBI NO: 15218719 NR Description: GTP-binding protein, putative [Arabidopsis >gi|6560749|gb|AAF16749.1|AC010155_2 F3M18.2 [Arabidopsis
  misc_feature (1)..(216): Homolog of NCBI NO: 15233873 NR Description: GTP-binding protein, putative [Arabidopsis
  misc_feature (1)..(216): Homolog of NCBI NO: 15226182 NR Description: GTP-binding protein, putative [Arabidopsis
  misc_feature (1)..(216): Homolog of NCBI NO: 10764861 NR Description: F1K23.21 [Arabidopsis thaliana]
MAAYRADDEYDYLFKVVLIGDSGVGKSNLLSRFTRNEFSLESKSTIGVEFATRSIHVDDKIVKAQIWDTAGQERYRAITSAYYRGAVGALLVYDVTRHVTFENVERWLKELRDHTDANIVIMFVGNKADLRHLRAVSTEDAKAFAERENTFFMETSALESMNVENAFTEVLSQIYRVVSRKALDIGDDPAALPKGQTINVGSKDDVSAVKKVGCCSN

SEQ ID NO: 106932 - DNA, 2413 bp, Arabidopsis thaliana
  misc_feature (1)..(2413): Ceres Seq. ID no. 13620905
  misc_feature: MA Experiment ID: 20000182 Result: Up-regulated in Transcription
  misc_feature: MA Experiment 20000182 PARAMETER Experiment Name: At_2mM_SA_P Parameter: Age (day) Value: 14
  misc_feature: MA Experiment 20000182 PARAMETER Experiment Name: At_2mM_SA_P Parameter: Organism Value: A. thaliana
  misc_feature: MA Experiment 20000182 PARAMETER Experiment Name: At_2mM_SA_P Parameter: Plant Line Value: WS
  misc_feature: MA Experiment 20000182 PARAMETER Experiment Name: At_2mM_SA_P Parameter: Timepoint (hr) Value: 6
  misc_feature: MA Experiment 20000182 PARAMETER Experiment Name: At_2mM_SA_P Parameter: Tissue Value: Aerial
  misc_feature: MA Experiment 20000182 PARAMETER Experiment Name: At_2mM_SA_P Parameter: Treatment Value: 2mM SA vs. No Treatment
  misc_feature: MA Experiment ID: 20000184 Result: Down-regulated in Transcription
  misc_feature: MA Experiment 20000184 PARAMETER Experiment Name: At_Shoots__P Parameter: Age (day) Value: 7
  misc_feature: MA Experiment 20000184 PARAMETER Experiment Name: At_Shoots__P Parameter: Tissue Value: Shoots vs. Whole Plant
  misc_feature: MA Experiment ID: 20000185 Result: Down-regulated in Transcription
  misc_feature: MA Experiment 20000185 PARAMETER Experiment Name: At_Roots__P Parameter: Age (day) Value: 7 vs. 21
  misc_feature: MA Experiment 20000185 PARAMETER Experiment Name: At_Roots__P Parameter: Organism Value: A. thaliana
  misc_feature: MA Experiment 20000185 PARAMETER Experiment Name: At_Roots__P Parameter: Tissue Value: Roots vs. Whole Plant
  misc_feature: MA Experiment ID: 20000234 Result: Down-regulated in Transcription
  misc_feature: MA Experiment 20000234 PARAMETER Experiment Name: At_Siliques_P Parameter: Age (day) Value: 21
  misc_feature: MA Experiment 20000234 PARAMETER Experiment Name: At_Siliques_P Parameter: Organism Value: A. thaliana
  misc_feature: MA Experiment 20000234 PARAMETER Experiment Name: At_Siliques_P Parameter: Plant Line Value: WS
  misc_feature: MA Experiment 20000234 PARAMETER Experiment Name: At_Siliques_P Parameter: Tissue Value: Less Than 5mm Siliques vs. Whole Plant
  misc_feature: MA Experiment ID: 20000264 Result: Down-regulated in Transcription
  misc_feature: MA Experiment 20000264 PARAMETER Experiment Name: At_Open_Flower_P Parameter: Age (day) Value: 21
  misc_feature: MA Experiment 20000264 PARAMETER Experiment Name: At_Open_Flower_P Parameter: Plant Line Value: WS
  misc_feature: MA Experiment 20000264 PARAMETER Experiment Name: At_Open_Flower_P Parameter: Tissue Value: Open Flower vs. Whole Plant
  misc_feature: MA Experiment ID: 20000265 Result: Down-regulated in Transcription
  misc_feature: MA Experiment 20000265 PARAMETER Experiment Name: At_Open_Flower_P Parameter: Age (day) Value: 21
  misc_feature: MA Experiment 20000265 PARAMETER Experiment Name: At_Open_Flower_P Parameter: Plant Line Value: WS
  misc_feature: MA Experiment 20000265 PARAMETER Experiment Name: At_Open_Flower_P Parameter: Tissue Value: Closed Flower vs. Whole Plant
  misc_feature: MA Experiment ID: 20000286 Result: Down-regulated in Transcription
  misc_feature: MA Experiment 20000286 PARAMETER Experiment Name: At_Open_Flower_P Parameter: Age (day) Value: 21
  misc_feature: MA Experiment 20000286 PARAMETER Experiment Name: At_Open_Flower_P Parameter: Plant Line Value: WS
  misc_feature: MA Experiment 20000286 PARAMETER Experiment Name: At_Open_Flower_P Parameter: Tissue Value: Half Open vs. Whole Plant
  misc_feature: MA Experiment ID: 20000438 Result: Down-regulated in Transcription
  misc_feature: MA Experiment 20000438 PARAMETER Experiment Name: At_Shoots__P Parameter: Age (day) Value: 14
  misc_feature: MA Experiment 20000438 PARAMETER Experiment Name: At_Shoots__P Parameter: Tissue Value: Shoots vs. Whole Plant
  misc_feature: MA Experiment ID: 20000439 Result: Down-regulated in Transcription
  misc_feature: MA Experiment 20000439 PARAMETER Experiment Name: At_Roots__P Parameter: Age (day) Value: 14 vs. 21
  misc_feature: MA Experiment 20000439 PARAMETER Experiment Name: At_Roots__P Parameter: Organism Value: A. thaliana
  misc_feature: MA Experiment 20000439 PARAMETER Experiment Name: At_Roots__P Parameter: Tissue Value: Roots vs. Whole Plant
  misc_feature: MA Experiment ID: 20000527 Result: Down-regulated in Transcription
  misc_feature: MA Experiment 20000527 PARAMETER Experiment Name: At_10percent_PEG_P Parameter: Age (day) Value: 20
  misc_feature: MA Experiment 20000527 PARAMETER Experiment Name: At_10percent_PEG_P Parameter: Organism Value: A. thaliana
  misc_feature: MA Experiment 20000527 PARAMETER Experiment Name: At_10percent_PEG_P Parameter: Plant Line Value: WS
  misc_feature: MA Experiment 20000527 PARAMETER Experiment Name: At_10percent_PEG_P Parameter: Timepoint (day) Value: 20
  misc_feature: MA Experiment 20000527 PARAMETER Experiment Name: At_10percent_PEG_P Parameter: Tissue Value: Whole Plant
  misc_feature: MA Experiment 20000527 PARAMETER Experiment Name: At_10percent_PEG_P Parameter: Treatment Value: 10percent PEG vs. No Treatment
  misc_feature: MA Experiment ID: 20000794 Result: Down-regulated in Transcription
  misc_feature: MA Experiment 20000794 PARAMETER Experiment Name: At_Petals_P Parameter: Age (day) Value: 23-25 days
  misc_feature: MA Experiment 20000794 PARAMETER Experiment Name: At_Petals_P Parameter: Plant Line Value: WS
  misc_feature: MA Experiment 20000794 PARAMETER Experiment Name: At_Petals_P Parameter: Tissue Value: Petals vs. Whole plant
  misc_feature: MA Experiment ID: 20001555 Result: Down-regulated in Transcription
  misc_feature: MA Experiment 20001555 PARAMETER Experiment Name: At_Drought_Soil_Dry_P Parameter: Age (day) Value: 24
  misc_feature: MA Experiment 20001555 PARAMETER Experiment Name: At_Drought_Soil_Dry_P Parameter: Organism Value: A. thaliana
  misc_feature: MA Experiment 20001555 PARAMETER Experiment Name: At_Drought_Soil_Dry_P Parameter: Plant Line Value: WS
  misc_feature: MA Experiment 20001555 PARAMETER Experiment Name: At_Drought_Soil_Dry_P Parameter: Post Timepoint (hr) Value: None
  misc_feature: MA Experiment 20001555 PARAMETER Experiment Name: At_Drought_Soil_Dry_P Parameter: Post-Treatment Value: None
  misc_feature: MA Experiment 20001555 PARAMETER Experiment Name: At_Drought_Soil_Dry_P Parameter: Timepoint (day) Value: 10
  misc_feature: MA Experiment 20001555 PARAMETER Experiment Name: At_Drought_Soil_Dry_P Parameter: Treatment Value: Drought vs. No Drought
  misc_feature: MA Experiment ID: 20001556 Result: Down-regulated in Transcription
  misc_feature: MA Experiment 20001556 PARAMETER Experiment Name: At_Drought_Soil_Dry_P Parameter: Age (day) Value: 26
  misc_feature: MA Experiment 20001556 PARAMETER Experiment Name: At_Drought_Soil_Dry_P Parameter: Organism Value: A. thaliana
  misc_feature: MA Experiment 20001556 PARAMETER Experiment Name: At_Drought_Soil_Dry_P Parameter: Plant Line Value: WS
  misc_feature: MA Experiment 20001556 PARAMETER Experiment Name: At_Drought_Soil_Dry_P Parameter: Post Timepoint (hr) Value: None
  misc_feature: MA Experiment 20001556 PARAMETER Experiment Name: At_Drought_Soil_Dry_P Parameter: Post-Treatment Value: None
  misc_feature: MA Experiment 20001556 PARAMETER Experiment Name: At_Drought_Soil_Dry_P Parameter: Timepoint (day) Value: 12
  misc_feature: MA Experiment 20001556 PARAMETER Experiment Name: At_Drought_Soil_Dry_P Parameter: Treatment Value: Drought vs. No Drought
  misc_feature: MA Experiment ID: 20001557 Result: Down-regulated in Transcription
  misc_feature: MA Experiment 20001557 PARAMETER Experiment Name: At_Drought_Soil_Dry_P Parameter: Age (day) Value: 27
  misc_feature: MA Experiment 20001557 PARAMETER Experiment Name: At_Drought_Soil_Dry_P Parameter: Organism Value: A. thaliana
  misc_feature: MA Experiment 20001557 PARAMETER Experiment Name: At_Drought_Soil_Dry_P Parameter: Plant Line Value: WS
  misc_feature: MA Experiment 20001557 PARAMETER Experiment Name: At_Drought_Soil_Dry_P Parameter: Post Timepoint (hr) Value: 3
  misc_feature: MA Experiment 20001557 PARAMETER Experiment Name: At_Drought_Soil_Dry_P Parameter: Post-Treatment Value: Re-Water vs. No Drought
  misc_feature: MA Experiment 20001557 PARAMETER Experiment Name: At_Drought_Soil_Dry_P Parameter: Timepoint (day) Value: 13
  misc_feature: MA Experiment 20001557 PARAMETER Experiment Name: At_Drought_Soil_Dry_P Parameter: Treatment Value: Drought vs. No Drought
  misc_feature: MA Experiment ID: 20001558 Result: Down-regulated in Transcription
  misc_feature: MA Experiment 20001558 PARAMETER Experiment Name: At_Drought_Soil_Dry_P Parameter: Age (day) Value: 27
  misc_feature: MA Experiment 20001558 PARAMETER Experiment Name: At_Drought_Soil_Dry_P Parameter: Organism Value: A. thaliana
  misc_feature: MA Experiment 20001558 PARAMETER Experiment Name: At_Drought_Soil_Dry_P Parameter: Plant Line Value: WS
  misc_feature: MA Experiment 20001558 PARAMETER Experiment Name: At_Drought_Soil_Dry_P Parameter: Post Timepoint (hr) Value: 6
  misc_feature: MA Experiment 20001558 PARAMETER Experiment Name: At_Drought_Soil_Dry_P Parameter: Post-Treatment Value: Re-Water vs. No Drought
  misc_feature: MA Experiment 20001558 PARAMETER Experiment Name: At_Drought_Soil_Dry_P Parameter: Timepoint (day) Value: 13
  misc_feature: MA Experiment 20001558 PARAMETER Experiment Name: At_Drought_Soil_Dry_P Parameter: Treatment Value: Drought vs. No Drought
  misc_feature: MA Experiment ID: 20001559 Result: Down-regulated in Transcription
  misc_feature: MA Experiment 20001559 PARAMETER Experiment Name: At_Drought_Soil_Dry_P Parameter: Age (day) Value: 28
  misc_feature: MA Experiment 20001559 PARAMETER Experiment Name: At_Drought_Soil_Dry_P Parameter: Organism Value: A. thaliana
  misc_feature: MA Experiment 20001559 PARAMETER Experiment Name: At_Drought_Soil_Dry_P Parameter: Plant Line Value: WS
  misc_feature: MA Experiment 20001559 PARAMETER Experiment Name: At_Drought_Soil_Dry_P Parameter: Post Timepoint (hr) Value: 29
  misc_feature: MA Experiment 20001559 PARAMETER Experiment Name: At_Drought_Soil_Dry_P Parameter: Post-Treatment Value: Re-Water vs. No Drought
  misc_feature: MA Experiment 20001559 PARAMETER Experiment Name: At_Drought_Soil_Dry_P Parameter: Timepoint (day) Value: 14
  misc_feature: MA Experiment 20001559 PARAMETER Experiment Name: At_Drought_Soil_Dry_P Parameter: Treatment Value: Drought vs. No Drought
  misc_feature: MA Experiment ID: 20001560 Result: Down-regulated in Transcription
  misc_feature: MA Experiment 20001560 PARAMETER Experiment Name: At_Drought_Soil_Dry_P Parameter: Age (day) Value: 28
  misc_feature: MA Experiment 20001560 PARAMETER Experiment Name: At_Drought_Soil_Dry_P Parameter: Organism Value: A. thaliana
  misc_feature: MA Experiment 20001560 PARAMETER Experiment Name: At_Drought_Soil_Dry_P Parameter: Plant Line Value: WS
  misc_feature: MA Experiment 20001560 PARAMETER Experiment Name: At_Drought_Soil_Dry_P Parameter: Post Timepoint (hr) Value: None
  misc_feature: MA Experiment 20001560 PARAMETER Experiment Name: At_Drought_Soil_Dry_P Parameter: Post-Treatment Value: None
  misc_feature: MA Experiment 20001560 PARAMETER Experiment Name: At_Drought_Soil_Dry_P Parameter: Timepoint (day) Value: 14
  misc_feature: MA Experiment 20001560 PARAMETER Experiment Name: At_Drought_Soil_Dry_P Parameter: Treatment Value: Drought vs. No Drought
aaacacacacaaccacaatgtagtctatttgttcctacccttaaaagtctctgttggcttttcaaaacctggtccattgagtcattgactcagagagttagaactaaaaagtctttatatttacacatatacgcagatttaatctctacatctttgcttcagtaaaatgggttctctttcttgttcaataatccatctggttcttattctgcaactacaaacatttttcgttttttctcaaaacatcagaaacggctctgttcctgtcggagaatctctcaccgcttcagagtcccaacaaatctctagttcatggcgttcaccttccggtgactttgctttcgggttccgcaagatccaaccaaacgacggtttcactctctccatttggttcgacaagatttctgacaagaccatcgtgtggcacgcacaagccgtcaacacaaccaccggtcttgtccctaatggttcgaaggttacattaactgcagatggcggtctggttatcgctgaccctcgaggtcaggagctgtggagagcgttgagtggtggctctgtttctcgagggcgatttactgacgacggaaacttcgttcttttcagagatgggtcagaagattctgacgaggttctatggtcgagctttgaaaatcccaccgacactctgttacctaatcagaatatagaagttggaaggaatctgtcatcacgtaggacagagacgagcttcaaaaaaggaagattcagcctacgtctagaggatgacggaaatcttcagcttcactctctcaacgccgagactgcctcagaatcagacatatactctcagtactacgaaagtaataccaacgatccaaacaaccccgggattcaattagttttcaaccagtcaggggaaatatatgttcttcaaaggaacaattcaagattcgtcgtcaaagatagagatccggatttttctatcgccgcgccgttctacatttcgacgggccccgatgatgcacttgggaatatggcttgtgggtataataatatatgtagtttaggaaacaacaagaggccaaaatgtgagtgtcctgagaggtttgtgttaaaggatccgagcaatgagtatggtgattgtttgccagattttgagatgcagacttgtagaccagagaaccaaaccgcaaactcagatgtgaatctttacgagttcattactttagagaagacgaattggccgtttggggattatgagagttatgccaactatgatgaagaaagatgtaaagcttcttgtcttagcgattgtttatgtgctgcggttatttttggaacaaatcgggatctaaaatgttggaagaagaagtttcccttgtctcacggtgaaagatctccacgtggtgatagtgatacattcattaaggttcgaaaccgctccatcgcggatgttccagttaccggaaacagagcgaaaaaacttgactgggtctttacatatggagagcttgcagaggctacaagagatttcacggaagagcttggaagaggagcctttggtatagtttacaaaggatatttagaagttgccggtggttctgaagttaccgtggctgtgaagaaactagatcgtcttgatttagataacgaaaaagagttcaagaatgaggttaaagtgataggtcagattcaccacaagaacctagtgaggctcattggcttctgcaacgaaggacagagccagatgatcgtctatgagtttttaccacaagggacgctagccaattttctcttcaggcgtccgaggccgagctgggaagatagaaagaatattgcggtggccattgctcgtggaatcttgtatctacatgaagagtgcagcgagcagatcatacactgtgacataaaaccgcagaacatactcctagatgagtattacactcctcggatctcggattttggtctagcaaagcttttgttgatgaaccaaacgtatacgctcactaacatccgtggaacaaaagggtatgtggcccctgaatggttcaggaatagccccattacatccaaagtagatgtttatagctatggagtaatgcttttagaaatcgtgtgctgcaagaaagccgtcgaccttgaggataacgtgattctcatcaattgggcttacgattgttttcgacaaggaaggttggaagatctgactgaggacgattcagaggcaatgaatgacatggaaactgtggagagatatgtgaaaatagcgatatggtgtatacaagaagagcatgggatgagacctaacatgagaaatgttacacagatgcttgaaggtgtgattcaagtttttgatcctccaaatccgtctccttatagcactttcacttggtctgatgaatctttgtctagtgatccagtgtcacttgtttga

SEQ ID NO: 106933 - protein, 748 aa, Arabidopsis thaliana
  peptide (1)..(748): Ceres Seq. ID no. 13620906
  misc_feature (81)..(189): Pfam Name: D-mannose binding lectin Pfam Description: D-mannose binding lectin
  misc_feature (276)..(436): Homolog of NCBI NO: 282881 NR Description: S-receptor kinase (EC 2.7.1.-) homolog 2
  misc_feature (437)..(730): Homolog of NCBI NO: 38344472 NR Description: OSJNBa0022H21.7 [Oryza sativa (japonica
  misc_feature (10)..(246): Homolog of NCBI NO: 38344472 NR Description: OSJNBa0022H21.7 [Oryza sativa (japonica
  misc_feature (222)..(436): Homolog of NCBI NO: 38344472 NR Description: OSJNBa0022H21.7 [Oryza sativa (japonica
  misc_feature (436)..(730): Homolog of NCBI NO: 38345183 NR Description: OSJNBb0005B05.6 [Oryza sativa (japonica
  misc_feature (14)..(280): Homolog of NCBI NO: 38345183 NR Description: OSJNBb0005B05.6 [Oryza sativa (japonica
  misc_feature (280)..(436): Homolog of NCBI NO: 38345183 NR Description: OSJNBb0005B05.6 [Oryza sativa (japonica
  misc_feature (437)..(728): Homolog of NCBI NO: 38345185 NR Description: OSJNBb0005B05.8 [Oryza sativa (japonica
  misc_feature (12)..(255): Homolog of NCBI NO: 38345185 NR Description: OSJNBb0005B05.8 [Oryza sativa (japonica
  misc_feature (280)..(436): Homolog of NCBI NO: 38345185 NR Description: OSJNBb0005B05.8 [Oryza sativa (japonica
MGSLSCSIIHLVLILQLQTFFVFSQNIRNGSVPVGESLTASESQQISSSWRSPSGDFAFGFRKIQPNDGFTLSIWFDKISDKTIVWHAQAVNTTTGLVPNGSKVTLTADGGLVIADPRGQELWRALSGGSVSRGRFTDDGNFVLFRDGSEDSDEVLWSSFENPTDTLLPNQNIEVGRNLSSRRTETSFKKGRFSLRLEDDGNLQLHSLNAETASESDIYSQYYESNTNDPNNPGIQLVFNQSGEIYVLQRNNSRFVVKDRDPDFSIAAPFYISTGPDDALGNMACGYNNICSLGNNKRPKCECPERFVLKDPSNEYGDCLPDFEMQTCRPENQTANSDVNLYEFITLEKTNWPFGDYESYANYDEERCKASCLSDCLCAAVIFGTNRDLKCWKKKFPLSHGERSPRGDSDTFIKVRNRSIADVPVTGNRAKKLDWVFTYGELAEATRDFTEELGRGAFGIVYKGYLEVAGGSEVTVAVKKLDRLDLDNEKEFKNEVKVIGQIHHKNLVRLIGFCNEGQSQMIVYEFLPQGTLANFLFRRPRPSWEDRKNIAVAIARGILYLHEECSEQIIHCDIKPQNILLDEYYTPRISDFGLAKLLLMNQTYTLTNIRGTKGYVAPEWFRNSPITSKVDVYSYGVMLLEIVCCKKAVDLEDNVILINWAYDCFRQGRLEDLTEDDSEAMNDMETVERYVKIAIWCIQEEHGMRPNMRNVTQMLEGVIQVFDPPNPSPYSTFTWSDESLSSDPVSLV

SEQ ID NO: 106934 - protein, 466 aa, Arabidopsis thaliana
  peptide (1)..(466): Ceres Seq. ID no. 13620907
  misc_feature (1)..(154): Homolog of NCBI NO: 282881 NR Description: S-receptor kinase (EC 2.7.1.-) homolog 2
  misc_feature (155)..(448): Homolog of NCBI NO: 38344472 NR Description: OSJNBa0022H21.7 [Oryza sativa (japonica
  misc_feature (1)..(154): Homolog of NCBI NO: 38344472 NR Description: OSJNBa0022H21.7 [Oryza sativa (japonica
  misc_feature (154)..(448): Homolog of NCBI NO: 38345183 NR Description: OSJNBb0005B05.6 [Oryza sativa (japonica
  misc_feature (1)..(154): Homolog of NCBI NO: 38345183 NR Description: OSJNBb0005B05.6 [Oryza sativa (japonica
  misc_feature (155)..(446): Homolog of NCBI NO: 38345185 NR Description: OSJNBb0005B05.8 [Oryza sativa (japonica
  misc_feature (1)..(154): Homolog of NCBI NO: 38345185 NR Description: OSJNBb0005B05.8 [Oryza sativa (japonica
  misc_feature (155)..(448): Homolog of NCBI NO: 38345182 NR Description: OSJNBb0005B05.5 [Oryza sativa (japonica
  misc_feature (1)..(154): Homolog of NCBI NO: 38345182 NR Description: OSJNBb0005B05.5 [Oryza sativa (japonica
  misc_feature (155)..(448): Homolog of NCBI NO: 38344471 NR Description: OSJNBa0022H21.6 [Oryza sativa (japonica
MACGYNNICSLGNNKRPKCECPERFVLKDPSNEYGDCLPDFEMQTCRPENQTANSDVNLYEFITLEKTNWPFGDYESYANYDEERCKASCLSDCLCAAVIFGTNRDLKCWKKKFPLSHGERSPRGDSDTFIKVRNRSIADVPVTGNRAKKLDWVFTYGELAEATRDFTEELGRGAFGIVYKGYLEVAGGSEVTVAVKKLDRLDLDNEKEFKNEVKVIGQIHHKNLVRLIGFCNEGQSQMIVYEFLPQGTLANFLFRRPRPSWEDRKNIAVAIARGILYLHEECSEQIIHCDIKPQNILLDEYYTPRISDFGLAKLLLMNQTYTLTNIRGTKGYVAPEWFRNSPITSKVDVYSYGVMLLEIVCCKKAVDLEDNVILINWAYDCFRQGRLEDLTEDDSEAMNDMETVERYVKIAIWCIQEEHGMRPNMRNVTQMLEGVIQVFDPPNPSPYSTFTWSDESLSSDPVSLV

SEQ ID NO: 106935 - protein, 424 aa, Arabidopsis thaliana
  peptide (1)..(424): Ceres Seq. ID no. 13620908
  misc_feature (1)..(112): Homolog of NCBI NO: 282881 NR Description: S-receptor kinase (EC 2.7.1.-) homolog 2
  misc_feature (113)..(406): Homolog of NCBI NO: 38344472 NR Description: OSJNBa0022H21.7 [Oryza sativa (japonica
  misc_feature (1)..(112): Homolog of NCBI NO: 38344472 NR Description: OSJNBa0022H21.7 [Oryza sativa (japonica
  misc_feature (112)..(406): Homolog of NCBI NO: 38345183 NR Description: OSJNBb0005B05.6 [Oryza sativa (japonica
  misc_feature (1)..(112): Homolog of NCBI NO: 38345183 NR Description: OSJNBb0005B05.6 [Oryza sativa (japonica
  misc_feature (113)..(404): Homolog of NCBI NO: 38345185 NR Description: OSJNBb0005B05.8 [Oryza sativa (japonica
  misc_feature (1)..(112): Homolog of NCBI NO: 38345185 NR Description: OSJNBb0005B05.8 [Oryza sativa (japonica
  misc_feature (113)..(406): Homolog of NCBI NO: 38345182 NR Description: OSJNBb0005B05.5 [Oryza sativa (japonica
  misc_feature (1)..(112): Homolog of NCBI NO: 38345182 NR Description: OSJNBb0005B05.5 [Oryza sativa (japonica
  misc_feature (113)..(406): Homolog of NCBI NO: 38344471 NR Description: OSJNBa0022H21.6 [Oryza sativa (japonica
MQTCRPENQTANSDVNLYEFITLEKTNWPFGDYESYANYDEERCKASCLSDCLCAAVIFGTNRDLKCWKKKFPLSHGERSPRGDSDTFIKVRNRSIADVPVTGNRAKKLDWVFTYGELAEATRDFTEELGRGAFGIVYKGYLEVAGGSEVTVAVKKLDRLDLDNEKEFKNEVKVIGQIHHKNLVRLIGFCNEGQSQMIVYEFLPQGTLANFLFRRPRPSWEDRKNIAVAIARGILYLHEECSEQIIHCDIKPQNILLDEYYTPRISDFGLAKLLLMNQTYTLTNIRGTKGYVAPEWFRNSPITSKVDVYSYGVMLLEIVCCKKAVDLEDNVILINWAYDCFRQGRLEDLTEDDSEAMNDMETVERYVKIAIWCIQEEHGMRPNMRNVTQMLEGVIQVFDPPNPSPYSTFTWSDESLSSDPVSLV

SEQ ID NO: 106936 - DNA, 1652 bp, Arabidopsis thaliana
  misc_feature (1)..(1652): Ceres Seq. ID no. 13620909
  misc_feature: MA Experiment ID: 108434 Result: Up-regulated in Transcription
  misc_feature: MA Experiment 108434 PARAMETER Experiment Name: At_Root_Tips_cDNA_P Parameter: Tissue Value: Root Tips
  misc_feature: MA Experiment ID: 108488 Result: Up-regulated in Transcription
  misc_feature: MA Experiment ID: 20001557 Result: Up-regulated in Transcription
  misc_feature: MA Experiment 20001557 PARAMETER Experiment Name: At_Drought_Soil_Dry_P Parameter: Age (day) Value: 27
  misc_feature: MA Experiment 20001557 PARAMETER Experiment Name: At_Drought_Soil_Dry_P Parameter: Organism Value: A. thaliana
  misc_feature: MA Experiment 20001557 PARAMETER Experiment Name: At_Drought_Soil_Dry_P Parameter: Plant Line Value: WS
  misc_feature: MA Experiment 20001557 PARAMETER Experiment Name: At_Drought_Soil_Dry_P Parameter: Post Timepoint (hr) Value: 3
  misc_feature: MA Experiment 20001557 PARAMETER Experiment Name: At_Drought_Soil_Dry_P Parameter: Post-Treatment Value: Re-Water vs. No Drought
  misc_feature: MA Experiment 20001557 PARAMETER Experiment Name: At_Drought_Soil_Dry_P Parameter: Timepoint (day) Value: 13
  misc_feature: MA Experiment 20001557 PARAMETER Experiment Name: At_Drought_Soil_Dry_P Parameter: Treatment Value: Drought vs. No Drought
agatctctctttgtccttctctctccctcagatcactatggcacagcaggaagctagtccttcccctggtgctgaggttgttggtcgtgcctttgtggagcaatactatcatattcttcaccaatctcccggtttagttcatcggttttatcaagattcgagctttttaacccgacctgatgttaccggtgctgtgactactgtcacaactatgcaagcgatcaacgacaagattctgtcgttgaaatatgaagactacacggctgagatagaaactgctgatgctcaggagtctcatgagagaggtgttattgtgctggttacaggacgcttaaccgggaacgataatgttaggaagaagtttagtcaatcttttttcttggctccacaagacaaaggatactttgtcttaaacgacgtgtttcgattccttgaggagaaagaggtgactgcacaagcccgctctgtccccatcaatggaaccactagggatgttcaggctcctattgaaccagaacgtgttgttgttagtcacgagcccgaggtagaacccgagccagttgcttctatcgaggaagaagatcttgacaatgtggcggaagtgtatgatccttctgataaagatgaaggagttgttgttgacgttgagcctattgaacctcccactcaaataagtcataatgaaatcttatcagtgcctcaaggagatgctcctaagcattcttatgcttcaatcctcaagcagatgaaaagcagtccagcaccaacaacacacgttgctagaaacaagccaagaccagctccagtcaaccagaagctgaccgcgcctcctgctgagcctgcagcaagacccgaggcttcagctcatgagaatgttccgaatagtagccatgttgatgtggaagatgatggtcattcgatttatgttcgaaatttgccgtttgactccacaccaacacaacttgaagaggtgttcaagaactttggtgcaatcaagcatgaggggattcaagtcagaagcaacaagcaaggtttctgttttggttttgtggaatttgaaacatctagcggaaagcaaagtgccctcgaggcctcaccagttacaattggagatcgtcaagctgttgtagaggagaagaaaacaaatagtcgaggaggaggcaacaatggaggtagcaggggaaggtacttttccggaagaggaagtttccgaaatgaaagcttcaaaggaggacgcggtggtgggggaagaggaggctatggaagaggaggaggtgagttttctggtagaccaaagagctcaaacccacgaaatggaggagaaggttaccaaagggttcctcaaaacggaggaggtggaagaggaggccgcggagaaggaggtcgtggtggagctcgaggtggtggttcatcttgactttgcttttaacgctcctctacaagagagtagttttaatttttgttttgcgtctttctttttgcctactacttgagttgatgtggtattggcttttttgtcggtctagtttttcaatattcttgctttttttcctctcttttttgtttttcatctttcaatctttctttggggtaatgtactcttcataaacaaacattcaatttcataaggaatccattatagagttgtgttc

SEQ ID NO: 106937 - protein, 471 aa, Arabidopsis thaliana
  peptide (1)..(471): Ceres Seq. ID no. 13620910
  misc_feature (27)..(143): Pfam Name: Nuclear transport factor 2 (NTF2) domain Pfam Description: Nuclear transport factor 2 (NTF2) domain
  misc_feature (13)..(471): Homolog of NCBI NO: 30697452 NR Description: NTF2-containing RNA-binding protein, putative
  misc_feature (13)..(471): Homolog of NCBI NO: 21553535 NR Description: ras-GTPase-activating protein SH3-domain binding
  misc_feature (13)..(471): Homolog of NCBI NO: 30697455 NR Description: NTF2-containing RNA-binding protein, putative
  misc_feature (14)..(471): Homolog of NCBI NO: 30687772 NR Description: NTF2-containing RNA-binding protein, putative thaliana] >gi|17979475|gb|AAL50074.1| AT3g25150/MJL12_9 thaliana] >gi|21360395|gb|AAM47313.1| AT3g25150/MJL12_9
  misc_feature (27)..(471): Homolog of NCBI NO: 9294171 NR Description: RNA-binding protein-like [Arabidopsis thaliana]
  misc_feature (13)..(469): Homolog of NCBI NO: 31126693 NR Description: putative GAP SH3 binding protein [Oryza sativa
  misc_feature (13)..(450): Homolog of NCBI NO: 18394029 NR Description: NTF2-containing RNA-binding protein, putative
  misc_feature (9)..(279): Homolog of NCBI NO: 21742151 NR Description: OSJNBa0069D17.2 [Oryza sativa (japonica
  misc_feature (398)..(468): Homolog of NCBI NO: 21742151 NR Description: OSJNBa0069D17.2 [Oryza sativa (japonica
  misc_feature (152)..(461): Homolog of NCBI NO: 21742151 NR Description: OSJNBa0069D17.2 [Oryza sativa (japonica
DLSLSFSLPQITMAQQEASPSPGAEVVGRAFVEQYYHILHQSPGLVHRFYQDSSFLTRPDVTGAVTTVTTMQAINDKILSLKYEDYTAEIETADAQESHERGVIVLVTGRLTGNDNVRKKFSQSFFLAPQDKGYFVLNDVFRFLEEKEVTAQARSVPINGTTRDVQAPIEPERVVVSHEPEVEPEPVASIEEEDLDNVAEVYDPSDKDEGVVVDVEPIEPPTQISHNEILSVPQGDAPKHSYASILKQMKSSPAPTTHVARNKPRPAPVNQKLTAPPAEPAARPEASAHENVPNSSHVDVEDDGHSIYVRNLPFDSTPTQLEEVFKNFGAIKHEGIQVRSNKQGFCFGFVEFETSSGKQSALEASPVTIGDRQAVVEEKKTNSRGGGNNGGSRGRYFSGRGSFRNESFKGGRGGGGRGGYGRGGGEFSGRPKSSNPRNGGEGYQRVPQNGGGGRGGRGEGGRGGARGGGSS

SEQ ID NO: 106938 - protein, 459 aa, Arabidopsis thaliana
  peptide (1)..(459): Ceres Seq. ID no. 13620911
  misc_feature (15)..(131): Pfam Name: Nuclear transport factor 2 (NTF2) domain Pfam Description: Nuclear transport factor 2 (NTF2) domain
  misc_feature (1)..(459): Homolog of NCBI NO: 30697452 NR Description: NTF2-containing RNA-binding protein, putative
  misc_feature (1)..(459): Homolog of NCBI NO: 21553535 NR Description: ras-GTPase-activating protein SH3-domain binding
  misc_feature (1)..(459): Homolog of NCBI NO: 30697455 NR Description: NTF2-containing RNA-binding protein, putative
  misc_feature (2)..(459): Homolog of NCBI NO: 30687772 NR Description: NTF2-containing RNA-binding protein, putative thaliana] >gi|17979475|gb|AAL50074.1| AT3g25150/MJL12_9 thaliana] >gi|21360395|gb|AAM47313.1| AT3g25150/MJL12_9
  misc_feature (15)..(459): Homolog of NCBI NO: 9294171 NR Description: RNA-binding protein-like [Arabidopsis thaliana]
  misc_feature (1)..(457): Homolog of NCBI NO: 31126693 NR Description: putative GAP SH3 binding protein [Oryza sativa
  misc_feature (1)..(438): Homolog of NCBI NO: 18394029 NR Description: NTF2-containing RNA-binding protein, putative
  misc_feature (1)..(267): Homolog of NCBI NO: 21742151 NR Description: OSJNBa0069D17.2 [Oryza sativa (japonica
  misc_feature (386)..(456): Homolog of NCBI NO: 21742151 NR Description: OSJNBa0069D17.2 [Oryza sativa (japonica
  misc_feature (140)..(449): Homolog of NCBI NO: 21742151 NR Description: OSJNBa0069D17.2 [Oryza sativa (japonica
MAQQEASPSPGAEVVGRAFVEQYYHILHQSPGLVHRFYQDSSFLTRPDVTGAVTTVTTMQAINDKILSLKYEDYTAEIETADAQESHERGVIVLVTGRLTGNDNVRKKFSQSFFLAPQDKGYFVLNDVFRFLEEKEVTAQARSVPINGTTRDVQAPIEPERVVVSHEPEVEPEPVASIEEEDLDNVAEVYDPSDKDEGVVVDVEPIEPPTQISHNEILSVPQGDAPKHSYASILKQMKSSPAPTTHVARNKPRPAPVNQKLTAPPAEPAARPEASAHENVPNSSHVDVEDDGHSIYVRNLPFDSTPTQLEEVFKNFGAIKHEGIQVRSNKQGFCFGFVEFETSSGKQSALEASPVTIGDRQAVVEEKKTNSRGGGNNGGSRGRYFSGRGSFRNESFKGGRGGGGRGGYGRGGGEFSGRPKSSNPRNGGEGYQRVPQNGGGGRGGRGEGGRGGARGGGSS

SEQ ID NO: 106939 - protein, 401 aa, Arabidopsis thaliana
  peptide (1)..(401): Ceres Seq. ID no. 13620912
  misc_feature (1)..(73): Pfam Name: Nuclear transport factor 2 (NTF2) domain Pfam Description: Nuclear transport factor 2 (NTF2) domain
  misc_feature (1)..(401): Homolog of NCBI NO: 30697452 NR Description: NTF2-containing RNA-binding protein, putative
  misc_feature (1)..(401): Homolog of NCBI NO: 21553535 NR Description: ras-GTPase-activating protein SH3-domain binding
  misc_feature (1)..(401): Homolog of NCBI NO: 30697455 NR Description: NTF2-containing RNA-binding protein, putative
  misc_feature (1)..(401): Homolog of NCBI NO: 30687772 NR Description: NTF2-containing RNA-binding protein, putative thaliana] >gi|17979475|gb|AAL50074.1| AT3g25150/MJL12_9 thaliana] >gi|21360395|gb|AAM47313.1| AT3g25150/MJL12_9
  misc_feature (1)..(401): Homolog of NCBI NO: 9294171 NR Description: RNA-binding protein-like [Arabidopsis thaliana]
  misc_feature (1)..(399): Homolog of NCBI NO: 31126693 NR Description: putative GAP SH3 binding protein [Oryza sativa
  misc_feature (1)..(380): Homolog of NCBI NO: 18394029 NR Description: NTF2-containing RNA-binding protein, putative
  misc_feature (1)..(209): Homolog of NCBI NO: 21742151 NR Description: OSJNBa0069D17.2 [Oryza sativa (japonica
  misc_feature (328)..(398): Homolog of NCBI NO: 21742151 NR Description: OSJNBa0069D17.2 [Oryza sativa (japonica
  misc_feature (82)..(391): Homolog of NCBI NO: 21742151 NR Description: OSJNBa0069D17.2 [Oryza sativa (japonica
MQAINDKILSLKYEDYTAEIETADAQESHERGVIVLVTGRLTGNDNVRKKFSQSFFLAPQDKGYFVLNDVFRFLEEKEVTAQARSVPINGTTRDVQAPIEPERVVVSHEPEVEPEPVASIEEEDLDNVAEVYDPSDKDEGVVVDVEPIEPPTQISHNEILSVPQGDAPKHSYASILKQMKSSPAPTTHVARNKPRPAPVNQKLTAPPAEPAARPEASAHENVPNSSHVDVEDDGHSIYVRNLPFDSTPTQLEEVFKNFGAIKHEGIQVRSNKQGFCFGFVEFETSSGKQSALEASPVTIGDRQAVVEEKKTNSRGGGNNGGSRGRYFSGRGSFRNESFKGGRGGGGRGGYGRGGGEFSGRPKSSNPRNGGEGYQRVPQNGGGGRGGRGEGGRGGARGGGSS

SEQ ID NO: 106940 - DNA, 2800 bp, Arabidopsis thaliana
  misc_feature (1)..(2800): Ceres Seq. ID no. 13620917
  misc_feature: MA Experiment ID: 20000185 Result: Up-regulated in Transcription
  misc_feature: MA Experiment 20000185 PARAMETER Experiment Name: At_Roots__P Parameter: Age (day) Value: 7 vs. 21
  misc_feature: MA Experiment 20000185 PARAMETER Experiment Name: At_Roots__P Parameter: Organism Value: A. thaliana
  misc_feature: MA Experiment 20000185 PARAMETER Experiment Name: At_Roots__P Parameter: Tissue Value: Roots vs. Whole Plant
  misc_feature: MA Experiment ID: 20000227 Result: Up-regulated in Transcription
  misc_feature: MA Experiment 20000227 PARAMETER Experiment Name: At_Root-Tips-vs-Tops_P Parameter: Tissue Value: Root Tips vs. Root Tops
  misc_feature: MA Experiment ID: 20000439 Result: Up-regulated in Transcription
  misc_feature: MA Experiment 20000439 PARAMETER Experiment Name: At_Roots__P Parameter: Age (day) Value: 14 vs. 21
  misc_feature: MA Experiment 20000439 PARAMETER Experiment Name: At_Roots__P Parameter: Organism Value: A. thaliana
  misc_feature: MA Experiment 20000439 PARAMETER Experiment Name: At_Roots__P Parameter: Tissue Value: Roots vs. Whole Plant
actaaaccaaaccaaacttagggttcttctttgttctctgcttcaacagaactacaggattaaacaatggaagagaaaaaagtagtaagagcgttaagcgaacacctatcactacctcctccaccatctccttctgtagcggtagccatcaacgggaagaagaagagcaaatacgtcgttttttgggctcttgagaagtttatacctgaaggtttcactgatttcaaattgctctatgttcgtcctcctgtctcttacatccctaccccaatggggattgcggtagcggtatcagagcttagagaggatgtagtatcagcttacaaacaagaactggattggagcgcaaacgagatgcttcgtccttacaagaaaatgtttgaaaggagaaaggtgcaagtagaggttttgttgctggattcacttgagcctgcagccgcgatagcggaagagattgctggaactggagtcacaaaactggtaataggaatgtctctccgcggattcttttcaagaaagatcgatatgtcttctttgatcgcaacagctgttccgagattctgcactgtctatgtgatctcgaaggggaaactagcttccgtgcgtccttctgagtcagacgctagcggaagcataagattcgagagaagcagttccacaagtggctccactgatagtcctagactccctcctgagtaccaagactttctctccgctgtttcggaagcacaatcccgagtctctcctttttctcctgctctgaaacattcgatgggaagcaacgcagtggctcagatggatacgagttcgagcgggacggaccaagaggaagtatctacggggagagggatggagattgtccatagcggtattgaaggaaagaagaataaggatgagagctttagcgcttcgttcccaatgggtacagaggcttacaactcgatgagctggacgtctaaatggagagatcacgaggataggagagagatgaggagctcttcttcgagtaacaaccacgatctagtcaatatggactggggtgccgtggttcctgagaactattcttgggtttctcatactgcctctcacatgtctgatggactcctcagtgtccattctattaccgataatcaggtgaatctgaactttgagatagagaaactgagagcggagctgaagcatgttcaggagatgtatgccatggctcaaaccgagactgttggtgcttcaaaaaagctgactgagctaaaccagaggcggttcgaggaatccgagaagcttgtggaactgaaggaaaaagaagaagtagcaaaagatacagcttcaaaggagaagcaaaggtacgaagaggcgatgaaggaagcagagaaggttaaagaactcatgatgaaagaggctttacatagaagagaagctgagttcaaagcagagcgcgatgctagagagaaagataagctccaggcttctctcgtctctcccggggtccaataccaacattatacctgggaggaaatcgcagccgcaacttctgacttcgcagaaaatctcaagattggaatcggagcctatggatcagtctacaaatgtaatctacatcacacgaccggtgctgtcaaggtccttcacgctggagaaactcagctctcgaaacagtttgatcaagagcttgagatcttaagcaaaattcgacatcctcacttagtcctcctactaggggcgtgtcccgaacgcggctgccttgtctacgagtacatggacaacggaagcttagatgaccggttgatgctagtcaacgacacaccaccgatcccttggtttgagcgtttcaggatcgctttagaagtcgcttcagcgcttgtattcctccacaaatccaagcctagaccaatcattcaccgtgacctcaaaccaggaaacatcttgcttgaccacaacttcgtcagcaaactcggcgatgttggtctctcaacaatggttaaccaagacgatgtttcatctagaactatcttcaagcaaaccagtcccgtgggcacgctctgttacattgaccctgagtatcagcgaaccgggattatctcacctaaatcggatgtgtactccctcggagttgtgattctgcagctaataaccgcgaaacccgccatagcgattactcatatggtggaagaagctatcggagacgatgctgaatttatggcaatcttggataagaaagctgggtcttggcccatcagtgatactcgtgagttagccgctttgggactgtgttgtacagaaatgagacgcagagacagaccggatcttaaagatcaaatcatcccggctttggaacggctcaggaaagtcgccgacaaagctcaaaacttgctttcgagaactccgtctggtcctccatctcatttcatttgcccacttttgaagggagtaatgaacgagccgtgcgtggctgcggatgggtacacgtacgatcgggaagctatagaggaatggctgagacagaaagatacatcaccggtgacgaatcttccattgcctaacaagaaccttattgctaattacactctttactcagcaatcatggagtggaaatctaataaacggtagagagaaacagattccagaaaaattacaatcggttctatcaatgtgtttactctaatatgttttttttttgtgtgtttttctctgttccgaggattcctcatttgtctgatgacatgcacaattacaacaatatatatagagagaaatgtctttcgatataagtttattttgtttctattggtaaaaatgtaacttt

SEQ ID NO: 106941 - protein, 845 aa, Arabidopsis thaliana
  peptide (1)..(845): Ceres Seq. ID no. 13620918
  misc_feature (774)..(844): Pfam Name: U-box domain Pfam Description: U-box domain
  misc_feature (112)..(844): Homolog of NCBI NO: 15234952 NR Description: protein kinase family [Arabidopsis thaliana]
  misc_feature (17)..(90): Homolog of NCBI NO: 15234952 NR Description: protein kinase family [Arabidopsis thaliana]
  misc_feature (362)..(845): Homolog of NCBI NO: 15241414 NR Description: protein kinase family [Arabidopsis thaliana]
  misc_feature (302)..(845): Homolog of NCBI NO: 37536860 NR Description: putative protein kinase [Oryza sativa (japonica group)] >gi|13569983|gb|AAK31267.1| putative protein kinase sativa] >gi|31433514|gb|AAP55019.1| putative protein kinase
  misc_feature (20)..(207): Homolog of NCBI NO: 37536860 NR Description: putative protein kinase [Oryza sativa (japonica group)] >gi|13569983|gb|AAK31267.1| putative protein kinase sativa] >gi|31433514|gb|AAP55019.1| putative protein kinase
  misc_feature (333)..(842): Homolog of NCBI NO: 9758471 NR Description: contains similarity to receptor-like protein
  misc_feature (333)..(842): Homolog of NCBI NO: 30697549 NR Description: protein kinase family [Arabidopsis thaliana]
  misc_feature (362)..(845): Homolog of NCBI NO: 22327904 NR Description: protein kinase family [Arabidopsis thaliana]
  misc_feature (23)..(273): Homolog of NCBI NO: 22327904 NR Description: protein kinase family [Arabidopsis thaliana]
  misc_feature (400)..(842): Homolog of NCBI NO: 29367517 NR Description: putative serine/threonine protein kinase [Oryza
MEEKKVVRALSEHLSLPPPPSPSVAVAINGKKKSKYVVFWALEKFIPEGFTDFKLLYVRPPVSYIPTPMGIAVAVSELREDVVSAYKQELDWSANEMLRPYKKMFERRKVQVEVLLLDSLEPAAAIAEEIAGTGVTKLVIGMSLRGFFSRKIDMSSLIATAVPRFCTVYVISKGKLASVRPSESDASGSIRFERSSSTSGSTDSPRLPPEYQDFLSAVSEAQSRVSPFSPALKHSMGSNAVAQMDTSSSGTDQEEVSTGRGMEIVHSGIEGKKNKDESFSASFPMGTEAYNSMSWTSKWRDHEDRREMRSSSSSNNHDLVNMDWGAVVPENYSWVSHTASHMSDGLLSVHSITDNQVNLNFEIEKLRAELKHVQEMYAMAQTETVGASKKLTELNQRRFEESEKLVELKEKEEVAKDTASKEKQRYEEAMKEAEKVKELMMKEALHRREAEFKAERDAREKDKLQASLVSPGVQYQHYTWEEIAAATSDFAENLKIGIGAYGSVYKCNLHHTTGAVKVLHAGETQLSKQFDQELEILSKIRHPHLVLLLGACPERGCLVYEYMDNGSLDDRLMLVNDTPPIPWFERFRIALEVASALVFLHKSKPRPIIHRDLKPGNILLDHNFVSKLGDVGLSTMVNQDDVSSRTIFKQTSPVGTLCYIDPEYQRTGIISPKSDVYSLGVVILQLITAKPAIAITHMVEEAIGDDAEFMAILDKKAGSWPISDTRELAALGLCCTEMRRRDRPDLKDQIIPALERLRKVADKAQNLLSRTPSGPPSHFICPLLKGVMNEPCVAADGYTYDREAIEEWLRQKDTSPVTNLPLPNKNLIANYTLYSAIMEWKSNKR

SEQ ID NO: 106942 - protein, 777 aa, Arabidopsis thaliana
  peptide (1)..(777): Ceres Seq. ID no. 13620919
  misc_feature (706)..(776): Pfam Name: U-box domain Pfam Description: U-box domain
  misc_feature (44)..(776): Homolog of NCBI NO: 15234952 NR Description: protein kinase family [Arabidopsis thaliana]
  misc_feature (1)..(22): Homolog of NCBI NO: 15234952 NR Description: protein kinase family [Arabidopsis thaliana]
  misc_feature (294)..(777): Homolog of NCBI NO: 15241414 NR Description: protein kinase family [Arabidopsis thaliana]
  misc_feature (234)..(777): Homolog of NCBI NO: 37536860 NR Description: putative protein kinase [Oryza sativa (japonica group)] >gi|13569983|gb|AAK31267.1| putative protein kinase sativa] >gi|31433514|gb|AAP55019.1| putative protein kinase
  misc_feature (1)..(139): Homolog of NCBI NO: 37536860 NR Description: putative protein kinase [Oryza sativa (japonica group)] >gi|13569983|gb|AAK31267.1| putative protein kinase sativa] >gi|31433514|gb|AAP55019.1| putative protein kinase
  misc_feature (265)..(774): Homolog of NCBI NO: 9758471 NR Description: contains similarity to receptor-like protein
  misc_feature (265)..(774): Homolog of NCBI NO: 30697549 NR Description: protein kinase family [Arabidopsis thaliana]
  misc_feature (294)..(777): Homolog of NCBI NO: 22327904 NR Description: protein kinase family [Arabidopsis thaliana]
  misc_feature (1)..(205): Homolog of NCBI NO: 22327904 NR Description: protein kinase family [Arabidopsis thaliana]
  misc_feature (332)..(774): Homolog of NCBI NO: 29367517 NR Description: putative serine/threonine protein kinase [Oryza
MGIAVAVSELREDVVSAYKQELDWSANEMLRPYKKMFERRKVQVEVLLLDSLEPAAAIAEEIAGTGVTKLVIGMSLRGFFSRKIDMSSLIATAVPRFCTVYVISKGKLASVRPSESDASGSIRFERSSSTSGSTDSPRLPPEYQDFLSAVSEAQSRVSPFSPALKHSMGSNAVAQMDTSSSGTDQEEVSTGRGMEIVHSGIEGKKNKDESFSASFPMGTEAYNSMSWTSKWRDHEDRREMRSSSSSNNHDLVNMDWGAVVPENYSWVSHTASHMSDGLLSVHSITDNQVNLNFEIEKLRAELKHVQEMYAMAQTETVGASKKLTELNQRRFEESEKLVELKEKEEVAKDTASKEKQRYEEAMKEAEKVKELMMKEALHRREAEFKAERDAREKDKLQASLVSPGVQYQHYTWEEIAAATSDFAENLKIGIGAYGSVYKCNLHHTTGAVKVLHAGETQLSKQFDQELEILSKIRHPHLVLLLGACPERGCLVYEYMDNGSLDDRLMLVNDTPPIPWFERFRIALEVASALVFLHKSKPRPIIHRDLKPGNILLDHNFVSKLGDVGLSTMVNQDDVSSRTIFKQTSPVGTLCYIDPEYQRTGIISPKSDVYSLGVVILQLITAKPAIAITHMVEEAIGDDAEFMAILDKKAGSWPISDTRELAALGLCCTEMRRRDRPDLKDQIIPALERLRKVADKAQNLLSRTPSGPPSHFICPLLKGVMNEPCVAADGYTYDREAIEEWLRQKDTSPVTNLPLPNKNLIANYTLYSAIMEWKSNKR

SEQ ID NO: 106943 - protein, 749 aa, Arabidopsis thaliana
  peptide (1)..(749): Ceres Seq. ID no. 13620920
  misc_feature (678)..(748): Pfam Name: U-box domain Pfam Description: U-box domain
  misc_feature (16)..(748): Homolog of NCBI NO: 15234952 NR Description: protein kinase family [Arabidopsis thaliana]
  misc_feature (266)..(749): Homolog of NCBI NO: 15241414 NR Description: protein kinase family [Arabidopsis thaliana]
  misc_feature (206)..(749): Homolog of NCBI NO: 37536860 NR Description: putative protein kinase [Oryza sativa (japonica group)] >gi|13569983|gb|AAK31267.1| putative protein kinase sativa] >gi|31433514|gb|AAP55019.1| putative protein kinase
  misc_feature (1)..(111): Homolog of NCBI NO: 37536860 NR Description: putative protein kinase [Oryza sativa (japonica group)] >gi|13569983|gb|AAK31267.1| putative protein kinase sativa] >gi|31433514|gb|AAP55019.1| putative protein kinase
  misc_feature (237)..(746): Homolog of NCBI NO: 9758471 NR Description: contains similarity to receptor-like protein
  misc_feature (237)..(746): Homolog of NCBI NO: 30697549 NR Description: protein kinase family [Arabidopsis thaliana]
  misc_feature (266)..(749): Homolog of NCBI NO: 22327904 NR Description: protein kinase family [Arabidopsis thaliana]
  misc_feature (1)..(177): Homolog of NCBI NO: 22327904 NR Description: protein kinase family [Arabidopsis thaliana]
  misc_feature (304)..(746): Homolog of NCBI NO: 29367517 NR Description: putative serine/threonine protein kinase [Oryza
  misc_feature (1)..(681): Homolog of NCBI NO: 15224129 NR Description: protein kinase family [Arabidopsis thaliana]
MLRPYKKMFERRKVQVEVLLLDSLEPAAAIAEEIAGTGVTKLVIGMSLRGFFSRKIDMSSLIATAVPRFCTVYVISKGKLASVRPSESDASGSIRFERSSSTSGSTDSPRLPPEYQDFLSAVSEAQSRVSPFSPALKHSMGSNAVAQMDTSSSGTDQEEVSTGRGMEIVHSGIEGKKNKDESFSASFPMGTEAYNSMSWTSKWRDHEDRREMRSSSSSNNHDLVNMDWGAVVPENYSWVSHTASHMSDGLLSVHSITDNQVNLNFEIEKLRAELKHVQEMYAMAQTETVGASKKLTELNQRRFEESEKLVELKEKEEVAKDTASKEKQRYEEAMKEAEKVKELMMKEALHRREAEFKAERDAREKDKLQASLVSPGVQYQHYTWEEIAAATSDFAENLKIGIGAYGSVYKCNLHHTTGAVKVLHAGETQLSKQFDQELEILSKIRHPHLVLLLGACPERGCLVYEYMDNGSLDDRLMLVNDTPPIPWFERFRIALEVASALVFLHKSKPRPIIHRDLKPGNILLDHNFVSKLGDVGLSTMVNQDDVSSRTIFKQTSPVGTLCYIDPEYQRTGIISPKSDVYSLGVVILQLITAKPAIAITHMVEEAIGDDAEFMAILDKKAGSWPISDTRELAALGLCCTEMRRRDRPDLKDQIIPALERLRKVADKAQNLLSRTPSGPPSHFICPLLKGVMNEPCVAADGYTYDREAIEEWLRQKDTSPVTNLPLPNKNLIANYTLYSAIMEWKSNKR

SEQ ID NO: 106944 - DNA, 1945 bp, Arabidopsis thaliana
  misc_feature (1)..(1945): Ceres Seq. ID no. 13620921
  misc_feature: MA Experiment ID: 20000327 Result: Down-regulated in Transcription
  misc_feature: MA Experiment 20000327 PARAMETER Experiment Name: At_42deg_Heat_Sub_P Parameter: Age (day) Value: 14
  misc_feature: MA Experiment 20000327 PARAMETER Experiment Name: At_42deg_Heat_Sub_P Parameter: Organism Value: A. thaliana
  misc_feature: MA Experiment 20000327 PARAMETER Experiment Name: At_42deg_Heat_Sub_P Parameter: Plant Line Value: WS
  misc_feature: MA Experiment 20000327 PARAMETER Experiment Name: At_42deg_Heat_Sub_P Parameter: Temperature (deg C) Value: 42 vs. 22
  misc_feature: MA Experiment 20000327 PARAMETER Experiment Name: At_42deg_Heat_Sub_P Parameter: Timepoint (hr) Value: 1
  misc_feature: MA Experiment 20000327 PARAMETER Experiment Name: At_42deg_Heat_Sub_P Parameter: Tissue Value: Aerial
  misc_feature: MA Experiment ID: 20000355 Result: Down-regulated in Transcription
  misc_feature: MA Experiment 20000355 PARAMETER Experiment Name: At_Siliques_Sub_P Parameter: Age (day) Value: 21
  misc_feature: MA Experiment 20000355 PARAMETER Experiment Name: At_Siliques_Sub_P Parameter: Organism Value: A. thaliana
  misc_feature: MA Experiment 20000355 PARAMETER Experiment Name: At_Siliques_Sub_P Parameter: Plant Line Value: WS
  misc_feature: MA Experiment 20000355 PARAMETER Experiment Name: At_Siliques_Sub_P Parameter: Tissue Value: Less Than 5mm Siliques vs. Whole Plant
  misc_feature: MA Experiment ID: 20000440 Result: Down-regulated in Transcription
  misc_feature: MA Experiment 20000440 PARAMETER Experiment Name: At_Closed-Flower__Sub_P Parameter: Tissue Value: Closed Flower vs. Whole Plant
atacatttcaatatttcttaccaaatacataaatttttctctccaaatcccaagaaataaaatttcgaatttcttccctcaaaaaaatctccacacgtcaaggaaattaaaaccccataaattccttgccaataaaaccttccaactactcaagttaattttctgtagtgtataatcttgaaaatatggtaatagctacagaaaccaccagtagtagtcatcaccggagactcactttcgcctccttcttaaactccgatcccgccgctgacgaagaagaacagagtcatggtgttgatgatatcatcaatcccagtagtagcaacaaaaacatcaacaaggatgtccatcataattaccgacaaagtcaaagcaatgcttcgacaactagcggtgagtcgtctcctaatcaagttctatcgccatggaaccaaacctactctccgtactacaccgacacaacaaacactccatcgatgtctccctcaccgtggaaccaaacttactctccgtactacaagtctccttggatctaccagacccgaaacattgatgatgataccgacaacggtttgatcggtacaatcgtgagacaagacggtcatgtctactcgttggctgcttctggagatcttttattcactggatccgattccaagaacattcgtgtttggaaagatctcaaggatcacacaggctttaaatcaaccagtggattagttaaagcgattgtgataaccggagataaccggattttcaccggtcatcaagacggtaaaattcgggtctggagaggttctaaaagaagaaccggaggttattcacgaatcggaagcttgccgacgttgaaagagtttttgacgaaatcagtgaatccaaagaactacgtcgaggttcgtcgtcggaaaaatgttctcaagattcgtcattacgacgccgtttcgtgtcttagcttgaacgaagagctcggtttactctactccggttcgtgggacaagactctcaaagtttggagattatctgattcaaaatgtcttgaatcgattcaagctcacgacgacgcgatcaacacggtggctgctggtttcgacgatttgctattcaccggatccgccgacggaactttgaaagtgtggaaacgtgagcttcaaggcaaagggacgaagcattttcttgttaatgtgttgatgaagcaagagaacgctgtaacggcgttagcggttaatataacggcggctgttgtttactgtggttcttctgacggtaccgttaatttctgggaaggacagaagtatctctctcacggtggaactctccgcggccatcgtttggcggtgctctgccttgccgccgccggaagtctggttttaagcggcggagcggataagaacatttgcgtgtggaggagaaacggtgatggtagccactcgtgtctctcggtattgatggaccacgtgggacctgtcaagtgtttgacggcggtggaagatgacggcgaaggccacagagagaaaggagatcagaaatggatagtgtacagtgggagcttggacaaatcggttaaagtgtggcgcgtgacggagtcggcgtctacggttattggctgagatatgcttgaggagaagtgtacacgcgccgccgccgccttaagcgcgtggtgaatggtgatgcggactatgaaacagaagaatgttccgcggcccatgtgatccctgccgttgttgtcaaggcaagtttttatggccggctaaaagaagcatttcatacaaccaatagggaactgccatgtcgtgaaagtatctaactgatttagaaagttcttctagtttattcgatcttctttgtaaagagtaactgcacatatttgagttacgttttagacaatattgtttcattgtattaaatcattttatttatatcttattttatggaattttaatactct

SEQ ID NO: 106945 - protein, 473 aa, Arabidopsis thaliana
  peptide (1)..(473): Ceres Seq. ID no. 13620922
  misc_feature (1)..(473): Homolog of NCBI NO: 15230244 NR Description: transducin / WD-40 repeat protein family
  misc_feature (1)..(469): Homolog of NCBI NO: 15222143 NR Description: transducin / WD-40 repeat protein family
  misc_feature (1)..(469): Homolog of NCBI NO: 17979259 NR Description: At1g49450/F13F21_11 [Arabidopsis thaliana]
  misc_feature (39)..(470): Homolog of NCBI NO: 15235354 NR Description: transducin / WD-40 repeat protein family
  misc_feature (98)..(467): Homolog of NCBI NO: 15225317 NR Description: transducin / WD-40 repeat protein family
  misc_feature (130)..(468): Homolog of NCBI NO: 31126785 NR Description: putative WD repeat-protein [Oryza sativa
  misc_feature (48)..(472): Homolog of NCBI NO: 15229740 NR Description: transducin / WD-40 repeat protein family
  misc_feature (119)..(464): Homolog of NCBI NO: 15220271 NR Description: transducin / WD-40 repeat protein family
  misc_feature (80)..(468): Homolog of NCBI NO: 15221675 NR Description: transducin / WD-40 repeat protein family
  misc_feature (141)..(465): Homolog of NCBI NO: 18395507 NR Description: transducin / WD-40 repeat protein family thaliana] >gi|9743339|gb|AAF97963.1|AC000103_13 F21J9.19 thaliana] >gi|15028341|gb|AAK76647.1| unknown protein
MVIATETTSSSHHRRLTFASFLNSDPAADEEEQSHGVDDIINPSSSNKNINKDVHHNYRQSQSNASTTSGESSPNQVLSPWNQTYSPYYTDTTNTPSMSPSPWNQTYSPYYKSPWIYQTRNIDDDTDNGLIGTIVRQDGHVYSLAASGDLLFTGSDSKNIRVWKDLKDHTGFKSTSGLVKAIVITGDNRIFTGHQDGKIRVWRGSKRRTGGYSRIGSLPTLKEFLTKSVNPKNYVEVRRRKNVLKIRHYDAVSCLSLNEELGLLYSGSWDKTLKVWRLSDSKCLESIQAHDDAINTVAAGFDDLLFTGSADGTLKVWKRELQGKGTKHFLVNVLMKQENAVTALAVNITAAVVYCGSSDGTVNFWEGQKYLSHGGTLRGHRLAVLCLAAAGSLVLSGGADKNICVWRRNGDGSHSCLSVLMDHVGPVKCLTAVEDDGEGHREKGDQKWIVYSGSLDKSVKVWRVTESASTVIG

SEQ ID NO: 106946 - protein, 376 aa, Arabidopsis thaliana
  peptide (1)..(376): Ceres Seq. ID no. 13620923
  misc_feature (1)..(376): Homolog of NCBI NO: 15230244 NR Description: transducin / WD-40 repeat protein family
  misc_feature (1)..(372): Homolog of NCBI NO: 15222143 NR Description: transducin / WD-40 repeat protein family
  misc_feature (1)..(372): Homolog of NCBI NO: 17979259 NR Description: At1g49450/F13F21_11 [Arabidopsis thaliana]
  misc_feature (1)..(373): Homolog of NCBI NO: 15235354 NR Description: transducin / WD-40 repeat protein family
  misc_feature (1)..(370): Homolog of NCBI NO: 15225317 NR Description: transducin / WD-40 repeat protein family
  misc_feature (33)..(371): Homolog of NCBI NO: 31126785 NR Description: putative WD repeat-protein [Oryza sativa
  misc_feature (1)..(375): Homolog of NCBI NO: 15229740 NR Description: transducin / WD-40 repeat protein family
  misc_feature (22)..(367): Homolog of NCBI NO: 15220271 NR Description: transducin / WD-40 repeat protein family
  misc_feature (1)..(371): Homolog of NCBI NO: 15221675 NR Description: transducin / WD-40 repeat protein family
  misc_feature (44)..(368): Homolog of NCBI NO: 18395507 NR Description: transducin / WD-40 repeat protein family thaliana] >gi|9743339|gb|AAF97963.1|AC000103_13 F21J9.19 thaliana] >gi|15028341|gb|AAK76647.1| unknown protein
MSPSPWNQTYSPYYKSPWIYQTRNIDDDTDNGLIGTIVRQDGHVYSLAASGDLLFTGSDSKNIRVWKDLKDHTGFKSTSGLVKAIVITGDNRIFTGHQDGKIRVWRGSKRRTGGYSRIGSLPTLKEFLTKSVNPKNYVEVRRRKNVLKIRHYDAVSCLSLNEELGLLYSGSWDKTLKVWRLSDSKCLESIQAHDDAINTVAAGFDDLLFTGSADGTLKVWKRELQGKGTKHFLVNVLMKQENAVTALAVNITAAVVYCGSSDGTVNFWEGQKYLSHGGTLRGHRLAVLCLAAAGSLVLSGGADKNICVWRRNGDGSHSCLSVLMDHVGPVKCLTAVEDDGEGHREKGDQKWIVYSGSLDKSVKVWRVTESASTVIG

SEQ ID NO: 106947 - DNA, 1173 bp, Arabidopsis thaliana
  misc_feature (1)..(1173): Ceres Seq. ID no. 13620934
  misc_feature: MA Experiment ID: 20000171 Result: Down-regulated in Transcription
  misc_feature: MA Experiment 20000171 PARAMETER Experiment Name: At_42deg_Heat_P Parameter: Age (day) Value: 14
  misc_feature: MA Experiment 20000171 PARAMETER Experiment Name: At_42deg_Heat_P Parameter: Organism Value: A. thaliana
  misc_feature: MA Experiment 20000171 PARAMETER Experiment Name: At_42deg_Heat_P Parameter: Plant Line Value: WS
  misc_feature: MA Experiment 20000171 PARAMETER Experiment Name: At_42deg_Heat_P Parameter: Temperature (deg C) Value: 42 vs. 22
  misc_feature: MA Experiment 20000171 PARAMETER Experiment Name: At_42deg_Heat_P Parameter: Timepoint (hr) Value: 1
  misc_feature: MA Experiment 20000171 PARAMETER Experiment Name: At_42deg_Heat_P Parameter: Tissue Value: Aerial
  misc_feature: MA Experiment ID: 20000173 Result: Down-regulated in Transcription
  misc_feature: MA Experiment 20000173 PARAMETER Experiment Name: At_42deg_Heat_P Parameter: Age (day) Value: 14
  misc_feature: MA Experiment 20000173 PARAMETER Experiment Name: At_42deg_Heat_P Parameter: Organism Value: A. thaliana
  misc_feature: MA Experiment 20000173 PARAMETER Experiment Name: At_42deg_Heat_P Parameter: Plant Line Value: WS
  misc_feature: MA Experiment 20000173 PARAMETER Experiment Name: At_42deg_Heat_P Parameter: Temperature (deg C) Value: 42 vs. 22
  misc_feature: MA Experiment 20000173 PARAMETER Experiment Name: At_42deg_Heat_P Parameter: Timepoint (hr) Value: 6
  misc_feature: MA Experiment 20000173 PARAMETER Experiment Name: At_42deg_Heat_P Parameter: Tissue Value: Aerial
  misc_feature: MA Experiment ID: 20000180 Result: Up-regulated in Transcription
  misc_feature: MA Experiment 20000180 PARAMETER Experiment Name: At_Germinating_Seeds_P Parameter: Age (hr) Value: 24 vs. 0
  misc_feature: MA Experiment 20000180 PARAMETER Experiment Name: At_Germinating_Seeds_P Parameter: Tissue Value: Germinating Seeds
  misc_feature: MA Experiment ID: 20000184 Result: Down-regulated in Transcription
  misc_feature: MA Experiment 20000184 PARAMETER Experiment Name: At_Shoots__P Parameter: Age (day) Value: 7
  misc_feature: MA Experiment 20000184 PARAMETER Experiment Name: At_Shoots__P Parameter: Tissue Value: Shoots vs. Whole Plant
  misc_feature: MA Experiment ID: 20000437 Result: Down-regulated in Transcription
  misc_feature: MA Experiment 20000437 PARAMETER Experiment Name: At_Drought_P Parameter: Age (day) Value: 8
  misc_feature: MA Experiment 20000437 PARAMETER Experiment Name: At_Drought_P Parameter: Organism Value: A. thaliana
  misc_feature: MA Experiment 20000437 PARAMETER Experiment Name: At_Drought_P Parameter: Plant Line Value: WS
  misc_feature: MA Experiment 20000437 PARAMETER Experiment Name: At_Drought_P Parameter: Timepoint (hr) Value: 24
  misc_feature: MA Experiment 20000437 PARAMETER Experiment Name: At_Drought_P Parameter: Tissue Value: Whole Plant
  misc_feature: MA Experiment 20000437 PARAMETER Experiment Name: At_Drought_P Parameter: Treatment Value: Drought vs. No Drought
  misc_feature: MA Experiment ID: 20001555 Result: Down-regulated in Transcription
  misc_feature: MA Experiment 20001555 PARAMETER Experiment Name: At_Drought_Soil_Dry_P Parameter: Age (day) Value: 24
  misc_feature: MA Experiment 20001555 PARAMETER Experiment Name: At_Drought_Soil_Dry_P Parameter: Organism Value: A. thaliana
  misc_feature: MA Experiment 20001555 PARAMETER Experiment Name: At_Drought_Soil_Dry_P Parameter: Plant Line Value: WS
  misc_feature: MA Experiment 20001555 PARAMETER Experiment Name: At_Drought_Soil_Dry_P Parameter: Post Timepoint (hr) Value: None
  misc_feature: MA Experiment 20001555 PARAMETER Experiment Name: At_Drought_Soil_Dry_P Parameter: Post-Treatment Value: None
  misc_feature: MA Experiment 20001555 PARAMETER Experiment Name: At_Drought_Soil_Dry_P Parameter: Timepoint (day) Value: 10
  misc_feature: MA Experiment 20001555 PARAMETER Experiment Name: At_Drought_Soil_Dry_P Parameter: Treatment Value: Drought vs. No Drought
  misc_feature: MA Experiment ID: 20001905 Result: Down-regulated in Transcription
  misc_feature: MA Experiment 20001905 PARAMETER Experiment Name: At_Drought_Reproduction_P Parameter: Age (day) Value: 40
  misc_feature: MA Experiment 20001905 PARAMETER Experiment Name: At_Drought_Reproduction_P Parameter: Organism Value: A. thaliana
  misc_feature: MA Experiment 20001905 PARAMETER Experiment Name: At_Drought_Reproduction_P Parameter: Plant Line Value: WS
  misc_feature: MA Experiment 20001905 PARAMETER Experiment Name: At_Drought_Reproduction_P Parameter: Timepoint (day) Value: 10
  misc_feature: MA Experiment 20001905 PARAMETER Experiment Name: At_Drought_Reproduction_P Parameter: Tissue Value: Rosettes
  misc_feature: MA Experiment 20001905 PARAMETER Experiment Name: At_Drought_Reproduction_P Parameter: Treatment Value: Drought vs. No Drought
  misc_feature: MA Experiment ID: 20001906 Result: Down-regulated in Transcription
  misc_feature: MA Experiment 20001906 PARAMETER Experiment Name: At_Drought_Reproduction_P Parameter: Age (day) Value: 35
  misc_feature: MA Experiment 20001906 PARAMETER Experiment Name: At_Drought_Reproduction_P Parameter: Organism Value: A. thaliana
  misc_feature: MA Experiment 20001906 PARAMETER Experiment Name: At_Drought_Reproduction_P Parameter: Plant Line Value: WS
  misc_feature: MA Experiment 20001906 PARAMETER Experiment Name: At_Drought_Reproduction_P Parameter: Timepoint (day) Value: 5
  misc_feature: MA Experiment 20001906 PARAMETER Experiment Name: At_Drought_Reproduction_P Parameter: Tissue Value: Siliques
  misc_feature: MA Experiment 20001906 PARAMETER Experiment Name: At_Drought_Reproduction_P Parameter: Treatment Value: Drought vs. No Drought
  misc_feature: MA Experiment ID: 20001911 Result: Down-regulated in Transcription
  misc_feature: MA Experiment 20001911 PARAMETER Experiment Name: At_Drought_Reproduction_P Parameter: Age (day) Value: 40
  misc_feature: MA Experiment 20001911 PARAMETER Experiment Name: At_Drought_Reproduction_P Parameter: Organism Value: A. thaliana
  misc_feature: MA Experiment 20001911 PARAMETER Experiment Name: At_Drought_Reproduction_P Parameter: Plant Line Value: WS
  misc_feature: MA Experiment 20001911 PARAMETER Experiment Name: At_Drought_Reproduction_P Parameter: Timepoint (day) Value: 10
  misc_feature: MA Experiment 20001911 PARAMETER Experiment Name: At_Drought_Reproduction_P Parameter: Tissue Value: Flowers
  misc_feature: MA Experiment 20001911 PARAMETER Experiment Name: At_Drought_Reproduction_P Parameter: Treatment Value: Drought vs. No Drought
aactgtttgcagaaatctcactgaaactagagagaaaaccaaatggcggctactccaatcagagttatagtctcagctcttgtgatcctctcggtattactactttcctcgtctctgggagtcgccacagagacagaaattgagcggaacgagacagaggtgcggctgatgtacgagcaatggcttgtggagaatcgaaagaactataatggtcttggagagaaagagagacgattcaagatcttcaaagacaacttgaagtttgtcgatgaacacaattctgttccggatcggacttttgaagtagggttgaccaggttcgctgatctaacaaatgaagagtttagagcgatttatttaaggaagaagatggaaagaactaaagattcggtgaaaactgagagatatttgtacaaagaaggagatgttttgcctgatgaagtagattggagagcgaatggcgcagttgtttcagtcaaagatcaaggaaactgtggaagttgttgggcgttttctgcggttggagcagtggaagggatcaaccagatcactaccggagagttgatatctttgtcggagcaagaactcgttgactgtgacagaggttttgtcaacgctggatgtgatggaggtatcatgaactatgcttttgagttcattatgaaaaatggtggtattgagacagatcaagattacccttataacgccaacgatcttggcttgtgcaatgcagataagaacaatactcgtgttgttacaattgatggttatgaagatgttcctagagacgatgagaagtctttgaaaaaggctgttgctcatcaacctgttagtgttgctattgaagctagtagccaagctttccagctttacaaatccggtgtgatgacaggaacatgtggaatatctttggaccatggtgtagtagtggttggatatggatccacaagtggtgaagattattggatcattcgcaattcatgggggttgaattggggagatagcggttacgttaagctccaacgtaacatcgatgatccatttgggaaatgtggtatagcaatgatgccttcttacccgaccaaatcatcattcccatcgtcatttgatttgttgtctgagatttgatttgatcttcctgtaaatgattaataactaaatattttttattac

SEQ ID NO: 106948 - protein, 361 aa, Arabidopsis thaliana
  peptide (1)..(361): Ceres Seq. ID no. 13620935
  misc_feature (130)..(347): Pfam Name: Papain family cysteine protease Pfam Description: Papain family cysteine protease
  misc_feature (1)..(361): Homolog of NCBI NO: 30685308 NR Description: cysteine proteinase [Arabidopsis thaliana] Putative cysteine proteinase At3g19400 precursor
  misc_feature (1)..(361): Homolog of NCBI NO: 26452046 NR Description: putative cysteine proteinase RD21A precursor
  misc_feature (3)..(350): Homolog of NCBI NO: 18402225 NR Description: cysteine proteinase [Arabidopsis thaliana] cysteine proteinase [Arabidopsis thaliana] cysteine proteinase [Arabidopsis thaliana]
  misc_feature (12)..(350): Homolog of NCBI NO: 18141281 NR Description: senescence-associated cysteine protease [Brassica
  misc_feature (12)..(361): Homolog of NCBI NO: 18407678 NR Description: cysteine proteinase [Arabidopsis thaliana]
  misc_feature (12)..(361): Homolog of NCBI NO: 21593501 NR Description: cysteine proteinase [Arabidopsis thaliana]
  misc_feature (1)..(349): Homolog of NCBI NO: 7435801 NR Description: cysteine proteinase (EC 3.4.22.-) precursor -
  misc_feature (10)..(348): Homolog of NCBI NO: 18422289 NR Description: cysteine proteinase RD21A [Arabidopsis thaliana]
  misc_feature (45)..(350): Homolog of NCBI NO: 1361974 NR Description: cysteine proteinase (EC 3.4.22.-) - clove pink
  misc_feature (1)..(349): Homolog of NCBI NO: 5777889 NR Description: cysteine protease [Solanum tuberosum]
MAATPIRVIVSALVILSVLLLSSSLGVATETEIERNETEVRLMYEQWLVENRKNYNGLGEKERRFKIFKDNLKFVDEHNSVPDRTFEVGLTRFADLTNEEFRAIYLRKKMERTKDSVKTERYLYKEGDVLPDEVDWRANGAVVSVKDQGNCGSCWAFSAVGAVEGINQITTGELISLSEQELVDCDRGFVNAGCDGGIMNYAFEFIMKNGGIETDQDYPYNANDLGLCNADKNNTRVVTIDGYEDVPRDDEKSLKKAVAHQPVSVAIEASSQAFQLYKSGVMTGTCGISLDHGVVVVGYGSTSGEDYWIIRNSWGLNWGDSGYVKLQRNIDDPFGKCGIAMMPSYPTKSSFPSSFDLLSEI

SEQ ID NO: 106949 - protein, 319 aa, Arabidopsis thaliana
  peptide (1)..(319): Ceres Seq. ID no. 13620936
  misc_feature (88)..(305): Pfam Name: Papain family cysteine protease Pfam Description: Papain family cysteine protease
  misc_feature (1)..(319): Homolog of NCBI NO: 30685308 NR Description: cysteine proteinase [Arabidopsis thaliana] Putative cysteine proteinase At3g19400 precursor
  misc_feature (1)..(319): Homolog of NCBI NO: 26452046 NR Description: putative cysteine proteinase RD21A precursor
  misc_feature (1)..(308): Homolog of NCBI NO: 18402225 NR Description: cysteine proteinase [Arabidopsis thaliana] cysteine proteinase [Arabidopsis thaliana] cysteine proteinase [Arabidopsis thaliana]
  misc_feature (1)..(308): Homolog of NCBI NO: 18141281 NR Description: senescence-associated cysteine protease [Brassica
  misc_feature (1)..(319): Homolog of NCBI NO: 18407678 NR Description: cysteine proteinase [Arabidopsis thaliana]
  misc_feature (1)..(319): Homolog of NCBI NO: 21593501 NR Description: cysteine proteinase [Arabidopsis thaliana]
  misc_feature (1)..(307): Homolog of NCBI NO: 7435801 NR Description: cysteine proteinase (EC 3.4.22.-) precursor -
  misc_feature (1)..(306): Homolog of NCBI NO: 18422289 NR Description: cysteine proteinase RD21A [Arabidopsis thaliana]
  misc_feature (3)..(308): Homolog of NCBI NO: 1361974 NR Description: cysteine proteinase (EC 3.4.22.-) - clove pink
  misc_feature (1)..(307): Homolog of NCBI NO: 5777889 NR Description: cysteine protease [Solanum tuberosum]
MYEQWLVENRKNYNGLGEKERRFKIFKDNLKFVDEHNSVPDRTFEVGLTRFADLTNEEFRAIYLRKKMERTKDSVKTERYLYKEGDVLPDEVDWRANGAVVSVKDQGNCGSCWAFSAVGAVEGINQITTGELISLSEQELVDCDRGFVNAGCDGGIMNYAFEFIMKNGGIETDQDYPYNANDLGLCNADKNNTRVVTIDGYEDVPRDDEKSLKKAVAHQPVSVAIEASSQAFQLYKSGVMTGTCGISLDHGVVVVGYGSTSGEDYWIIRNSWGLNWGDSGYVKLQRNIDDPFGKCGIAMMPSYPTKSSFPSSFDLLSEI

SEQ ID NO: 106950 - protein, 252 aa, Arabidopsis thaliana
  peptide (1)..(252): Ceres Seq. ID no. 13620937
  misc_feature (21)..(238): Pfam Name: Papain family cysteine protease Pfam Description: Papain family cysteine protease
  misc_feature (1)..(252): Homolog of NCBI NO: 30685308 NR Description: cysteine proteinase [Arabidopsis thaliana] Putative cysteine proteinase At3g19400 precursor
  misc_feature (1)..(252): Homolog of NCBI NO: 26452046 NR Description: putative cysteine proteinase RD21A precursor
  misc_feature (1)..(241): Homolog of NCBI NO: 18402225 NR Description: cysteine proteinase [Arabidopsis thaliana] cysteine proteinase [Arabidopsis thaliana] cysteine proteinase [Arabidopsis thaliana]
  misc_feature (1)..(241): Homolog of NCBI NO: 18141281 NR Description: senescence-associated cysteine protease [Brassica
  misc_feature (1)..(252): Homolog of NCBI NO: 18407678 NR Description: cysteine proteinase [Arabidopsis thaliana]
  misc_feature (1)..(252): Homolog of NCBI NO: 21593501 NR Description: cysteine proteinase [Arabidopsis thaliana]
  misc_feature (1)..(240): Homolog of NCBI NO: 7435801 NR Description: cysteine proteinase (EC 3.4.22.-) precursor -
  misc_feature (1)..(239): Homolog of NCBI NO: 18422289 NR Description: cysteine proteinase RD21A [Arabidopsis thaliana]
  misc_feature (1)..(241): Homolog of NCBI NO: 1361974 NR Description: cysteine proteinase (EC 3.4.22.-) - clove pink
  misc_feature (1)..(240): Homolog of NCBI NO: 5777889 NR Description: cysteine protease [Solanum tuberosum]
MERTKDSVKTERYLYKEGDVLPDEVDWRANGAVVSVKDQGNCGSCWAFSAVGAVEGINQITTGELISLSEQELVDCDRGFVNAGCDGGIMNYAFEFIMKNGGIETDQDYPYNANDLGLCNADKNNTRVVTIDGYEDVPRDDEKSLKKAVAHQPVSVAIEASSQAFQLYKSGVMTGTCGISLDHGVVVVGYGSTSGEDYWIIRNSWGLNWGDSGYVKLQRNIDDPFGKCGIAMMPSYPTKSSFPSSFDLLSEI

SEQ ID NO: 106951 - DNA, 1838 bp, Arabidopsis thaliana
  misc_feature (1)..(1838): Ceres Seq. ID no. 13620943
  misc_feature: MA Experiment ID: 20000184 Result: Up-regulated in Transcription
  misc_feature: MA Experiment 20000184 PARAMETER Experiment Name: At_Shoots__P Parameter: Age (day) Value: 7
  misc_feature: MA Experiment 20000184 PARAMETER Experiment Name: At_Shoots__P Parameter: Tissue Value: Shoots vs. Whole Plant
  misc_feature: MA Experiment ID: 20000185 Result: Up-regulated in Transcription
  misc_feature: MA Experiment 20000185 PARAMETER Experiment Name: At_Roots__P Parameter: Age (day) Value: 7 vs. 21
  misc_feature: MA Experiment 20000185 PARAMETER Experiment Name: At_Roots__P Parameter: Organism Value: A. thaliana
  misc_feature: MA Experiment 20000185 PARAMETER Experiment Name: At_Roots__P Parameter: Tissue Value: Roots vs. Whole Plant
  misc_feature: MA Experiment ID: 20000439 Result: Up-regulated in Transcription
  misc_feature: MA Experiment 20000439 PARAMETER Experiment Name: At_Roots__P Parameter: Age (day) Value: 14 vs. 21
  misc_feature: MA Experiment 20000439 PARAMETER Experiment Name: At_Roots__P Parameter: Organism Value: A. thaliana
  misc_feature: MA Experiment 20000439 PARAMETER Experiment Name: At_Roots__P Parameter: Tissue Value: Roots vs. Whole Plant
gtagttatactttctattaatggactgttgattatgtttcatctgcctcttcacttaaagaaacaatggtagtcatacttcacatacgttatacagtatactctgagatgtgttaatactctgttttatcttaccttttacactttgagcaacaattgcagcaatgttgaccgttgactctcaacactgtttcagtttcatactcctctgcttcttctcactcctctgttactctctcttgttcaagaaactaaaggactcacatgttggccgtgatttgcttcagagccctccatctcttccgatcataggccatcttcatcatctcctctcttctctagcacacaaatctttgcagcaactctcatccaagtatggacctctcctacatctcagcatcttcaacttccctgtagtcctcgtctcctcggcctctgtggcttacgagatcttcaaggctcatgacttgaacatctcgtctcgcgacaatcctccaatcaatgagtccctcttggtcggttcttctgtgttcgtcggcgccccctatggagattattggaagttcatgaagaagctcttggttacaaagctgctgggaccacaggcactcgagcggtcaagaagcatccgtgcagatgagctagagcggttttacagaagcttgctcgataaggcgatgaagaaggagagtgttgagattggtaaggaagcaacgaagctaagtatcaacagcatatgcaggatgagcatggggaggagtttttcagaagagagtggtgaggctgagagagttagaggtttggttaccgagttagatggcttgacgaagaaggttttgttggtaaacatattgcgctggccgcttgagaagctcagaatctctctgttcaaaaaagagataatgtatgtttcgaacagctttgatgagctgctggagaggattattgtggaacgtgaaaagaaaccgaatgaacatcagggtacatacttgatggacgtgttgttggaagcttatgaagacgaaaaagcagagcataagatcactaggaaccatatcaagtcgttgttcgtggagcttttacttggaggcactgatacctcggcgcaaacaatacagtggacaatggccgagctcatcaacaaccgtaacgttcttaagagattgagagaagaaattgattcggttgtaggagaaacaaggttgattcaagaaaaggatctaccaaagctaccttatttacaatctgtagtcaaagaagggctaagattgcacccgccattgcctctcatggtaaggacgttccaaagaagttgtgagatgaaagggttctacatagcggaaaagacaacacttgtagttaatgcttatgctgtgatgagagatcctactacttgggaagatcctgatgagtttaagccagagaggtttctaaggcaagaggaggagagaagagcactgaagcacattgcttttggaagtggaaggagaggctgtccaggatcaaacctagctactattttcataggaactgcaattggaacaatggtgcagtgttttgacttgagcatcaaaggagacaaggtcaaaatggatgaggttggaggactcaacttgaccatggctcatccccttgagtgcattcttgttcctcgaacccaacctttcatttctaaccagcagattccaagtttgtaatttccatgaatcctaattattgtttttattattgtaattccaacctttcatgaccaaacggttcaagtttggtttttattttattttcacggtttacaatacgaaaccgtaattattgtggtctactgttggatttgtcctg

SEQ ID NO: 106952 - protein, 510 aa, Arabidopsis thaliana
  peptide (1)..(510): Ceres Seq. ID no. 13620944
  misc_feature (1)..(510): Homolog of NCBI NO: 15231050 NR Description: cytochrome P450 family [Arabidopsis thaliana]
  misc_feature (9)..(505): Homolog of NCBI NO: 9293969 NR Description: cytochrome P450-like protein [Arabidopsis
  misc_feature (1)..(509): Homolog of NCBI NO: 15231047 NR Description: cytochrome P450 family [Arabidopsis thaliana]
  misc_feature (1)..(509): Homolog of NCBI NO: 9294003 NR Description: cytochrome P450-like protein [Arabidopsis
  misc_feature (1)..(501): Homolog of NCBI NO: 15231049 NR Description: cytochrome P450 family [Arabidopsis thaliana]
  misc_feature (1)..(499): Homolog of NCBI NO: 15231053 NR Description: cytochrome P450 family [Arabidopsis thaliana]
  misc_feature (1)..(501): Homolog of NCBI NO: 21553521 NR Description: cytochrome P450, putative [Arabidopsis thaliana]
  misc_feature (12)..(498): Homolog of NCBI NO: 15233774 NR Description: cytochrome P450 family [Arabidopsis thaliana]
  misc_feature (12)..(498): Homolog of NCBI NO: 7430617 NR Description: cytochrome P450 - Arabidopsis thaliana
  misc_feature (1)..(508): Homolog of NCBI NO: 15232418 NR Description: cytochrome P450 family [Arabidopsis thaliana]
MLTVDSQHCFSFILLCFFSLLCYSLLFKKLKDSHVGRDLLQSPPSLPIIGHLHHLLSSLAHKSLQQLSSKYGPLLHLSIFNFPVVLVSSASVAYEIFKAHDLNISSRDNPPINESLLVGSSVFVGAPYGDYWKFMKKLLVTKLLGPQALERSRSIRADELERFYRSLLDKAMKKESVEIGKEATKLSINSICRMSMGRSFSEESGEAERVRGLVTELDGLTKKVLLVNILRWPLEKLRISLFKKEIMYVSNSFDELLERIIVEREKKPNEHQGTYLMDVLLEAYEDEKAEHKITRNHIKSLFVELLLGGTDTSAQTIQWTMAELINNRNVLKRLREEIDSVVGETRLIQEKDLPKLPYLQSVVKEGLRLHPPLPLMVRTFQRSCEMKGFYIAEKTTLVVNAYAVMRDPTTWEDPDEFKPERFLRQEEERRALKHIAFGSGRRGCPGSNLATIFIGTAIGTMVQCFDLSIKGDKVKMDEVGGLNLTMAHPLECILVPRTQPFISNQQIPSL

SEQ ID NO: 106953 - protein, 376 aa, Arabidopsis thaliana
  peptide (1)..(376): Ceres Seq. ID no. 13620945
  misc_feature (1)..(376): Homolog of NCBI NO: 15231050 NR Description: cytochrome P450 family [Arabidopsis thaliana]
  misc_feature (1)..(371): Homolog of NCBI NO: 9293969 NR Description: cytochrome P450-like protein [Arabidopsis
  misc_feature (1)..(375): Homolog of NCBI NO: 15231047 NR Description: cytochrome P450 family [Arabidopsis thaliana]
  misc_feature (1)..(375): Homolog of NCBI NO: 9294003 NR Description: cytochrome P450-like protein [Arabidopsis
  misc_feature (1)..(367): Homolog of NCBI NO: 15231049 NR Description: cytochrome P450 family [Arabidopsis thaliana]
  misc_feature (1)..(365): Homolog of NCBI NO: 15231053 NR Description: cytochrome P450 family [Arabidopsis thaliana]
  misc_feature (1)..(367): Homolog of NCBI NO: 21553521 NR Description: cytochrome P450, putative [Arabidopsis thaliana]
  misc_feature (1)..(364): Homolog of NCBI NO: 15233774 NR Description: cytochrome P450 family [Arabidopsis thaliana]
  misc_feature (1)..(364): Homolog of NCBI NO: 7430617 NR Description: cytochrome P450 - Arabidopsis thaliana
  misc_feature (1)..(374): Homolog of NCBI NO: 15232418 NR Description: cytochrome P450 family [Arabidopsis thaliana]
MKKLLVTKLLGPQALERSRSIRADELERFYRSLLDKAMKKESVEIGKEATKLSINSICRMSMGRSFSEESGEAERVRGLVTELDGLTKKVLLVNILRWPLEKLRISLFKKEIMYVSNSFDELLERIIVEREKKPNEHQGTYLMDVLLEAYEDEKAEHKITRNHIKSLFVELLLGGTDTSAQTIQWTMAELINNRNVLKRLREEIDSVVGETRLIQEKDLPKLPYLQSVVKEGLRLHPPLPLMVRTFQRSCEMKGFYIAEKTTLVVNAYAVMRDPTTWEDPDEFKPERFLRQEEERRALKHIAFGSGRRGCPGSNLATIFIGTAIGTMVQCFDLSIKGDKVKMDEVGGLNLTMAHPLECILVPRTQPFISNQQIPSL

SEQ ID NO: 106954 - protein, 339 aa, Arabidopsis thaliana
  peptide (1)..(339): Ceres Seq. ID no. 13620946
  misc_feature (1)..(339): Homolog of NCBI NO: 15231050 NR Description: cytochrome P450 family [Arabidopsis thaliana]
  misc_feature (1)..(334): Homolog of NCBI NO: 9293969 NR Description: cytochrome P450-like protein [Arabidopsis
  misc_feature (1)..(338): Homolog of NCBI NO: 15231047 NR Description: cytochrome P450 family [Arabidopsis thaliana]
  misc_feature (1)..(338): Homolog of NCBI NO: 9294003 NR Description: cytochrome P450-like protein [Arabidopsis
  misc_feature (1)..(330): Homolog of NCBI NO: 15231049 NR Description: cytochrome P450 family [Arabidopsis thaliana]
  misc_feature (1)..(328): Homolog of NCBI NO: 15231053 NR Description: cytochrome P450 family [Arabidopsis thaliana]
  misc_feature (1)..(330): Homolog of NCBI NO: 21553521 NR Description: cytochrome P450, putative [Arabidopsis thaliana]
  misc_feature (1)..(327): Homolog of NCBI NO: 15233774 NR Description: cytochrome P450 family [Arabidopsis thaliana]
  misc_feature (1)..(327): Homolog of NCBI NO: 7430617 NR Description: cytochrome P450 - Arabidopsis thaliana
  misc_feature (1)..(337): Homolog of NCBI NO: 15232418 NR Description: cytochrome P450 family [Arabidopsis thaliana]
MKKESVEIGKEATKLSINSICRMSMGRSFSEESGEAERVRGLVTELDGLTKKVLLVNILRWPLEKLRISLFKKEIMYVSNSFDELLERIIVEREKKPNEHQGTYLMDVLLEAYEDEKAEHKITRNHIKSLFVELLLGGTDTSAQTIQWTMAELINNRNVLKRLREEIDSVVGETRLIQEKDLPKLPYLQSVVKEGLRLHPPLPLMVRTFQRSCEMKGFYIAEKTTLVVNAYAVMRDPTTWEDPDEFKPERFLRQEEERRALKHIAFGSGRRGCPGSNLATIFIGTAIGTMVQCFDLSIKGDKVKMDEVGGLNLTMAHPLECILVPRTQPFISNQQIPSL

SEQ ID NO: 106955 - DNA, 969 bp, Arabidopsis thaliana
  misc_feature (1)..(969): Ceres Seq. ID no. 13620947
  misc_feature: MA Experiment ID: 108488 Result: Up-regulated in Transcription
  misc_feature: MA Experiment ID: 108569 Result: Up-regulated in Transcription
  misc_feature: MA Experiment 108569 PARAMETER Experiment Name: At_0.001%_MeJA__cDNA_P Parameter: Timepoint (hr) Value: 6
  misc_feature: MA Experiment 108569 PARAMETER Experiment Name: At_0.001%_MeJA__cDNA_P Parameter: Tissue Value: Aerial
  misc_feature: MA Experiment 108569 PARAMETER Experiment Name: At_0.001%_MeJA__cDNA_P Parameter: Treatment Value: 0.001% MeJA vs. No Treatment
  misc_feature: MA Experiment ID: 20000180 Result: Up-regulated in Transcription
  misc_feature: MA Experiment 20000180 PARAMETER Experiment Name: At_Germinating_Seeds_P Parameter: Age (hr) Value: 24 vs. 0
  misc_feature: MA Experiment 20000180 PARAMETER Experiment Name: At_Germinating_Seeds_P Parameter: Tissue Value: Germinating Seeds
  misc_feature: MA Experiment ID: 20000437 Result: Down-regulated in Transcription
  misc_feature: MA Experiment 20000437 PARAMETER Experiment Name: At_Drought_P Parameter: Age (day) Value: 8
  misc_feature: MA Experiment 20000437 PARAMETER Experiment Name: At_Drought_P Parameter: Organism Value: A. thaliana
  misc_feature: MA Experiment 20000437 PARAMETER Experiment Name: At_Drought_P Parameter: Plant Line Value: WS
  misc_feature: MA Experiment 20000437 PARAMETER Experiment Name: At_Drought_P Parameter: Timepoint (hr) Value: 24
  misc_feature: MA Experiment 20000437 PARAMETER Experiment Name: At_Drought_P Parameter: Tissue Value: Whole Plant
  misc_feature: MA Experiment 20000437 PARAMETER Experiment Name: At_Drought_P Parameter: Treatment Value: Drought vs. No Drought
  misc_feature: MA Experiment ID: 20000794 Result: Down-regulated in Transcription
  misc_feature: MA Experiment 20000794 PARAMETER Experiment Name: At_Petals_P Parameter: Age (day) Value: 23-25 days
  misc_feature: MA Experiment 20000794 PARAMETER Experiment Name: At_Petals_P Parameter: Plant Line Value: WS
  misc_feature: MA Experiment 20000794 PARAMETER Experiment Name: At_Petals_P Parameter: Tissue Value: Petals vs. Whole plant
  misc_feature: MA Experiment ID: 20001451 Result: Down-regulated in Transcription
  misc_feature: MA Experiment 20001451 PARAMETER Experiment Name: At_Far-red-induction_P Parameter: Age (day) Value: 7
  misc_feature: MA Experiment 20001451 PARAMETER Experiment Name: At_Far-red-induction_P Parameter: Light Value: Far-red vs. White
  misc_feature: MA Experiment 20001451 PARAMETER Experiment Name: At_Far-red-induction_P Parameter: Organism Value: A. thaliana
  misc_feature: MA Experiment 20001451 PARAMETER Experiment Name: At_Far-red-induction_P Parameter: Plant Line Value: Columbia
  misc_feature: MA Experiment 20001451 PARAMETER Experiment Name: At_Far-red-induction_P Parameter: Timepoint (hr) Value: 24
  misc_feature: MA Experiment 20001451 PARAMETER Experiment Name: At_Far-red-induction_P Parameter: Tissue Value: Whole Plant
  misc_feature: MA Experiment ID: 20001911 Result: Down-regulated in Transcription
  misc_feature: MA Experiment 20001911 PARAMETER Experiment Name: At_Drought_Reproduction_P Parameter: Age (day) Value: 40
  misc_feature: MA Experiment 20001911 PARAMETER Experiment Name: At_Drought_Reproduction_P Parameter: Organism Value: A. thaliana
  misc_feature: MA Experiment 20001911 PARAMETER Experiment Name: At_Drought_Reproduction_P Parameter: Plant Line Value: WS
  misc_feature: MA Experiment 20001911 PARAMETER Experiment Name: At_Drought_Reproduction_P Parameter: Timepoint (day) Value: 10
  misc_feature: MA Experiment 20001911 PARAMETER Experiment Name: At_Drought_Reproduction_P Parameter: Tissue Value: Flowers
  misc_feature: MA Experiment 20001911 PARAMETER Experiment Name: At_Drought_Reproduction_P Parameter: Treatment Value: Drought vs. No Drought
acgagaatcatctgcttaaaatccaatcgcatcgactcagtcttcttcttcttcttcacctacctttctctctctctctcgtggtccattcgctattctatacttcttgtcggcgccggagagagtgagatgacttggtcggttttcagatccataaatactccaacactcgacctctccaccgcacttcgctccactcgtaccccattggtcgctgctggtgtcggctgcgcaacattcgctggtgtttctctcttcagaatgtcttctagatctcctcctttcgcttccctctctgtctctgcttcttctgtgaagaaggaagttgtgtctactgagaaagcaccagctgctttgggaccttactctcaggccattaaagccaataatctggtttttctttcaggtgttcttggacttatacctgagactggaaagtttgtttcggagagcgtcgaagatcagactgagcaggtactcaaaaacatgggggagatattgaaagctagtggtgctgattattcctcggtggtgaagacaacaatcatgttggctgatttggctgacttcaagacagtgaacgagatatatgccaaatacttcccagctccttctccagcacgatcgacgtatcaagttgcagctttgcctctaaacgccaagatcgagattgaatgtattgcaacactctagaacactcaaatcaatctctacgaagggtattttggtccggaagatgtcaaaacaaataagagaaacaatggtttttggggcttaacccatatttaacctacttttcattttgctgcactacgaaaaatgttgcggattatcaaccattaggttggttacaaatcaaaagcctctaatcaagaataagttatttagtgtcttgtccaccctcatttgctgttgacgtatatgtattgattgtatacattattttatttgagtgaaaaccattatgct

SEQ ID NO: 106956 - protein, 230 aa, Arabidopsis thaliana; identical to SEQ ID NO: 34771
  peptide (1)..(230): Ceres Seq. ID no. 13620948
  misc_feature (112)..(230): Pfam Name: Endoribonuclease L-PSP Pfam Description: Endoribonuclease L-PSP
  misc_feature (44)..(230): Homolog of NCBI NO: 15231137 NR Description: translational inhibitor protein -related thaliana] >gi|14030711|gb|AAK53030.1|AF375446_1 [Arabidopsis thaliana] >gi|16974537|gb|AAL31178.1|
  misc_feature (88)..(230): Homolog of NCBI NO: 9294558 NR Description: contains similarity to protein translation
  misc_feature (44)..(230): Homolog of NCBI NO: 23617012 NR Description: putative translational inhibitor protein [Oryza
  misc_feature (62)..(230): Homolog of NCBI NO: 29420485 NR Description: translation-inhibitor protein [Gentiana triflora]
  misc_feature (102)..(228): Homolog of NCBI NO: 39579795 NR Description: Hypothetical protein CBG24261 [Caenorhabditis
  misc_feature (102)..(228): Homolog of NCBI NO: 25148891 NR Description: YjgF family precursor [Caenorhabditis elegans]
  misc_feature (102)..(228): Homolog of NCBI NO: 25148896 NR Description: YjgF family (15.2 kD) [Caenorhabditis elegans]
  misc_feature (100)..(228): Homolog of NCBI NO: 1708292 NR Description: HEAT-RESPONSIVE PROTEIN 12
  misc_feature (102)..(228): Homolog of NCBI NO: 31616050 NR Description: Chain A, Crystal Structure Of A Human P14.5, A Inhibitor Reveals Different Mode Of Ligand Binding Near The Residues Of The YjgfUK114 PROTEIN FAMILY >gi|31616051|pdb|1ONI|B
  misc_feature (103)..(228): Homolog of NCBI NO: 5032215 NR Description: translational inhibitor protein p14.5 [Homo >gi|1717975|sp|P52758|UK14_HUMAN 14.5 kDa translational inhibitor (p14.5) (UK114 antigen homolog) >gi|30749907|pdb|1ONI|A Chain A,

SEQ ID NO: 106957 - protein, 187 aa, Arabidopsis thaliana; identical to SEQ ID NO: 34772
  peptide (1)..(187): Ceres Seq. ID no. 13620949
  misc_feature (69)..(187): Pfam Name: Endoribonuclease L-PSP Pfam Description: Endoribonuclease L-PSP
  misc_feature (1)..(187): Homolog of NCBI NO: 15231137 NR Description: translational inhibitor protein -related thaliana] >gi|14030711|gb|AAK53030.1|AF375446_1 [Arabidopsis thaliana] >gi|16974537|gb|AAL31178.1|
  misc_feature (45)..(187): Homolog of NCBI NO: 9294558 NR Description: contains similarity to protein translation
  misc_feature (1)..(187): Homolog of NCBI NO: 23617012 NR Description: putative translational inhibitor protein [Oryza
  misc_feature (19)..(187): Homolog of NCBI NO: 29420485 NR Description: translation-inhibitor protein [Gentiana triflora]
  misc_feature (59)..(185): Homolog of NCBI NO: 39579795 NR Description: Hypothetical protein CBG24261 [Caenorhabditis
  misc_feature (59)..(185): Homolog of NCBI NO: 25148891 NR Description: YjgF family precursor [Caenorhabditis elegans]
  misc_feature (59)..(185): Homolog of NCBI NO: 25148896 NR Description: YjgF family (15.2 kD) [Caenorhabditis elegans]
  misc_feature (57)..(185): Homolog of NCBI NO: 1708292 NR Description: HEAT-RESPONSIVE PROTEIN 12
  misc_feature (59)..(185): Homolog of NCBI NO: 31616050 NR Description: Chain A, Crystal Structure Of A Human P14.5, A Inhibitor Reveals Different Mode Of Ligand Binding Near The Residues Of The YjgfUK114 PROTEIN FAMILY >gi|31616051|pdb|1ONI|B
  misc_feature (60)..(185): Homolog of NCBI NO: 5032215 NR Description: translational inhibitor protein p14.5 [Homo >gi|1717975|sp|P52758|UK14_HUMAN 14.5 kDa translational inhibitor (p14.5) (UK114 antigen homolog) >gi|30749907|pdb|1ONI|A Chain A,

SEQ ID NO: 106958 - protein, 143 aa, Arabidopsis thaliana; identical to SEQ ID NO: 34773
  peptide (1)..(143): Ceres Seq. ID no. 13620950
  misc_feature (25)..(143): Pfam Name: Endoribonuclease L-PSP Pfam Description: Endoribonuclease L-PSP
  misc_feature (1)..(143): Homolog of NCBI NO: 15231137 NR Description: translational inhibitor protein -related thaliana] >gi|14030711|gb|AAK53030.1|AF375446_1 [Arabidopsis thaliana] >gi|16974537|gb|AAL31178.1|
  misc_feature (1)..(143): Homolog of NCBI NO: 9294558 NR Description: contains similarity to protein translation
  misc_feature (1)..(143): Homolog of NCBI NO: 23617012 NR Description: putative translational inhibitor protein [Oryza
  misc_feature (1)..(143): Homolog of NCBI NO: 29420485 NR Description: translation-inhibitor protein [Gentiana triflora]
  misc_feature (15)..(141): Homolog of NCBI NO: 39579795 NR Description: Hypothetical protein CBG24261 [Caenorhabditis
  misc_feature (15)..(141): Homolog of NCBI NO: 25148891 NR Description: YjgF family precursor [Caenorhabditis elegans]
  misc_feature (15)..(141): Homolog of NCBI NO: 25148896 NR Description: YjgF family (15.2 kD) [Caenorhabditis elegans]
  misc_feature (13)..(141): Homolog of NCBI NO: 1708292 NR Description: HEAT-RESPONSIVE PROTEIN 12
  misc_feature (15)..(141): Homolog of NCBI NO: 31616050 NR Description: Chain A, Crystal Structure Of A Human P14.5, A Inhibitor Reveals Different Mode Of Ligand Binding Near The Residues Of The YjgfUK114 PROTEIN FAMILY >gi|31616051|pdb|1ONI|B
  misc_feature (16)..(141): Homolog of NCBI NO: 5032215 NR Description: translational inhibitor protein p14.5 [Homo >gi|1717975|sp|P52758|UK14_HUMAN 14.5 kDa translational inhibitor (p14.5) (UK114 antigen homolog) >gi|30749907|pdb|1ONI|A Chain A,

SEQ ID NO: 106959 - DNA, 1700 bp, Arabidopsis thaliana
  misc_feature (1)..(1700): Ceres Seq. ID no. 13620963
  misc_feature: MA Experiment ID: 20000185 Result: Up-regulated in Transcription
  misc_feature: MA Experiment 20000185 PARAMETER Experiment Name: At_Roots__P Parameter: Age (day) Value: 7 vs. 21
  misc_feature: MA Experiment 20000185 PARAMETER Experiment Name: At_Roots__P Parameter: Organism Value: A. thaliana
  misc_feature: MA Experiment 20000185 PARAMETER Experiment Name: At_Roots__P Parameter: Tissue Value: Roots vs. Whole Plant
  misc_feature: MA Experiment ID: 20000439 Result: Up-regulated in Transcription
  misc_feature: MA Experiment 20000439 PARAMETER Experiment Name: At_Roots__P Parameter: Age (day) Value: 14 vs. 21
  misc_feature: MA Experiment 20000439 PARAMETER Experiment Name: At_Roots__P Parameter: Organism Value: A. thaliana
  misc_feature: MA Experiment 20000439 PARAMETER Experiment Name: At_Roots__P Parameter: Tissue Value: Roots vs. Whole Plant
  misc_feature: MA Experiment ID: 20000495 Result: Up-regulated in Transcription
  misc_feature: MA Experiment 20000495 PARAMETER Experiment Name: At_Guard_Cells_P Parameter: Harvest Date Value: 8/2/2002
  misc_feature: MA Experiment 20000495 PARAMETER Experiment Name: At_Guard_Cells_P Parameter: Organism Value: A. thaliana
  misc_feature: MA Experiment 20000495 PARAMETER Experiment Name: At_Guard_Cells_P Parameter: Tissue Value: Guard Cells vs. Leaves
  misc_feature: MA Experiment ID: 20000496 Result: Up-regulated in Transcription
  misc_feature: MA Experiment 20000496 PARAMETER Experiment Name: At_Guard_Cells_P Parameter: Harvest Date Value: 7/19/2002
  misc_feature: MA Experiment 20000496 PARAMETER Experiment Name: At_Guard_Cells_P Parameter: Organism Value: Canola
  misc_feature: MA Experiment 20000496 PARAMETER Experiment Name: At_Guard_Cells_P Parameter: Tissue Value: Guard Cells vs. Leaves
  misc_feature: MA Experiment ID: 20001247 Result: Down-regulated in Transcription
  misc_feature: MA Experiment 20001247 PARAMETER Experiment Name: At_Far-red-induction_P Parameter: Age (day) Value: 7
  misc_feature: MA Experiment 20001247 PARAMETER Experiment Name: At_Far-red-induction_P Parameter: Light Value: Far-red vs. White
  misc_feature: MA Experiment 20001247 PARAMETER Experiment Name: At_Far-red-induction_P Parameter: Organism Value: A. thaliana
  misc_feature: MA Experiment 20001247 PARAMETER Experiment Name: At_Far-red-induction_P Parameter: Plant Line Value: Columbia
  misc_feature: MA Experiment 20001247 PARAMETER Experiment Name: At_Far-red-induction_P Parameter: Timepoint (hr) Value: 1
  misc_feature: MA Experiment 20001247 PARAMETER Experiment Name: At_Far-red-induction_P Parameter: Tissue Value: Whole Plant
atgtaaccacaatctgagaagacacaacaaattaagatccaacatcaatacacacacacatatatatatatatatatatatagtgagaaaaaaagaagctatgggagatcatcatgatttcatcaactcaggaagctggtggaaagtatcttcttcttcttcaccatcttcttcttcttccatgagagcaagctctattgaatctggtggttctgctgttttccatgataagcttcatcatcattctttagctactgatcaccatcttcagatgattggtttaggactttcttcacaatcacctgttgatcaatggaaccaatctctcttacgaggagatagtaaagcggagacaagctttggtgtgatgcttcaagagaatctcaatttagatgccacttcaaacgcaaacgctaacacaacgtcatccacatcttcttaccagctgcaagaatctgattcctctcaccatcatcaagctttgtggcgagatccacaaagcgatttcaaaccgcagattttaacgagtggtggtaatcgcgggtttttcttagatcatcagttcagtcctcatggtagctcaagtaccgacagtagcacagtaacatgtcaaggtttcgctgttgacaactcgtcaaacgccatgtacgcagcaacaacaacaactcctaattcatcttccggtatgtttcatcatcagcaagcaggtggttttggctcttctgatcaacaaccgtcgaggaatcatcaacagtcatctcttggctattctcagtttggatcatccaccggaaactatgatcaaatggcgtcagcgttaccatcgacttggtttttaagatcttctccgccgccaaaaccacacagtcctttgagattctctaataacgcaacgttttggaaccccgcggctgcgggaaacgccggtgctcctcctcctcatgacgcgtcttctaactttttcccggcgttacaaccgccgcagattcatccgcagagttttgacgaacaaccaaagaatatatcggagattagagattcaagtagcaacgaagtaaagagaggaggaaacgatcatcagccggcggcgaaaagagctaagagcgaagcagcgtctccgtcaccagctttcaagaggaaagagaaaatgggggacagaatcgctgcgctccaacaattggtttcacctttcggaaagactgatgcagcctcagtgctctctgaagccattgaatacattaagttcttacaccaacaagtttctgctctgagcaacccatacatgaaaagtggagcttctttacaacatcaacagagtgatcattccacagagctagaagtatcagaagaaccagatcttagaagtcgaggtttatgcttagtgccagtttcaagcacatttccagtgacacacgatactacagtagatttctggactcctacatttggtgggacttttagatagatatatagacggaaaatcgtatattagatgtcgggtaacgtacgtatcttttttaacttataatatatacgttgattgctgataagaatcaccgcatttttaaacgaagaggagataagttaatggacaagtgaaacgtgttgtccatttatacttcttattcatagaactaaaaaataatgtgtaattgaagaaccatgcatagatatataagagctattgagatttgacatgt

SEQ ID NO: 106960 - protein, 487 aa, Arabidopsis thaliana
  peptide (1)..(487): Ceres Seq. ID no. 13620964
  misc_feature (379)..(416): Pfam Name: Helix-loop-helix DNA-binding domain Pfam Description: Helix-loop-helix DNA-binding domain
  misc_feature (34)..(487): Homolog of NCBI NO: 15232315 NR Description: bHLH transcription factor (bHLH123) -related thaliana] >gi|26451163|dbj|BAC42685.1| putative bHLH factor bHLH123 [Arabidopsis thaliana] >gi|30793909|gb|AAP40407.1|
  misc_feature (28)..(487): Homolog of NCBI NO: 9294343 NR Description: gene_id:F3H11.2~unknown protein [Arabidopsis
  misc_feature (293)..(487): Homolog of NCBI NO: 18407276 NR Description: expressed protein [Arabidopsis thaliana] At1g61660/T13M11_21 [Arabidopsis thaliana]
  misc_feature (293)..(487): Homolog of NCBI NO: 21553730 NR Description: unknown [Arabidopsis thaliana]
  misc_feature (293)..(487): Homolog of NCBI NO: 25404333 NR Description: hypothetical protein T13M11.1 [imported] -
  misc_feature (155)..(482): Homolog of NCBI NO: 22093671 NR Description: similar to bHLH (Basic-helix-loop-helix)
  misc_feature (293)..(438): Homolog of NCBI NO: 30696595 NR Description: expressed protein [Arabidopsis thaliana]
  misc_feature (347)..(469): Homolog of NCBI NO: 15234636 NR Description: hypothetical protein [Arabidopsis thaliana]
  misc_feature (312)..(484): Homolog of NCBI NO: 15217667 NR Description: hypothetical protein [Arabidopsis thaliana]
  misc_feature (360)..(478): Homolog of NCBI NO: 22328848 NR Description: expressed protein [Arabidopsis thaliana] unknown protein [Arabidopsis thaliana]
CNHNLRRHNKLRSNINTHTHIYIYIYIVRKKEAMGDHHDFINSGSWWKVSSSSSPSSSSSMRASSIESGGSAVFHDKLHHHSLATDHHLQMIGLGLSSQSPVDQWNQSLLRGDSKAETSFGVMLQENLNLDATSNANANTTSSTSSYQLQESDSSHHHQALWRDPQSDFKPQILTSGGNRGFFLDHQFSPHGSSSTDSSTVTCQGFAVDNSSNAMYAATTTTPNSSSGMFHHQQAGGFGSSDQQPSRNHQQSSLGYSQFGSSTGNYDQMASALPSTWFLRSSPPPKPHSPLRFSNNATFWNPAAAGNAGAPPPHDASSNFFPALQPPQIHPQSFDEQPKNISEIRDSSSNEVKRGGNDHQPAAKRAKSEAASPSPAFKRKEKMGDRIAALQQLVSPFGKTDAASVLSEAIEYIKFLHQQVSALSNPYMKSGASLQHQQSDHSTELEVSEEPDLRSRGLCLVPVSSTFPVTHDTTVDFWTPTFGGTFR

SEQ ID NO: 106961 - protein, 454 aa, Arabidopsis thaliana
  peptide (1)..(454): Ceres Seq. ID no. 13620965
  misc_feature (346)..(383): Pfam Name: Helix-loop-helix DNA-binding domain Pfam Description: Helix-loop-helix DNA-binding domain
  misc_feature (1)..(454): Homolog of NCBI NO: 15232315 NR Description: bHLH transcription factor (bHLH123) -related thaliana] >gi|26451163|dbj|BAC42685.1| putative bHLH factor bHLH123 [Arabidopsis thaliana] >gi|30793909|gb|AAP40407.1|
  misc_feature (1)..(454): Homolog of NCBI NO: 9294343 NR Description: gene_id:F3H11.2~unknown protein [Arabidopsis
  misc_feature (260)..(454): Homolog of NCBI NO: 18407276 NR Description: expressed protein [Arabidopsis thaliana] At1g61660/T13M11_21 [Arabidopsis thaliana]
  misc_feature (260)..(454): Homolog of NCBI NO: 21553730 NR Description: unknown [Arabidopsis thaliana]
  misc_feature (260)..(454): Homolog of NCBI NO: 25404333 NR Description: hypothetical protein T13M11.1 [imported] -
  misc_feature (122)..(449): Homolog of NCBI NO: 22093671 NR Description: similar to bHLH (Basic-helix-loop-helix)
  misc_feature (260)..(405): Homolog of NCBI NO: 30696595 NR Description: expressed protein [Arabidopsis thaliana]
  misc_feature (314)..(436): Homolog of NCBI NO: 15234636 NR Description: hypothetical protein [Arabidopsis thaliana]
  misc_feature (279)..(451): Homolog of NCBI NO: 15217667 NR Description: hypothetical protein [Arabidopsis thaliana]
  misc_feature (327)..(445): Homolog of NCBI NO: 22328848 NR Description: expressed protein [Arabidopsis thaliana] unknown protein [Arabidopsis thaliana]
MGDHHDFINSGSWWKVSSSSSPSSSSSMRASSIESGGSAVFHDKLHHHSLATDHHLQMIGLGLSSQSPVDQWNQSLLRGDSKAETSFGVMLQENLNLDATSNANANTTSSTSSYQLQESDSSHHHQALWRDPQSDFKPQILTSGGNRGFFLDHQFSPHGSSSTDSSTVTCQGFAVDNSSNAMYAATTTTPNSSSGMFHHQQAGGFGSSDQQPSRNHQQSSLGYSQFGSSTGNYDQMASALPSTWFLRSSPPPKPHSPLRFSNNATFWNPAAAGNAGAPPPHDASSNFFPALQPPQIHPQSFDEQPKNISEIRDSSSNEVKRGGNDHQPAAKRAKSEAASPSPAFKRKEKMGDRIAALQQLVSPFGKTDAASVLSEAIEYIKFLHQQVSALSNPYMKSGASLQHQQSDHSTELEVSEEPDLRSRGLCLVPVSSTFPVTHDTTVDFWTPTFGGTFR

SEQ ID NO: 106962 - protein, 427 aa, Arabidopsis thaliana
  peptide (1)..(427): Ceres Seq. ID no. 13620966
  misc_feature (319)..(356): Pfam Name: Helix-loop-helix DNA-binding domain Pfam Description: Helix-loop-helix DNA-binding domain
  misc_feature (1)..(427): Homolog of NCBI NO: 15232315 NR Description: bHLH transcription factor (bHLH123) -related thaliana] >gi|26451163|dbj|BAC42685.1| putative bHLH factor bHLH123 [Arabidopsis thaliana] >gi|30793909|gb|AAP40407.1|
  misc_feature (1)..(427): Homolog of NCBI NO: 9294343 NR Description: gene_id:F3H11.2~unknown protein [Arabidopsis
  misc_feature (233)..(427): Homolog of NCBI NO: 18407276 NR Description: expressed protein [Arabidopsis thaliana] At1g61660/T13M11_21 [Arabidopsis thaliana]
  misc_feature (233)..(427): Homolog of NCBI NO: 21553730 NR Description: unknown [Arabidopsis thaliana]
  misc_feature (233)..(427): Homolog of NCBI NO: 25404333 NR Description: hypothetical protein T13M11.1 [imported] -
  misc_feature (95)..(422): Homolog of NCBI NO: 22093671 NR Description: similar to bHLH (Basic-helix-loop-helix)
  misc_feature (233)..(378): Homolog of NCBI NO: 30696595 NR Description: expressed protein [Arabidopsis thaliana]
  misc_feature (287)..(409): Homolog of NCBI NO: 15234636 NR Description: hypothetical protein [Arabidopsis thaliana]
  misc_feature (252)..(424): Homolog of NCBI NO: 15217667 NR Description: hypothetical protein [Arabidopsis thaliana]
  misc_feature (300)..(418): Homolog of NCBI NO: 22328848 NR Description: expressed protein [Arabidopsis thaliana] unknown protein [Arabidopsis thaliana]
MRASSIESGGSAVFHDKLHHHSLATDHHLQMIGLGLSSQSPVDQWNQSLLRGDSKAETSFGVMLQENLNLDATSNANANTTSSTSSYQLQESDSSHHHQALWRDPQSDFKPQILTSGGNRGFFLDHQFSPHGSSSTDSSTVTCQGFAVDNSSNAMYAATTTTPNSSSGMFHHQQAGGFGSSDQQPSRNHQQSSLGYSQFGSSTGNYDQMASALPSTWFLRSSPPPKPHSPLRFSNNATFWNPAAAGNAGAPPPHDASSNFFPALQPPQIHPQSFDEQPKNISEIRDSSSNEVKRGGNDHQPAAKRAKSEAASPSPAFKRKEKMGDRIAALQQLVSPFGKTDAASVLSEAIEYIKFLHQQVSALSNPYMKSGASLQHQQSDHSTELEVSEEPDLRSRGLCLVPVSSTFPVTHDTTVDFWTPTFGGTFR

SEQ ID NO: 106963 - DNA, 911 bp, Arabidopsis thaliana
  misc_feature (1)..(911): Ceres Seq. ID no. 13620967
  misc_feature: MA Experiment ID: 108434 Result: Down-regulated in Transcription
  misc_feature: MA Experiment 108434 PARAMETER Experiment Name: At_Root_Tips_cDNA_P Parameter: Tissue Value: Root Tips
  misc_feature: MA Experiment ID: 108461 Result: Up-regulated in Transcription
  misc_feature: MA Experiment 108461 PARAMETER Experiment Name: At_Germinating_Seeds_cDNA_P Parameter: Age (day) Value: 1 vs. 0
  misc_feature: MA Experiment 108461 PARAMETER Experiment Name: At_Germinating_Seeds_cDNA_P Parameter: Tissue Value: Germinating Seeds
  misc_feature: MA Experiment ID: 108462 Result: Up-regulated in Transcription
  misc_feature: MA Experiment 108462 PARAMETER Experiment Name: At_Germinating_Seeds_cDNA_P Parameter: Age (day) Value: 2 vs. 0
  misc_feature: MA Experiment 108462 PARAMETER Experiment Name: At_Germinating_Seeds_cDNA_P Parameter: Tissue Value: Germinating Seeds
  misc_feature: MA Experiment ID: 108463 Result: Up-regulated in Transcription
  misc_feature: MA Experiment 108463 PARAMETER Experiment Name: At_Germinating_Seeds_cDNA_P Parameter: Age (day) Value: 3 vs. 0
  misc_feature: MA Experiment 108463 PARAMETER Experiment Name: At_Germinating_Seeds_cDNA_P Parameter: Tissue Value: Germinating Seeds
  misc_feature: MA Experiment ID: 108464 Result: Up-regulated in Transcription
  misc_feature: MA Experiment 108464 PARAMETER Experiment Name: At_Germinating_Seeds_cDNA_P Parameter: Age (day) Value: 4 vs. 0
  misc_feature: MA Experiment 108464 PARAMETER Experiment Name: At_Germinating_Seeds_cDNA_P Parameter: Tissue Value: Germinating Seeds
  misc_feature: MA Experiment ID: 108488 Result: Up-regulated in Transcription
  misc_feature: MA Experiment ID: 108489 Result: Up-regulated in Transcription
  misc_feature: MA Experiment ID: 108501 Result: Down-regulated in Transcription
  misc_feature: MA Experiment 108501 PARAMETER Experiment Name: At_ap2_floral_buds_cDNA_P Parameter: Plant Line Value: ap2 (Ler.)
  misc_feature: MA Experiment 108501 PARAMETER Experiment Name: At_ap2_floral_buds_cDNA_P Parameter: Tissue Value: Closed Flower
  misc_feature: MA Experiment ID: 108607 Result: Down-regulated in Transcription
  misc_feature: MA Experiment 108607 PARAMETER Experiment Name: At_100uM_ABA_cDNA_P Parameter: Timepoint (hr) Value: 4
  misc_feature: MA Experiment 108607 PARAMETER Experiment Name: At_100uM_ABA_cDNA_P Parameter: Tissue Value: Aerial
  misc_feature: MA Experiment 108607 PARAMETER Experiment Name: At_100uM_ABA_cDNA_P Parameter: Treatment Value: 100uM ABA vs. No Treatment
  misc_feature: MA Experiment ID: 20000113 Result: Down-regulated in Transcription
  misc_feature: MA Experiment 20000113 PARAMETER Experiment Name: At_42deg_Heat_cDNA_P Parameter: Temperature (deg C) Value: 42 vs. 22
  misc_feature: MA Experiment 20000113 PARAMETER Experiment Name: At_42deg_Heat_cDNA_P Parameter: Timepoint (hr) Value: 8
  misc_feature: MA Experiment 20000113 PARAMETER Experiment Name: At_42deg_Heat_cDNA_P Parameter: Tissue Value: Aerial
  misc_feature: MA Experiment ID: 20000180 Result: Up-regulated in Transcription
  misc_feature: MA Experiment 20000180 PARAMETER Experiment Name: At_Germinating_Seeds_P Parameter: Age (hr) Value: 24 vs. 0
  misc_feature: MA Experiment 20000180 PARAMETER Experiment Name: At_Germinating_Seeds_P Parameter: Tissue Value: Germinating Seeds
  misc_feature: MA Experiment ID: 20000182 Result: Up-regulated in Transcription
  misc_feature: MA Experiment 20000182 PARAMETER Experiment Name: At_2mM_SA_P Parameter: Age (day) Value: 14
  misc_feature: MA Experiment 20000182 PARAMETER Experiment Name: At_2mM_SA_P Parameter: Organism Value: A. thaliana
  misc_feature: MA Experiment 20000182 PARAMETER Experiment Name: At_2mM_SA_P Parameter: Plant Line Value: WS
  misc_feature: MA Experiment 20000182 PARAMETER Experiment Name: At_2mM_SA_P Parameter: Timepoint (hr) Value: 6
  misc_feature: MA Experiment 20000182 PARAMETER Experiment Name: At_2mM_SA_P Parameter: Tissue Value: Aerial
  misc_feature: MA Experiment 20000182 PARAMETER Experiment Name: At_2mM_SA_P Parameter: Treatment Value: 2mM SA vs. No Treatment
  misc_feature: MA Experiment ID: 20000185 Result: Up-regulated in Transcription
  misc_feature: MA Experiment 20000185 PARAMETER Experiment Name: At_Roots__P Parameter: Age (day) Value: 7 vs. 21
  misc_feature: MA Experiment 20000185 PARAMETER Experiment Name: At_Roots__P Parameter: Organism Value: A. thaliana
  misc_feature: MA Experiment 20000185 PARAMETER Experiment Name: At_Roots__P Parameter: Tissue Value: Roots vs. Whole Plant
  misc_feature: MA Experiment ID: 20000224 Result: Down-regulated in Transcription
  misc_feature: MA Experiment ID: 20000227 Result: Down-regulated in Transcription
  misc_feature: MA Experiment 20000227 PARAMETER Experiment Name: At_Root-Tips-vs-Tops_P Parameter: Tissue Value: Root Tips vs. Root Tops
  misc_feature: MA Experiment ID: 20000234 Result: Down-regulated in Transcription
  misc_feature: MA Experiment 20000234 PARAMETER Experiment Name: At_Siliques_P Parameter: Age (day) Value: 21
  misc_feature: MA Experiment 20000234 PARAMETER Experiment Name: At_Siliques_P Parameter: Organism Value: A. thaliana
  misc_feature: MA Experiment 20000234 PARAMETER Experiment Name: At_Siliques_P Parameter: Plant Line Value: WS
  misc_feature: MA Experiment 20000234 PARAMETER Experiment Name: At_Siliques_P Parameter: Tissue Value: Less Than 5mm Siliques vs. Whole Plant
  misc_feature: MA Experiment ID: 20000235 Result: Down-regulated in Transcription
  misc_feature: MA Experiment 20000235 PARAMETER Experiment Name: At_Siliques_P Parameter: Age (day) Value: 21
  misc_feature: MA Experiment 20000235 PARAMETER Experiment Name: At_Siliques_P Parameter: Organism Value: A. thaliana
  misc_feature: MA Experiment 20000235 PARAMETER Experiment Name: At_Siliques_P Parameter: Plant Line Value: WS
  misc_feature: MA Experiment 20000235 PARAMETER Experiment Name: At_Siliques_P Parameter: Tissue Value: 5-10mm Siliques vs. Whole Plant
  misc_feature: MA Experiment ID: 20000264 Result: Down-regulated in Transcription
  misc_feature: MA Experiment 20000264 PARAMETER Experiment Name: At_Open_Flower_P Parameter: Age (day) Value: 21
  misc_feature: MA Experiment 20000264 PARAMETER Experiment Name: At_Open_Flower_P Parameter: Plant Line Value: WS
  misc_feature: MA Experiment 20000264 PARAMETER Experiment Name: At_Open_Flower_P Parameter: Tissue Value: Open Flower vs. Whole Plant
  misc_feature: MA Experiment ID: 20000265 Result: Down-regulated in Transcription
  misc_feature: MA Experiment 20000265 PARAMETER Experiment Name: At_Open_Flower_P Parameter: Age (day) Value: 21
  misc_feature: MA Experiment 20000265 PARAMETER Experiment Name: At_Open_Flower_P Parameter: Plant Line Value: WS
  misc_feature: MA Experiment 20000265 PARAMETER Experiment Name: At_Open_Flower_P Parameter: Tissue Value: Closed Flower vs. Whole Plant
  misc_feature: MA Experiment ID: 20000286 Result: Down-regulated in Transcription
  misc_feature: MA Experiment 20000286 PARAMETER Experiment Name: At_Open_Flower_P Parameter: Age (day) Value: 21
  misc_feature: MA Experiment 20000286 PARAMETER Experiment Name: At_Open_Flower_P Parameter: Plant Line Value: WS
  misc_feature: MA Experiment 20000286 PARAMETER Experiment Name: At_Open_Flower_P Parameter: Tissue Value: Half Open vs. Whole Plant
  misc_feature: MA Experiment ID: 20000437 Result: Down-regulated in Transcription
  misc_feature: MA Experiment 20000437 PARAMETER Experiment Name: At_Drought_P Parameter: Age (day) Value: 8
  misc_feature: MA Experiment 20000437 PARAMETER Experiment Name: At_Drought_P Parameter: Organism Value: A. thaliana
  misc_feature: MA Experiment 20000437 PARAMETER Experiment Name: At_Drought_P Parameter: Plant Line Value: WS
  misc_feature: MA Experiment 20000437 PARAMETER Experiment Name: At_Drought_P Parameter: Timepoint (hr) Value: 24
  misc_feature: MA Experiment 20000437 PARAMETER Experiment Name: At_Drought_P Parameter: Tissue Value: Whole Plant
  misc_feature: MA Experiment 20000437 PARAMETER Experiment Name: At_Drought_P Parameter: Treatment Value: Drought vs. No Drought
  misc_feature: MA Experiment ID: 20000438 Result: Down-regulated in Transcription
  misc_feature: MA Experiment 20000438 PARAMETER Experiment Name: At_Shoots__P Parameter: Age (day) Value: 14
  misc_feature: MA Experiment 20000438 PARAMETER Experiment Name: At_Shoots__P Parameter: Tissue Value: Shoots vs. Whole Plant
  misc_feature: MA Experiment ID: 20000439 Result: Up-regulated in Transcription
  misc_feature: MA Experiment 20000439 PARAMETER Experiment Name: At_Roots__P Parameter: Age (day) Value: 14 vs. 21
  misc_feature: MA Experiment 20000439 PARAMETER Experiment Name: At_Roots__P Parameter: Organism Value: A. thaliana
  misc_feature: MA Experiment 20000439 PARAMETER Experiment Name: At_Roots__P Parameter: Tissue Value: Roots vs. Whole Plant
  misc_feature: MA Experiment ID: 20000794 Result: Down-regulated in Transcription
  misc_feature: MA Experiment 20000794 PARAMETER Experiment Name: At_Petals_P Parameter: Age (day) Value: 23-25 days
  misc_feature: MA Experiment 20000794 PARAMETER Experiment Name: At_Petals_P Parameter: Plant Line Value: WS
  misc_feature: MA Experiment 20000794 PARAMETER Experiment Name: At_Petals_P Parameter: Tissue Value: Petals vs. Whole plant
  misc_feature: MA Experiment ID: 20001248 Result: Up-regulated in Transcription
  misc_feature: MA Experiment 20001248 PARAMETER Experiment Name: At_Far-red-induction_P Parameter: Age (day) Value: 7
  misc_feature: MA Experiment 20001248 PARAMETER Experiment Name: At_Far-red-induction_P Parameter: Light Value: Far-red vs. White
  misc_feature: MA Experiment 20001248 PARAMETER Experiment Name: At_Far-red-induction_P Parameter: Organism Value: A. thaliana
  misc_feature: MA Experiment 20001248 PARAMETER Experiment Name: At_Far-red-induction_P Parameter: Plant Line Value: Columbia
  misc_feature: MA Experiment 20001248 PARAMETER Experiment Name: At_Far-red-induction_P Parameter: Timepoint (hr) Value: 4
  misc_feature: MA Experiment 20001248 PARAMETER Experiment Name: At_Far-red-induction_P Parameter: Tissue Value: Whole Plant
  misc_feature: MA Experiment ID: 20001451 Result: Up-regulated in Transcription
  misc_feature: MA Experiment 20001451 PARAMETER Experiment Name: At_Far-red-induction_P Parameter: Age (day) Value: 7
  misc_feature: MA Experiment 20001451 PARAMETER Experiment Name: At_Far-red-induction_P Parameter: Light Value: Far-red vs. White
  misc_feature: MA Experiment 20001451 PARAMETER Experiment Name: At_Far-red-induction_P Parameter: Organism Value: A. thaliana
  misc_feature: MA Experiment 20001451 PARAMETER Experiment Name: At_Far-red-induction_P Parameter: Plant Line Value: Columbia
  misc_feature: MA Experiment 20001451 PARAMETER Experiment Name: At_Far-red-induction_P Parameter: Timepoint (hr) Value: 24
  misc_feature: MA Experiment 20001451 PARAMETER Experiment Name: At_Far-red-induction_P Parameter: Tissue Value: Whole Plant
  misc_feature: MA Experiment ID: 20001555 Result: Down-regulated in Transcription
  misc_feature: MA Experiment 20001555 PARAMETER Experiment Name: At_Drought_Soil_Dry_P Parameter: Age (day) Value: 24
  misc_feature: MA Experiment 20001555 PARAMETER Experiment Name: At_Drought_Soil_Dry_P Parameter: Organism Value: A. thaliana
  misc_feature: MA Experiment 20001555 PARAMETER Experiment Name: At_Drought_Soil_Dry_P Parameter: Plant Line Value: WS
  misc_feature: MA Experiment 20001555 PARAMETER Experiment Name: At_Drought_Soil_Dry_P Parameter: Post Timepoint (hr) Value: None
  misc_feature: MA Experiment 20001555 PARAMETER Experiment Name: At_Drought_Soil_Dry_P Parameter: Post-Treatment Value: None
  misc_feature: MA Experiment 20001555 PARAMETER Experiment Name: At_Drought_Soil_Dry_P Parameter: Timepoint (day) Value: 10
  misc_feature: MA Experiment 20001555 PARAMETER Experiment Name: At_Drought_Soil_Dry_P Parameter: Treatment Value: Drought vs. No Drought
  misc_feature: MA Experiment ID: 20001774 Result: Down-regulated in Transcription
  misc_feature: MA Experiment 20001774 PARAMETER Experiment Name: At_Far-red-enriched-adult_P Parameter: Age (day) Value: 31
  misc_feature: MA Experiment 20001774 PARAMETER Experiment Name: At_Far-red-enriched-adult_P Parameter: Light Value: Far-red enriched vs. White
  misc_feature: MA Experiment 20001774 PARAMETER Experiment Name: At_Far-red-enriched-adult_P Parameter: Organism Value: A. thaliana
  misc_feature: MA Experiment 20001774 PARAMETER Experiment Name: At_Far-red-enriched-adult_P Parameter: Plant Line Value: Columbia
  misc_feature: MA Experiment 20001774 PARAMETER Experiment Name: At_Far-red-enriched-adult_P Parameter: Timepoint (hr) Value: 72
  misc_feature: MA Experiment 20001774 PARAMETER Experiment Name: At_Far-red-enriched-adult_P Parameter: Tissue Value: Aerial
  misc_feature: MA Experiment ID: 20001905 Result: Up-regulated in Transcription
  misc_feature: MA Experiment 20001905 PARAMETER Experiment Name: At_Drought_Reproduction_P Parameter: Age (day) Value: 40
  misc_feature: MA Experiment 20001905 PARAMETER Experiment Name: At_Drought_Reproduction_P Parameter: Organism Value: A. thaliana
  misc_feature: MA Experiment 20001905 PARAMETER Experiment Name: At_Drought_Reproduction_P Parameter: Plant Line Value: WS
  misc_feature: MA Experiment 20001905 PARAMETER Experiment Name: At_Drought_Reproduction_P Parameter: Timepoint (day) Value: 10
  misc_feature: MA Experiment 20001905 PARAMETER Experiment Name: At_Drought_Reproduction_P Parameter: Tissue Value: Rosettes
  misc_feature: MA Experiment 20001905 PARAMETER Experiment Name: At_Drought_Reproduction_P Parameter: Treatment Value: Drought vs. No Drought
gttatataatgacaccataaccatttcttctcttcacaatctttacaagaatatctctcttctacagtaaacaaaaaatggcaatgaatggtttgtccaagatggctgtagccgccgcaactgctcttctcctagttctgaccattgtcccgggcgcagtagctgtgacttacactattgaatggaccactggtgtggactactcaggttgggctaccggaaagactttcagggttggtgacattctagagttcaagtatggttcttcccacacggtggatgtggttgacaaagccggatatgatggctgcgacgcctcctcctcgactgagaaccattccgatggagacaccaaaatcgatcttaagactgtaggaataaactatttcatctgttctacacctggtcactgcagaaccaatggcggcatgaagctagccgttaatgtcgtagccggttctgccggacctccggccactcccacgccaccttcttcaactccgggaactcctaccacaccggaatcacctccgtctggcggatcacccacacccaccacacccacacctggtgcaggttcaacttctcctcctcctccaccaaaggcaagtggtgcgtctaagggagtgatgagttacgttttggtgggagtctcgatggttttgggttatggtttgtggatgtaattggtttagagagccagggtggagtcagtgcttttgcctttttaaattattttggtttttggttgtaagagaatttgggtttgtgtgccacgtcagaagctcttcattattcgtaggatttttattatctcggcatttgattatcgttatcatcatcatcatcacattcacttattctcttgttgtaataaattatactattaattttcattttcgttcatgtgg

SEQ ID NO: 106964 - protein, 202 aa, Arabidopsis thaliana; identical to SEQ ID NO: 30996
  peptide (1)..(202): Ceres Seq. ID no. 13620968
  misc_feature (36)..(118): Pfam Name: Plastocyanin-like domain Pfam Description: Plastocyanin-like domain
  misc_feature (1)..(202): Homolog of NCBI NO: 15224960 NR Description: uclacyanin II [Arabidopsis thaliana]
  misc_feature (1)..(202): Homolog of NCBI NO: 21554060 NR Description: phytocyanin [Arabidopsis thaliana]
  misc_feature (1)..(202): Homolog of NCBI NO: 25453521 NR Description: blue copper-binding protein II [imported] -
  misc_feature (1)..(202): Homolog of NCBI NO: 25453522 NR Description: blue copper-binding protein II [imported] -
  misc_feature (1)..(129): Homolog of NCBI NO: 25282796 NR Description: uclacyanin II [imported] - Arabidopsis thaliana
  misc_feature (9)..(183): Homolog of NCBI NO: 15232289 NR Description: uclacyanin 3 [Arabidopsis thaliana]
  misc_feature (9)..(200): Homolog of NCBI NO: 15232287 NR Description: plastocyanin-like domain containing protein
  misc_feature (11)..(183): Homolog of NCBI NO: 14140127 NR Description: uclacyanin 3-like protein [Oryza sativa]
  misc_feature (9)..(190): Homolog of NCBI NO: 2493318 NR Description: Blue copper protein precursor
  misc_feature (1)..(167): Homolog of NCBI NO: 38636764 NR Description: putative blue copper binding protein [Oryza

SEQ ID NO: 106965 - protein, 200 aa, Arabidopsis thaliana; identical to SEQ ID NO: 30997
  peptide (1)..(200): Ceres Seq. ID no. 13620969
  misc_feature (34)..(116): Pfam Name: Plastocyanin-like domain Pfam Description: Plastocyanin-like domain
  misc_feature (1)..(200): Homolog of NCBI NO: 15224960 NR Description: uclacyanin II [Arabidopsis thaliana]
  misc_feature (1)..(200): Homolog of NCBI NO: 21554060 NR Description: phytocyanin [Arabidopsis thaliana]
  misc_feature (1)..(200): Homolog of NCBI NO: 25453521 NR Description: blue copper-binding protein II [imported] -
  misc_feature (1)..(200): Homolog of NCBI NO: 25453522 NR Description: blue copper-binding protein II [imported] -
  misc_feature (1)..(127): Homolog of NCBI NO: 25282796 NR Description: uclacyanin II [imported] - Arabidopsis thaliana
  misc_feature (7)..(181): Homolog of NCBI NO: 15232289 NR Description: uclacyanin 3 [Arabidopsis thaliana]
  misc_feature (7)..(198): Homolog of NCBI NO: 15232287 NR Description: plastocyanin-like domain containing protein
  misc_feature (9)..(181): Homolog of NCBI NO: 14140127 NR Description: uclacyanin 3-like protein [Oryza sativa]
  misc_feature (7)..(188): Homolog of NCBI NO: 2493318 NR Description: Blue copper protein precursor
  misc_feature (1)..(165): Homolog of NCBI NO: 38636764 NR Description: putative blue copper binding protein [Oryza

SEQ ID NO: 106966 - protein, 194 aa, Arabidopsis thaliana; identical to SEQ ID NO: 30998
  peptide (1)..(194): Ceres Seq. ID no. 13620970
  misc_feature (28)..(110): Pfam Name: Plastocyanin-like domain Pfam Description: Plastocyanin-like domain
  misc_feature (1)..(194): Homolog of NCBI NO: 15224960 NR Description: uclacyanin II [Arabidopsis thaliana]
  misc_feature (1)..(194): Homolog of NCBI NO: 21554060 NR Description: phytocyanin [Arabidopsis thaliana]
  misc_feature (1)..(194): Homolog of NCBI NO: 25453521 NR Description: blue copper-binding protein II [imported] -
  misc_feature (1)..(194): Homolog of NCBI NO: 25453522 NR Description: blue copper-binding protein II [imported] -
  misc_feature (1)..(121): Homolog of NCBI NO: 25282796 NR Description: uclacyanin II [imported] - Arabidopsis thaliana
  misc_feature (1)..(175): Homolog of NCBI NO: 15232289 NR Description: uclacyanin 3 [Arabidopsis thaliana]
  misc_feature (1)..(192): Homolog of NCBI NO: 15232287 NR Description: plastocyanin-like domain containing protein
  misc_feature (3)..(175): Homolog of NCBI NO: 14140127 NR Description: uclacyanin 3-like protein [Oryza sativa]
  misc_feature (1)..(182): Homolog of NCBI NO: 2493318 NR Description: Blue copper protein precursor
  misc_feature (1)..(159): Homolog of NCBI NO: 38636764 NR Description: putative blue copper binding protein [Oryza

SEQ ID NO: 106967 - DNA, 766 bp, Arabidopsis thaliana
  misc_feature (1)..(766): Ceres Seq. ID no. 13621000
  misc_feature: MA Experiment ID: 20000184 Result: Down-regulated in Transcription
  misc_feature: MA Experiment 20000184 PARAMETER Experiment Name: At_Shoots__P Parameter: Age (day) Value: 7
  misc_feature: MA Experiment 20000184 PARAMETER Experiment Name: At_Shoots__P Parameter: Tissue Value: Shoots vs. Whole Plant
  misc_feature: MA Experiment ID: 20000185 Result: Up-regulated in Transcription
  misc_feature: MA Experiment 20000185 PARAMETER Experiment Name: At_Roots__P Parameter: Age (day) Value: 7 vs. 21
  misc_feature: MA Experiment 20000185 PARAMETER Experiment Name: At_Roots__P Parameter: Organism Value: A. thaliana
  misc_feature: MA Experiment 20000185 PARAMETER Experiment Name: At_Roots__P Parameter: Tissue Value: Roots vs. Whole Plant
  misc_feature: MA Experiment ID: 20000495 Result: Up-regulated in Transcription
  misc_feature: MA Experiment 20000495 PARAMETER Experiment Name: At_Guard_Cells_P Parameter: Harvest Date Value: 8/2/2002
  misc_feature: MA Experiment 20000495 PARAMETER Experiment Name: At_Guard_Cells_P Parameter: Organism Value: A. thaliana
  misc_feature: MA Experiment 20000495 PARAMETER Experiment Name: At_Guard_Cells_P Parameter: Tissue Value: Guard Cells vs. Leaves
  misc_feature: MA Experiment ID: 20001451 Result: Up-regulated in Transcription
  misc_feature: MA Experiment 20001451 PARAMETER Experiment Name: At_Far-red-induction_P Parameter: Age (day) Value: 7
  misc_feature: MA Experiment 20001451 PARAMETER Experiment Name: At_Far-red-induction_P Parameter: Light Value: Far-red vs. White
  misc_feature: MA Experiment 20001451 PARAMETER Experiment Name: At_Far-red-induction_P Parameter: Organism Value: A. thaliana
  misc_feature: MA Experiment 20001451 PARAMETER Experiment Name: At_Far-red-induction_P Parameter: Plant Line Value: Columbia
  misc_feature: MA Experiment 20001451 PARAMETER Experiment Name: At_Far-red-induction_P Parameter: Timepoint (hr) Value: 24
  misc_feature: MA Experiment 20001451 PARAMETER Experiment Name: At_Far-red-induction_P Parameter: Tissue Value: Whole Plant
agacaaagtaaggaggccagacagcagacccgtctctctccgtctccatctccgccatgaccagctcttccgctccttcacgcaaggctttaagcaagatcgcgtgtaataggttgcagaaagagctttctgagtggcaattgaatccccccactggatttcgtcacaaagtcactgataatcttcaaaaatggacaatagatgttaccggagctccagggacactttacgctaatgagacttatcagcttcaggttgaatttcctgaacattaccctatggaagcaccccaggtagtgtttgtttctccggcaccttcacatccacatatatacagcaatggacatatttgtttagatattctatatgactcatggtcaccagcaatgacagtgaattcagtctgcatcagcattctttcgatgctatcaagttcacccgcaaagcaacgccctgcggataacgatcgttatgtgaagaactgtaagaatgggaggtctcctaaggagacgaggtggtggttccatgacgacaaggtttgatgcacgaccaagattaaagagaagccttaatatgttaatgatgacatttaaaaatgtcaaaacctaactttttgtctcactcttactatggaatatgtcaagtgaagagctctgaattacataagagaacactgagagcgggaatctatatttcgtactgaacatgtccacaaaaagatcaattaatgctaaacaataagttgtcattaatgccaatagttatt

SEQ ID NO: 106968 - protein, 161 aa, Arabidopsis thaliana
  peptide (1)..(161): Ceres Seq. ID no. 13621001
  misc_feature (1)..(161): Homolog of NCBI NO: 18401461 NR Description: ubiquitin-conjugating enzyme 15 (UBC15)
  misc_feature (1)..(161): Homolog of NCBI NO: 481811 NR Description: ubiquitin-conjugating enzyme UBC2-1 - Arabidopsis
  misc_feature (1)..(161): Homolog of NCBI NO: 18422281 NR Description: ubiquitin-conjugating enzyme 18 (UBC18)
  misc_feature (1)..(161): Homolog of NCBI NO: 18410856 NR Description: ubiquitin-conjugating enzyme 16 (UBC16)
  misc_feature (1)..(161): Homolog of NCBI NO: 2801444 NR Description: ubiquitin-conjugating enzyme 16 [Arabidopsis
  misc_feature (1)..(161): Homolog of NCBI NO: 4090259 NR Description: ubiquitin-conjugating enzyme E2 [Pseudotsuga
  misc_feature (1)..(161): Homolog of NCBI NO: 18419831 NR Description: ubiquitin-conjugating enzyme 17 (UBC17)
  misc_feature (1)..(130): Homolog of NCBI NO: 34897008 NR Description: putative ubiquitin-conjugating enzyme E2 [Oryza
  misc_feature (1)..(102): Homolog of NCBI NO: 25293672 NR Description: protein F27F5.13 [imported] - Arabidopsis >gi|7767660|gb|AAF69157.1|AC007915_9 F27F5.13 [Arabidopsis
  misc_feature (65)..(161): Homolog of NCBI NO: 25293670 NR Description: ubiquitin-conjugating enzyme 18 [imported] -
MTSSSAPSRKALSKIACNRLQKELSEWQLNPPTGFRHKVTDNLQKWTIDVTGAPGTLYANETYQLQVEFPEHYPMEAPQVVFVSPAPSHPHIYSNGHICLDILYDSWSPAMTVNSVCISILSMLSSSPAKQRPADNDRYVKNCKNGRSPKETRWWFHDDKV

SEQ ID NO: 106969 - protein, 87 aa, Arabidopsis thaliana; identical to SEQ ID NO: 76963
  peptide (1)..(87): Ceres Seq. ID no. 13621002
  misc_feature (1)..(87): Homolog of NCBI NO: 18401461 NR Description: ubiquitin-conjugating enzyme 15 (UBC15)
  misc_feature (1)..(87): Homolog of NCBI NO: 481811 NR Description: ubiquitin-conjugating enzyme UBC2-1 - Arabidopsis
  misc_feature (1)..(87): Homolog of NCBI NO: 18422281 NR Description: ubiquitin-conjugating enzyme 18 (UBC18)
  misc_feature (1)..(87): Homolog of NCBI NO: 18410856 NR Description: ubiquitin-conjugating enzyme 16 (UBC16)
  misc_feature (1)..(87): Homolog of NCBI NO: 2801444 NR Description: ubiquitin-conjugating enzyme 16 [Arabidopsis
  misc_feature (1)..(87): Homolog of NCBI NO: 4090259 NR Description: ubiquitin-conjugating enzyme E2 [Pseudotsuga
  misc_feature (1)..(87): Homolog of NCBI NO: 18419831 NR Description: ubiquitin-conjugating enzyme 17 (UBC17)
  misc_feature (1)..(56): Homolog of NCBI NO: 34897008 NR Description: putative ubiquitin-conjugating enzyme E2 [Oryza
  misc_feature (1)..(28): Homolog of NCBI NO: 25293672 NR Description: protein F27F5.13 [imported] - Arabidopsis >gi|7767660|gb|AAF69157.1|AC007915_9 F27F5.13 [Arabidopsis
  misc_feature (1)..(87): Homolog of NCBI NO: 25293670 NR Description: ubiquitin-conjugating enzyme 18 [imported] -

SEQ ID NO: 106970 - DNA, 1481 bp, Arabidopsis thaliana
  misc_feature (1)..(1481): Ceres Seq. ID no. 13621007
  misc_feature: MA Experiment ID: 108461 Result: Up-regulated in Transcription
  misc_feature: MA Experiment 108461 PARAMETER Experiment Name: At_Germinating_Seeds_cDNA_P Parameter: Age (day) Value: 1 vs. 0
  misc_feature: MA Experiment 108461 PARAMETER Experiment Name: At_Germinating_Seeds_cDNA_P Parameter: Tissue Value: Germinating Seeds
  misc_feature: MA Experiment ID: 108469 Result: Up-regulated in Transcription
  misc_feature: MA Experiment ID: 20000069 Result: Down-regulated in Transcription
  misc_feature: MA Experiment 20000069 PARAMETER Experiment Name: At_100uM_ABA_Mutants_cDNA_P Parameter: Plant Line Value: CS23
  misc_feature: MA Experiment 20000069 PARAMETER Experiment Name: At_100uM_ABA_Mutants_cDNA_P Parameter: Timepoint (hr) Value: 6
  misc_feature: MA Experiment 20000069 PARAMETER Experiment Name: At_100uM_ABA_Mutants_cDNA_P Parameter: Tissue Value: Aerial
  misc_feature: MA Experiment 20000069 PARAMETER Experiment Name: At_100uM_ABA_Mutants_cDNA_P Parameter: Treatment Value: 100uM ABA vs. No Treatment
  misc_feature: MA Experiment ID: 20000171 Result: Down-regulated in Transcription
  misc_feature: MA Experiment 20000171 PARAMETER Experiment Name: At_42deg_Heat_P Parameter: Age (day) Value: 14
  misc_feature: MA Experiment 20000171 PARAMETER Experiment Name: At_42deg_Heat_P Parameter: Organism Value: A. thaliana
  misc_feature: MA Experiment 20000171 PARAMETER Experiment Name: At_42deg_Heat_P Parameter: Plant Line Value: WS
  misc_feature: MA Experiment 20000171 PARAMETER Experiment Name: At_42deg_Heat_P Parameter: Temperature (deg C) Value: 42 vs. 22
  misc_feature: MA Experiment 20000171 PARAMETER Experiment Name: At_42deg_Heat_P Parameter: Timepoint (hr) Value: 1
  misc_feature: MA Experiment 20000171 PARAMETER Experiment Name: At_42deg_Heat_P Parameter: Tissue Value: Aerial
  misc_feature: MA Experiment ID: 20000173 Result: Down-regulated in Transcription
  misc_feature: MA Experiment 20000173 PARAMETER Experiment Name: At_42deg_Heat_P Parameter: Age (day) Value: 14
  misc_feature: MA Experiment 20000173 PARAMETER Experiment Name: At_42deg_Heat_P Parameter: Organism Value: A. thaliana
  misc_feature: MA Experiment 20000173 PARAMETER Experiment Name: At_42deg_Heat_P Parameter: Plant Line Value: WS
  misc_feature: MA Experiment 20000173 PARAMETER Experiment Name: At_42deg_Heat_P Parameter: Temperature (deg C) Value: 42 vs. 22
  misc_feature: MA Experiment 20000173 PARAMETER Experiment Name: At_42deg_Heat_P Parameter: Timepoint (hr) Value: 6
  misc_feature: MA Experiment 20000173 PARAMETER Experiment Name: At_42deg_Heat_P Parameter: Tissue Value: Aerial
  misc_feature: MA Experiment ID: 20000179 Result: Up-regulated in Transcription
  misc_feature: MA Experiment 20000179 PARAMETER Experiment Name: At_Germinating_Seeds_P Parameter: Age (hr) Value: 6 vs. 0
  misc_feature: MA Experiment 20000179 PARAMETER Experiment Name: At_Germinating_Seeds_P Parameter: Tissue Value: Germinating Seeds
  misc_feature: MA Experiment ID: 20000180 Result: Up-regulated in Transcription
  misc_feature: MA Experiment 20000180 PARAMETER Experiment Name: At_Germinating_Seeds_P Parameter: Age (hr) Value: 24 vs. 0
  misc_feature: MA Experiment 20000180 PARAMETER Experiment Name: At_Germinating_Seeds_P Parameter: Tissue Value: Germinating Seeds
  misc_feature: MA Experiment ID: 20000185 Result: Up-regulated in Transcription
  misc_feature: MA Experiment 20000185 PARAMETER Experiment Name: At_Roots__P Parameter: Age (day) Value: 7 vs. 21
  misc_feature: MA Experiment 20000185 PARAMETER Experiment Name: At_Roots__P Parameter: Organism Value: A. thaliana
  misc_feature: MA Experiment 20000185 PARAMETER Experiment Name: At_Roots__P Parameter: Tissue Value: Roots vs. Whole Plant
  misc_feature: MA Experiment ID: 20000224 Result: Up-regulated in Transcription
  misc_feature: MA Experiment ID: 20000437 Result: Down-regulated in Transcription
  misc_feature: MA Experiment 20000437 PARAMETER Experiment Name: At_Drought_P Parameter: Age (day) Value: 8
  misc_feature: MA Experiment 20000437 PARAMETER Experiment Name: At_Drought_P Parameter: Organism Value: A. thaliana
  misc_feature: MA Experiment 20000437 PARAMETER Experiment Name: At_Drought_P Parameter: Plant Line Value: WS
  misc_feature: MA Experiment 20000437 PARAMETER Experiment Name: At_Drought_P Parameter: Timepoint (hr) Value: 24
  misc_feature: MA Experiment 20000437 PARAMETER Experiment Name: At_Drought_P Parameter: Tissue Value: Whole Plant
  misc_feature: MA Experiment 20000437 PARAMETER Experiment Name: At_Drought_P Parameter: Treatment Value: Drought vs. No Drought
  misc_feature: MA Experiment ID: 20001451 Result: Down-regulated in Transcription
  misc_feature: MA Experiment 20001451 PARAMETER Experiment Name: At_Far-red-induction_P Parameter: Age (day) Value: 7
  misc_feature: MA Experiment 20001451 PARAMETER Experiment Name: At_Far-red-induction_P Parameter: Light Value: Far-red vs. White
  misc_feature: MA Experiment 20001451 PARAMETER Experiment Name: At_Far-red-induction_P Parameter: Organism Value: A. thaliana
  misc_feature: MA Experiment 20001451 PARAMETER Experiment Name: At_Far-red-induction_P Parameter: Plant Line Value: Columbia
  misc_feature: MA Experiment 20001451 PARAMETER Experiment Name: At_Far-red-induction_P Parameter: Timepoint (hr) Value: 24
  misc_feature: MA Experiment 20001451 PARAMETER Experiment Name: At_Far-red-induction_P Parameter: Tissue Value: Whole Plant
atccgatctctcaatcctctcaaatctcaaactctctcttcccatcactctctcgctctctcttcaatctcatctcaatcatgacagagcaagagatctgcgtgagggttacaagagcggcggcgaaacgaaaagcttcgacggcgatgggtattgacggagatcgggtcaacaagaagagagttgttctcggtgagcttctaaacgtctccaatgtcaatctcttggctaatctcaatcagaagaaagaaacccagaagccaaaaaggaatcttaaacctcctccggcgaaacagattaagtcagctccggtggctattattgacctagaatcaaaatctgacattgattctcgatctgatgatcctcaaatgtgtggaccttatgttgctgatatctatgagtatcttcgtcaacttgaggtgaagccaaagcagagacctttaccagattacatagagaaagttcagaaagatgtaacaccaagtatgagaggtgttttggttgattggttagtggaagttgctgaagagtataaacttggatctgaaacactttatctcactgtctcacatattgatagattcttgtctttaaagactgttaacaagcaaaagctacagcttgttggagtttctgctatgcttattgcttcgaagtatgaagagataagtcctcctaaagtggatgatttttgttacattacggataatacgttttcgaaacaagatgttgtgaagatggaagctgatatacttcttgctcttcagtttgagttgggaagaccaacgattaatacttttatgagacggtttactagagttgcacaagacgatttcaaagttccacatttgcagctagagcctctttgttgctatttgtcagaattgagtatattagattataagactgtgaagtttgtgccgtctctgttggctgcttctgctgtttttctcgctcggttcatcatccgtccgaaacaacatccttggaaccaaatgttagaagagtacacaaagtacaaagcggctgatctacaagtgtgtgttggaatcatacatgacttgtatttgagcagaagaggaggtgctttacaagctgttagagagaaatataagcaccataagttccaatgcgttgcgaccatgcctgtttcaccagagctgccggttaccttttgggaggatgttaccatttgatctgaggttatgctatcttaagcaaatgttacggagctggattaccgaatcttgtttcaaatagtataatggacacagatcttcaagtgaagctagaagagtaagaaatatagaagtgaaggcaggagcaaataagtctgcgttatgtgaagatgtgtgatgtattattgaaatctcttcttttttatttacaaaattttagtgtgaaattcggaataatataattttatacaattatgcaatatgatataagtatttatgtgacatgatcttattttgttt

SEQ ID NO: 106971 - protein, 398 aa, Arabidopsis thaliana
  peptide (1)..(398): Ceres Seq. ID no. 13621008
  misc_feature (262)..(389): Pfam Name: Cyclin, C-terminal domain Pfam Description: Cyclin, C-terminal domain
  misc_feature (27)..(398): Homolog of NCBI NO: 30694019 NR Description: cyclin family [Arabidopsis thaliana]
  misc_feature (27)..(398): Homolog of NCBI NO: 15220147 NR Description: cyclin, putative [Arabidopsis thaliana]
  misc_feature (65)..(398): Homolog of NCBI NO: 15239172 NR Description: cyclin, putative [Arabidopsis thaliana]
  misc_feature (108)..(396): Homolog of NCBI NO: 15220145 NR Description: cyclin, putative [Arabidopsis thaliana]
  misc_feature (25)..(396): Homolog of NCBI NO: 7438513 NR Description: cyclin A-type (clone 59) - common tobacco
  misc_feature (27)..(396): Homolog of NCBI NO: 7438516 NR Description: cyclin A-type - Madagascar periwinkle
  misc_feature (111)..(394): Homolog of NCBI NO: 7242793 NR Description: cyclin A3.1 [Pisum sativum]
  misc_feature (27)..(218): Homolog of NCBI NO: 18401622 NR Description: cyclin family [Arabidopsis thaliana]
  misc_feature (35)..(396): Homolog of NCBI NO: 40538955 NR Description: putative A-type cyclin [Oryza sativa (japonica
PISQSSQISNSLFPSLSRSLFNLISIMTEQEICVRVTRAAAKRKASTAMGIDGDRVNKKRVVLGELLNVSNVNLLANLNQKKETQKPKRNLKPPPAKQIKSAPVAIIDLESKSDIDSRSDDPQMCGPYVADIYEYLRQLEVKPKQRPLPDYIEKVQKDVTPSMRGVLVDWLVEVAEEYKLGSETLYLTVSHIDRFLSLKTVNKQKLQLVGVSAMLIASKYEEISPPKVDDFCYITDNTFSKQDVVKMEADILLALQFELGRPTINTFMRRFTRVAQDDFKVPHLQLEPLCCYLSELSILDYKTVKFVPSLLAASAVFLARFIIRPKQHPWNQMLEEYTKYKAADLQVCVGIIHDLYLSRRGGALQAVREKYKHHKFQCVATMPVSPELPVTFWEDVTI

SEQ ID NO: 106972 - protein, 372 aa, Arabidopsis thaliana; identical to SEQ ID NO: 41537
  peptide (1)..(372): Ceres Seq. ID no. 13621009
  misc_feature (236)..(363): Pfam Name: Cyclin, C-terminal domain Pfam Description: Cyclin, C-terminal domain
  misc_feature (1)..(372): Homolog of NCBI NO: 30694019 NR Description: cyclin family [Arabidopsis thaliana]
  misc_feature (1)..(372): Homolog of NCBI NO: 15220147 NR Description: cyclin, putative [Arabidopsis thaliana]
  misc_feature (39)..(372): Homolog of NCBI NO: 15239172 NR Description: cyclin, putative [Arabidopsis thaliana]
  misc_feature (82)..(370): Homolog of NCBI NO: 15220145 NR Description: cyclin, putative [Arabidopsis thaliana]
  misc_feature (1)..(370): Homolog of NCBI NO: 7438513 NR Description: cyclin A-type (clone 59) - common tobacco
  misc_feature (1)..(370): Homolog of NCBI NO: 7438516 NR Description: cyclin A-type - Madagascar periwinkle
  misc_feature (85)..(368): Homolog of NCBI NO: 7242793 NR Description: cyclin A3.1 [Pisum sativum]
  misc_feature (1)..(192): Homolog of NCBI NO: 18401622 NR Description: cyclin family [Arabidopsis thaliana]
  misc_feature (9)..(370): Homolog of NCBI NO: 40538955 NR Description: putative A-type cyclin [Oryza sativa (japonica

SEQ ID NO: 106973 - protein, 350 aa, Arabidopsis thaliana; identical to SEQ ID NO: 41538
  peptide (1)..(350): Ceres Seq. ID no. 13621010
  misc_feature (214)..(341): Pfam Name: Cyclin, C-terminal domain Pfam Description: Cyclin, C-terminal domain
  misc_feature (1)..(350): Homolog of NCBI NO: 30694019 NR Description: cyclin family [Arabidopsis thaliana]
  misc_feature (1)..(350): Homolog of NCBI NO: 15220147 NR Description: cyclin, putative [Arabidopsis thaliana]
  misc_feature (17)..(350): Homolog of NCBI NO: 15239172 NR Description: cyclin, putative [Arabidopsis thaliana]
  misc_feature (60)..(348): Homolog of NCBI NO: 15220145 NR Description: cyclin, putative [Arabidopsis thaliana]
  misc_feature (1)..(348): Homolog of NCBI NO: 7438513 NR Description: cyclin A-type (clone 59) - common tobacco
  misc_feature (1)..(348): Homolog of NCBI NO: 7438516 NR Description: cyclin A-type - Madagascar periwinkle
  misc_feature (63)..(346): Homolog of NCBI NO: 7242793 NR Description: cyclin A3.1 [Pisum sativum]
  misc_feature (1)..(170): Homolog of NCBI NO: 18401622 NR Description: cyclin family [Arabidopsis thaliana]
  misc_feature (1)..(348): Homolog of NCBI NO: 40538955 NR Description: putative A-type cyclin [Oryza sativa (japonica

SEQ ID NO: 106974 - DNA, 1742 bp, Arabidopsis thaliana
  misc_feature (1)..(1742): Ceres Seq. ID no. 13621015
  misc_feature: MA Experiment ID: 20000185 Result: Up-regulated in Transcription
  misc_feature: MA Experiment 20000185 PARAMETER Experiment Name: At_Roots__P Parameter: Age (day) Value: 7 vs. 21
  misc_feature: MA Experiment 20000185 PARAMETER Experiment Name: At_Roots__P Parameter: Organism Value: A. thaliana
  misc_feature: MA Experiment 20000185 PARAMETER Experiment Name: At_Roots__P Parameter: Tissue Value: Roots vs. Whole Plant
  misc_feature: MA Experiment ID: 20000227 Result: Up-regulated in Transcription
  misc_feature: MA Experiment 20000227 PARAMETER Experiment Name: At_Root-Tips-vs-Tops_P Parameter: Tissue Value: Root Tips vs. Root Tops
  misc_feature: MA Experiment ID: 20000439 Result: Up-regulated in Transcription
  misc_feature: MA Experiment 20000439 PARAMETER Experiment Name: At_Roots__P Parameter: Age (day) Value: 14 vs. 21
  misc_feature: MA Experiment 20000439 PARAMETER Experiment Name: At_Roots__P Parameter: Organism Value: A. thaliana
  misc_feature: MA Experiment 20000439 PARAMETER Experiment Name: At_Roots__P Parameter: Tissue Value: Roots vs. Whole Plant
  misc_feature: MA Experiment ID: 20000527 Result: Down-regulated in Transcription
  misc_feature: MA Experiment 20000527 PARAMETER Experiment Name: At_10percent_PEG_P Parameter: Age (day) Value: 20
  misc_feature: MA Experiment 20000527 PARAMETER Experiment Name: At_10percent_PEG_P Parameter: Organism Value: A. thaliana
  misc_feature: MA Experiment 20000527 PARAMETER Experiment Name: At_10percent_PEG_P Parameter: Plant Line Value: WS
  misc_feature: MA Experiment 20000527 PARAMETER Experiment Name: At_10percent_PEG_P Parameter: Timepoint (day) Value: 20
  misc_feature: MA Experiment 20000527 PARAMETER Experiment Name: At_10percent_PEG_P Parameter: Tissue Value: Whole Plant
  misc_feature: MA Experiment 20000527 PARAMETER Experiment Name: At_10percent_PEG_P Parameter: Treatment Value: 10percent PEG vs. No Treatment
atcaccaaaagaagcacatcaataaagaaaatacaaaccatggcaattccaaaagctcactactctttagctgttcttgtccttctctttgtcgtcgtttcgagtagccaaaaggtttgcaatccagaatgcaaggccaaagaacccttccactgcgataatactcatgcattcaaccgtacgggatttcccagaaatttcacttttggtgcagctacttcggcttatcaaattgaaggtgcagcacatagagcacttaatggatgggactatttcacgcatagatatccagaaaaagtaccggatcgtagttcaggagatcttgcttgtgattcgtatgatctttataaggatgatgtcaaactactaaaaagaatgaatgttcaagcttacagactctcgatagcatggtcaagggtcttaccaaagggaagactgactgggggagtggacgagaatgggataacatactacaacaatctcattaacgagttgaaagcaaatggcatagaaccatatgttactatatttcattgggatgttccccaaactttagaagacgaatatggaggtttcttaagcacacgtatagtggaggactacacaaactacgctgagcttctattccaaagattcggagacagggtcaaattttggatcactttaaatcagcctttctctcttgcaaccaaaggctatggagatggatcgtatccaccaggacggtgcaccggctgtgaacttggaggagattctggagttgaaccttatacagttgcacataaccaacttctagctcatgcaaaaactgtatctttatacagaaaaagatatcagaaatttcaaggtggtaagataggaacaaccttgatcgggagatggttcgccccgctaaatgaatttagcgaactcgacaaggctgctgcaaaacgagcattcgacttttttgttggatggttcttggatccattggtgtacggaaaatatccaacgataatgagagagatggtaggagatagattgccagaattcactcctgagcaatcagctttagttaaaggatcacttgattttctagggttgaactattatgttacacaatatgcaactgacgcacctcctccgacacaacttaatgcaataacggatgcacgagttactcttggattttatcgcaatggagttcctattggtgttgctcctagcttcgtctactatcctccaggattccgtcagattctaaactacatcaaagacaactacaaaaatccacttacctacatcaccgaaaacggagttgctgatcttgatcttggaaacgtaacgcttgcaactgctcttgccgataatggacggattcaaaaccattgcagccatctctcttgtcttaaatgcgctatgaaggatggatgcaacgtagcaggatattttgcatggtcattgatggacaattacgaattcggaaatggttacaccctccggtttggtatgaattgggtcaatttcactaatcctgctgatcgaaaagaaaaagcttctggaaaatggttctctaagttcctcgcaaaataagttgaagccctagatttataaatccaaacctcgaatgtaataacaattgtactgtatgtattttaagaccttatgtgttttgtatatgatgttaataatgttgtaataatcggatcctaatttcgtgcacagttcataaataaataaaaatgtatacaatgtttgtaatt

SEQ ID NO: 106975 - protein, 523 aa, Arabidopsis thaliana
  peptide (1)..(523): Ceres Seq. ID no. 13621016
  misc_feature (59)..(523): Pfam Name: Glycosyl hydrolase family 1 Pfam Description: Glycosyl hydrolase family 1
  misc_feature (14)..(523): Homolog of NCBI NO: 30694106 NR Description: glycosyl hydrolase family 1 [Arabidopsis >gi|23306442|gb|AAN17448.1| thioglucosidase, putative thaliana] >gi|25084292|gb|AAN72213.1| thioglucosidase, putative
  misc_feature (14)..(523): Homolog of NCBI NO: 30694982 NR Description: glycosyl hydrolase family 1 [Arabidopsis thaliana]
  misc_feature (14)..(523): Homolog of NCBI NO: 25289450 NR Description: hypothetical protein F16N3.11 [imported] - thaliana >gi|5668800|gb|AAD46026.1|AC007519_11 Similar to
  misc_feature (142)..(523): Homolog of NCBI NO: 25289451 NR Description: probable myrosinase precursor 53323-50499 - Arabidopsis thaliana >gi|12325369|gb|AAG52628.1|AC024261_15
  misc_feature (14)..(137): Homolog of NCBI NO: 25289451 NR Description: probable myrosinase precursor 53323-50499 - Arabidopsis thaliana >gi|12325369|gb|AAG52628.1|AC024261_15
  misc_feature (71)..(432): Homolog of NCBI NO: 15217941 NR Description: glycosyl hydrolase family 1 [Arabidopsis thaliana]
  misc_feature (475)..(523): Homolog of NCBI NO: 15217941 NR Description: glycosyl hydrolase family 1 [Arabidopsis thaliana]
  misc_feature (14)..(39): Homolog of NCBI NO: 15217941 NR Description: glycosyl hydrolase family 1 [Arabidopsis thaliana]
  misc_feature (59)..(523): Homolog of NCBI NO: 38344468 NR Description: OSJNBa0022H21.3 [Oryza sativa (japonica
  misc_feature (26)..(521): Homolog of NCBI NO: 13605680 NR Description: AT5g25980/T1N24_18 [Arabidopsis thaliana]
ITKRSTSIKKIQTMAIPKAHYSLAVLVLLFVVVSSSQKVCNPECKAKEPFHCDNTHAFNRTGFPRNFTFGAATSAYQIEGAAHRALNGWDYFTHRYPEKVPDRSSGDLACDSYDLYKDDVKLLKRMNVQAYRLSIAWSRVLPKGRLTGGVDENGITYYNNLINELKANGIEPYVTIFHWDVPQTLEDEYGGFLSTRIVEDYTNYAELLFQRFGDRVKFWITLNQPFSLATKGYGDGSYPPGRCTGCELGGDSGVEPYTVAHNQLLAHAKTVSLYRKRYQKFQGGKIGTTLIGRWFAPLNEFSELDKAAAKRAFDFFVGWFLDPLVYGKYPTIMREMVGDRLPEFTPEQSALVKGSLDFLGLNYYVTQYATDAPPPTQLNAITDARVTLGFYRNGVPIGVAPSFVYYPPGFRQILNYIKDNYKNPLTYITENGVADLDLGNVTLATALADNGRIQNHCSHLSCLKCAMKDGCNVAGYFAWSLMDNYEFGNGYTLRFGMNWVNFTNPADRKEKASGKWFSKFLAK

SEQ ID NO: 106976 - protein, 510 aa, Arabidopsis thaliana
  peptide (1)..(510): Ceres Seq. ID no. 13621017
  misc_feature (46)..(510): Pfam Name: Glycosyl hydrolase family 1 Pfam Description: Glycosyl hydrolase family 1
  misc_feature (1)..(510): Homolog of NCBI NO: 30694106 NR Description: glycosyl hydrolase family 1 [Arabidopsis >gi|23306442|gb|AAN17448.1| thioglucosidase, putative thaliana] >gi|25084292|gb|AAN72213.1| thioglucosidase, putative
  misc_feature (1)..(510): Homolog of NCBI NO: 30694982 NR Description: glycosyl hydrolase family 1 [Arabidopsis thaliana]
  misc_feature (1)..(510): Homolog of NCBI NO: 25289450 NR Description: hypothetical protein F16N3.11 [imported] - thaliana >gi|5668800|gb|AAD46026.1|AC007519_11 Similar to
  misc_feature (129)..(510): Homolog of NCBI NO: 25289451 NR Description: probable myrosinase precursor 53323-50499 - Arabidopsis thaliana >gi|12325369|gb|AAG52628.1|AC024261_15
  misc_feature (1)..(124): Homolog of NCBI NO: 25289451 NR Description: probable myrosinase precursor 53323-50499 - Arabidopsis thaliana >gi|12325369|gb|AAG52628.1|AC024261_15
  misc_feature (58)..(419): Homolog of NCBI NO: 15217941 NR Description: glycosyl hydrolase family 1 [Arabidopsis thaliana]
  misc_feature (462)..(510): Homolog of NCBI NO: 15217941 NR Description: glycosyl hydrolase family 1 [Arabidopsis thaliana]
  misc_feature (1)..(26): Homolog of NCBI NO: 15217941 NR Description: glycosyl hydrolase family 1 [Arabidopsis thaliana]
  misc_feature (46)..(510): Homolog of NCBI NO: 38344468 NR Description: OSJNBa0022H21.3 [Oryza sativa (japonica
  misc_feature (13)..(508): Homolog of NCBI NO: 13605680 NR Description: AT5g25980/T1N24_18 [Arabidopsis thaliana]
MAIPKAHYSLAVLVLLFVVVSSSQKVCNPECKAKEPFHCDNTHAFNRTGFPRNFTFGAATSAYQIEGAAHRALNGWDYFTHRYPEKVPDRSSGDLACDSYDLYKDDVKLLKRMNVQAYRLSIAWSRVLPKGRLTGGVDENGITYYNNLINELKANGIEPYVTIFHWDVPQTLEDEYGGFLSTRIVEDYTNYAELLFQRFGDRVKFWITLNQPFSLATKGYGDGSYPPGRCTGCELGGDSGVEPYTVAHNQLLAHAKTVSLYRKRYQKFQGGKIGTTLIGRWFAPLNEFSELDKAAAKRAFDFFVGWFLDPLVYGKYPTIMREMVGDRLPEFTPEQSALVKGSLDFLGLNYYVTQYATDAPPPTQLNAITDARVTLGFYRNGVPIGVAPSFVYYPPGFRQILNYIKDNYKNPLTYITENGVADLDLGNVTLATALADNGRIQNHCSHLSCLKCAMKDGCNVAGYFAWSLMDNYEFGNGYTLRFGMNWVNFTNPADRKEKASGKWFSKFLAK

SEQ ID NO: 106977 - protein, 398 aa, Arabidopsis thaliana
  peptide (1)..(398): Ceres Seq. ID no. 13621018
  misc_feature (1)..(398): Pfam Name: Glycosyl hydrolase family 1 Pfam Description: Glycosyl hydrolase family 1
  misc_feature (1)..(398): Homolog of NCBI NO: 30694106 NR Description: glycosyl hydrolase family 1 [Arabidopsis >gi|23306442|gb|AAN17448.1| thioglucosidase, putative thaliana] >gi|25084292|gb|AAN72213.1| thioglucosidase, putative
  misc_feature (1)..(398): Homolog of NCBI NO: 30694982 NR Description: glycosyl hydrolase family 1 [Arabidopsis thaliana]
  misc_feature (1)..(398): Homolog of NCBI NO: 25289450 NR Description: hypothetical protein F16N3.11 [imported] - thaliana >gi|5668800|gb|AAD46026.1|AC007519_11 Similar to
  misc_feature (17)..(398): Homolog of NCBI NO: 25289451 NR Description: probable myrosinase precursor 53323-50499 - Arabidopsis thaliana >gi|12325369|gb|AAG52628.1|AC024261_15
  misc_feature (1)..(12): Homolog of NCBI NO: 25289451 NR Description: probable myrosinase precursor 53323-50499 - Arabidopsis thaliana >gi|12325369|gb|AAG52628.1|AC024261_15
  misc_feature (1)..(307): Homolog of NCBI NO: 15217941 NR Description: glycosyl hydrolase family 1 [Arabidopsis thaliana]
  misc_feature (350)..(398): Homolog of NCBI NO: 15217941 NR Description: glycosyl hydrolase family 1 [Arabidopsis thaliana]
  misc_feature (1)..(398): Homolog of NCBI NO: 38344468 NR Description: OSJNBa0022H21.3 [Oryza sativa (japonica
  misc_feature (1)..(396): Homolog of NCBI NO: 13605680 NR Description: AT5g25980/T1N24_18 [Arabidopsis thaliana]
  misc_feature (1)..(396): Homolog of NCBI NO: 1362007 NR Description: thioglucosidase (EC 3.2.1.147) 2 - Arabidopsis >gi|871992|emb|CAA55787.1| thioglucosidase [Arabidopsis thaliana]
MNVQAYRLSIAWSRVLPKGRLTGGVDENGITYYNNLINELKANGIEPYVTIFHWDVPQTLEDEYGGFLSTRIVEDYTNYAELLFQRFGDRVKFWITLNQPFSLATKGYGDGSYPPGRCTGCELGGDSGVEPYTVAHNQLLAHAKTVSLYRKRYQKFQGGKIGTTLIGRWFAPLNEFSELDKAAAKRAFDFFVGWFLDPLVYGKYPTIMREMVGDRLPEFTPEQSALVKGSLDFLGLNYYVTQYATDAPPPTQLNAITDARVTLGFYRNGVPIGVAPSFVYYPPGFRQILNYIKDNYKNPLTYITENGVADLDLGNVTLATALADNGRIQNHCSHLSCLKCAMKDGCNVAGYFAWSLMDNYEFGNGYTLRFGMNWVNFTNPADRKEKASGKWFSKFLAK

SEQ ID NO: 106978 - DNA, 1563 bp, Arabidopsis thaliana
  misc_feature (1)..(1563): Ceres Seq. ID no. 13621019
  misc_feature: MA Experiment ID: 20000173 Result: Down-regulated in Transcription
  misc_feature: MA Experiment 20000173 PARAMETER Experiment Name: At_42deg_Heat_P Parameter: Age (day) Value: 14
  misc_feature: MA Experiment 20000173 PARAMETER Experiment Name: At_42deg_Heat_P Parameter: Organism Value: A. thaliana
  misc_feature: MA Experiment 20000173 PARAMETER Experiment Name: At_42deg_Heat_P Parameter: Plant Line Value: WS
  misc_feature: MA Experiment 20000173 PARAMETER Experiment Name: At_42deg_Heat_P Parameter: Temperature (deg C) Value: 42 vs. 22
  misc_feature: MA Experiment 20000173 PARAMETER Experiment Name: At_42deg_Heat_P Parameter: Timepoint (hr) Value: 6
  misc_feature: MA Experiment 20000173 PARAMETER Experiment Name: At_42deg_Heat_P Parameter: Tissue Value: Aerial
  misc_feature: MA Experiment ID: 20000184 Result: Down-regulated in Transcription
  misc_feature: MA Experiment 20000184 PARAMETER Experiment Name: At_Shoots__P Parameter: Age (day) Value: 7
  misc_feature: MA Experiment 20000184 PARAMETER Experiment Name: At_Shoots__P Parameter: Tissue Value: Shoots vs. Whole Plant
ggttctaatcaatctcactccaatttctgcaaaaatcaaaccttttttttatattcatttcacatctctgtttttcctcagattcctcaaacattacagatcttcaggttttctatttataagcagaacttgttctgttcttgtgtgaagctttcactggttttggaaattggtgaatgtgattaatgggtagcagtgagatggaaaaatcaggtaaagagaaagaacctaagactacaccgccttcgacttcttcatctgctcctgctactgttgtttcacaggaaccttcttctgctgtgagtgctggagtggctgttactcaagattggtctggcttccaggcttattctcctatgccgcctcatggttatgtagcatcaagtcctcaacctcatccttatatgtggggcgttcagcatatgatgccgccttatggaacaccgcctcatccgtatgttacgatgtatcctccaggtggcatgtatgctcatccttcattacctccggggtcttatccatatagtccctatgcaatgccttctcctaatggaatggctgaagcttctggtaatactggaagtgttattgagggtgatggtaaaccatctgatgggaaggaaaaattgccaatcaaaagatcaaaaggaagcttgggaagtttgaatatgattataggaaagaacaatgaagctggaaaaaactcaggagcatcagctaatggagcttgttctaaaagtgctgagagcggttctgatggatcaagtgacggaagtgatgcaaattcacaaaacgactctggctctagacacaacgggaaggatggtgaaacagcttcagagagtggtggttctgctcatggaccaccccgtaatggaagtaatctaccagtgaaccagaccgtcgctatcatgccagtgtcggctacaggtgttccaggcccaccaacaaatctaaatatcggaatggattattggagcggtcatgggaatgtttctggagcagttcctggagttgtagtagatggttcccaatcacagccatggttacaggatgagagagagattaagcgacagagacggaagcaatccaatagggaatctgctcgtagatccaggttgcgtaaacaggcggagtgtgatgagctagcacaacgagcagaggttttgaatggagagaactcaagtcttagagcagaaattaacaagcttaaaagccaatatgaagagcttcttgctgaaaatagctctctcaagaataagttctcgtcagccccgtcactggaaggtggagacttggacaagaacgagcaagaaccacagagaagtacacgtcaggatgttgcgtagacggctcgtggttccttccacaactcagcttgactcaagaacagcagctaacagatatatgtaattttaggaaccagatttggtgtgatttctttagtgtttaaataggaggaagcatgaaaaaaaaaaatagtctcttctttaacaaactgtgtatatcttttcttcagattttggacttttttgtctctcaataaaatgaactcggaactct

SEQ ID NO: 106979 - protein, 387 aa, Arabidopsis thaliana
  peptide (1)..(387): Ceres Seq. ID no. 13621020
  misc_feature (291)..(355): Pfam Name: bZIP transcription factor Pfam Description: bZIP transcription factor
  misc_feature (1)..(387): Homolog of NCBI NO: 15222576 NR Description: G-Box binding protein -related [Arabidopsis
  misc_feature (1)..(387): Homolog of NCBI NO: 28393494 NR Description: putative G-Box binding protein [Arabidopsis
  misc_feature (1)..(378): Homolog of NCBI NO: 30686443 NR Description: G-box binding bZIP transcription factor -related
  misc_feature (1)..(359): Homolog of NCBI NO: 25344493 NR Description: hypothetical protein At2g35530 [imported] -
  misc_feature (1)..(387): Homolog of NCBI NO: 5381313 NR Description: G-Box binding protein 2 [Catharanthus roseus]
  misc_feature (20)..(359): Homolog of NCBI NO: 7489475 NR Description: G-box binding factor 1A - rice
  misc_feature (1)..(365): Homolog of NCBI NO: 7488943 NR Description: bZIP DNA-binding protein - parsley
  misc_feature (1)..(361): Homolog of NCBI NO: 13775109 NR Description: bZIP transcription factor 3 [Phaseolus vulgaris]
  misc_feature (11)..(358): Homolog of NCBI NO: 27469354 NR Description: bZIP transcription factor ZIP1 [Hordeum vulgare
  misc_feature (1)..(365): Homolog of NCBI NO: 13775107 NR Description: bZIP transcription factor 2 [Phaseolus vulgaris]
MGSSEMEKSGKEKEPKTTPPSTSSSAPATVVSQEPSSAVSAGVAVTQDWSGFQAYSPMPPHGYVASSPQPHPYMWGVQHMMPPYGTPPHPYVTMYPPGGMYAHPSLPPGSYPYSPYAMPSPNGMAEASGNTGSVIEGDGKPSDGKEKLPIKRSKGSLGSLNMIIGKNNEAGKNSGASANGACSKSAESGSDGSSDGSDANSQNDSGSRHNGKDGETASESGGSAHGPPRNGSNLPVNQTVAIMPVSATGVPGPPTNLNIGMDYWSGHGNVSGAVPGVVVDGSQSQPWLQDEREIKRQRRKQSNRESARRSRLRKQAECDELAQRAEVLNGENSSLRAEINKLKSQYEELLAENSSLKNKFSSAPSLEGGDLDKNEQEPQRSTRQDVA

SEQ ID NO: 106980 - protein, 382 aa, Arabidopsis thaliana
  peptide (1)..(382): Ceres Seq. ID no. 13621021
  misc_feature (286)..(350): Pfam Name: bZIP transcription factor Pfam Description: bZIP transcription factor
  misc_feature (1)..(382): Homolog of NCBI NO: 15222576 NR Description: G-Box binding protein -related [Arabidopsis
  misc_feature (1)..(382): Homolog of NCBI NO: 28393494 NR Description: putative G-Box binding protein [Arabidopsis
  misc_feature (1)..(373): Homolog of NCBI NO: 30686443 NR Description: G-box binding bZIP transcription factor -related
  misc_feature (1)..(354): Homolog of NCBI NO: 25344493 NR Description: hypothetical protein At2g35530 [imported] -
  misc_feature (1)..(382): Homolog of NCBI NO: 5381313 NR Description: G-Box binding protein 2 [Catharanthus roseus]
  misc_feature (15)..(354): Homolog of NCBI NO: 7489475 NR Description: G-box binding factor 1A - rice
  misc_feature (1)..(360): Homolog of NCBI NO: 7488943 NR Description: bZIP DNA-binding protein - parsley
  misc_feature (1)..(356): Homolog of NCBI NO: 13775109 NR Description: bZIP transcription factor 3 [Phaseolus vulgaris]
  misc_feature (6)..(353): Homolog of NCBI NO: 27469354 NR Description: bZIP transcription factor ZIP1 [Hordeum vulgare
  misc_feature (1)..(360): Homolog of NCBI NO: 13775107 NR Description: bZIP transcription factor 2 [Phaseolus vulgaris]
MEKSGKEKEPKTTPPSTSSSAPATVVSQEPSSAVSAGVAVTQDWSGFQAYSPMPPHGYVASSPQPHPYMWGVQHMMPPYGTPPHPYVTMYPPGGMYAHPSLPPGSYPYSPYAMPSPNGMAEASGNTGSVIEGDGKPSDGKEKLPIKRSKGSLGSLNMIIGKNNEAGKNSGASANGACSKSAESGSDGSSDGSDANSQNDSGSRHNGKDGETASESGGSAHGPPRNGSNLPVNQTVAIMPVSATGVPGPPTNLNIGMDYWSGHGNVSGAVPGVVVDGSQSQPWLQDEREIKRQRRKQSNRESARRSRLRKQAECDELAQRAEVLNGENSSLRAEINKLKSQYEELLAENSSLKNKFSSAPSLEGGDLDKNEQEPQRSTRQDVA

SEQ ID NO: 106981 - protein, 330 aa, Arabidopsis thaliana
  peptide (1)..(330): Ceres Seq. ID no. 13621022
  misc_feature (234)..(298): Pfam Name: bZIP transcription factor Pfam Description: bZIP transcription factor
  misc_feature (1)..(330): Homolog of NCBI NO: 15222576 NR Description: G-Box binding protein -related [Arabidopsis
  misc_feature (1)..(330): Homolog of NCBI NO: 28393494 NR Description: putative G-Box binding protein [Arabidopsis
  misc_feature (1)..(321): Homolog of NCBI NO: 30686443 NR Description: G-box binding bZIP transcription factor -related
  misc_feature (1)..(302): Homolog of NCBI NO: 25344493 NR Description: hypothetical protein At2g35530 [imported] -
  misc_feature (1)..(330): Homolog of NCBI NO: 5381313 NR Description: G-Box binding protein 2 [Catharanthus roseus]
  misc_feature (1)..(302): Homolog of NCBI NO: 7489475 NR Description: G-box binding factor 1A - rice
  misc_feature (1)..(308): Homolog of NCBI NO: 7488943 NR Description: bZIP DNA-binding protein - parsley
  misc_feature (1)..(304): Homolog of NCBI NO: 13775109 NR Description: bZIP transcription factor 3 [Phaseolus vulgaris]
  misc_feature (1)..(301): Homolog of NCBI NO: 27469354 NR Description: bZIP transcription factor ZIP1 [Hordeum vulgare
  misc_feature (1)..(308): Homolog of NCBI NO: 13775107 NR Description: bZIP transcription factor 2 [Phaseolus vulgaris]
MPPHGYVASSPQPHPYMWGVQHMMPPYGTPPHPYVTMYPPGGMYAHPSLPPGSYPYSPYAMPSPNGMAEASGNTGSVIEGDGKPSDGKEKLPIKRSKGSLGSLNMIIGKNNEAGKNSGASANGACSKSAESGSDGSSDGSDANSQNDSGSRHNGKDGETASESGGSAHGPPRNGSNLPVNQTVAIMPVSATGVPGPPTNLNIGMDYWSGHGNVSGAVPGVVVDGSQSQPWLQDEREIKRQRRKQSNRESARRSRLRKQAECDELAQRAEVLNGENSSLRAEINKLKSQYEELLAENSSLKNKFSSAPSLEGGDLDKNEQEPQRSTRQDVA

SEQ ID NO: 106982 - DNA, 1600 bp, Arabidopsis thaliana
  misc_feature (1)..(1600): Ceres Seq. ID no. 13621023
  misc_feature: MA Experiment ID: 20000171 Result: Up-regulated in Transcription
  misc_feature: MA Experiment 20000171 PARAMETER Experiment Name: At_42deg_Heat_P Parameter: Age (day) Value: 14
  misc_feature: MA Experiment 20000171 PARAMETER Experiment Name: At_42deg_Heat_P Parameter: Organism Value: A. thaliana
  misc_feature: MA Experiment 20000171 PARAMETER Experiment Name: At_42deg_Heat_P Parameter: Plant Line Value: WS
  misc_feature: MA Experiment 20000171 PARAMETER Experiment Name: At_42deg_Heat_P Parameter: Temperature (deg C) Value: 42 vs. 22
  misc_feature: MA Experiment 20000171 PARAMETER Experiment Name: At_42deg_Heat_P Parameter: Timepoint (hr) Value: 1
  misc_feature: MA Experiment 20000171 PARAMETER Experiment Name: At_42deg_Heat_P Parameter: Tissue Value: Aerial
atggatgtgagcaaagtaaccacaagcgacggcggaggagattcaatggagactaagccatctcctcaacctcagcctgcggcgattctaagttcaaacgcgcctcctccgtttctgagcaagacctatgatatggttgatgatcacaatacagattcgattgtctcttggagtgctaataacaacagttttatcgtttggaaaccaccggagttcgctcgcgatcttcttcctaagaactttaagcataataatttctccagcttcgttagacagcttaatacctatggtttcaggaaggttgacccagatagatgggaatttgcgaatgaaggttttttaagaggtcagaagcacttgctacaatcaataactaggcgaaaacctgcccatggacagggacagggacatcagcgatctcagcactcgaatggacagaactcatctgttagcgcatgtgttgaagttggcaaatttggtctcgaagaagaagttgaaaggcttaaaagagataagaacgtccttatgcaagaactcgtcagattaagacagcagcaacagtccactgataaccaacttcaaacgatggttcagcgtctccagggcatggagaatcggcaacaacaattaatgtcattccttgcaaaggcagtacaaagccctcattttctatctcaattcttacagcagcagaatcagcaaaacgagagtaataggcgcatcagtgataccagtaagaagcggagattcaagcgagacggcattgtccgtaataatgattctgctactcctgatggacagatagtgaagtatcaacctccaatgcacgagcaagccaaagcaatgtttaaacagcttatgaagatggaaccttacaaaaccggcgatgatggtttccttctaggtaatggtacgtctactaccgagggaacagagatggagacttcatcaaaccaagtatcgggtataactcttaaggaaatgcctacagcttctgagatacagtcatcatcaccaattgaaacaactcctgaaaatgtttcggcagcatcagaagcaaccgagaactgtattccttcacctgatgatctaactcttcccgacttcactcatatgctaccggaaaataattcagagaagcctccagagagtttcatggaaccaaacctgggaggttctagtccattactagatccagatctgttgatcgatgattctttgtccttcgacattgacgactttccaatggattctgatatagaccctgttgattacggtttactcgaacgcttactcatgtcaagcccggttccagataatatggattcaacaccagtggacaatgaaacagagcaggaacaaaatggatgggacaaaactaagcatatggataatctgactcaacagatgggtctcctctctcctgaaaccttagatctctcaaggcaaaatccttgattttgggagtttttaaagtcttttgaggtaacacagtccctgagagcagcatattcatttttcatacgctgatcttttatttcttctttcttgtatcaaagtggtttaacattactgcttcatacaactctcaattttacac

SEQ ID NO: 106983 - protein, 485 aa, Arabidopsis thaliana
  peptide (1)..(485): Ceres Seq. ID no. 13621024
  misc_feature (36)..(214): Pfam Name: HSF-type DNA-binding Pfam Description: HSF-type DNA-binding
  misc_feature (1)..(482): Homolog of NCBI NO: 15223168 NR Description: heat shock transcription factor family
  misc_feature (5)..(332): Homolog of NCBI NO: 729775 NR Description: HEAT SHOCK FACTOR PROTEIN HSF8 (HEAT SHOCK FACTOR 8) (HSTF 8) (HEAT STRESS TRANSCRIPTION FACTOR)
  misc_feature (308)..(471): Homolog of NCBI NO: 729775 NR Description: HEAT SHOCK FACTOR PROTEIN HSF8 (HEAT SHOCK FACTOR 8) (HSTF 8) (HEAT STRESS TRANSCRIPTION FACTOR)
  misc_feature (5)..(332): Homolog of NCBI NO: 11386827 NR Description: Heat shock factor protein HSF8 (Heat shock factor 8) (HSTF 8) (Heat stress transcription factor)
  misc_feature (4)..(477): Homolog of NCBI NO: 429155 NR Description: heat shock factor [Arabidopsis thaliana]
  misc_feature (4)..(477): Homolog of NCBI NO: 15236631 NR Description: heat shock transcription factor 1 (HSF1) thaliana] >gi|12644262|sp|P41151|HSF1_ARATH Heat shock factor
  misc_feature (24)..(479): Homolog of NCBI NO: 29126355 NR Description: putative heat shock transcription factor [Oryza
  misc_feature (8)..(476): Homolog of NCBI NO: 25296101 NR Description: heat shock transcription factor HSF3 [imported] - thaliana (fragment) >gi|3256068|emb|CAA74397.1| Heat Shock Factor
  misc_feature (17)..(476): Homolog of NCBI NO: 30686034 NR Description: heat shock transcription factor 3 (HSF3) thaliana] >gi|30686038|ref|NP_850832.1| heat shock transcription
  misc_feature (28)..(478): Homolog of NCBI NO: 15228440 NR Description: heat shock transcription factor 2 (HSF2) thaliana] >gi|21431799|sp|Q9SCW5|HSF2_ARATH Heat shock factor
MDVSKVTTSDGGGDSMETKPSPQPQPAAILSSNAPPPFLSKTYDMVDDHNTDSIVSWSANNNSFIVWKPPEFARDLLPKNFKHNNFSSFVRQLNTYGFRKVDPDRWEFANEGFLRGQKHLLQSITRRKPAHGQGQGHQRSQHSNGQNSSVSACVEVGKFGLEEEVERLKRDKNVLMQELVRLRQQQQSTDNQLQTMVQRLQGMENRQQQLMSFLAKAVQSPHFLSQFLQQQNQQNESNRRISDTSKKRRFKRDGIVRNNDSATPDGQIVKYQPPMHEQAKAMFKQLMKMEPYKTGDDGFLLGNGTSTTEGTEMETSSNQVSGITLKEMPTASEIQSSSPIETTPENVSAASEATENCIPSPDDLTLPDFTHMLPENNSEKPPESFMEPNLGGSSPLLDPDLLIDDSLSFDIDDFPMDSDIDPVDYGLLERLLMSSPVPDNMDSTPVDNETEQEQNGWDKTKHMDNLTQQMGLLSPETLDLSRQNP

SEQ ID NO: 106984 - protein, 470 aa, Arabidopsis thaliana
  peptide (1)..(470): Ceres Seq. ID no. 13621025
  misc_feature (21)..(199): Pfam Name: HSF-type DNA-binding Pfam Description: HSF-type DNA-binding
  misc_feature (1)..(467): Homolog of NCBI NO: 15223168 NR Description: heat shock transcription factor family
  misc_feature (1)..(317): Homolog of NCBI NO: 729775 NR Description: HEAT SHOCK FACTOR PROTEIN HSF8 (HEAT SHOCK FACTOR 8) (HSTF 8) (HEAT STRESS TRANSCRIPTION FACTOR)
  misc_feature (293)..(456): Homolog of NCBI NO: 729775 NR Description: HEAT SHOCK FACTOR PROTEIN HSF8 (HEAT SHOCK FACTOR 8) (HSTF 8) (HEAT STRESS TRANSCRIPTION FACTOR)
  misc_feature (1)..(317): Homolog of NCBI NO: 11386827 NR Description: Heat shock factor protein HSF8 (Heat shock factor 8) (HSTF 8) (Heat stress transcription factor)
  misc_feature (1)..(462): Homolog of NCBI NO: 429155 NR Description: heat shock factor [Arabidopsis thaliana]
  misc_feature (1)..(462): Homolog of NCBI NO: 15236631 NR Description: heat shock transcription factor 1 (HSF1) thaliana] >gi|12644262|sp|P41151|HSF1_ARATH Heat shock factor
  misc_feature (9)..(464): Homolog of NCBI NO: 29126355 NR Description: putative heat shock transcription factor [Oryza
  misc_feature (1)..(461): Homolog of NCBI NO: 25296101 NR Description: heat shock transcription factor HSF3 [imported] - thaliana (fragment) >gi|3256068|emb|CAA74397.1| Heat Shock Factor
  misc_feature (2)..(461): Homolog of NCBI NO: 30686034 NR Description: heat shock transcription factor 3 (HSF3) thaliana] >gi|30686038|ref|NP_850832.1| heat shock transcription
  misc_feature (13)..(463): Homolog of NCBI NO: 15228440 NR Description: heat shock transcription factor 2 (HSF2) thaliana] >gi|21431799|sp|Q9SCW5|HSF2_ARATH Heat shock factor
METKPSPQPQPAAILSSNAPPPFLSKTYDMVDDHNTDSIVSWSANNNSFIVWKPPEFARDLLPKNFKHNNFSSFVRQLNTYGFRKVDPDRWEFANEGFLRGQKHLLQSITRRKPAHGQGQGHQRSQHSNGQNSSVSACVEVGKFGLEEEVERLKRDKNVLMQELVRLRQQQQSTDNQLQTMVQRLQGMENRQQQLMSFLAKAVQSPHFLSQFLQQQNQQNESNRRISDTSKKRRFKRDGIVRNNDSATPDGQIVKYQPPMHEQAKAMFKQLMKMEPYKTGDDGFLLGNGTSTTEGTEMETSSNQVSGITLKEMPTASEIQSSSPIETTPENVSAASEATENCIPSPDDLTLPDFTHMLPENNSEKPPESFMEPNLGGSSPLLDPDLLIDDSLSFDIDDFPMDSDIDPVDYGLLERLLMSSPVPDNMDSTPVDNETEQEQNGWDKTKHMDNLTQQMGLLSPETLDLSRQNP

SEQ ID NO: 106985 - protein, 441 aa, Arabidopsis thaliana
  peptide (1)..(441): Ceres Seq. ID no. 13621026
  misc_feature (1)..(170): Pfam Name: HSF-type DNA-binding Pfam Description: HSF-type DNA-binding
  misc_feature (1)..(438): Homolog of NCBI NO: 15223168 NR Description: heat shock transcription factor family
  misc_feature (1)..(288): Homolog of NCBI NO: 729775 NR Description: HEAT SHOCK FACTOR PROTEIN HSF8 (HEAT SHOCK FACTOR 8) (HSTF 8) (HEAT STRESS TRANSCRIPTION FACTOR)
  misc_feature (264)..(427): Homolog of NCBI NO: 729775 NR Description: HEAT SHOCK FACTOR PROTEIN HSF8 (HEAT SHOCK FACTOR 8) (HSTF 8) (HEAT STRESS TRANSCRIPTION FACTOR)
  misc_feature (1)..(288): Homolog of NCBI NO: 11386827 NR Description: Heat shock factor protein HSF8 (Heat shock factor 8) (HSTF 8) (Heat stress transcription factor)
  misc_feature (1)..(433): Homolog of NCBI NO: 429155 NR Description: heat shock factor [Arabidopsis thaliana]
  misc_feature (1)..(433): Homolog of NCBI NO: 15236631 NR Description: heat shock transcription factor 1 (HSF1) thaliana] >gi|12644262|sp|P41151|HSF1_ARATH Heat shock factor
  misc_feature (1)..(435): Homolog of NCBI NO: 29126355 NR Description: putative heat shock transcription factor [Oryza
  misc_feature (1)..(432): Homolog of NCBI NO: 25296101 NR Description: heat shock transcription factor HSF3 [imported] - thaliana (fragment) >gi|3256068|emb|CAA74397.1| Heat Shock Factor
  misc_feature (1)..(432): Homolog of NCBI NO: 30686034 NR Description: heat shock transcription factor 3 (HSF3) thaliana] >gi|30686038|ref|NP_850832.1| heat shock transcription
  misc_feature (1)..(434): Homolog of NCBI NO: 15228440 NR Description: heat shock transcription factor 2 (HSF2) thaliana] >gi|21431799|sp|Q9SCW5|HSF2_ARATH Heat shock factor
MVDDHNTDSIVSWSANNNSFIVWKPPEFARDLLPKNFKHNNFSSFVRQLNTYGFRKVDPDRWEFANEGFLRGQKHLLQSITRRKPAHGQGQGHQRSQHSNGQNSSVSACVEVGKFGLEEEVERLKRDKNVLMQELVRLRQQQQSTDNQLQTMVQRLQGMENRQQQLMSFLAKAVQSPHFLSQFLQQQNQQNESNRRISDTSKKRRFKRDGIVRNNDSATPDGQIVKYQPPMHEQAKAMFKQLMKMEPYKTGDDGFLLGNGTSTTEGTEMETSSNQVSGITLKEMPTASEIQSSSPIETTPENVSAASEATENCIPSPDDLTLPDFTHMLPENNSEKPPESFMEPNLGGSSPLLDPDLLIDDSLSFDIDDFPMDSDIDPVDYGLLERLLMSSPVPDNMDSTPVDNETEQEQNGWDKTKHMDNLTQQMGLLSPETLDLSRQNP

SEQ ID NO: 106986 - DNA, 2107 bp, Arabidopsis thaliana
  misc_feature (1)..(2107): Ceres Seq. ID no. 13621031
  misc_feature: MA Experiment ID: 20001451 Result: Down-regulated in Transcription
  misc_feature: MA Experiment 20001451 PARAMETER Experiment Name: At_Far-red-induction_P Parameter: Age (day) Value: 7
  misc_feature: MA Experiment 20001451 PARAMETER Experiment Name: At_Far-red-induction_P Parameter: Light Value: Far-red vs. White
  misc_feature: MA Experiment 20001451 PARAMETER Experiment Name: At_Far-red-induction_P Parameter: Organism Value: A. thaliana
  misc_feature: MA Experiment 20001451 PARAMETER Experiment Name: At_Far-red-induction_P Parameter: Plant Line Value: Columbia
  misc_feature: MA Experiment 20001451 PARAMETER Experiment Name: At_Far-red-induction_P Parameter: Timepoint (hr) Value: 24
  misc_feature: MA Experiment 20001451 PARAMETER Experiment Name: At_Far-red-induction_P Parameter: Tissue Value: Whole Plant
atggggacacgtgtaacacaattctcttacctccacgcgccgtcgtcacacatggcggagcagttactgaatcaattcatctccgcagtgatatcaaagtcgagacatttgaatcatttgaagcaagttcagtcctttatgatagtttctggactaagtcattcacatttcctctgttttaagcttcttcgtttttgtacgcttcgtctctgtaatctctcttacgctcgctttatctttgatcgtttctctttccccaatacgcatctttacgctgccgttttaactgcttactcttcttctcttcctcttcatgcttcttcagctttctccttctttcgtctcatggttaatcgttctgttcctcggcctaatcactttatctacccacttgttcttaagtctacaccatatctctcctctgctttttcaactcctttggtgcatacccatttgtttaaatctgggtttcatctctatgtcgttgttcaaactgctcttcttcactcctacgcttcctctgtttctcatataactcttgcaagacaactgttcgacgaaatgtctgagagaaatgttgtttcttggactgctatgctttctgggtatgctaggtctggtgatatctctaatgctgttgctctttttgaagatatgcctgagcgtgatgttccttcctggaatgcgattcttgctgcttgtactcagaatggtctttttcttgaagcggtttctctgtttagaaggatgattaatgagcctagcattcgtcctaatgaggtaactgtagtttgtgtcctctctgcgtgtgctcaaactggtacgcttcagctggctaaagggattcatgcctttgcttaccgtcgtgatctttcttctgatgtgtttgtttcgaattctttagttgacttgtatggaaaatgtggtaacttggaggaagcaagctctgtttttaagatggcatccaagaaaagtttaacagcttggaattctatgatcaattgctttgcactccatggtagaagtgaagaagccatagctgtgtttgaagaaatgatgaagttgaacattaacgatatcaaaccagatcacattactttcatcggtcttctcaatgcgtgtactcatggaggtttggtatcaaaaggccgaggttatttcgatctgatgacaaacagattcggtattgagccaaggattgagcattatggctgtctaatagatcttttaggcagggcaggtcggtttgatgaagctttagaagttatgtccacgatgaagatgaaagcggatgaggctatttggggatcactgcttaatgcttgtaagatacatggccatctggatttggctgaagttgctgtaaaaaacctggttgctttaaatcctaataatggaggttatgtcgctatgatggcaaatttatatggagagatgggtaattgggaagaggcacgtagagctagaaagatgatcaagcaccaaaatgcttataaaccaccaggctggagtcggattgagatcgataacgaggtccatcagttctactctcttgacaaatcacatccggagactgaggagatatacatgatacttgacagtctgatctctttctgacacttttggaaggtcctagtttctctatatgacttgacacagctgcactctgctttataacagcgagcttcgtgcgaaattgttggtttgcaatatgtatggcttcagagaaaagcaggcattttcttcattgatctacacaggttacatactttgtttctgatacacaaatgctggtacggtaattttgttgtactgtaagaagaggaactagtacgtgataagccagcaaacaacatgttgcttgattagaaagtaagtcttgccattcctttctaacatgctatcacgtggtttctttctgtgattccagcaaaaaacttttagtttacaggtccatggacaatcaaacattcgagaagaggaagtctcttacgccaagcattagtactatttaattatgatcttttagttttctaacactttcctcatgtatctttattgagaatgatcaataaacaaggcacgcaatatagagactttgttacag

SEQ ID NO: 106987 - protein, 538 aa, Arabidopsis thaliana
  peptide (1)..(538): Ceres Seq. ID no. 13621032
  misc_feature (365)..(399): Pfam Name: PPR repeat Pfam Description: PPR repeat
  misc_feature (1)..(538): Homolog of NCBI NO: 15217517 NR Description: pentatricopeptide (PPR) repeat-containing protein
  misc_feature (320)..(538): Homolog of NCBI NO: 26451823 NR Description: unknown protein [Arabidopsis thaliana]
  misc_feature (17)..(537): Homolog of NCBI NO: 15225375 NR Description: pentatricopeptide (PPR) repeat-containing protein
  misc_feature (37)..(535): Homolog of NCBI NO: 15241651 NR Description: pentatricopeptide (PPR) repeat-containing protein thaliana] >gi|9759345|dbj|BAB10000.1|
  misc_feature (23)..(535): Homolog of NCBI NO: 15241180 NR Description: pentatricopeptide (PPR) repeat-containing protein thaliana] >gi|10177829|dbj|BAB11258.1|
  misc_feature (27)..(532): Homolog of NCBI NO: 15235537 NR Description: pentatricopeptide (PPR) repeat-containing protein
  misc_feature (16)..(528): Homolog of NCBI NO: 15239979 NR Description: pentatricopeptide (PPR) repeat-containing protein
  misc_feature (14)..(535): Homolog of NCBI NO: 9759241 NR Description: gene_id:MNC17.11~pir||T04732~strong similarity to
  misc_feature (14)..(535): Homolog of NCBI NO: 15237835 NR Description: pentatricopeptide (PPR) repeat-containing protein
  misc_feature (52)..(538): Homolog of NCBI NO: 15227199 NR Description: pentatricopeptide (PPR) repeat-containing protein
MGTRVTQFSYLHAPSSHMAEQLLNQFISAVISKSRHLNHLKQVQSFMIVSGLSHSHFLCFKLLRFCTLRLCNLSYARFIFDRFSFPNTHLYAAVLTAYSSSLPLHASSAFSFFRLMVNRSVPRPNHFIYPLVLKSTPYLSSAFSTPLVHTHLFKSGFHLYVVVQTALLHSYASSVSHITLARQLFDEMSERNVVSWTAMLSGYARSGDISNAVALFEDMPERDVPSWNAILAACTQNGLFLEAVSLFRRMINEPSIRPNEVTVVCVLSACAQTGTLQLAKGIHAFAYRRDLSSDVFVSNSLVDLYGKCGNLEEASSVFKMASKKSLTAWNSMINCFALHGRSEEAIAVFEEMMKLNINDIKPDHITFIGLLNACTHGGLVSKGRGYFDLMTNRFGIEPRIEHYGCLIDLLGRAGRFDEALEVMSTMKMKADEAIWGSLLNACKIHGHLDLAEVAVKNLVALNPNNGGYVAMMANLYGEMGNWEEARRARKMIKHQNAYKPPGWSRIEIDNEVHQFYSLDKSHPETEEIYMILDSLISF

SEQ ID NO: 106988 - protein, 521 aa, Arabidopsis thaliana; identical to SEQ ID NO: 72164
  peptide (1)..(521): Ceres Seq. ID no. 13621033
  misc_feature (348)..(382): Pfam Name: PPR repeat Pfam Description: PPR repeat
  misc_feature (1)..(521): Homolog of NCBI NO: 15217517 NR Description: pentatricopeptide (PPR) repeat-containing protein
  misc_feature (303)..(521): Homolog of NCBI NO: 26451823 NR Description: unknown protein [Arabidopsis thaliana]
  misc_feature (1)..(520): Homolog of NCBI NO: 15225375 NR Description: pentatricopeptide (PPR) repeat-containing protein
  misc_feature (20)..(518): Homolog of NCBI NO: 15241651 NR Description: pentatricopeptide (PPR) repeat-containing protein thaliana] >gi|9759345|dbj|BAB10000.1|
  misc_feature (6)..(518): Homolog of NCBI NO: 15241180 NR Description: pentatricopeptide (PPR) repeat-containing protein thaliana] >gi|10177829|dbj|BAB11258.1|
  misc_feature (10)..(515): Homolog of NCBI NO: 15235537 NR Description: pentatricopeptide (PPR) repeat-containing protein
  misc_feature (1)..(511): Homolog of NCBI NO: 15239979 NR Description: pentatricopeptide (PPR) repeat-containing protein
  misc_feature (1)..(518): Homolog of NCBI NO: 9759241 NR Description: gene_id:MNC17.11~pir||T04732~strong similarity to
  misc_feature (1)..(518): Homolog of NCBI NO: 15237835 NR Description: pentatricopeptide (PPR) repeat-containing protein
  misc_feature (35)..(521): Homolog of NCBI NO: 15227199 NR Description: pentatricopeptide (PPR) repeat-containing protein

SEQ ID NO: 106989 - protein, 492 aa, Arabidopsis thaliana; identical to SEQ ID NO: 72165
  peptide (1)..(492): Ceres Seq. ID no. 13621034
  misc_feature (319)..(353): Pfam Name: PPR repeat Pfam Description: PPR repeat
  misc_feature (1)..(492): Homolog of NCBI NO: 15217517 NR Description: pentatricopeptide (PPR) repeat-containing protein
  misc_feature (274)..(492): Homolog of NCBI NO: 26451823 NR Description: unknown protein [Arabidopsis thaliana]
  misc_feature (1)..(491): Homolog of NCBI NO: 15225375 NR Description: pentatricopeptide (PPR) repeat-containing protein
  misc_feature (1)..(489): Homolog of NCBI NO: 15241651 NR Description: pentatricopeptide (PPR) repeat-containing protein thaliana] >gi|9759345|dbj|BAB10000.1|
  misc_feature (1)..(489): Homolog of NCBI NO: 15241180 NR Description: pentatricopeptide (PPR) repeat-containing protein thaliana] >gi|10177829|dbj|BAB11258.1|
  misc_feature (1)..(486): Homolog of NCBI NO: 15235537 NR Description: pentatricopeptide (PPR) repeat-containing protein
  misc_feature (1)..(482): Homolog of NCBI NO: 15239979 NR Description: pentatricopeptide (PPR) repeat-containing protein
  misc_feature (1)..(489): Homolog of NCBI NO: 9759241 NR Description: gene_id:MNC17.11~pir||T04732~strong similarity to
  misc_feature (1)..(489): Homolog of NCBI NO: 15237835 NR Description: pentatricopeptide (PPR) repeat-containing protein
  misc_feature (6)..(492): Homolog of NCBI NO: 15227199 NR Description: pentatricopeptide (PPR) repeat-containing protein

SEQ ID NO: 106990 - DNA, 742 bp, Arabidopsis thaliana
  misc_feature (1)..(742): Ceres Seq. ID no. 13621035
  misc_feature: MA Experiment ID: 20000166 Result: Up-regulated in Transcription
  misc_feature: MA Experiment 20000166 PARAMETER Experiment Name: At_100uM_ABA_P Parameter: Age (day) Value: 14
  misc_feature: MA Experiment 20000166 PARAMETER Experiment Name: At_100uM_ABA_P Parameter: Organism Value: A. thaliana
  misc_feature: MA Experiment 20000166 PARAMETER Experiment Name: At_100uM_ABA_P Parameter: Plant Line Value: WS
  misc_feature: MA Experiment 20000166 PARAMETER Experiment Name: At_100uM_ABA_P Parameter: Timepoint (hr) Value: 1
  misc_feature: MA Experiment 20000166 PARAMETER Experiment Name: At_100uM_ABA_P Parameter: Tissue Value: Aerial
  misc_feature: MA Experiment 20000166 PARAMETER Experiment Name: At_100uM_ABA_P Parameter: Treatment Value: 100uM ABA vs. No Treatment
  misc_feature: MA Experiment ID: 20000169 Result: Up-regulated in Transcription
  misc_feature: MA Experiment 20000169 PARAMETER Experiment Name: At_100uM_ABA_P Parameter: Age (day) Value: 14
  misc_feature: MA Experiment 20000169 PARAMETER Experiment Name: At_100uM_ABA_P Parameter: Organism Value: A. thaliana
  misc_feature: MA Experiment 20000169 PARAMETER Experiment Name: At_100uM_ABA_P Parameter: Plant Line Value: WS
  misc_feature: MA Experiment 20000169 PARAMETER Experiment Name: At_100uM_ABA_P Parameter: Timepoint (hr) Value: 6
  misc_feature: MA Experiment 20000169 PARAMETER Experiment Name: At_100uM_ABA_P Parameter: Tissue Value: Aerial
  misc_feature: MA Experiment 20000169 PARAMETER Experiment Name: At_100uM_ABA_P Parameter: Treatment Value: 100uM ABA vs. No Treatment
  misc_feature: MA Experiment ID: 20000179 Result: Down-regulated in Transcription
  misc_feature: MA Experiment 20000179 PARAMETER Experiment Name: At_Germinating_Seeds_P Parameter: Age (hr) Value: 6 vs. 0
  misc_feature: MA Experiment 20000179 PARAMETER Experiment Name: At_Germinating_Seeds_P Parameter: Tissue Value: Germinating Seeds
  misc_feature: MA Experiment ID: 20000184 Result: Up-regulated in Transcription
  misc_feature: MA Experiment 20000184 PARAMETER Experiment Name: At_Shoots__P Parameter: Age (day) Value: 7
  misc_feature: MA Experiment 20000184 PARAMETER Experiment Name: At_Shoots__P Parameter: Tissue Value: Shoots vs. Whole Plant
  misc_feature: MA Experiment ID: 20000268 Result: Up-regulated in Transcription
  misc_feature: MA Experiment 20000268 PARAMETER Experiment Name: At_100mM_NaCl__P Parameter: Age (day) Value: 14
  misc_feature: MA Experiment 20000268 PARAMETER Experiment Name: At_100mM_NaCl__P Parameter: Organism Value: A. thaliana
  misc_feature: MA Experiment 20000268 PARAMETER Experiment Name: At_100mM_NaCl__P Parameter: Plant Line Value: WS
  misc_feature: MA Experiment 20000268 PARAMETER Experiment Name: At_100mM_NaCl__P Parameter: Timepoint (hr) Value: 6
  misc_feature: MA Experiment 20000268 PARAMETER Experiment Name: At_100mM_NaCl__P Parameter: Tissue Value: Whole Plant
  misc_feature: MA Experiment 20000268 PARAMETER Experiment Name: At_100mM_NaCl__P Parameter: Treatment Value: 100mM NaCl vs. No Treatment
  misc_feature: MA Experiment ID: 20000436 Result: Up-regulated in Transcription
  misc_feature: MA Experiment 20000436 PARAMETER Experiment Name: At_Drought_P Parameter: Age (day) Value: 7
  misc_feature: MA Experiment 20000436 PARAMETER Experiment Name: At_Drought_P Parameter: Organism Value: A. thaliana
  misc_feature: MA Experiment 20000436 PARAMETER Experiment Name: At_Drought_P Parameter: Plant Line Value: WS
  misc_feature: MA Experiment 20000436 PARAMETER Experiment Name: At_Drought_P Parameter: Timepoint (hr) Value: 12
  misc_feature: MA Experiment 20000436 PARAMETER Experiment Name: At_Drought_P Parameter: Tissue Value: Whole Plant
  misc_feature: MA Experiment 20000436 PARAMETER Experiment Name: At_Drought_P Parameter: Treatment Value: Drought vs. No Drought
  misc_feature: MA Experiment ID: 20000437 Result: Up-regulated in Transcription
  misc_feature: MA Experiment 20000437 PARAMETER Experiment Name: At_Drought_P Parameter: Age (day) Value: 8
  misc_feature: MA Experiment 20000437 PARAMETER Experiment Name: At_Drought_P Parameter: Organism Value: A. thaliana
  misc_feature: MA Experiment 20000437 PARAMETER Experiment Name: At_Drought_P Parameter: Plant Line Value: WS
  misc_feature: MA Experiment 20000437 PARAMETER Experiment Name: At_Drought_P Parameter: Timepoint (hr) Value: 24
  misc_feature: MA Experiment 20000437 PARAMETER Experiment Name: At_Drought_P Parameter: Tissue Value: Whole Plant
  misc_feature: MA Experiment 20000437 PARAMETER Experiment Name: At_Drought_P Parameter: Treatment Value: Drought vs. No Drought
  misc_feature: MA Experiment ID: 20000451 Result: Up-regulated in Transcription
  misc_feature: MA Experiment 20000451 PARAMETER Experiment Name: At_CS6879_Shoots-Roots_P Parameter: Age (day) Value: 14
  misc_feature: MA Experiment 20000451 PARAMETER Experiment Name: At_CS6879_Shoots-Roots_P Parameter: Organism Value: A. thaliana
  misc_feature: MA Experiment 20000451 PARAMETER Experiment Name: At_CS6879_Shoots-Roots_P Parameter: Plant Line Value: CS6879 vs. WS
  misc_feature: MA Experiment 20000451 PARAMETER Experiment Name: At_CS6879_Shoots-Roots_P Parameter: Tissue Value: Roots
  misc_feature: MA Experiment ID: 20000453 Result: Up-regulated in Transcription
  misc_feature: MA Experiment 20000453 PARAMETER Experiment Name: At_100uM_ABA_P Parameter: Age (day) Value: 15
  misc_feature: MA Experiment 20000453 PARAMETER Experiment Name: At_100uM_ABA_P Parameter: Organism Value: A. thaliana
  misc_feature: MA Experiment 20000453 PARAMETER Experiment Name: At_100uM_ABA_P Parameter: Plant Line Value: WS
  misc_feature: MA Experiment 20000453 PARAMETER Experiment Name: At_100uM_ABA_P Parameter: Timepoint (hr) Value: 24
  misc_feature: MA Experiment 20000453 PARAMETER Experiment Name: At_100uM_ABA_P Parameter: Tissue Value: Aerial
  misc_feature: MA Experiment 20000453 PARAMETER Experiment Name: At_100uM_ABA_P Parameter: Treatment Value: 100uM ABA vs. No Treatment
  misc_feature: MA Experiment ID: 20001906 Result: Up-regulated in Transcription
  misc_feature: MA Experiment 20001906 PARAMETER Experiment Name: At_Drought_Reproduction_P Parameter: Age (day) Value: 35
  misc_feature: MA Experiment 20001906 PARAMETER Experiment Name: At_Drought_Reproduction_P Parameter: Organism Value: A. thaliana
  misc_feature: MA Experiment 20001906 PARAMETER Experiment Name: At_Drought_Reproduction_P Parameter: Plant Line Value: WS
  misc_feature: MA Experiment 20001906 PARAMETER Experiment Name: At_Drought_Reproduction_P Parameter: Timepoint (day) Value: 5
  misc_feature: MA Experiment 20001906 PARAMETER Experiment Name: At_Drought_Reproduction_P Parameter: Tissue Value: Siliques
  misc_feature: MA Experiment 20001906 PARAMETER Experiment Name: At_Drought_Reproduction_P Parameter: Treatment Value: Drought vs. No Drought
  misc_feature: MA Experiment ID: 20001908 Result: Up-regulated in Transcription
  misc_feature: MA Experiment 20001908 PARAMETER Experiment Name: At_Drought_Reproduction_P Parameter: Age (day) Value: 40
  misc_feature: MA Experiment 20001908 PARAMETER Experiment Name: At_Drought_Reproduction_P Parameter: Organism Value: A. thaliana
  misc_feature: MA Experiment 20001908 PARAMETER Experiment Name: At_Drought_Reproduction_P Parameter: Plant Line Value: WS
  misc_feature: MA Experiment 20001908 PARAMETER Experiment Name: At_Drought_Reproduction_P Parameter: Timepoint (day) Value: 10
  misc_feature: MA Experiment 20001908 PARAMETER Experiment Name: At_Drought_Reproduction_P Parameter: Tissue Value: Siliques
  misc_feature: MA Experiment 20001908 PARAMETER Experiment Name: At_Drought_Reproduction_P Parameter: Treatment Value: Drought vs. No Drought
  misc_feature: MA Experiment ID: 20001910 Result: Up-regulated in Transcription
  misc_feature: MA Experiment 20001910 PARAMETER Experiment Name: At_Drought_Reproduction_P Parameter: Age (day) Value: 37
  misc_feature: MA Experiment 20001910 PARAMETER Experiment Name: At_Drought_Reproduction_P Parameter: Organism Value: A. thaliana
  misc_feature: MA Experiment 20001910 PARAMETER Experiment Name: At_Drought_Reproduction_P Parameter: Plant Line Value: WS
  misc_feature: MA Experiment 20001910 PARAMETER Experiment Name: At_Drought_Reproduction_P Parameter: Timepoint (day) Value: 7
  misc_feature: MA Experiment 20001910 PARAMETER Experiment Name: At_Drought_Reproduction_P Parameter: Tissue Value: Flowers
  misc_feature: MA Experiment 20001910 PARAMETER Experiment Name: At_Drought_Reproduction_P Parameter: Treatment Value: Drought vs. No Drought
aaactcaaaaggcggaggtgagtactggtgagagtgtgagtgaaaaaacaaaaaaaacaattcaactgcaaaaatgagttccggaatcggaagtttagtgaaggtcatctttaagaacttcgatgtcatcgctggacctgtgattagcttggtttatcctctatatgcatcagtgagggcaatagagtcgaggagtcatggagacgacaagcaatggttgacgtattgggctctctattcacttatcaaactctttgagctcacttttttcagactcctcgaatggatcccattatatccatacgcaaagctagccctaactagttggttggtcttaccgggcatgaacggtgctgcttatctctacgagcactatgtgcgttcattccttttaagcccacatactgttaacgtatggtacgtgccagccaagaaggatgacgacttgggagcaaccgctggcaaatttactccagtaaatgattccggtgcgcctcaggaaaagattgtgagctcggtggatacatcagcaaaatatgttggtcattcggcttttgatgacgcctatatctactaggctagtagctagtaaactacttccggctagttgtagctgagcatcctgatcttagtgtatcgaaatacttgttttctcctctttttctttgttttcgggttttatgaagtttgttgttactgctaaggaattttaatatcaaaataaatgttaattgagtgagtt

SEQ ID NO: 106991 - protein, 167 aa, Arabidopsis thaliana
  peptide (1)..(167): Ceres Seq. ID no. 13621036
  misc_feature (9)..(106): Pfam Name: TB2/DP1, HVA22 family Pfam Description: TB2/DP1, HVA22 family
  misc_feature (1)..(167): Homolog of NCBI NO: 15241840 NR Description: AtHVA22b-related protein [Arabidopsis thaliana]
  misc_feature (1)..(167): Homolog of NCBI NO: 4884934 NR Description: AtHVA22b [Arabidopsis thaliana]
  misc_feature (1)..(158): Homolog of NCBI NO: 15221266 NR Description: AtHVA22a [Arabidopsis thaliana]
  misc_feature (2)..(167): Homolog of NCBI NO: 15222421 NR Description: AtHVA22c [Arabidopsis thaliana]
  misc_feature (19)..(103): Homolog of NCBI NO: 18423191 NR Description: expressed protein [Arabidopsis thaliana] AtHVA22e [Arabidopsis thaliana] AtHVA22e [Arabidopsis thaliana] >gi|21537153|gb|AAM61494.1|
  misc_feature (20)..(103): Homolog of NCBI NO: 18416458 NR Description: abscisic acid-induced - like protein [Arabidopsis >gi|4884938|gb|AAD31882.1| AtHVA22d [Arabidopsis thaliana] AtHVA22d [Arabidopsis thaliana] >gi|16604611|gb|AAL24098.1|
  misc_feature (34)..(105): Homolog of NCBI NO: 34910810 NR Description: P0042A10.34 [Oryza sativa (japonica
  misc_feature (26)..(103): Homolog of NCBI NO: 8777395 NR Description: gene_id:MFB16.12~pir||T05517~similar to unknown
  misc_feature (19)..(106): Homolog of NCBI NO: 1076715 NR Description: abscisic acid-induced protein HVA22 - barley
  misc_feature (19)..(106): Homolog of NCBI NO: 33342176 NR Description: hypothetical protein [Triticum aestivum]
MSSGIGSLVKVIFKNFDVIAGPVISLVYPLYASVRAIESRSHGDDKQWLTYWALYSLIKLFELTFFRLLEWIPLYPYAKLALTSWLVLPGMNGAAYLYEHYVRSFLLSPHTVNVWYVPAKKDDDLGATAGKFTPVNDSGAPQEKIVSSVDTSAKYVGHSAFDDAYIY

SEQ ID NO: 106992 - DNA, 869 bp, Arabidopsis thaliana
  misc_feature (1)..(869): Ceres Seq. ID no. 13621052
  misc_feature: MA Experiment ID: 20001905 Result: Down-regulated in Transcription
  misc_feature: MA Experiment 20001905 PARAMETER Experiment Name: At_Drought_Reproduction_P Parameter: Age (day) Value: 40
  misc_feature: MA Experiment 20001905 PARAMETER Experiment Name: At_Drought_Reproduction_P Parameter: Organism Value: A. thaliana
  misc_feature: MA Experiment 20001905 PARAMETER Experiment Name: At_Drought_Reproduction_P Parameter: Plant Line Value: WS
  misc_feature: MA Experiment 20001905 PARAMETER Experiment Name: At_Drought_Reproduction_P Parameter: Timepoint (day) Value: 10
  misc_feature: MA Experiment 20001905 PARAMETER Experiment Name: At_Drought_Reproduction_P Parameter: Tissue Value: Rosettes
  misc_feature: MA Experiment 20001905 PARAMETER Experiment Name: At_Drought_Reproduction_P Parameter: Treatment Value: Drought vs. No Drought
atctcctttaaaattctctgttcttttgtattcctaatctttaacaatttaagaagaaatggattcgaattcatggatcaattgtccccctgtgttttcatcatcgccttcttcacgccgttaccaatctcgatcagatttgtatttgggagatgttgaaggagaagacgatttgaaagctgagtttatgtgtcctttttgtgcagatgagtttgatattgttggtctttgttgtcatattgatgtgaatcatcctgttgaagctaagaatggggtttgtcctgtctgcacaaagaaggtgggattggacattgttggccatataacaacgcaacacgggaacagattttacgtgcagcgaagaagaaggttgcgtaaaggtggatatagctctacctatcttactcttaaaaaagagcttcgagaagctaacttacagtctcttggagggtcttccactttcattccctcttccaatatagattctgatcctctactctcatcctttatgtttaaacccccttcggctatacctatcactgaaggagactcggtagcacaagtctcacctaaggacacctctaaaagcaaaatacaacaagaatcattctcaaacgaagatcaagagaaggcaaagaagagcaagtttgtgcggggcttgctttggtcaaccatgcttgaagacaagttctaatttatctagatatcttatattgtaatcaatgtatcaagaaatcatacattagtctcaatgtatgtagcagaggcttgtagcaagcataatggcatgctgagtatgttgtaatcggatgttcgtggggtatcttttatgtgcataatcagaagatatataagtactatttcactcc

SEQ ID NO: 106993 - protein, 211 aa, Arabidopsis thaliana
  peptide (1)..(211): Ceres Seq. ID no. 13621053
  misc_feature (12)..(206): Pfam Name: Drought induced 19 protein (Di19) Pfam Description: Drought induced 19 protein (Di19)
  misc_feature (1)..(211): Homolog of NCBI NO: 15239827 NR Description: drought-induced protein -related [Arabidopsis
  misc_feature (1)..(211): Homolog of NCBI NO: 13937216 NR Description: AT5g49230/K21P3_11 [Arabidopsis thaliana]
  misc_feature (1)..(211): Homolog of NCBI NO: 18377875 NR Description: AT3g06760/F3E22_10 [Arabidopsis thaliana]
  misc_feature (1)..(211): Homolog of NCBI NO: 15230782 NR Description: drought-induced protein -related [Arabidopsis
  misc_feature (1)..(209): Homolog of NCBI NO: 25992529 NR Description: fiber protein Fb2 [Gossypium barbadense]
  misc_feature (1)..(209): Homolog of NCBI NO: 28393233 NR Description: unknown protein [Arabidopsis thaliana]
  misc_feature (1)..(209): Homolog of NCBI NO: 15240426 NR Description: drought-induced protein -related [Arabidopsis
  misc_feature (23)..(209): Homolog of NCBI NO: 15028023 NR Description: unknown protein [Arabidopsis thaliana]
  misc_feature (23)..(209): Homolog of NCBI NO: 1076316 NR Description: drought-induced protein Di19 - Arabidopsis
  misc_feature (23)..(209): Homolog of NCBI NO: 30696095 NR Description: drought-induced protein -related [Arabidopsis
MDSNSWINCPPVFSSSPSSRRYQSRSDLYLGDVEGEDDLKAEFMCPFCADEFDIVGLCCHIDVNHPVEAKNGVCPVCTKKVGLDIVGHITTQHGNRFYVQRRRRLRKGGYSSTYLTLKKELREANLQSLGGSSTFIPSSNIDSDPLLSSFMFKPPSAIPITEGDSVAQVSPKDTSKSKIQQESFSNEDQEKAKKSKFVRGLLWSTMLEDKF

SEQ ID NO: 106994 - protein, 168 aa, Arabidopsis thaliana
  peptide (1)..(168): Ceres Seq. ID no. 13621054
  misc_feature (1)..(163): Pfam Name: Drought induced 19 protein (Di19) Pfam Description: Drought induced 19 protein (Di19)
  misc_feature (1)..(168): Homolog of NCBI NO: 15239827 NR Description: drought-induced protein -related [Arabidopsis
  misc_feature (1)..(168): Homolog of NCBI NO: 13937216 NR Description: AT5g49230/K21P3_11 [Arabidopsis thaliana]
  misc_feature (1)..(168): Homolog of NCBI NO: 18377875 NR Description: AT3g06760/F3E22_10 [Arabidopsis thaliana]
  misc_feature (1)..(168): Homolog of NCBI NO: 15230782 NR Description: drought-induced protein -related [Arabidopsis
  misc_feature (1)..(166): Homolog of NCBI NO: 25992529 NR Description: fiber protein Fb2 [Gossypium barbadense]
  misc_feature (1)..(166): Homolog of NCBI NO: 28393233 NR Description: unknown protein [Arabidopsis thaliana]
  misc_feature (1)..(166): Homolog of NCBI NO: 15240426 NR Description: drought-induced protein -related [Arabidopsis
  misc_feature (1)..(166): Homolog of NCBI NO: 15028023 NR Description: unknown protein [Arabidopsis thaliana]
  misc_feature (1)..(166): Homolog of NCBI NO: 1076316 NR Description: drought-induced protein Di19 - Arabidopsis
  misc_feature (1)..(166): Homolog of NCBI NO: 30696095 NR Description: drought-induced protein -related [Arabidopsis
MCPFCADEFDIVGLCCHIDVNHPVEAKNGVCPVCTKKVGLDIVGHITTQHGNRFYVQRRRRLRKGGYSSTYLTLKKELREANLQSLGGSSTFIPSSNIDSDPLLSSFMFKPPSAIPITEGDSVAQVSPKDTSKSKIQQESFSNEDQEKAKKSKFVRGLLWSTMLEDKF

SEQ ID NO: 106995 - DNA, 831 bp, Arabidopsis thaliana
  misc_feature (1)..(831): Ceres Seq. ID no. 13621055
  misc_feature: MA Experiment ID: 108576 Result: Up-regulated in Transcription
  misc_feature: MA Experiment 108576 PARAMETER Experiment Name: At_42deg_Heat_cDNA_P Parameter: Temperature (deg C) Value: 42 vs. 22
  misc_feature: MA Experiment 108576 PARAMETER Experiment Name: At_42deg_Heat_cDNA_P Parameter: Timepoint (hr) Value: 1
  misc_feature: MA Experiment 108576 PARAMETER Experiment Name: At_42deg_Heat_cDNA_P Parameter: Tissue Value: Aerial
  misc_feature: MA Experiment ID: 20000166 Result: Up-regulated in Transcription
  misc_feature: MA Experiment 20000166 PARAMETER Experiment Name: At_100uM_ABA_P Parameter: Age (day) Value: 14
  misc_feature: MA Experiment 20000166 PARAMETER Experiment Name: At_100uM_ABA_P Parameter: Organism Value: A. thaliana
  misc_feature: MA Experiment 20000166 PARAMETER Experiment Name: At_100uM_ABA_P Parameter: Plant Line Value: WS
  misc_feature: MA Experiment 20000166 PARAMETER Experiment Name: At_100uM_ABA_P Parameter: Timepoint (hr) Value: 1
  misc_feature: MA Experiment 20000166 PARAMETER Experiment Name: At_100uM_ABA_P Parameter: Tissue Value: Aerial
  misc_feature: MA Experiment 20000166 PARAMETER Experiment Name: At_100uM_ABA_P Parameter: Treatment Value: 100uM ABA vs. No Treatment
  misc_feature: MA Experiment ID: 20000169 Result: Up-regulated in Transcription
  misc_feature: MA Experiment 20000169 PARAMETER Experiment Name: At_100uM_ABA_P Parameter: Age (day) Value: 14
  misc_feature: MA Experiment 20000169 PARAMETER Experiment Name: At_100uM_ABA_P Parameter: Organism Value: A. thaliana
  misc_feature: MA Experiment 20000169 PARAMETER Experiment Name: At_100uM_ABA_P Parameter: Plant Line Value: WS
  misc_feature: MA Experiment 20000169 PARAMETER Experiment Name: At_100uM_ABA_P Parameter: Timepoint (hr) Value: 6
  misc_feature: MA Experiment 20000169 PARAMETER Experiment Name: At_100uM_ABA_P Parameter: Tissue Value: Aerial
  misc_feature: MA Experiment 20000169 PARAMETER Experiment Name: At_100uM_ABA_P Parameter: Treatment Value: 100uM ABA vs. No Treatment
  misc_feature: MA Experiment ID: 20000180 Result: Up-regulated in Transcription
  misc_feature: MA Experiment 20000180 PARAMETER Experiment Name: At_Germinating_Seeds_P Parameter: Age (hr) Value: 24 vs. 0
  misc_feature: MA Experiment 20000180 PARAMETER Experiment Name: At_Germinating_Seeds_P Parameter: Tissue Value: Germinating Seeds
  misc_feature: MA Experiment ID: 20000234 Result: Up-regulated in Transcription
  misc_feature: MA Experiment 20000234 PARAMETER Experiment Name: At_Siliques_P Parameter: Age (day) Value: 21
  misc_feature: MA Experiment 20000234 PARAMETER Experiment Name: At_Siliques_P Parameter: Organism Value: A. thaliana
  misc_feature: MA Experiment 20000234 PARAMETER Experiment Name: At_Siliques_P Parameter: Plant Line Value: WS
  misc_feature: MA Experiment 20000234 PARAMETER Experiment Name: At_Siliques_P Parameter: Tissue Value: Less Than 5mm Siliques vs. Whole Plant
  misc_feature: MA Experiment ID: 20000267 Result: Up-regulated in Transcription
  misc_feature: MA Experiment 20000267 PARAMETER Experiment Name: At_Drought_P Parameter: Age (day) Value: 7
  misc_feature: MA Experiment 20000267 PARAMETER Experiment Name: At_Drought_P Parameter: Organism Value: A. thaliana
  misc_feature: MA Experiment 20000267 PARAMETER Experiment Name: At_Drought_P Parameter: Plant Line Value: WS
  misc_feature: MA Experiment 20000267 PARAMETER Experiment Name: At_Drought_P Parameter: Timepoint (hr) Value: 6
  misc_feature: MA Experiment 20000267 PARAMETER Experiment Name: At_Drought_P Parameter: Tissue Value: Whole Plant
  misc_feature: MA Experiment 20000267 PARAMETER Experiment Name: At_Drought_P Parameter: Treatment Value: Drought vs. No Drought
  misc_feature: MA Experiment ID: 20000436 Result: Up-regulated in Transcription
  misc_feature: MA Experiment 20000436 PARAMETER Experiment Name: At_Drought_P Parameter: Age (day) Value: 7
  misc_feature: MA Experiment 20000436 PARAMETER Experiment Name: At_Drought_P Parameter: Organism Value: A. thaliana
  misc_feature: MA Experiment 20000436 PARAMETER Experiment Name: At_Drought_P Parameter: Plant Line Value: WS
  misc_feature: MA Experiment 20000436 PARAMETER Experiment Name: At_Drought_P Parameter: Timepoint (hr) Value: 12
  misc_feature: MA Experiment 20000436 PARAMETER Experiment Name: At_Drought_P Parameter: Tissue Value: Whole Plant
  misc_feature: MA Experiment 20000436 PARAMETER Experiment Name: At_Drought_P Parameter: Treatment Value: Drought vs. No Drought
  misc_feature: MA Experiment ID: 20000437 Result: Up-regulated in Transcription
  misc_feature: MA Experiment 20000437 PARAMETER Experiment Name: At_Drought_P Parameter: Age (day) Value: 8
  misc_feature: MA Experiment 20000437 PARAMETER Experiment Name: At_Drought_P Parameter: Organism Value: A. thaliana
  misc_feature: MA Experiment 20000437 PARAMETER Experiment Name: At_Drought_P Parameter: Plant Line Value: WS
  misc_feature: MA Experiment 20000437 PARAMETER Experiment Name: At_Drought_P Parameter: Timepoint (hr) Value: 24
  misc_feature: MA Experiment 20000437 PARAMETER Experiment Name: At_Drought_P Parameter: Tissue Value: Whole Plant
  misc_feature: MA Experiment 20000437 PARAMETER Experiment Name: At_Drought_P Parameter: Treatment Value: Drought vs. No Drought
  misc_feature: MA Experiment ID: 20000439 Result: Up-regulated in Transcription
  misc_feature: MA Experiment 20000439 PARAMETER Experiment Name: At_Roots__P Parameter: Age (day) Value: 14 vs. 21
  misc_feature: MA Experiment 20000439 PARAMETER Experiment Name: At_Roots__P Parameter: Organism Value: A. thaliana
  misc_feature: MA Experiment 20000439 PARAMETER Experiment Name: At_Roots__P Parameter: Tissue Value: Roots vs. Whole Plant
  misc_feature: MA Experiment ID: 20000441 Result: Down-regulated in Transcription
  misc_feature: MA Experiment 20000441 PARAMETER Experiment Name: At_1uM_BR-BRZ__P Parameter: Tissue Value: Shoot Apices
  misc_feature: MA Experiment 20000441 PARAMETER Experiment Name: At_1uM_BR-BRZ__P Parameter: Treatment Value: 1uM BR vs. No Treatment
  misc_feature: MA Experiment ID: 20000453 Result: Up-regulated in Transcription
  misc_feature: MA Experiment 20000453 PARAMETER Experiment Name: At_100uM_ABA_P Parameter: Age (day) Value: 15
  misc_feature: MA Experiment 20000453 PARAMETER Experiment Name: At_100uM_ABA_P Parameter: Organism Value: A. thaliana
  misc_feature: MA Experiment 20000453 PARAMETER Experiment Name: At_100uM_ABA_P Parameter: Plant Line Value: WS
  misc_feature: MA Experiment 20000453 PARAMETER Experiment Name: At_100uM_ABA_P Parameter: Timepoint (hr) Value: 24
  misc_feature: MA Experiment 20000453 PARAMETER Experiment Name: At_100uM_ABA_P Parameter: Tissue Value: Aerial
  misc_feature: MA Experiment 20000453 PARAMETER Experiment Name: At_100uM_ABA_P Parameter: Treatment Value: 100uM ABA vs. No Treatment
  misc_feature: MA Experiment ID: 20000794 Result: Down-regulated in Transcription
  misc_feature: MA Experiment 20000794 PARAMETER Experiment Name: At_Petals_P Parameter: Age (day) Value: 23-25 days
  misc_feature: MA Experiment 20000794 PARAMETER Experiment Name: At_Petals_P Parameter: Plant Line Value: WS
  misc_feature: MA Experiment 20000794 PARAMETER Experiment Name: At_Petals_P Parameter: Tissue Value: Petals vs. Whole plant
  misc_feature: MA Experiment ID: 20001247 Result: Up-regulated in Transcription
  misc_feature: MA Experiment 20001247 PARAMETER Experiment Name: At_Far-red-induction_P Parameter: Age (day) Value: 7
  misc_feature: MA Experiment 20001247 PARAMETER Experiment Name: At_Far-red-induction_P Parameter: Light Value: Far-red vs. White
  misc_feature: MA Experiment 20001247 PARAMETER Experiment Name: At_Far-red-induction_P Parameter: Organism Value: A. thaliana
  misc_feature: MA Experiment 20001247 PARAMETER Experiment Name: At_Far-red-induction_P Parameter: Plant Line Value: Columbia
  misc_feature: MA Experiment 20001247 PARAMETER Experiment Name: At_Far-red-induction_P Parameter: Timepoint (hr) Value: 1
  misc_feature: MA Experiment 20001247 PARAMETER Experiment Name: At_Far-red-induction_P Parameter: Tissue Value: Whole Plant
  misc_feature: MA Experiment ID: 20001554 Result: Up-regulated in Transcription
  misc_feature: MA Experiment 20001554 PARAMETER Experiment Name: At_Drought_Soil_Dry_P Parameter: Age (day) Value: 21
  misc_feature: MA Experiment 20001554 PARAMETER Experiment Name: At_Drought_Soil_Dry_P Parameter: Organism Value: A. thaliana
  misc_feature: MA Experiment 20001554 PARAMETER Experiment Name: At_Drought_Soil_Dry_P Parameter: Plant Line Value: WS
  misc_feature: MA Experiment 20001554 PARAMETER Experiment Name: At_Drought_Soil_Dry_P Parameter: Post Timepoint (hr) Value: None
  misc_feature: MA Experiment 20001554 PARAMETER Experiment Name: At_Drought_Soil_Dry_P Parameter: Post-Treatment Value: None
  misc_feature: MA Experiment 20001554 PARAMETER Experiment Name: At_Drought_Soil_Dry_P Parameter: Timepoint (day) Value: 7
  misc_feature: MA Experiment 20001554 PARAMETER Experiment Name: At_Drought_Soil_Dry_P Parameter: Treatment Value: Drought vs. No Drought
  misc_feature: MA Experiment ID: 20001555 Result: Up-regulated in Transcription
  misc_feature: MA Experiment 20001555 PARAMETER Experiment Name: At_Drought_Soil_Dry_P Parameter: Age (day) Value: 24
  misc_feature: MA Experiment 20001555 PARAMETER Experiment Name: At_Drought_Soil_Dry_P Parameter: Organism Value: A. thaliana
  misc_feature: MA Experiment 20001555 PARAMETER Experiment Name: At_Drought_Soil_Dry_P Parameter: Plant Line Value: WS
  misc_feature: MA Experiment 20001555 PARAMETER Experiment Name: At_Drought_Soil_Dry_P Parameter: Post Timepoint (hr) Value: None
  misc_feature: MA Experiment 20001555 PARAMETER Experiment Name: At_Drought_Soil_Dry_P Parameter: Post-Treatment Value: None
  misc_feature: MA Experiment 20001555 PARAMETER Experiment Name: At_Drought_Soil_Dry_P Parameter: Timepoint (day) Value: 10
  misc_feature: MA Experiment 20001555 PARAMETER Experiment Name: At_Drought_Soil_Dry_P Parameter: Treatment Value: Drought vs. No Drought
  misc_feature: MA Experiment ID: 20001557 Result: Up-regulated in Transcription
  misc_feature: MA Experiment 20001557 PARAMETER Experiment Name: At_Drought_Soil_Dry_P Parameter: Age (day) Value: 27
  misc_feature: MA Experiment 20001557 PARAMETER Experiment Name: At_Drought_Soil_Dry_P Parameter: Organism Value: A. thaliana
  misc_feature: MA Experiment 20001557 PARAMETER Experiment Name: At_Drought_Soil_Dry_P Parameter: Plant Line Value: WS
  misc_feature: MA Experiment 20001557 PARAMETER Experiment Name: At_Drought_Soil_Dry_P Parameter: Post Timepoint (hr) Value: 3
  misc_feature: MA Experiment 20001557 PARAMETER Experiment Name: At_Drought_Soil_Dry_P Parameter: Post-Treatment Value: Re-Water vs. No Drought
  misc_feature: MA Experiment 20001557 PARAMETER Experiment Name: At_Drought_Soil_Dry_P Parameter: Timepoint (day) Value: 13
  misc_feature: MA Experiment 20001557 PARAMETER Experiment Name: At_Drought_Soil_Dry_P Parameter: Treatment Value: Drought vs. No Drought
  misc_feature: MA Experiment ID: 20001560 Result: Up-regulated in Transcription
  misc_feature: MA Experiment 20001560 PARAMETER Experiment Name: At_Drought_Soil_Dry_P Parameter: Age (day) Value: 28
  misc_feature: MA Experiment 20001560 PARAMETER Experiment Name: At_Drought_Soil_Dry_P Parameter: Organism Value: A. thaliana
  misc_feature: MA Experiment 20001560 PARAMETER Experiment Name: At_Drought_Soil_Dry_P Parameter: Plant Line Value: WS
  misc_feature: MA Experiment 20001560 PARAMETER Experiment Name: At_Drought_Soil_Dry_P Parameter: Post Timepoint (hr) Value: None
  misc_feature: MA Experiment 20001560 PARAMETER Experiment Name: At_Drought_Soil_Dry_P Parameter: Post-Treatment Value: None
  misc_feature: MA Experiment 20001560 PARAMETER Experiment Name: At_Drought_Soil_Dry_P Parameter: Timepoint (day) Value: 14
  misc_feature: MA Experiment 20001560 PARAMETER Experiment Name: At_Drought_Soil_Dry_P Parameter: Treatment Value: Drought vs. No Drought
cttcttcttcttcttcttcttctttcccactcctactctttctccctcctctgctctctcatctacttcctctgtatattcttcgcacaaaattaagtttctaaatccagtttctgacaatggaaacaaaccatttatacactttgtctacacttgttgttatgctgctagtgtcagtgacaccgacagtgacatcaaaagacgaggttgtttcttgtacaatgtgttcttcatgcgacaatccatgtagtcctgtccaatcatctcctccgccaccttctcctccaccaccgtcaacccccacaaccgcatgtcctccccctccttctcctccaagctccggtggcggtagctcttactattaccctcctccttctcagtccggtggaggcagtaaataccctccaccatacggtggcggtggtcaaggttattactatcctccgccgtattcaggaaactatcctacgccgcctccgccgaatccgatcgtcccttatttcccgttttactatcatactccaccaccaggttctggctcagatcggtttatgagttcttactctattatttttgctctttttgctgtctttctctgtttagtgtgacggaaaatagtcggaaaattcgccgggaaaatgacgaagaaaaagtcgaaataatgtggcagatccgtagatctataaatctttagatttctttgatcatggaaactaaatgatgttggatcttttactttcttcgatctgttttaactttttcttttgttgttgacaatttgtatttaattgttcttgattattaacatattaattactcgttattcagatt

SEQ ID NO: 106996 - protein, 162 aa, Arabidopsis thaliana
  peptide (1)..(162): Ceres Seq. ID no. 13621056
  misc_feature (42)..(126): Pfam Name: 7 transmembrane receptor (rhodopsin family) Pfam Description: 7 transmembrane receptor (rhodopsin family)
  misc_feature (1)..(162): Homolog of NCBI NO: 18423010 NR Description: proline-rich protein family [Arabidopsis >gi|10177157|dbj|BAB10346.1| gene_id:K21P3.16~unknown protein thaliana] >gi|21553492|gb|AAM62585.1| extensin like protein
  misc_feature (1)..(162): Homolog of NCBI NO: 18397707 NR Description: proline-rich protein family [Arabidopsis >gi|7549638|gb|AAF63823.1| unknown protein [Arabidopsis thaliana]
  misc_feature (1)..(158): Homolog of NCBI NO: 15234820 NR Description: proline-rich protein family [Arabidopsis thaliana]
  misc_feature (23)..(141): Homolog of NCBI NO: 34894480 NR Description: OJ1116_C07.3 [Oryza sativa (japonica
  misc_feature (50)..(136): Homolog of NCBI NO: 34894212 NR Description: P0439B06.27 [Oryza sativa (japonica
  misc_feature (45)..(135): Homolog of NCBI NO: 15608218 NR Description: pra [Mycobacterium tuberculosis H37Rv]
  misc_feature (45)..(135): Homolog of NCBI NO: 31792269 NR Description: Probable Proline-rich antigen homolog pra
  misc_feature (41)..(141): Homolog of NCBI NO: 791150 NR Description: extensin-like protein [Vigna unguiculata]
  misc_feature (49)..(141): Homolog of NCBI NO: 3204132 NR Description: extensin [Cicer arietinum]
  misc_feature (49)..(141): Homolog of NCBI NO: 7488998 NR Description: extensin class I (clone uG-18) - tomato >gi|1345537|emb|CAA39215.1| extensin (class I) [Lycopersicon
METNHLYTLSTLVVMLLVSVTPTVTSKDEVVSCTMCSSCDNPCSPVQSSPPPPSPPPPSTPTTACPPPPSPPSSGGGSSYYYPPPSQSGGGSKYPPPYGGGGQGYYYPPPYSGNYPTPPPPNPIVPYFPFYYHTPPPGSGSDRFMSSYSIIFALFAVFLCLV

SEQ ID NO: 106997 - protein, 148 aa, Arabidopsis thaliana
  peptide (1)..(148): Ceres Seq. ID no. 13621057
  misc_feature (28)..(112): Pfam Name: 7 transmembrane receptor (rhodopsin family) Pfam Description: 7 transmembrane receptor (rhodopsin family)
  misc_feature (1)..(148): Homolog of NCBI NO: 18423010 NR Description: proline-rich protein family [Arabidopsis >gi|10177157|dbj|BAB10346.1| gene_id:K21P3.16~unknown protein thaliana] >gi|21553492|gb|AAM62585.1| extensin like protein
  misc_feature (1)..(148): Homolog of NCBI NO: 18397707 NR Description: proline-rich protein family [Arabidopsis >gi|7549638|gb|AAF63823.1| unknown protein [Arabidopsis thaliana]
  misc_feature (1)..(144): Homolog of NCBI NO: 15234820 NR Description: proline-rich protein family [Arabidopsis thaliana]
  misc_feature (9)..(127): Homolog of NCBI NO: 34894480 NR Description: OJ1116_C07.3 [Oryza sativa (japonica
  misc_feature (36)..(122): Homolog of NCBI NO: 34894212 NR Description: P0439B06.27 [Oryza sativa (japonica
  misc_feature (31)..(121): Homolog of NCBI NO: 15608218 NR Description: pra [Mycobacterium tuberculosis H37Rv]
  misc_feature (31)..(121): Homolog of NCBI NO: 31792269 NR Description: Probable Proline-rich antigen homolog pra
  misc_feature (27)..(127): Homolog of NCBI NO: 791150 NR Description: extensin-like protein [Vigna unguiculata]
  misc_feature (35)..(127): Homolog of NCBI NO: 3204132 NR Description: extensin [Cicer arietinum]
  misc_feature (35)..(127): Homolog of NCBI NO: 7488998 NR Description: extensin class I (clone uG-18) - tomato >gi|1345537|emb|CAA39215.1| extensin (class I) [Lycopersicon
MLLVSVTPTVTSKDEVVSCTMCSSCDNPCSPVQSSPPPPSPPPPSTPTTACPPPPSPPSSGGGSSYYYPPPSQSGGGSKYPPPYGGGGQGYYYPPPYSGNYPTPPPPNPIVPYFPFYYHTPPPGSGSDRFMSSYSIIFALFAVFLCLV

SEQ ID NO: 106998 - protein, 128 aa, Arabidopsis thaliana
  peptide (1)..(128): Ceres Seq. ID no. 13621058
  misc_feature (8)..(92): Pfam Name: 7 transmembrane receptor (rhodopsin family) Pfam Description: 7 transmembrane receptor (rhodopsin family)
  misc_feature (1)..(128): Homolog of NCBI NO: 18423010 NR Description: proline-rich protein family [Arabidopsis >gi|10177157|dbj|BAB10346.1| gene_id:K21P3.16~unknown protein thaliana] >gi|21553492|gb|AAM62585.1| extensin like protein
  misc_feature (1)..(128): Homolog of NCBI NO: 18397707 NR Description: proline-rich protein family [Arabidopsis >gi|7549638|gb|AAF63823.1| unknown protein [Arabidopsis thaliana]
  misc_feature (1)..(124): Homolog of NCBI NO: 15234820 NR Description: proline-rich protein family [Arabidopsis thaliana]
  misc_feature (1)..(107): Homolog of NCBI NO: 34894480 NR Description: OJ1116_C07.3 [Oryza sativa (japonica
  misc_feature (16)..(102): Homolog of NCBI NO: 34894212 NR Description: P0439B06.27 [Oryza sativa (japonica
  misc_feature (11)..(101): Homolog of NCBI NO: 15608218 NR Description: pra [Mycobacterium tuberculosis H37Rv]
  misc_feature (11)..(101): Homolog of NCBI NO: 31792269 NR Description: Probable Proline-rich antigen homolog pra
  misc_feature (7)..(107): Homolog of NCBI NO: 791150 NR Description: extensin-like protein [Vigna unguiculata]
  misc_feature (15)..(107): Homolog of NCBI NO: 3204132 NR Description: extensin [Cicer arietinum]
  misc_feature (15)..(107): Homolog of NCBI NO: 7488998 NR Description: extensin class I (clone uG-18) - tomato >gi|1345537|emb|CAA39215.1| extensin (class I) [Lycopersicon
MCSSCDNPCSPVQSSPPPPSPPPPSTPTTACPPPPSPPSSGGGSSYYYPPPSQSGGGSKYPPPYGGGGQGYYYPPPYSGNYPTPPPPNPIVPYFPFYYHTPPPGSGSDRFMSSYSIIFALFAVFLCLV

SEQ ID NO: 106999 - DNA, 1736 bp, Arabidopsis thaliana
  misc_feature (1)..(1736): Ceres Seq. ID no. 13621063
  misc_feature: MA Experiment ID: 20000306 Result: Down-regulated in Transcription
  misc_feature: MA Experiment 20000306 PARAMETER Experiment Name: At_Germinating_Seeds_Sub_P Parameter: Age (hr) Value: 6 vs. 0
  misc_feature: MA Experiment 20000306 PARAMETER Experiment Name: At_Germinating_Seeds_Sub_P Parameter: Organism Value: A. thaliana
  misc_feature: MA Experiment 20000306 PARAMETER Experiment Name: At_Germinating_Seeds_Sub_P Parameter: Plant Line Value: WS
  misc_feature: MA Experiment 20000306 PARAMETER Experiment Name: At_Germinating_Seeds_Sub_P Parameter: Tissue Value: Germinating Seeds
  misc_feature: MA Experiment ID: 20000347 Result: Up-regulated in Transcription
  misc_feature: MA Experiment 20000347 PARAMETER Experiment Name: At_2mM_SA_Sub_P Parameter: Age (day) Value: 14
  misc_feature: MA Experiment 20000347 PARAMETER Experiment Name: At_2mM_SA_Sub_P Parameter: Organism Value: A. thaliana
  misc_feature: MA Experiment 20000347 PARAMETER Experiment Name: At_2mM_SA_Sub_P Parameter: Plant Line Value: WS
  misc_feature: MA Experiment 20000347 PARAMETER Experiment Name: At_2mM_SA_Sub_P Parameter: Timepoint (hr) Value: 6
  misc_feature: MA Experiment 20000347 PARAMETER Experiment Name: At_2mM_SA_Sub_P Parameter: Tissue Value: Aerial
  misc_feature: MA Experiment 20000347 PARAMETER Experiment Name: At_2mM_SA_Sub_P Parameter: Treatment Value: 2mM SA vs. No Treatment
  misc_feature: MA Experiment ID: 20000355 Result: Down-regulated in Transcription
  misc_feature: MA Experiment 20000355 PARAMETER Experiment Name: At_Siliques_Sub_P Parameter: Age (day) Value: 21
  misc_feature: MA Experiment 20000355 PARAMETER Experiment Name: At_Siliques_Sub_P Parameter: Organism Value: A. thaliana
  misc_feature: MA Experiment 20000355 PARAMETER Experiment Name: At_Siliques_Sub_P Parameter: Plant Line Value: WS
  misc_feature: MA Experiment 20000355 PARAMETER Experiment Name: At_Siliques_Sub_P Parameter: Tissue Value: Less Than 5mm Siliques vs. Whole Plant
  misc_feature: MA Experiment ID: 20000440 Result: Down-regulated in Transcription
  misc_feature: MA Experiment 20000440 PARAMETER Experiment Name: At_Closed-Flower__Sub_P Parameter: Tissue Value: Closed Flower vs. Whole Plant
atgtccatgctttattgaagatgtgcagagaataacaaaaatggtcgacaagagagaagaagttatgcacgtagccatgtttccatggctagctatgggtcatctccttccttttcttcgtctctccaagttactagctcaaaagggtcacaagatctctttcatatcaacaccaagaaacatcgaaagacttcctaaattacaatcaaacctcgcctcctccatcaccttcgtctctttccctctccctcccatctcaggcttgcctccttcttcagaatcatccatggacgttccttacaacaagcaacagtctcttaaagccgcttttgatcttcttcagccaccgttgaaagagtttctccgacggtcttctccggattggatcatatacgactatgcttctcactggcttccttctattgcggccgagcttggaatctctaaggctttctttagtctctttaacgcagctactctctgtttcatgggaccgtcttcgtctttgattgaagaaattagatcaacgccggaagatttcacggtggtgccaccgtgggtcccgttcaagtcaaacatcgtgtttcgttatcatgaagttactagatacgttgagaagacagaggaagatgtaaccggagtctctgactcagttcggtttggttactcgattgacgaaagcgatgcggtttttgtccgtagctgtccggagtttgaaccggaatggtttggtttactaaaagacctgtaccgtaaaccggtatttccaatcgggtttttgcctccggttattgaagacgacgatgccgttgatactacatgggttcgtataaagaagtggctcgacaagcaacggcttaattcagttgtttacgtgtcacttggcaccgaagcgagtcttcgtcatgaggaagtaactgagctagctcttgggttagagaagtcagagacaccgttcttttgggtcctaaggaacgagccaaagattccagatgggttcaaaacacgagtcaagggacgtggaatggttcatgttggttgggttccacaagtgaaaatacttagtcacgagtcagtaggagggttcttgacacattgtggttggaactcagtggtggaagggttagggtttggtaaagttccaatcttttttccggtgttgaatgagcaaggacttaatacgaggttgttgcatgggaaaggacttggtgttgaggtttcaagagatgagagagatgggtcgtttgattctgactcggtcgctgactcgattaggttggtgatgattgatgatgctggcgaggagataagggctaaggctaaagtgatgaaggatttgtttgggaacatggatgagaatattcgttatgttgacgaacttgttaggtttatgagaagtaaaggatcatcatcatcatcatgatcttgttgttgctatgattttgacttgtccattacggctgccgtgggagaactcaatctttttttcctccaagtctcgttttattaatatttcacaataccatcatagtccatagacacgcaaggcacggcaatatatccacaaaagacacgttggcttacacatacatgacgagtgttctaaaaaccagtataaacgttaggaactcagatgtgaccgtttagaccgattataattgtataaatttcatttttttgtattttccaatgtcgaacgaagttttattttcatatacatagttataaatattcgt

SEQ ID NO: 107000 - protein, 473 aa, Arabidopsis thaliana
  peptide (1)..(473): Ceres Seq. ID no. 13621064
  misc_feature (19)..(467): Pfam Name: UDP-glucoronosyl and UDP-glucosyl transferase Pfam Description: UDP-glucoronosyl and UDP-glucosyl transferase
  misc_feature (14)..(473): Homolog of NCBI NO: 15240534 NR Description: UDP-glycosyltransferase family [Arabidopsis
  misc_feature (22)..(466): Homolog of NCBI NO: 20149064 NR Description: putative anthocyanidine rhamnosyl-transferase
  misc_feature (22)..(466): Homolog of NCBI NO: 15238503 NR Description: UDP-glycosyltransferase family [Arabidopsis
  misc_feature (22)..(466): Homolog of NCBI NO: 26452040 NR Description: putative anthocyanidin-3-glucoside
  misc_feature (22)..(464): Homolog of NCBI NO: 15450577 NR Description: At2g22590/T9I22.3 [Arabidopsis thaliana]
  misc_feature (22)..(464): Homolog of NCBI NO: 18400022 NR Description: glycosyltransferase family [Arabidopsis thaliana]
  misc_feature (14)..(464): Homolog of NCBI NO: 21435782 NR Description: UDP-glucosyltransferase [Stevia rebaudiana]
  misc_feature (22)..(462): Homolog of NCBI NO: 34908562 NR Description: putative anthocyanidine rhamnosyl-transferase
  misc_feature (22)..(471): Homolog of NCBI NO: 34393985 NR Description: putative UDP-glucosyltransferase [Oryza sativa
  misc_feature (115)..(327): Homolog of NCBI NO: 34393978 NR Description: putative UDP-glucosyltransferase [Oryza sativa
CPCFIEDVQRITKMVDKREEVMHVAMFPWLAMGHLLPFLRLSKLLAQKGHKISFISTPRNIERLPKLQSNLASSITFVSFPLPPISGLPPSSESSMDVPYNKQQSLKAAFDLLQPPLKEFLRRSSPDWIIYDYASHWLPSIAAELGISKAFFSLFNAATLCFMGPSSSLIEEIRSTPEDFTVVPPWVPFKSNIVFRYHEVTRYVEKTEEDVTGVSDSVRFGYSIDESDAVFVRSCPEFEPEWFGLLKDLYRKPVFPIGFLPPVIEDDDAVDTTWVRIKKWLDKQRLNSVVYVSLGTEASLRHEEVTELALGLEKSETPFFWVLRNEPKIPDGFKTRVKGRGMVHVGWVPQVKILSHESVGGFLTHCGWNSVVEGLGFGKVPIFFPVLNEQGLNTRLLHGKGLGVEVSRDERDGSFDSDSVADSIRLVMIDDAGEEIRAKAKVMKDLFGNMDENIRYVDELVRFMRSKGSSSSS

SEQ ID NO: 107001 - protein, 460 aa, Arabidopsis thaliana
  peptide (1)..(460): Ceres Seq. ID no. 13621065
  misc_feature (6)..(454): Pfam Name: UDP-glucoronosyl and UDP-glucosyl transferase Pfam Description: UDP-glucoronosyl and UDP-glucosyl transferase
  misc_feature (1)..(460): Homolog of NCBI NO: 15240534 NR Description: UDP-glycosyltransferase family [Arabidopsis
  misc_feature (9)..(453): Homolog of NCBI NO: 20149064 NR Description: putative anthocyanidine rhamnosyl-transferase
  misc_feature (9)..(453): Homolog of NCBI NO: 15238503 NR Description: UDP-glycosyltransferase family [Arabidopsis
  misc_feature (9)..(453): Homolog of NCBI NO: 26452040 NR Description: putative anthocyanidin-3-glucoside
  misc_feature (9)..(451): Homolog of NCBI NO: 15450577 NR Description: At2g22590/T9I22.3 [Arabidopsis thaliana]
  misc_feature (9)..(451): Homolog of NCBI NO: 18400022 NR Description: glycosyltransferase family [Arabidopsis thaliana]
  misc_feature (1)..(451): Homolog of NCBI NO: 21435782 NR Description: UDP-glucosyltransferase [Stevia rebaudiana]
  misc_feature (9)..(449): Homolog of NCBI NO: 34908562 NR Description: putative anthocyanidine rhamnosyl-transferase
  misc_feature (9)..(458): Homolog of NCBI NO: 34393985 NR Description: putative UDP-glucosyltransferase [Oryza sativa
  misc_feature (102)..(314): Homolog of NCBI NO: 34393978 NR Description: putative UDP-glucosyltransferase [Oryza sativa
MVDKREEVMHVAMFPWLAMGHLLPFLRLSKLLAQKGHKISFISTPRNIERLPKLQSNLASSITFVSFPLPPISGLPPSSESSMDVPYNKQQSLKAAFDLLQPPLKEFLRRSSPDWIIYDYASHWLPSIAAELGISKAFFSLFNAATLCFMGPSSSLIEEIRSTPEDFTVVPPWVPFKSNIVFRYHEVTRYVEKTEEDVTGVSDSVRFGYSIDESDAVFVRSCPEFEPEWFGLLKDLYRKPVFPIGFLPPVIEDDDAVDTTWVRIKKWLDKQRLNSVVYVSLGTEASLRHEEVTELALGLEKSETPFFWVLRNEPKIPDGFKTRVKGRGMVHVGWVPQVKILSHESVGGFLTHCGWNSVVEGLGFGKVPIFFPVLNEQGLNTRLLHGKGLGVEVSRDERDGSFDSDSVADSIRLVMIDDAGEEIRAKAKVMKDLFGNMDENIRYVDELVRFMRSKGSSSSS

SEQ ID NO: 107002 - protein, 452 aa, Arabidopsis thaliana
  peptide (1)..(452): Ceres Seq. ID no. 13621066
  misc_feature (1)..(446): Pfam Name: UDP-glucoronosyl and UDP-glucosyl transferase Pfam Description: UDP-glucoronosyl and UDP-glucosyl transferase
  misc_feature (1)..(452): Homolog of NCBI NO: 15240534 NR Description: UDP-glycosyltransferase family [Arabidopsis
  misc_feature (1)..(445): Homolog of NCBI NO: 20149064 NR Description: putative anthocyanidine rhamnosyl-transferase
  misc_feature (1)..(445): Homolog of NCBI NO: 15238503 NR Description: UDP-glycosyltransferase family [Arabidopsis
  misc_feature (1)..(445): Homolog of NCBI NO: 26452040 NR Description: putative anthocyanidin-3-glucoside
  misc_feature (1)..(443): Homolog of NCBI NO: 15450577 NR Description: At2g22590/T9I22.3 [Arabidopsis thaliana]
  misc_feature (1)..(443): Homolog of NCBI NO: 18400022 NR Description: glycosyltransferase family [Arabidopsis thaliana]
  misc_feature (1)..(443): Homolog of NCBI NO: 21435782 NR Description: UDP-glucosyltransferase [Stevia rebaudiana]
  misc_feature (1)..(441): Homolog of NCBI NO: 34908562 NR Description: putative anthocyanidine rhamnosyl-transferase
  misc_feature (1)..(450): Homolog of NCBI NO: 34393985 NR Description: putative UDP-glucosyltransferase [Oryza sativa
  misc_feature (94)..(306): Homolog of NCBI NO: 34393978 NR Description: putative UDP-glucosyltransferase [Oryza sativa
MHVAMFPWLAMGHLLPFLRLSKLLAQKGHKISFISTPRNIERLPKLQSNLASSITFVSFPLPPISGLPPSSESSMDVPYNKQQSLKAAFDLLQPPLKEFLRRSSPDWIIYDYASHWLPSIAAELGISKAFFSLFNAATLCFMGPSSSLIEEIRSTPEDFTVVPPWVPFKSNIVFRYHEVTRYVEKTEEDVTGVSDSVRFGYSIDESDAVFVRSCPEFEPEWFGLLKDLYRKPVFPIGFLPPVIEDDDAVDTTWVRIKKWLDKQRLNSVVYVSLGTEASLRHEEVTELALGLEKSETPFFWVLRNEPKIPDGFKTRVKGRGMVHVGWVPQVKILSHESVGGFLTHCGWNSVVEGLGFGKVPIFFPVLNEQGLNTRLLHGKGLGVEVSRDERDGSFDSDSVADSIRLVMIDDAGEEIRAKAKVMKDLFGNMDENIRYVDELVRFMRSKGSSSSS

SEQ ID NO: 107003 - DNA, 662 bp, Arabidopsis thaliana
  misc_feature (1)..(662): Ceres Seq. ID no. 13621069
  misc_feature: MA Experiment ID: 20000182 Result: Down-regulated in Transcription
  misc_feature: MA Experiment 20000182 PARAMETER Experiment Name: At_2mM_SA_P Parameter: Age (day) Value: 14
  misc_feature: MA Experiment 20000182 PARAMETER Experiment Name: At_2mM_SA_P Parameter: Organism Value: A. thaliana
  misc_feature: MA Experiment 20000182 PARAMETER Experiment Name: At_2mM_SA_P Parameter: Plant Line Value: WS
  misc_feature: MA Experiment 20000182 PARAMETER Experiment Name: At_2mM_SA_P Parameter: Timepoint (hr) Value: 6
  misc_feature: MA Experiment 20000182 PARAMETER Experiment Name: At_2mM_SA_P Parameter: Tissue Value: Aerial
  misc_feature: MA Experiment 20000182 PARAMETER Experiment Name: At_2mM_SA_P Parameter: Treatment Value: 2mM SA vs. No Treatment
  misc_feature: MA Experiment ID: 20000185 Result: Down-regulated in Transcription
  misc_feature: MA Experiment 20000185 PARAMETER Experiment Name: At_Roots__P Parameter: Age (day) Value: 7 vs. 21
  misc_feature: MA Experiment 20000185 PARAMETER Experiment Name: At_Roots__P Parameter: Organism Value: A. thaliana
  misc_feature: MA Experiment 20000185 PARAMETER Experiment Name: At_Roots__P Parameter: Tissue Value: Roots vs. Whole Plant
  misc_feature: MA Experiment ID: 20000264 Result: Down-regulated in Transcription
  misc_feature: MA Experiment 20000264 PARAMETER Experiment Name: At_Open_Flower_P Parameter: Age (day) Value: 21
  misc_feature: MA Experiment 20000264 PARAMETER Experiment Name: At_Open_Flower_P Parameter: Plant Line Value: WS
  misc_feature: MA Experiment 20000264 PARAMETER Experiment Name: At_Open_Flower_P Parameter: Tissue Value: Open Flower vs. Whole Plant
  misc_feature: MA Experiment ID: 20000286 Result: Down-regulated in Transcription
  misc_feature: MA Experiment 20000286 PARAMETER Experiment Name: At_Open_Flower_P Parameter: Age (day) Value: 21
  misc_feature: MA Experiment 20000286 PARAMETER Experiment Name: At_Open_Flower_P Parameter: Plant Line Value: WS
  misc_feature: MA Experiment 20000286 PARAMETER Experiment Name: At_Open_Flower_P Parameter: Tissue Value: Half Open vs. Whole Plant
  misc_feature: MA Experiment ID: 20000437 Result: Down-regulated in Transcription
  misc_feature: MA Experiment 20000437 PARAMETER Experiment Name: At_Drought_P Parameter: Age (day) Value: 8
  misc_feature: MA Experiment 20000437 PARAMETER Experiment Name: At_Drought_P Parameter: Organism Value: A. thaliana
  misc_feature: MA Experiment 20000437 PARAMETER Experiment Name: At_Drought_P Parameter: Plant Line Value: WS
  misc_feature: MA Experiment 20000437 PARAMETER Experiment Name: At_Drought_P Parameter: Timepoint (hr) Value: 24
  misc_feature: MA Experiment 20000437 PARAMETER Experiment Name: At_Drought_P Parameter: Tissue Value: Whole Plant
  misc_feature: MA Experiment 20000437 PARAMETER Experiment Name: At_Drought_P Parameter: Treatment Value: Drought vs. No Drought
  misc_feature: MA Experiment ID: 20000439 Result: Down-regulated in Transcription
  misc_feature: MA Experiment 20000439 PARAMETER Experiment Name: At_Roots__P Parameter: Age (day) Value: 14 vs. 21
  misc_feature: MA Experiment 20000439 PARAMETER Experiment Name: At_Roots__P Parameter: Organism Value: A. thaliana
  misc_feature: MA Experiment 20000439 PARAMETER Experiment Name: At_Roots__P Parameter: Tissue Value: Roots vs. Whole Plant
  misc_feature: MA Experiment ID: 20000495 Result: Down-regulated in Transcription
  misc_feature: MA Experiment 20000495 PARAMETER Experiment Name: At_Guard_Cells_P Parameter: Harvest Date Value: 8/2/2002
  misc_feature: MA Experiment 20000495 PARAMETER Experiment Name: At_Guard_Cells_P Parameter: Organism Value: A. thaliana
  misc_feature: MA Experiment 20000495 PARAMETER Experiment Name: At_Guard_Cells_P Parameter: Tissue Value: Guard Cells vs. Leaves
  misc_feature: MA Experiment ID: 20000496 Result: Down-regulated in Transcription
  misc_feature: MA Experiment 20000496 PARAMETER Experiment Name: At_Guard_Cells_P Parameter: Harvest Date Value: 7/19/2002
  misc_feature: MA Experiment 20000496 PARAMETER Experiment Name: At_Guard_Cells_P Parameter: Organism Value: Canola
  misc_feature: MA Experiment 20000496 PARAMETER Experiment Name: At_Guard_Cells_P Parameter: Tissue Value: Guard Cells vs. Leaves
  misc_feature: MA Experiment ID: 20000794 Result: Down-regulated in Transcription
  misc_feature: MA Experiment 20000794 PARAMETER Experiment Name: At_Petals_P Parameter: Age (day) Value: 23-25 days
  misc_feature: MA Experiment 20000794 PARAMETER Experiment Name: At_Petals_P Parameter: Plant Line Value: WS
  misc_feature: MA Experiment 20000794 PARAMETER Experiment Name: At_Petals_P Parameter: Tissue Value: Petals vs. Whole plant
  misc_feature: MA Experiment ID: 20001451 Result: Down-regulated in Transcription
  misc_feature: MA Experiment 20001451 PARAMETER Experiment Name: At_Far-red-induction_P Parameter: Age (day) Value: 7
  misc_feature: MA Experiment 20001451 PARAMETER Experiment Name: At_Far-red-induction_P Parameter: Light Value: Far-red vs. White
  misc_feature: MA Experiment 20001451 PARAMETER Experiment Name: At_Far-red-induction_P Parameter: Organism Value: A. thaliana
  misc_feature: MA Experiment 20001451 PARAMETER Experiment Name: At_Far-red-induction_P Parameter: Plant Line Value: Columbia
  misc_feature: MA Experiment 20001451 PARAMETER Experiment Name: At_Far-red-induction_P Parameter: Timepoint (hr) Value: 24
  misc_feature: MA Experiment 20001451 PARAMETER Experiment Name: At_Far-red-induction_P Parameter: Tissue Value: Whole Plant
  misc_feature: MA Experiment ID: 20001557 Result: Down-regulated in Transcription
  misc_feature: MA Experiment 20001557 PARAMETER Experiment Name: At_Drought_Soil_Dry_P Parameter: Age (day) Value: 27
  misc_feature: MA Experiment 20001557 PARAMETER Experiment Name: At_Drought_Soil_Dry_P Parameter: Organism Value: A. thaliana
  misc_feature: MA Experiment 20001557 PARAMETER Experiment Name: At_Drought_Soil_Dry_P Parameter: Plant Line Value: WS
  misc_feature: MA Experiment 20001557 PARAMETER Experiment Name: At_Drought_Soil_Dry_P Parameter: Post Timepoint (hr) Value: 3
  misc_feature: MA Experiment 20001557 PARAMETER Experiment Name: At_Drought_Soil_Dry_P Parameter: Post-Treatment Value: Re-Water vs. No Drought
  misc_feature: MA Experiment 20001557 PARAMETER Experiment Name: At_Drought_Soil_Dry_P Parameter: Timepoint (day) Value: 13
  misc_feature: MA Experiment 20001557 PARAMETER Experiment Name: At_Drought_Soil_Dry_P Parameter: Treatment Value: Drought vs. No Drought
  misc_feature: MA Experiment ID: 20001757 Result: Up-regulated in Transcription
  misc_feature: MA Experiment 20001757 PARAMETER Experiment Name: At_50mM_NH4NO3_L-to-H_P Parameter: Timepoint (hr) Value: 6
  misc_feature: MA Experiment 20001757 PARAMETER Experiment Name: At_50mM_NH4NO3_L-to-H_P Parameter: Tissue Value: Leaf
  misc_feature: MA Experiment 20001757 PARAMETER Experiment Name: At_50mM_NH4NO3_L-to-H_P Parameter: Treatment Value: 50mM NH4NO3 vs 100mM Mannitol
  misc_feature: MA Experiment ID: 20001905 Result: Down-regulated in Transcription
  misc_feature: MA Experiment 20001905 PARAMETER Experiment Name: At_Drought_Reproduction_P Parameter: Age (day) Value: 40
  misc_feature: MA Experiment 20001905 PARAMETER Experiment Name: At_Drought_Reproduction_P Parameter: Organism Value: A. thaliana
  misc_feature: MA Experiment 20001905 PARAMETER Experiment Name: At_Drought_Reproduction_P Parameter: Plant Line Value: WS
  misc_feature: MA Experiment 20001905 PARAMETER Experiment Name: At_Drought_Reproduction_P Parameter: Timepoint (day) Value: 10
  misc_feature: MA Experiment 20001905 PARAMETER Experiment Name: At_Drought_Reproduction_P Parameter: Tissue Value: Rosettes
  misc_feature: MA Experiment 20001905 PARAMETER Experiment Name: At_Drought_Reproduction_P Parameter: Treatment Value: Drought vs. No Drought
  misc_feature: MA Experiment ID: 20001906 Result: Down-regulated in Transcription
  misc_feature: MA Experiment 20001906 PARAMETER Experiment Name: At_Drought_Reproduction_P Parameter: Age (day) Value: 35
  misc_feature: MA Experiment 20001906 PARAMETER Experiment Name: At_Drought_Reproduction_P Parameter: Organism Value: A. thaliana
  misc_feature: MA Experiment 20001906 PARAMETER Experiment Name: At_Drought_Reproduction_P Parameter: Plant Line Value: WS
  misc_feature: MA Experiment 20001906 PARAMETER Experiment Name: At_Drought_Reproduction_P Parameter: Timepoint (day) Value: 5
  misc_feature: MA Experiment 20001906 PARAMETER Experiment Name: At_Drought_Reproduction_P Parameter: Tissue Value: Siliques
  misc_feature: MA Experiment 20001906 PARAMETER Experiment Name: At_Drought_Reproduction_P Parameter: Treatment Value: Drought vs. No Drought
atggtaattctcagcaacgtctcgttgttctcctgctgcaacatctctcagaaaccatctctcttttctccgtcttctcgtagttctcattgtcccattcgttgctcacagtcacaggaagggaaagaagtggttaccagtcctttgagaagtgtggtttggtcattaggagaagaggtttcaaagagaagtctatttgcacttgtctctgcttctctcttctttgttgatcctgctcttgcttttaagggtggaggtccctatggtcaaggagtcaccaggggacaggacttatctggcaaagatttcagtggccagactcttatcaggcaggacttcaaaacgtccatcctaaggcaagccaacttcaagggtgcaaagttgttaggtgctagcttctttgatgcagatctaacaggtgctgatttatcggaagctgatctccgaggtgcagatttctccttggcaaatgtaacaaaggtgaatctaacgaacgctaacttagaaggagcgactgttactggaaacacatcattcaagggatcaaacattacaggcgcaggtgaaaaaagaaaagaaaactttcataataacaataagcacatctctttattacctctgagcttcacataaagtttgatacgtttgtgtgtataaatttg

SEQ ID NO: 107004 - protein, 210 aa, Arabidopsis thaliana
  peptide (1)..(210): Ceres Seq. ID no. 13621070
  misc_feature (116)..(155): Pfam Name: Pentapeptide repeats (8 copies) Pfam Description: Pentapeptide repeats (8 copies)
  misc_feature (1)..(210): Homolog of NCBI NO: 18406663 NR Description: thylakoid lumen pentapeptide repeat family [Arabidopsis thaliana] >gi|20196924|gb|AAC31832.2| pentapeptide family protein [Arabidopsis thaliana] >gi|24030254|gb|AAN41302.1|
  misc_feature (1)..(187): Homolog of NCBI NO: 18406661 NR Description: thylakoid lumen pentapeptide repeat family [Arabidopsis thaliana] >gi|20141847|sp|O22160|TL15_ARATH lumenal 15 kDa protein, chloroplast precursor (p15)
  misc_feature (1)..(176): Homolog of NCBI NO: 7486947 NR Description: hypothetical protein At2g44920 [imported] -
  misc_feature (47)..(187): Homolog of NCBI NO: 34895746 NR Description: P0024G09.19 [Oryza sativa (japonica
  misc_feature (94)..(187): Homolog of NCBI NO: 16331083 NR Description: unknown protein [Synechocystis sp. PCC 6803]
  misc_feature (69)..(187): Homolog of NCBI NO: 23128511 NR Description: hypothetical protein [Nostoc punctiforme]
  misc_feature (65)..(187): Homolog of NCBI NO: 33865584 NR Description: conserved hypothetical protein [Synechococcus sp.
  misc_feature (94)..(184): Homolog of NCBI NO: 37523071 NR Description: hypothetical protein glr3502 [Gloeobacter
  misc_feature (94)..(199): Homolog of NCBI NO: 23043019 NR Description: hypothetical protein [Trichodesmium erythraeum
  misc_feature (96)..(187): Homolog of NCBI NO: 23039927 NR Description: hypothetical protein [Trichodesmium erythraeum
MVILSNVSLFSCCNISQKPSLFSPSSRSSHCPIRCSQSQEGKEVVTSPLRSVVWSLGEEVSKRSLFALVSASLFFVDPALAFKGGGPYGQGVTRGQDLSGKDFSGQTLIRQDFKTSILRQANFKGAKLLGASFFDADLTGADLSEADLRGADFSLANVTKVNLTNANLEGATVTGNTSFKGSNITGAGEKRKENFHNNNKHISLLPLSFT

SEQ ID NO: 107005 - DNA, 956 bp, Arabidopsis thaliana
  misc_feature (1)..(956): Ceres Seq. ID no. 13621071
  misc_feature: MA Experiment ID: 20000184 Result: Up-regulated in Transcription
  misc_feature: MA Experiment 20000184 PARAMETER Experiment Name: At_Shoots__P Parameter: Age (day) Value: 7
  misc_feature: MA Experiment 20000184 PARAMETER Experiment Name: At_Shoots__P Parameter: Tissue Value: Shoots vs. Whole Plant
  misc_feature: MA Experiment ID: 20000234 Result: Up-regulated in Transcription
  misc_feature: MA Experiment 20000234 PARAMETER Experiment Name: At_Siliques_P Parameter: Age (day) Value: 21
  misc_feature: MA Experiment 20000234 PARAMETER Experiment Name: At_Siliques_P Parameter: Organism Value: A. thaliana
  misc_feature: MA Experiment 20000234 PARAMETER Experiment Name: At_Siliques_P Parameter: Plant Line Value: WS
  misc_feature: MA Experiment 20000234 PARAMETER Experiment Name: At_Siliques_P Parameter: Tissue Value: Less Than 5mm Siliques vs. Whole Plant
  misc_feature: MA Experiment ID: 20000235 Result: Up-regulated in Transcription
  misc_feature: MA Experiment 20000235 PARAMETER Experiment Name: At_Siliques_P Parameter: Age (day) Value: 21
  misc_feature: MA Experiment 20000235 PARAMETER Experiment Name: At_Siliques_P Parameter: Organism Value: A. thaliana
  misc_feature: MA Experiment 20000235 PARAMETER Experiment Name: At_Siliques_P Parameter: Plant Line Value: WS
  misc_feature: MA Experiment 20000235 PARAMETER Experiment Name: At_Siliques_P Parameter: Tissue Value: 5-10mm Siliques vs. Whole Plant
  misc_feature: MA Experiment ID: 20001451 Result: Up-regulated in Transcription
  misc_feature: MA Experiment 20001451 PARAMETER Experiment Name: At_Far-red-induction_P Parameter: Age (day) Value: 7
  misc_feature: MA Experiment 20001451 PARAMETER Experiment Name: At_Far-red-induction_P Parameter: Light Value: Far-red vs. White
  misc_feature: MA Experiment 20001451 PARAMETER Experiment Name: At_Far-red-induction_P Parameter: Organism Value: A. thaliana
  misc_feature: MA Experiment 20001451 PARAMETER Experiment Name: At_Far-red-induction_P Parameter: Plant Line Value: Columbia
  misc_feature: MA Experiment 20001451 PARAMETER Experiment Name: At_Far-red-induction_P Parameter: Timepoint (hr) Value: 24
  misc_feature: MA Experiment 20001451 PARAMETER Experiment Name: At_Far-red-induction_P Parameter: Tissue Value: Whole Plant
  misc_feature: MA Experiment ID: 20001910 Result: Up-regulated in Transcription
  misc_feature: MA Experiment 20001910 PARAMETER Experiment Name: At_Drought_Reproduction_P Parameter: Age (day) Value: 37
  misc_feature: MA Experiment 20001910 PARAMETER Experiment Name: At_Drought_Reproduction_P Parameter: Organism Value: A. thaliana
  misc_feature: MA Experiment 20001910 PARAMETER Experiment Name: At_Drought_Reproduction_P Parameter: Plant Line Value: WS
  misc_feature: MA Experiment 20001910 PARAMETER Experiment Name: At_Drought_Reproduction_P Parameter: Timepoint (day) Value: 7
  misc_feature: MA Experiment 20001910 PARAMETER Experiment Name: At_Drought_Reproduction_P Parameter: Tissue Value: Flowers
  misc_feature: MA Experiment 20001910 PARAMETER Experiment Name: At_Drought_Reproduction_P Parameter: Treatment Value: Drought vs. No Drought
aaattcacaaatacctttaaaagagtatagaaagcttggtttatacaaaacaaagtatatagctagatatatcaatggcatcatcacaaagatatttcgctctcctagctcttttcgcagtctcactaaaattttgttattgccaaaatgagactatagatgtagctggatcgggaaccgccggagttacttggtacggtgaaccattcggcgccggtagcaccggaggagcttgtgggtacggttccgcggtggctaatccaccactatacgcgatggtttcagccggaggtccttcgctgttcaacaatggaaaaggatgtggaacatgttatcaggttgtatgcatcggacatccagcgtgctcggggtcaccaataacggtgacgataaccgacgagtgccctggtggtccttgcgcctctgaaccagtccacattgatcttagcggcaaagccatgggtgccttagccaaacctggccaagccgatcaacttcgatccgctggtgttatacgtgtcaactacaaacgtgcggcatgtttatatcgaggaactaacatagtttttcgtatggacgctggagcaaatccgtactacatttcatttgttgttgagtatgaaaacggcgatggagatttgtccaatgttgaaattcaaccagccggcggaagtttcatctccatgcaagaaatgagatccgccgtatggaaggtcaactcaggcagtgccctaagaggaccattcaacattagacttacttctggtgaatctcataaagtaatcgtcgcttataatgttattccggcgaattggaaacctgacgaatcttaccgttcaattgttaacttttaggattttgtcatattgtatttcgacacatttcattgtgttctctagtcaaactttgaaagcttctgatatagtaatgaataataaaaatatatatgatttacc

SEQ ID NO: 107006 - protein, 259 aa, Arabidopsis thaliana
  peptide (1)..(259): Ceres Seq. ID no. 13621072
  misc_feature (163)..(244): Pfam Name: Pollen allergen Pfam Description: Pollen allergen
  misc_feature (1)..(259): Homolog of NCBI NO: 15225412 NR Description: beta-expansin, putative (EXPB4) [Arabidopsis
  misc_feature (1)..(259): Homolog of NCBI NO: 28393322 NR Description: putative beta-expansin [Arabidopsis thaliana]
  misc_feature (51)..(259): Homolog of NCBI NO: 30697231 NR Description: beta-expansin, putative (EXBP2) [Arabidopsis
  misc_feature (51)..(165): Homolog of NCBI NO: 25404942 NR Description: protein F1E22.6 [imported] - Arabidopsis thaliana
  misc_feature (156)..(259): Homolog of NCBI NO: 25404942 NR Description: protein F1E22.6 [imported] - Arabidopsis thaliana
  misc_feature (10)..(259): Homolog of NCBI NO: 22095681 NR Description: Putative beta-expansin 5 precursor (At-EXPB5)
  misc_feature (37)..(259): Homolog of NCBI NO: 21666630 NR Description: beta-expansin [Oryza sativa]
  misc_feature (22)..(259): Homolog of NCBI NO: 16517013 NR Description: beta-expansin [Oryza sativa]
  misc_feature (32)..(259): Homolog of NCBI NO: 8118428 NR Description: beta-expansin [Oryza sativa]
  misc_feature (32)..(259): Homolog of NCBI NO: 16303229 NR Description: beta-expansin 5 [Oryza sativa]
MASSQRYFALLALFAVSLKFCYCQNETIDVAGSGTAGVTWYGEPFGAGSTGGACGYGSAVANPPLYAMVSAGGPSLFNNGKGCGTCYQVVCIGHPACSGSPITVTITDECPGGPCASEPVHIDLSGKAMGALAKPGQADQLRSAGVIRVNYKRAACLYRGTNIVFRMDAGANPYYISFVVEYENGDGDLSNVEIQPAGGSFISMQEMRSAVWKVNSGSALRGPFNIRLTSGESHKVIVAYNVIPANWKPDESYRSIVNF

SEQ ID NO: 107007 - protein, 192 aa, Arabidopsis thaliana
  peptide (1)..(192): Ceres Seq. ID no. 13621073
  misc_feature (96)..(177): Pfam Name: Pollen allergen Pfam Description: Pollen allergen
  misc_feature (1)..(192): Homolog of NCBI NO: 15225412 NR Description: beta-expansin, putative (EXPB4) [Arabidopsis
  misc_feature (1)..(192): Homolog of NCBI NO: 28393322 NR Description: putative beta-expansin [Arabidopsis thaliana]
  misc_feature (1)..(192): Homolog of NCBI NO: 30697231 NR Description: beta-expansin, putative (EXBP2) [Arabidopsis
  misc_feature (1)..(98): Homolog of NCBI NO: 25404942 NR Description: protein F1E22.6 [imported] - Arabidopsis thaliana
  misc_feature (89)..(192): Homolog of NCBI NO: 25404942 NR Description: protein F1E22.6 [imported] - Arabidopsis thaliana
  misc_feature (1)..(192): Homolog of NCBI NO: 22095681 NR Description: Putative beta-expansin 5 precursor (At-EXPB5)
  misc_feature (1)..(192): Homolog of NCBI NO: 21666630 NR Description: beta-expansin [Oryza sativa]
  misc_feature (1)..(192): Homolog of NCBI NO: 16517013 NR Description: beta-expansin [Oryza sativa]
  misc_feature (1)..(192): Homolog of NCBI NO: 8118428 NR Description: beta-expansin [Oryza sativa]
  misc_feature (1)..(192): Homolog of NCBI NO: 16303229 NR Description: beta-expansin 5 [Oryza sativa]
MVSAGGPSLFNNGKGCGTCYQVVCIGHPACSGSPITVTITDECPGGPCASEPVHIDLSGKAMGALAKPGQADQLRSAGVIRVNYKRAACLYRGTNIVFRMDAGANPYYISFVVEYENGDGDLSNVEIQPAGGSFISMQEMRSAVWKVNSGSALRGPFNIRLTSGESHKVIVAYNVIPANWKPDESYRSIVNF

SEQ ID NO: 107008 - protein, 131 aa, Arabidopsis thaliana
  peptide (1)..(131): Ceres Seq. ID no. 13621074
  misc_feature (35)..(116): Pfam Name: Pollen allergen Pfam Description: Pollen allergen
  misc_feature (1)..(131): Homolog of NCBI NO: 15225412 NR Description: beta-expansin, putative (EXPB4) [Arabidopsis
  misc_feature (1)..(131): Homolog of NCBI NO: 28393322 NR Description: putative beta-expansin [Arabidopsis thaliana]
  misc_feature (1)..(131): Homolog of NCBI NO: 30697231 NR Description: beta-expansin, putative (EXBP2) [Arabidopsis
  misc_feature (1)..(37): Homolog of NCBI NO: 25404942 NR Description: protein F1E22.6 [imported] - Arabidopsis thaliana
  misc_feature (28)..(131): Homolog of NCBI NO: 25404942 NR Description: protein F1E22.6 [imported] - Arabidopsis thaliana
  misc_feature (1)..(131): Homolog of NCBI NO: 22095681 NR Description: Putative beta-expansin 5 precursor (At-EXPB5)
  misc_feature (1)..(131): Homolog of NCBI NO: 21666630 NR Description: beta-expansin [Oryza sativa]
  misc_feature (1)..(131): Homolog of NCBI NO: 16517013 NR Description: beta-expansin [Oryza sativa]
  misc_feature (1)..(131): Homolog of NCBI NO: 8118428 NR Description: beta-expansin [Oryza sativa]
  misc_feature (1)..(131): Homolog of NCBI NO: 16303229 NR Description: beta-expansin 5 [Oryza sativa]
MGALAKPGQADQLRSAGVIRVNYKRAACLYRGTNIVFRMDAGANPYYISFVVEYENGDGDLSNVEIQPAGGSFISMQEMRSAVWKVNSGSALRGPFNIRLTSGESHKVIVAYNVIPANWKPDESYRSIVNF

SEQ ID NO: 107009 - DNA, 1585 bp, Arabidopsis thaliana
  misc_feature (1)..(1585): Ceres Seq. ID no. 13621095
  misc_feature: MA Experiment ID: 20000171 Result: Down-regulated in Transcription
  misc_feature: MA Experiment 20000171 PARAMETER Experiment Name: At_42deg_Heat_P Parameter: Age (day) Value: 14
  misc_feature: MA Experiment 20000171 PARAMETER Experiment Name: At_42deg_Heat_P Parameter: Organism Value: A. thaliana
  misc_feature: MA Experiment 20000171 PARAMETER Experiment Name: At_42deg_Heat_P Parameter: Plant Line Value: WS
  misc_feature: MA Experiment 20000171 PARAMETER Experiment Name: At_42deg_Heat_P Parameter: Temperature (deg C) Value: 42 vs. 22
  misc_feature: MA Experiment 20000171 PARAMETER Experiment Name: At_42deg_Heat_P Parameter: Timepoint (hr) Value: 1
  misc_feature: MA Experiment 20000171 PARAMETER Experiment Name: At_42deg_Heat_P Parameter: Tissue Value: Aerial
  misc_feature: MA Experiment ID: 20000173 Result: Down-regulated in Transcription
  misc_feature: MA Experiment 20000173 PARAMETER Experiment Name: At_42deg_Heat_P Parameter: Age (day) Value: 14
  misc_feature: MA Experiment 20000173 PARAMETER Experiment Name: At_42deg_Heat_P Parameter: Organism Value: A. thaliana
  misc_feature: MA Experiment 20000173 PARAMETER Experiment Name: At_42deg_Heat_P Parameter: Plant Line Value: WS
  misc_feature: MA Experiment 20000173 PARAMETER Experiment Name: At_42deg_Heat_P Parameter: Temperature (deg C) Value: 42 vs. 22
  misc_feature: MA Experiment 20000173 PARAMETER Experiment Name: At_42deg_Heat_P Parameter: Timepoint (hr) Value: 6
  misc_feature: MA Experiment 20000173 PARAMETER Experiment Name: At_42deg_Heat_P Parameter: Tissue Value: Aerial
  misc_feature: MA Experiment ID: 20000180 Result: Up-regulated in Transcription
  misc_feature: MA Experiment 20000180 PARAMETER Experiment Name: At_Germinating_Seeds_P Parameter: Age (hr) Value: 24 vs. 0
  misc_feature: MA Experiment 20000180 PARAMETER Experiment Name: At_Germinating_Seeds_P Parameter: Tissue Value: Germinating Seeds
  misc_feature: MA Experiment ID: 20000182 Result: Up-regulated in Transcription
  misc_feature: MA Experiment 20000182 PARAMETER Experiment Name: At_2mM_SA_P Parameter: Age (day) Value: 14
  misc_feature: MA Experiment 20000182 PARAMETER Experiment Name: At_2mM_SA_P Parameter: Organism Value: A. thaliana
  misc_feature: MA Experiment 20000182 PARAMETER Experiment Name: At_2mM_SA_P Parameter: Plant Line Value: WS
  misc_feature: MA Experiment 20000182 PARAMETER Experiment Name: At_2mM_SA_P Parameter: Timepoint (hr) Value: 6
  misc_feature: MA Experiment 20000182 PARAMETER Experiment Name: At_2mM_SA_P Parameter: Tissue Value: Aerial
  misc_feature: MA Experiment 20000182 PARAMETER Experiment Name: At_2mM_SA_P Parameter: Treatment Value: 2mM SA vs. No Treatment
  misc_feature: MA Experiment ID: 20000184 Result: Down-regulated in Transcription
  misc_feature: MA Experiment 20000184 PARAMETER Experiment Name: At_Shoots__P Parameter: Age (day) Value: 7
  misc_feature: MA Experiment 20000184 PARAMETER Experiment Name: At_Shoots__P Parameter: Tissue Value: Shoots vs. Whole Plant
  misc_feature: MA Experiment ID: 20000234 Result: Down-regulated in Transcription
  misc_feature: MA Experiment 20000234 PARAMETER Experiment Name: At_Siliques_P Parameter: Age (day) Value: 21
  misc_feature: MA Experiment 20000234 PARAMETER Experiment Name: At_Siliques_P Parameter: Organism Value: A. thaliana
  misc_feature: MA Experiment 20000234 PARAMETER Experiment Name: At_Siliques_P Parameter: Plant Line Value: WS
  misc_feature: MA Experiment 20000234 PARAMETER Experiment Name: At_Siliques_P Parameter: Tissue Value: Less Than 5mm Siliques vs. Whole Plant
  misc_feature: MA Experiment ID: 20000235 Result: Down-regulated in Transcription
  misc_feature: MA Experiment 20000235 PARAMETER Experiment Name: At_Siliques_P Parameter: Age (day) Value: 21
  misc_feature: MA Experiment 20000235 PARAMETER Experiment Name: At_Siliques_P Parameter: Organism Value: A. thaliana
  misc_feature: MA Experiment 20000235 PARAMETER Experiment Name: At_Siliques_P Parameter: Plant Line Value: WS
  misc_feature: MA Experiment 20000235 PARAMETER Experiment Name: At_Siliques_P Parameter: Tissue Value: 5-10mm Siliques vs. Whole Plant
  misc_feature: MA Experiment ID: 20000264 Result: Down-regulated in Transcription
  misc_feature: MA Experiment 20000264 PARAMETER Experiment Name: At_Open_Flower_P Parameter: Age (day) Value: 21
  misc_feature: MA Experiment 20000264 PARAMETER Experiment Name: At_Open_Flower_P Parameter: Plant Line Value: WS
  misc_feature: MA Experiment 20000264 PARAMETER Experiment Name: At_Open_Flower_P Parameter: Tissue Value: Open Flower vs. Whole Plant
  misc_feature: MA Experiment ID: 20000265 Result: Down-regulated in Transcription
  misc_feature: MA Experiment 20000265 PARAMETER Experiment Name: At_Open_Flower_P Parameter: Age (day) Value: 21
  misc_feature: MA Experiment 20000265 PARAMETER Experiment Name: At_Open_Flower_P Parameter: Plant Line Value: WS
  misc_feature: MA Experiment 20000265 PARAMETER Experiment Name: At_Open_Flower_P Parameter: Tissue Value: Closed Flower vs. Whole Plant
  misc_feature: MA Experiment ID: 20000438 Result: Down-regulated in Transcription
  misc_feature: MA Experiment 20000438 PARAMETER Experiment Name: At_Shoots__P Parameter: Age (day) Value: 14
  misc_feature: MA Experiment 20000438 PARAMETER Experiment Name: At_Shoots__P Parameter: Tissue Value: Shoots vs. Whole Plant
gagctcttggatcctgttattcaaaactggattgatttacatggtcaagttatggcgtaggaagatcatcgactggtttcatgtttaccaattctacaaagtcccagaattcaacgacaacgttcaagagaatcatctctaccaaaaagtctacatgtatctaaattccttaagctcgatcgagaattctgatttcacgaacctcttcaccgggaaaaagtccaacgaaatcatcctccggttagatcggaaccaagtcgttggcgacgagtttctcggcgctagagtttgttggattaacggagaagacgaagatggagcgaggaatttcgttttgaagattcgtaaagctgacaaacggagaattctcggttcttatctccagcatatacatacagtatctgatgagcttgaacagaggaacacagagcttaagcttttcatcaacgtcggaatcgatgatcatctgaataagaagaagaagaagaacggacggtggagatcgattccgtttgatcatccttgtaccttcgacaacatcgccatggaaacggatctgaagaacaaagtcaaatctgatctcgaatctttcctcaaaggtaaacagtattataatcgtctgggccgtgtttggaaacggagttatctcttatacggaccttccggtaccggaaaatcaagcttcgtcgcagcaatggcgaatttcttagattacgatgtttacgatatagatctctccaaagtagttgatgattcagatcttaagatgcttctgttacaaaccagaggcaaatcagtgatcgtgatcgaagatctagatcgacacctctcgacgaaatcaacggctgtgaatttatctgggattttgaatttcactgatagtattctcagctcttgcaccgccgatgaacggatcatggtgtttacgatgactgggaaagaacaaattgacccggctatgcttcgaccgggtcgggtcgacgtacacattcattttcccttatgtgatttcacggcgtttaaaacgctcgctaataactacttaggtgttaaagagcacaagcttttctctcaagttgaaggaatatttcaaaacggtgcgtctttgagtcccgccgagatcggagagttgatgatcgcgaatcgtaactcgccgactcgtgcattgaagcatgtcatcaatgctttgcagactgatggtgatcggagaggaactggacgacgtttgcttttagaaaatggttcgagaaagtcgacgtcggaggatgtttctgatgatatgagtggttcgctttgcggcggtggcggaggaagttcgccggcggtgaaggagtttaggaagttgtatgggttgttgagaattaaaagtagtagaaaatctggatcgttcgatgtggctcgagagatgagggacggctagtgattaaaaagtttttaaaagtcagcagccacgtgggttggttttattggttgagagagagtctggacaaaaagcgtagactagagaaagttgttactctgtttttattgtttttgggttttagttgatgtacagaagtttataagattttgcttttgagtcccc

SEQ ID NO: 107010 - protein, 472 aa, Arabidopsis thaliana
  peptide (1)..(472): Ceres Seq. ID no. 13621096
  misc_feature (214)..(390): Pfam Name: ATPase family associated with various cellular Pfam Description: ATPase family associated with various cellular
  misc_feature (4)..(472): Homolog of NCBI NO: 30690453 NR Description: AAA-type ATPase family [Arabidopsis thaliana]
  misc_feature (14)..(472): Homolog of NCBI NO: 25354579 NR Description: hypothetical protein At2g46620 [imported] - thaliana >gi|4415942|gb|AAD20172.1| hypothetical protein thaliana] >gi|18700084|gb|AAL77654.1| At2g46620/F13A10.15
  misc_feature (4)..(397): Homolog of NCBI NO: 37536122 NR Description: hypothetical protein [Oryza sativa (japonica group)] >gi|10122056|gb|AAG13445.1| hypothetical protein [Oryza
  misc_feature (360)..(461): Homolog of NCBI NO: 37536122 NR Description: hypothetical protein [Oryza sativa (japonica group)] >gi|10122056|gb|AAG13445.1| hypothetical protein [Oryza
  misc_feature (5)..(397): Homolog of NCBI NO: 34902172 NR Description: Hypothetical protein [Oryza sativa (japonica group)] >gi|27476092|gb|AAO17023.1| Hypothetical protein [Oryza
  misc_feature (15)..(288): Homolog of NCBI NO: 15242143 NR Description: hypothetical protein [Arabidopsis thaliana]
  misc_feature (283)..(426): Homolog of NCBI NO: 15242143 NR Description: hypothetical protein [Arabidopsis thaliana]
  misc_feature (28)..(273): Homolog of NCBI NO: 15242536 NR Description: AAA-type ATPase family [Arabidopsis thaliana]
  misc_feature (279)..(423): Homolog of NCBI NO: 15242536 NR Description: AAA-type ATPase family [Arabidopsis thaliana]
  misc_feature (26)..(277): Homolog of NCBI NO: 15233037 NR Description: AAA-type ATPase family [Arabidopsis thaliana]
SSWILLFKTGLIYMVKLWRRKIIDWFHVYQFYKVPEFNDNVQENHLYQKVYMYLNSLSSIENSDFTNLFTGKKSNEIILRLDRNQVVGDEFLGARVCWINGEDEDGARNFVLKIRKADKRRILGSYLQHIHTVSDELEQRNTELKLFINVGIDDHLNKKKKKNGRWRSIPFDHPCTFDNIAMETDLKNKVKSDLESFLKGKQYYNRLGRVWKRSYLLYGPSGTGKSSFVAAMANFLDYDVYDIDLSKVVDDSDLKMLLLQTRGKSVIVIEDLDRHLSTKSTAVNLSGILNFTDSILSSCTADERIMVFTMTGKEQIDPAMLRPGRVDVHIHFPLCDFTAFKTLANNYLGVKEHKLFSQVEGIFQNGASLSPAEIGELMIANRNSPTRALKHVINALQTDGDRRGTGRRLLLENGSRKSTSEDVSDDMSGSLCGGGGGSSPAVKEFRKLYGLLRIKSSRKSGSFDVAREMRDG

SEQ ID NO: 107011 - protein, 459 aa, Arabidopsis thaliana
  peptide (1)..(459): Ceres Seq. ID no. 13621097
  misc_feature (201)..(377): Pfam Name: ATPase family associated with various cellular Pfam Description: ATPase family associated with various cellular
  misc_feature (1)..(459): Homolog of NCBI NO: 30690453 NR Description: AAA-type ATPase family [Arabidopsis thaliana]
  misc_feature (1)..(459): Homolog of NCBI NO: 25354579 NR Description: hypothetical protein At2g46620 [imported] - thaliana >gi|4415942|gb|AAD20172.1| hypothetical protein thaliana] >gi|18700084|gb|AAL77654.1| At2g46620/F13A10.15
  misc_feature (1)..(384): Homolog of NCBI NO: 37536122 NR Description: hypothetical protein [Oryza sativa (japonica group)] >gi|10122056|gb|AAG13445.1| hypothetical protein [Oryza
  misc_feature (347)..(448): Homolog of NCBI NO: 37536122 NR Description: hypothetical protein [Oryza sativa (japonica group)] >gi|10122056|gb|AAG13445.1| hypothetical protein [Oryza
  misc_feature (1)..(384): Homolog of NCBI NO: 34902172 NR Description: Hypothetical protein [Oryza sativa (japonica group)] >gi|27476092|gb|AAO17023.1| Hypothetical protein [Oryza
  misc_feature (2)..(275): Homolog of NCBI NO: 15242143 NR Description: hypothetical protein [Arabidopsis thaliana]
  misc_feature (270)..(413): Homolog of NCBI NO: 15242143 NR Description: hypothetical protein [Arabidopsis thaliana]
  misc_feature (15)..(260): Homolog of NCBI NO: 15242536 NR Description: AAA-type ATPase family [Arabidopsis thaliana]
  misc_feature (266)..(410): Homolog of NCBI NO: 15242536 NR Description: AAA-type ATPase family [Arabidopsis thaliana]
  misc_feature (13)..(264): Homolog of NCBI NO: 15233037 NR Description: AAA-type ATPase family [Arabidopsis thaliana]
MVKLWRRKIIDWFHVYQFYKVPEFNDNVQENHLYQKVYMYLNSLSSIENSDFTNLFTGKKSNEIILRLDRNQVVGDEFLGARVCWINGEDEDGARNFVLKIRKADKRRILGSYLQHIHTVSDELEQRNTELKLFINVGIDDHLNKKKKKNGRWRSIPFDHPCTFDNIAMETDLKNKVKSDLESFLKGKQYYNRLGRVWKRSYLLYGPSGTGKSSFVAAMANFLDYDVYDIDLSKVVDDSDLKMLLLQTRGKSVIVIEDLDRHLSTKSTAVNLSGILNFTDSILSSCTADERIMVFTMTGKEQIDPAMLRPGRVDVHIHFPLCDFTAFKTLANNYLGVKEHKLFSQVEGIFQNGASLSPAEIGELMIANRNSPTRALKHVINALQTDGDRRGTGRRLLLENGSRKSTSEDVSDDMSGSLCGGGGGSSPAVKEFRKLYGLLRIKSSRKSGSFDVAREMRDG

SEQ ID NO: 107012 - protein, 421 aa, Arabidopsis thaliana
  peptide (1)..(421): Ceres Seq. ID no. 13621098
  misc_feature (163)..(339): Pfam Name: ATPase family associated with various cellular Pfam Description: ATPase family associated with various cellular
  misc_feature (1)..(421): Homolog of NCBI NO: 30690453 NR Description: AAA-type ATPase family [Arabidopsis thaliana]
  misc_feature (1)..(421): Homolog of NCBI NO: 25354579 NR Description: hypothetical protein At2g46620 [imported] - thaliana >gi|4415942|gb|AAD20172.1| hypothetical protein thaliana] >gi|18700084|gb|AAL77654.1| At2g46620/F13A10.15
  misc_feature (1)..(346): Homolog of NCBI NO: 37536122 NR Description: hypothetical protein [Oryza sativa (japonica group)] >gi|10122056|gb|AAG13445.1| hypothetical protein [Oryza
  misc_feature (309)..(410): Homolog of NCBI NO: 37536122 NR Description: hypothetical protein [Oryza sativa (japonica group)] >gi|10122056|gb|AAG13445.1| hypothetical protein [Oryza
  misc_feature (1)..(346): Homolog of NCBI NO: 34902172 NR Description: Hypothetical protein [Oryza sativa (japonica group)] >gi|27476092|gb|AAO17023.1| Hypothetical protein [Oryza
  misc_feature (1)..(237): Homolog of NCBI NO: 15242143 NR Description: hypothetical protein [Arabidopsis thaliana]
  misc_feature (232)..(375): Homolog of NCBI NO: 15242143 NR Description: hypothetical protein [Arabidopsis thaliana]
  misc_feature (1)..(222): Homolog of NCBI NO: 15242536 NR Description: AAA-type ATPase family [Arabidopsis thaliana]
  misc_feature (228)..(372): Homolog of NCBI NO: 15242536 NR Description: AAA-type ATPase family [Arabidopsis thaliana]
  misc_feature (1)..(226): Homolog of NCBI NO: 15233037 NR Description: AAA-type ATPase family [Arabidopsis thaliana]
MYLNSLSSIENSDFTNLFTGKKSNEIILRLDRNQVVGDEFLGARVCWINGEDEDGARNFVLKIRKADKRRILGSYLQHIHTVSDELEQRNTELKLFINVGIDDHLNKKKKKNGRWRSIPFDHPCTFDNIAMETDLKNKVKSDLESFLKGKQYYNRLGRVWKRSYLLYGPSGTGKSSFVAAMANFLDYDVYDIDLSKVVDDSDLKMLLLQTRGKSVIVIEDLDRHLSTKSTAVNLSGILNFTDSILSSCTADERIMVFTMTGKEQIDPAMLRPGRVDVHIHFPLCDFTAFKTLANNYLGVKEHKLFSQVEGIFQNGASLSPAEIGELMIANRNSPTRALKHVINALQTDGDRRGTGRRLLLENGSRKSTSEDVSDDMSGSLCGGGGGSSPAVKEFRKLYGLLRIKSSRKSGSFDVAREMRDG

SEQ ID NO: 107013 - DNA, 1370 bp, Arabidopsis thaliana
  misc_feature (1)..(1370): Ceres Seq. ID no. 13621099
  misc_feature: MA Experiment ID: 20000171 Result: Down-regulated in Transcription
  misc_feature: MA Experiment 20000171 PARAMETER Experiment Name: At_42deg_Heat_P Parameter: Age (day) Value: 14
  misc_feature: MA Experiment 20000171 PARAMETER Experiment Name: At_42deg_Heat_P Parameter: Organism Value: A. thaliana
  misc_feature: MA Experiment 20000171 PARAMETER Experiment Name: At_42deg_Heat_P Parameter: Plant Line Value: WS
  misc_feature: MA Experiment 20000171 PARAMETER Experiment Name: At_42deg_Heat_P Parameter: Temperature (deg C) Value: 42 vs. 22
  misc_feature: MA Experiment 20000171 PARAMETER Experiment Name: At_42deg_Heat_P Parameter: Timepoint (hr) Value: 1
  misc_feature: MA Experiment 20000171 PARAMETER Experiment Name: At_42deg_Heat_P Parameter: Tissue Value: Aerial
  misc_feature: MA Experiment ID: 20000173 Result: Down-regulated in Transcription
  misc_feature: MA Experiment 20000173 PARAMETER Experiment Name: At_42deg_Heat_P Parameter: Age (day) Value: 14
  misc_feature: MA Experiment 20000173 PARAMETER Experiment Name: At_42deg_Heat_P Parameter: Organism Value: A. thaliana
  misc_feature: MA Experiment 20000173 PARAMETER Experiment Name: At_42deg_Heat_P Parameter: Plant Line Value: WS
  misc_feature: MA Experiment 20000173 PARAMETER Experiment Name: At_42deg_Heat_P Parameter: Temperature (deg C) Value: 42 vs. 22
  misc_feature: MA Experiment 20000173 PARAMETER Experiment Name: At_42deg_Heat_P Parameter: Timepoint (hr) Value: 6
  misc_feature: MA Experiment 20000173 PARAMETER Experiment Name: At_42deg_Heat_P Parameter: Tissue Value: Aerial
  misc_feature: MA Experiment ID: 20000185 Result: Down-regulated in Transcription
  misc_feature: MA Experiment 20000185 PARAMETER Experiment Name: At_Roots__P Parameter: Age (day) Value: 7 vs. 21
  misc_feature: MA Experiment 20000185 PARAMETER Experiment Name: At_Roots__P Parameter: Organism Value: A. thaliana
  misc_feature: MA Experiment 20000185 PARAMETER Experiment Name: At_Roots__P Parameter: Tissue Value: Roots vs. Whole Plant
  misc_feature: MA Experiment ID: 20000439 Result: Down-regulated in Transcription
  misc_feature: MA Experiment 20000439 PARAMETER Experiment Name: At_Roots__P Parameter: Age (day) Value: 14 vs. 21
  misc_feature: MA Experiment 20000439 PARAMETER Experiment Name: At_Roots__P Parameter: Organism Value: A. thaliana
  misc_feature: MA Experiment 20000439 PARAMETER Experiment Name: At_Roots__P Parameter: Tissue Value: Roots vs. Whole Plant
  misc_feature: MA Experiment ID: 20000573 Result: Down-regulated in Transcription
  misc_feature: MA Experiment 20000573 PARAMETER Experiment Name: At_100uM_ABA_Mutants__P Parameter: Organism Value: A. thaliana
  misc_feature: MA Experiment 20000573 PARAMETER Experiment Name: At_100uM_ABA_Mutants__P Parameter: Plant Line Value: CS22 vs. Ler wt
  misc_feature: MA Experiment 20000573 PARAMETER Experiment Name: At_100uM_ABA_Mutants__P Parameter: Timepoint (hr) Value: N/A
  misc_feature: MA Experiment 20000573 PARAMETER Experiment Name: At_100uM_ABA_Mutants__P Parameter: Tissue Value: Whole Plant
  misc_feature: MA Experiment 20000573 PARAMETER Experiment Name: At_100uM_ABA_Mutants__P Parameter: Treatment Value: None
  misc_feature: MA Experiment ID: 20000794 Result: Up-regulated in Transcription
  misc_feature: MA Experiment 20000794 PARAMETER Experiment Name: At_Petals_P Parameter: Age (day) Value: 23-25 days
  misc_feature: MA Experiment 20000794 PARAMETER Experiment Name: At_Petals_P Parameter: Plant Line Value: WS
  misc_feature: MA Experiment 20000794 PARAMETER Experiment Name: At_Petals_P Parameter: Tissue Value: Petals vs. Whole plant
  misc_feature: MA Experiment ID: 20001911 Result: Down-regulated in Transcription
  misc_feature: MA Experiment 20001911 PARAMETER Experiment Name: At_Drought_Reproduction_P Parameter: Age (day) Value: 40
  misc_feature: MA Experiment 20001911 PARAMETER Experiment Name: At_Drought_Reproduction_P Parameter: Organism Value: A. thaliana
  misc_feature: MA Experiment 20001911 PARAMETER Experiment Name: At_Drought_Reproduction_P Parameter: Plant Line Value: WS
  misc_feature: MA Experiment 20001911 PARAMETER Experiment Name: At_Drought_Reproduction_P Parameter: Timepoint (day) Value: 10
  misc_feature: MA Experiment 20001911 PARAMETER Experiment Name: At_Drought_Reproduction_P Parameter: Tissue Value: Flowers
  misc_feature: MA Experiment 20001911 PARAMETER Experiment Name: At_Drought_Reproduction_P Parameter: Treatment Value: Drought vs. No Drought
attcttcttctaaaaaatcttgacaactttttgtttttgttttctttctctgaattttttaaaagagagagagctatgtagctatgaaacagtaagagatatagatatagagagacagagaaagatgatgatcagtgaagttaggctaaacccactttctatttatgtataattaggtcaatcacatcaccaatctcctcctccaattctcctcctctccttccaaattctagggttttgcttgtatctcaccccctttctcaattccctagggaaactgtgaatttcatcaaattccattattttttggtcacacccttaaagagatctgagagttctaaagatgatgacagatttatctctcacgagagatgaagatgaagaagaagcaaagcccttagcagaagaagaaggagcgcgtgaagtagcagacagagagcacatgttcgacaaagttgtgactccaagtgatgtcggaaaactaaaccgacttgtgatcccaaagcaacacgcagagagattcttccctttagattcatcttcaaacgagaaaggtttgcttttaaacttcgaagatctcactggcaaatcttggaggttccgttactcttactggaacagtagtcaaagctatgtcatgactaaaggttggagcagattcgttaaagacaaaaagcttgacgccggagatattgtctctttccaaagatgtgtcggagattcaggaagagatagccgtttgtttattgattggaggagaagacctaaagtccctgaccatcctcatttcgccgccggagctatgttccctaggttttacagctttccttcgaccaattacagtctttataatcatcagcagcaacgtcatcatcacagtggtggtggttataattatcatcaaattccgagagaatttggttatggttacttcgttaggtcagtggatcagaggaacaatcctgcggctgcggtggctgatccgttggtgattgaatctgtgccggtgatgatgcacgggagagctaatcaggaacttgttggaacggccgggaagagactgaggctttttggagttgatatggaatgcggcgagagcggaatgaccaacagtacggaggaggaatcatcatcttccggtggaagtttgccacgtggaggcggtggtggtgcttcatcttcctctttctttcagctgagacttggaagcagcagtgaagatgatcacttcactaagaaaggaaagtcttcattgtcttttgatttggatcaataataatgatgatgatgaaattagttggtattttaagaaaaaaaacatacatatataattctatatatatgacaacataatgcattgatttcattat

SEQ ID NO: 107014 - protein, 310 aa, Arabidopsis thaliana
  peptide (1)..(310): Ceres Seq. ID no. 13621100
  misc_feature (34)..(143): Pfam Name: B3 DNA binding domain Pfam Description: B3 DNA binding domain
  misc_feature (1)..(310): Homolog of NCBI NO: 18407193 NR Description: DNA-binding protein, putative [Arabidopsis
  misc_feature (13)..(310): Homolog of NCBI NO: 15228649 NR Description: DNA-binding protein, putative [Arabidopsis
  misc_feature (13)..(310): Homolog of NCBI NO: 26450371 NR Description: putative RAV [Arabidopsis thaliana]
  misc_feature (30)..(310): Homolog of NCBI NO: 21618252 NR Description: RAV-like protein [Arabidopsis thaliana]
  misc_feature (30)..(196): Homolog of NCBI NO: 15223284 NR Description: DNA-binding protein, putative [Arabidopsis
  misc_feature (21)..(181): Homolog of NCBI NO: 34902226 NR Description: Putative RAV-like B3 domain DNA binding protein
  misc_feature (27)..(148): Homolog of NCBI NO: 32492293 NR Description: OSJNBa0088A01.1 [Oryza sativa (japonica
  misc_feature (22)..(308): Homolog of NCBI NO: 37536454 NR Description: putative DNA-binding protein [Oryza sativa
  misc_feature (31)..(196): Homolog of NCBI NO: 15234209 NR Description: DNA-binding protein, putative [Arabidopsis
  misc_feature (31)..(140): Homolog of NCBI NO: 15239984 NR Description: DNA-binding protein, putative [Arabidopsis
MMTDLSLTRDEDEEEAKPLAEEEGAREVADREHMFDKVVTPSDVGKLNRLVIPKQHAERFFPLDSSSNEKGLLLNFEDLTGKSWRFRYSYWNSSQSYVMTKGWSRFVKDKKLDAGDIVSFQRCVGDSGRDSRLFIDWRRRPKVPDHPHFAAGAMFPRFYSFPSTNYSLYNHQQQRHHHSGGGYNYHQIPREFGYGYFVRSVDQRNNPAAAVADPLVIESVPVMMHGRANQELVGTAGKRLRLFGVDMECGESGMTNSTEEESSSSGGSLPRGGGGGASSSSFFQLRLGSSSEDDHFTKKGKSSLSFDLDQ

SEQ ID NO: 107015 - protein, 309 aa, Arabidopsis thaliana
  peptide (1)..(309): Ceres Seq. ID no. 13621101
  misc_feature (33)..(142): Pfam Name: B3 DNA binding domain Pfam Description: B3 DNA binding domain
  misc_feature (1)..(309): Homolog of NCBI NO: 18407193 NR Description: DNA-binding protein, putative [Arabidopsis
  misc_feature (12)..(309): Homolog of NCBI NO: 15228649 NR Description: DNA-binding protein, putative [Arabidopsis
  misc_feature (12)..(309): Homolog of NCBI NO: 26450371 NR Description: putative RAV [Arabidopsis thaliana]
  misc_feature (29)..(309): Homolog of NCBI NO: 21618252 NR Description: RAV-like protein [Arabidopsis thaliana]
  misc_feature (29)..(195): Homolog of NCBI NO: 15223284 NR Description: DNA-binding protein, putative [Arabidopsis
  misc_feature (20)..(180): Homolog of NCBI NO: 34902226 NR Description: Putative RAV-like B3 domain DNA binding protein
  misc_feature (26)..(147): Homolog of NCBI NO: 32492293 NR Description: OSJNBa0088A01.1 [Oryza sativa (japonica
  misc_feature (21)..(307): Homolog of NCBI NO: 37536454 NR Description: putative DNA-binding protein [Oryza sativa
  misc_feature (30)..(195): Homolog of NCBI NO: 15234209 NR Description: DNA-binding protein, putative [Arabidopsis
  misc_feature (30)..(139): Homolog of NCBI NO: 15239984 NR Description: DNA-binding protein, putative [Arabidopsis
MTDLSLTRDEDEEEAKPLAEEEGAREVADREHMFDKVVTPSDVGKLNRLVIPKQHAERFFPLDSSSNEKGLLLNFEDLTGKSWRFRYSYWNSSQSYVMTKGWSRFVKDKKLDAGDIVSFQRCVGDSGRDSRLFIDWRRRPKVPDHPHFAAGAMFPRFYSFPSTNYSLYNHQQQRHHHSGGGYNYHQIPREFGYGYFVRSVDQRNNPAAAVADPLVIESVPVMMHGRANQELVGTAGKRLRLFGVDMECGESGMTNSTEEESSSSGGSLPRGGGGGASSSSFFQLRLGSSSEDDHFTKKGKSSLSFDLDQ

SEQ ID NO: 107016 - protein, 277 aa, Arabidopsis thaliana
  peptide (1)..(277): Ceres Seq. ID no. 13621102
  misc_feature (1)..(110): Pfam Name: B3 DNA binding domain Pfam Description: B3 DNA binding domain
  misc_feature (1)..(277): Homolog of NCBI NO: 18407193 NR Description: DNA-binding protein, putative [Arabidopsis
  misc_feature (1)..(277): Homolog of NCBI NO: 15228649 NR Description: DNA-binding protein, putative [Arabidopsis
  misc_feature (1)..(277): Homolog of NCBI NO: 26450371 NR Description: putative RAV [Arabidopsis thaliana]
  misc_feature (1)..(277): Homolog of NCBI NO: 21618252 NR Description: RAV-like protein [Arabidopsis thaliana]
  misc_feature (1)..(163): Homolog of NCBI NO: 15223284 NR Description: DNA-binding protein, putative [Arabidopsis
  misc_feature (1)..(148): Homolog of NCBI NO: 34902226 NR Description: Putative RAV-like B3 domain DNA binding protein
  misc_feature (1)..(115): Homolog of NCBI NO: 32492293 NR Description: OSJNBa0088A01.1 [Oryza sativa (japonica
  misc_feature (1)..(275): Homolog of NCBI NO: 37536454 NR Description: putative DNA-binding protein [Oryza sativa
  misc_feature (1)..(163): Homolog of NCBI NO: 15234209 NR Description: DNA-binding protein, putative [Arabidopsis
  misc_feature (1)..(107): Homolog of NCBI NO: 15239984 NR Description: DNA-binding protein, putative [Arabidopsis
MFDKVVTPSDVGKLNRLVIPKQHAERFFPLDSSSNEKGLLLNFEDLTGKSWRFRYSYWNSSQSYVMTKGWSRFVKDKKLDAGDIVSFQRCVGDSGRDSRLFIDWRRRPKVPDHPHFAAGAMFPRFYSFPSTNYSLYNHQQQRHHHSGGGYNYHQIPREFGYGYFVRSVDQRNNPAAAVADPLVIESVPVMMHGRANQELVGTAGKRLRLFGVDMECGESGMTNSTEEESSSSGGSLPRGGGGGASSSSFFQLRLGSSSEDDHFTKKGKSSLSFDLDQ

SEQ ID NO: 107017 - DNA, 692 bp, Arabidopsis thaliana
  misc_feature (1)..(692): Ceres Seq. ID no. 13621156
  misc_feature: MA Experiment ID: 20000185 Result: Up-regulated in Transcription
  misc_feature: MA Experiment 20000185 PARAMETER Experiment Name: At_Roots__P Parameter: Age (day) Value: 7 vs. 21
  misc_feature: MA Experiment 20000185 PARAMETER Experiment Name: At_Roots__P Parameter: Organism Value: A. thaliana
  misc_feature: MA Experiment 20000185 PARAMETER Experiment Name: At_Roots__P Parameter: Tissue Value: Roots vs. Whole Plant
  misc_feature: MA Experiment ID: 20000267 Result: Up-regulated in Transcription
  misc_feature: MA Experiment 20000267 PARAMETER Experiment Name: At_Drought_P Parameter: Age (day) Value: 7
  misc_feature: MA Experiment 20000267 PARAMETER Experiment Name: At_Drought_P Parameter: Organism Value: A. thaliana
  misc_feature: MA Experiment 20000267 PARAMETER Experiment Name: At_Drought_P Parameter: Plant Line Value: WS
  misc_feature: MA Experiment 20000267 PARAMETER Experiment Name: At_Drought_P Parameter: Timepoint (hr) Value: 6
  misc_feature: MA Experiment 20000267 PARAMETER Experiment Name: At_Drought_P Parameter: Tissue Value: Whole Plant
  misc_feature: MA Experiment 20000267 PARAMETER Experiment Name: At_Drought_P Parameter: Treatment Value: Drought vs. No Drought
  misc_feature: MA Experiment ID: 20000268 Result: Up-regulated in Transcription
  misc_feature: MA Experiment 20000268 PARAMETER Experiment Name: At_100mM_NaCl__P Parameter: Age (day) Value: 14
  misc_feature: MA Experiment 20000268 PARAMETER Experiment Name: At_100mM_NaCl__P Parameter: Organism Value: A. thaliana
  misc_feature: MA Experiment 20000268 PARAMETER Experiment Name: At_100mM_NaCl__P Parameter: Plant Line Value: WS
  misc_feature: MA Experiment 20000268 PARAMETER Experiment Name: At_100mM_NaCl__P Parameter: Timepoint (hr) Value: 6
  misc_feature: MA Experiment 20000268 PARAMETER Experiment Name: At_100mM_NaCl__P Parameter: Tissue Value: Whole Plant
  misc_feature: MA Experiment 20000268 PARAMETER Experiment Name: At_100mM_NaCl__P Parameter: Treatment Value: 100mM NaCl vs. No Treatment
  misc_feature: MA Experiment ID: 20000439 Result: Up-regulated in Transcription
  misc_feature: MA Experiment 20000439 PARAMETER Experiment Name: At_Roots__P Parameter: Age (day) Value: 14 vs. 21
  misc_feature: MA Experiment 20000439 PARAMETER Experiment Name: At_Roots__P Parameter: Organism Value: A. thaliana
  misc_feature: MA Experiment 20000439 PARAMETER Experiment Name: At_Roots__P Parameter: Tissue Value: Roots vs. Whole Plant
  misc_feature: MA Experiment ID: 20000453 Result: Up-regulated in Transcription
  misc_feature: MA Experiment 20000453 PARAMETER Experiment Name: At_100uM_ABA_P Parameter: Age (day) Value: 15
  misc_feature: MA Experiment 20000453 PARAMETER Experiment Name: At_100uM_ABA_P Parameter: Organism Value: A. thaliana
  misc_feature: MA Experiment 20000453 PARAMETER Experiment Name: At_100uM_ABA_P Parameter: Plant Line Value: WS
  misc_feature: MA Experiment 20000453 PARAMETER Experiment Name: At_100uM_ABA_P Parameter: Timepoint (hr) Value: 24
  misc_feature: MA Experiment 20000453 PARAMETER Experiment Name: At_100uM_ABA_P Parameter: Tissue Value: Aerial
  misc_feature: MA Experiment 20000453 PARAMETER Experiment Name: At_100uM_ABA_P Parameter: Treatment Value: 100uM ABA vs. No Treatment
  misc_feature: MA Experiment ID: 20000460 Result: Down-regulated in Transcription
  misc_feature: MA Experiment 20000460 PARAMETER Experiment Name: At_10percent_PEG_P Parameter: Age (day) Value: 12
  misc_feature: MA Experiment 20000460 PARAMETER Experiment Name: At_10percent_PEG_P Parameter: Organism Value: A. thaliana
  misc_feature: MA Experiment 20000460 PARAMETER Experiment Name: At_10percent_PEG_P Parameter: Plant Line Value: WS
  misc_feature: MA Experiment 20000460 PARAMETER Experiment Name: At_10percent_PEG_P Parameter: Timepoint (day) Value: 12
  misc_feature: MA Experiment 20000460 PARAMETER Experiment Name: At_10percent_PEG_P Parameter: Tissue Value: Whole Plant
  misc_feature: MA Experiment 20000460 PARAMETER Experiment Name: At_10percent_PEG_P Parameter: Treatment Value: 10percent PEG vs. No Treatment
  misc_feature: MA Experiment ID: 20000573 Result: Down-regulated in Transcription
  misc_feature: MA Experiment 20000573 PARAMETER Experiment Name: At_100uM_ABA_Mutants__P Parameter: Organism Value: A. thaliana
  misc_feature: MA Experiment 20000573 PARAMETER Experiment Name: At_100uM_ABA_Mutants__P Parameter: Plant Line Value: CS22 vs. Ler wt
  misc_feature: MA Experiment 20000573 PARAMETER Experiment Name: At_100uM_ABA_Mutants__P Parameter: Timepoint (hr) Value: N/A
  misc_feature: MA Experiment 20000573 PARAMETER Experiment Name: At_100uM_ABA_Mutants__P Parameter: Tissue Value: Whole Plant
  misc_feature: MA Experiment 20000573 PARAMETER Experiment Name: At_100uM_ABA_Mutants__P Parameter: Treatment Value: None
  misc_feature: MA Experiment ID: 20000574 Result: Down-regulated in Transcription
  misc_feature: MA Experiment 20000574 PARAMETER Experiment Name: At_100uM_ABA_Mutants__P Parameter: Organism Value: A. thaliana
  misc_feature: MA Experiment 20000574 PARAMETER Experiment Name: At_100uM_ABA_Mutants__P Parameter: Plant Line Value: CS23 vs. Ler wt
  misc_feature: MA Experiment 20000574 PARAMETER Experiment Name: At_100uM_ABA_Mutants__P Parameter: Timepoint (hr) Value: N/A
  misc_feature: MA Experiment 20000574 PARAMETER Experiment Name: At_100uM_ABA_Mutants__P Parameter: Tissue Value: Whole Plant
  misc_feature: MA Experiment 20000574 PARAMETER Experiment Name: At_100uM_ABA_Mutants__P Parameter: Treatment Value: None
  misc_feature: MA Experiment ID: 20001556 Result: Up-regulated in Transcription
  misc_feature: MA Experiment 20001556 PARAMETER Experiment Name: At_Drought_Soil_Dry_P Parameter: Age (day) Value: 26
  misc_feature: MA Experiment 20001556 PARAMETER Experiment Name: At_Drought_Soil_Dry_P Parameter: Organism Value: A. thaliana
  misc_feature: MA Experiment 20001556 PARAMETER Experiment Name: At_Drought_Soil_Dry_P Parameter: Plant Line Value: WS
  misc_feature: MA Experiment 20001556 PARAMETER Experiment Name: At_Drought_Soil_Dry_P Parameter: Post Timepoint (hr) Value: None
  misc_feature: MA Experiment 20001556 PARAMETER Experiment Name: At_Drought_Soil_Dry_P Parameter: Post-Treatment Value: None
  misc_feature: MA Experiment 20001556 PARAMETER Experiment Name: At_Drought_Soil_Dry_P Parameter: Timepoint (day) Value: 12
  misc_feature: MA Experiment 20001556 PARAMETER Experiment Name: At_Drought_Soil_Dry_P Parameter: Treatment Value: Drought vs. No Drought
  misc_feature: MA Experiment ID: 20001761 Result: Down-regulated in Transcription
  misc_feature: MA Experiment 20001761 PARAMETER Experiment Name: At_50mM_NH4NO3_L-to-H_P Parameter: Timepoint (hr) Value: 4
  misc_feature: MA Experiment 20001761 PARAMETER Experiment Name: At_50mM_NH4NO3_L-to-H_P Parameter: Tissue Value: Siliques
  misc_feature: MA Experiment 20001761 PARAMETER Experiment Name: At_50mM_NH4NO3_L-to-H_P Parameter: Treatment Value: 50mM NH4NO3 vs 100mM Mannitol
  misc_feature: MA Experiment ID: 20001904 Result: Up-regulated in Transcription
  misc_feature: MA Experiment 20001904 PARAMETER Experiment Name: At_Drought_Reproduction_P Parameter: Age (day) Value: 37
  misc_feature: MA Experiment 20001904 PARAMETER Experiment Name: At_Drought_Reproduction_P Parameter: Organism Value: A. thaliana
  misc_feature: MA Experiment 20001904 PARAMETER Experiment Name: At_Drought_Reproduction_P Parameter: Plant Line Value: WS
  misc_feature: MA Experiment 20001904 PARAMETER Experiment Name: At_Drought_Reproduction_P Parameter: Timepoint (day) Value: 7
  misc_feature: MA Experiment 20001904 PARAMETER Experiment Name: At_Drought_Reproduction_P Parameter: Tissue Value: Rosettes
  misc_feature: MA Experiment 20001904 PARAMETER Experiment Name: At_Drought_Reproduction_P Parameter: Treatment Value: Drought vs. No Drought
  misc_feature: MA Experiment ID: 20001906 Result: Up-regulated in Transcription
  misc_feature: MA Experiment 20001906 PARAMETER Experiment Name: At_Drought_Reproduction_P Parameter: Age (day) Value: 35
  misc_feature: MA Experiment 20001906 PARAMETER Experiment Name: At_Drought_Reproduction_P Parameter: Organism Value: A. thaliana
  misc_feature: MA Experiment 20001906 PARAMETER Experiment Name: At_Drought_Reproduction_P Parameter: Plant Line Value: WS
  misc_feature: MA Experiment 20001906 PARAMETER Experiment Name: At_Drought_Reproduction_P Parameter: Timepoint (day) Value: 5
  misc_feature: MA Experiment 20001906 PARAMETER Experiment Name: At_Drought_Reproduction_P Parameter: Tissue Value: Siliques
  misc_feature: MA Experiment 20001906 PARAMETER Experiment Name: At_Drought_Reproduction_P Parameter: Treatment Value: Drought vs. No Drought
  misc_feature: MA Experiment ID: 20001908 Result: Up-regulated in Transcription
  misc_feature: MA Experiment 20001908 PARAMETER Experiment Name: At_Drought_Reproduction_P Parameter: Age (day) Value: 40
  misc_feature: MA Experiment 20001908 PARAMETER Experiment Name: At_Drought_Reproduction_P Parameter: Organism Value: A. thaliana
  misc_feature: MA Experiment 20001908 PARAMETER Experiment Name: At_Drought_Reproduction_P Parameter: Plant Line Value: WS
  misc_feature: MA Experiment 20001908 PARAMETER Experiment Name: At_Drought_Reproduction_P Parameter: Timepoint (day) Value: 10
  misc_feature: MA Experiment 20001908 PARAMETER Experiment Name: At_Drought_Reproduction_P Parameter: Tissue Value: Siliques
  misc_feature: MA Experiment 20001908 PARAMETER Experiment Name: At_Drought_Reproduction_P Parameter: Treatment Value: Drought vs. No Drought
aaactcattttactctcacaattacaaacactttgttacaatttagaccccaccagaaaaaagcgaaaatggcaaaagaggaatatgtatcaagaatgttggttatgttaataatgataatgccactggttgctcagggatcgagactgcatagttgggctaatcggcttgaggaaacagggaaggacaaggtaacaaaccttcagttctatttccatgacaccttgagcggcaagaatccaaccgcagttaaggtggctcagggcacagacaccgaaaaatccccgacgctgttcggcgctgtgttcatggtcgacgacgctctcaccgagaccgctgatccaaaatccaaactcgttggacgggcgcaaggcctttacggttcttcatgtaaagaagaagtaggtttgataatggccatgagcttctgtttcgaggacggtccttacaaggacagcaccataagcatgatcgggaagaactccgcgatgaacccaatccgagaaatgcctattgttggcggcacgggaatgttccggatggctcgtggctatgctattgcccggactaattggtttgatcccaaaaccggtgatgccatcgttggctataacgttaccattatgcactagaaaggctttgtatcatataatacggcgacgttttgcaatgtatacacgtaacatttcact

SEQ ID NO: 107018 - protein, 209 aa, Arabidopsis thaliana
  peptide (1)..(209): Ceres Seq. ID no. 13621157
  misc_feature (40)..(204): Pfam Name: Dirigent-like protein Pfam Description: Dirigent-like protein
  misc_feature (23)..(209): Homolog of NCBI NO: 30681257 NR Description: disease resistance response protein-related/
  misc_feature (23)..(204): Homolog of NCBI NO: 25412014 NR Description: probable disease resistance response protein - Arabidopsis thaliana >gi|4803933|gb|AAD29806.1| putative
  misc_feature (62)..(209): Homolog of NCBI NO: 15218836 NR Description: disease resistance response protein-related/
  misc_feature (61)..(209): Homolog of NCBI NO: 15239779 NR Description: disease resistance response protein-related/
  misc_feature (23)..(209): Homolog of NCBI NO: 15222673 NR Description: disease resistance response protein-related/
  misc_feature (23)..(209): Homolog of NCBI NO: 22135914 NR Description: unknown protein [Arabidopsis thaliana]
  misc_feature (23)..(209): Homolog of NCBI NO: 15238980 NR Description: disease resistance response protein-related
  misc_feature (29)..(209): Homolog of NCBI NO: 15217886 NR Description: disease resistance response protein-related/
  misc_feature (32)..(209): Homolog of NCBI NO: 15238982 NR Description: disease resistance response protein-related thaliana] >gi|9759487|dbj|BAB10492.1| contains similarity to resistance response protein~gene_id:MDH9.21 [Arabidopsis
  misc_feature (32)..(209): Homolog of NCBI NO: 15219966 NR Description: disease resistance response protein-related
THFTLTITNTLLQFRPHQKKAKMAKEEYVSRMLVMLIMIMPLVAQGSRLHSWANRLEETGKDKVTNLQFYFHDTLSGKNPTAVKVAQGTDTEKSPTLFGAVFMVDDALTETADPKSKLVGRAQGLYGSSCKEEVGLIMAMSFCFEDGPYKDSTISMIGKNSAMNPIREMPIVGGTGMFRMARGYAIARTNWFDPKTGDAIVGYNVTIMH

SEQ ID NO: 107019 - protein, 187 aa, Arabidopsis thaliana
  peptide (1)..(187): Ceres Seq. ID no. 13621158
  misc_feature (18)..(182): Pfam Name: Dirigent-like protein Pfam Description: Dirigent-like protein
  misc_feature (1)..(187): Homolog of NCBI NO: 30681257 NR Description: disease resistance response protein-related/
  misc_feature (1)..(182): Homolog of NCBI NO: 25412014 NR Description: probable disease resistance response protein - Arabidopsis thaliana >gi|4803933|gb|AAD29806.1| putative
  misc_feature (40)..(187): Homolog of NCBI NO: 15218836 NR Description: disease resistance response protein-related/
  misc_feature (39)..(187): Homolog of NCBI NO: 15239779 NR Description: disease resistance response protein-related/
  misc_feature (1)..(187): Homolog of NCBI NO: 15222673 NR Description: disease resistance response protein-related/
  misc_feature (1)..(187): Homolog of NCBI NO: 22135914 NR Description: unknown protein [Arabidopsis thaliana]
  misc_feature (1)..(187): Homolog of NCBI NO: 15238980 NR Description: disease resistance response protein-related
  misc_feature (7)..(187): Homolog of NCBI NO: 15217886 NR Description: disease resistance response protein-related/
  misc_feature (10)..(187): Homolog of NCBI NO: 15238982 NR Description: disease resistance response protein-related thaliana] >gi|9759487|dbj|BAB10492.1| contains similarity to resistance response protein~gene_id:MDH9.21 [Arabidopsis
  misc_feature (10)..(187): Homolog of NCBI NO: 15219966 NR Description: disease resistance response protein-related
MAKEEYVSRMLVMLIMIMPLVAQGSRLHSWANRLEETGKDKVTNLQFYFHDTLSGKNPTAVKVAQGTDTEKSPTLFGAVFMVDDALTETADPKSKLVGRAQGLYGSSCKEEVGLIMAMSFCFEDGPYKDSTISMIGKNSAMNPIREMPIVGGTGMFRMARGYAIARTNWFDPKTGDAIVGYNVTIMH

SEQ ID NO: 107020 - protein, 178 aa, Arabidopsis thaliana
  peptide (1)..(178): Ceres Seq. ID no. 13621159
  misc_feature (9)..(173): Pfam Name: Dirigent-like protein Pfam Description: Dirigent-like protein
  misc_feature (1)..(178): Homolog of NCBI NO: 30681257 NR Description: disease resistance response protein-related/
  misc_feature (1)..(173): Homolog of NCBI NO: 25412014 NR Description: probable disease resistance response protein - Arabidopsis thaliana >gi|4803933|gb|AAD29806.1| putative
  misc_feature (31)..(178): Homolog of NCBI NO: 15218836 NR Description: disease resistance response protein-related/
  misc_feature (30)..(178): Homolog of NCBI NO: 15239779 NR Description: disease resistance response protein-related/
  misc_feature (1)..(178): Homolog of NCBI NO: 15222673 NR Description: disease resistance response protein-related/
  misc_feature (1)..(178): Homolog of NCBI NO: 22135914 NR Description: unknown protein [Arabidopsis thaliana]
  misc_feature (1)..(178): Homolog of NCBI NO: 15238980 NR Description: disease resistance response protein-related
  misc_feature (1)..(178): Homolog of NCBI NO: 15217886 NR Description: disease resistance response protein-related/
  misc_feature (1)..(178): Homolog of NCBI NO: 15238982 NR Description: disease resistance response protein-related thaliana] >gi|9759487|dbj|BAB10492.1| contains similarity to resistance response protein~gene_id:MDH9.21 [Arabidopsis
  misc_feature (1)..(178): Homolog of NCBI NO: 15219966 NR Description: disease resistance response protein-related
MLVMLIMIMPLVAQGSRLHSWANRLEETGKDKVTNLQFYFHDTLSGKNPTAVKVAQGTDTEKSPTLFGAVFMVDDALTETADPKSKLVGRAQGLYGSSCKEEVGLIMAMSFCFEDGPYKDSTISMIGKNSAMNPIREMPIVGGTGMFRMARGYAIARTNWFDPKTGDAIVGYNVTIMH

SEQ ID NO: 107021 - DNA, 1201 bp, Arabidopsis thaliana
  misc_feature (1)..(1201): Ceres Seq. ID no. 13621160
  misc_feature: MA Experiment ID: 108488 Result: Down-regulated in Transcription
  misc_feature: MA Experiment ID: 20000224 Result: Up-regulated in Transcription
  misc_feature: MA Experiment ID: 20001911 Result: Up-regulated in Transcription
  misc_feature: MA Experiment 20001911 PARAMETER Experiment Name: At_Drought_Reproduction_P Parameter: Age (day) Value: 40
  misc_feature: MA Experiment 20001911 PARAMETER Experiment Name: At_Drought_Reproduction_P Parameter: Organism Value: A. thaliana
  misc_feature: MA Experiment 20001911 PARAMETER Experiment Name: At_Drought_Reproduction_P Parameter: Plant Line Value: WS
  misc_feature: MA Experiment 20001911 PARAMETER Experiment Name: At_Drought_Reproduction_P Parameter: Timepoint (day) Value: 10
  misc_feature: MA Experiment 20001911 PARAMETER Experiment Name: At_Drought_Reproduction_P Parameter: Tissue Value: Flowers
  misc_feature: MA Experiment 20001911 PARAMETER Experiment Name: At_Drought_Reproduction_P Parameter: Treatment Value: Drought vs. No Drought
aaagtttgcatctttacttgggttgtgtctggaatcaattacttcctaaaggttgccatttgttaacttactctgttagtctactaccaccaataactatgtttttcgatggataccattatcatggaacaacctttgagcagagttaccggtgttatccggcatcttttatcgacaagccacaacttgaaagtggtgacaagattataatgccaccatcagcccttgatcgtctagcctctttgcatattgactatccgatgctgtttgagcttcgtaatgctggaattgaacgtgttacacactgtggagtccttgagttcattgcagaagaaggcatgatttacatgccatattggatgatgcagaatctgctgctgcaagaaggagacattgtgagagttagaaatgtcactcttccaaagggaacttacgttaaactacagccccacacaacagacttcctggatatatccaacccgaaagccatcttggagactgctttgagaaattattcatgcctaactagtggggatagcattatggttccatacaacaataagaagtacttcatagatatagttgaaacaaagcctgctaacgcaatcagcatcatagaaacagactgtgaggttgatttcgcacctcccctcgattacaaggagcctgaacgtcccacagcaccttctgcagctaagggtccggcaaaagctgaggaggttgtggatgaacctgaaccaaagttcaaccctttcaccggatctggaagacggttagatgggagacctcttgcctatgagccagcgccagcctctagctcaaaaggcaaacaacctgttgtcgctaatggtaatggacagtcatctgtagcaagtagctcagagaaagctacacgagctcagggaaagcttgtatttggggctaacggaaaccgtgctccaaaagaagctgctccgaaagttggagctgcaaaagagacaaagaaagaggaacaagagaagaaagacgagcccaagtttcaagctttctctgggaagaagtattcattgaggggttgatcaactcacacaatgggtctactcagtctatttatgacctctcatgttgtgtactaaaaatacaaggaaaacaaataagtgaataaatctctggctcctcttgacgcggcttgttttctttatcagattcaatgcaactttct

SEQ ID NO: 107022 - protein, 351 aa, Arabidopsis thaliana
  peptide (1)..(351): Ceres Seq. ID no. 13621161
  misc_feature (42)..(216): Pfam Name: Ubiquitin fusion degradation protein UFD1 Pfam Description: Ubiquitin fusion degradation protein UFD1
  misc_feature (33)..(351): Homolog of NCBI NO: 18399646 NR Description: ubiquitin fusion degradation (UFD) protein,
  misc_feature (34)..(351): Homolog of NCBI NO: 25347017 NR Description: probable ubiquitin fusion-degradation protein
  misc_feature (33)..(351): Homolog of NCBI NO: 21592947 NR Description: putative ubiquitin fusion-degradation protein
  misc_feature (33)..(351): Homolog of NCBI NO: 7488221 NR Description: probable ubiquitin-dependent proteolytic protein -
  misc_feature (33)..(351): Homolog of NCBI NO: 18420341 NR Description: ubiquitin fusion degradation protein UFD1 family thaliana] >gi|16930497|gb|AAL31934.1|AF419602_1 [Arabidopsis thaliana] >gi|22135779|gb|AAM91046.1|
  misc_feature (33)..(350): Homolog of NCBI NO: 38345534 NR Description: OSJNBa0020J04.9 [Oryza sativa (japonica
  misc_feature (64)..(351): Homolog of NCBI NO: 7488408 NR Description: probable ubiquitin fusion-degradation protein
  misc_feature (70)..(351): Homolog of NCBI NO: 30684115 NR Description: ubiquitin fusion degradation (UFD) protein,
  misc_feature (45)..(275): Homolog of NCBI NO: 16758158 NR Description: ubiquitin fusion degradation 1-like [Rattus
  misc_feature (45)..(275): Homolog of NCBI NO: 20891983 NR Description: ubiquitin fusion degradation 1 like [Mus
SLHLYLGCVWNQLLPKGCHLLTYSVSLLPPITMFFDGYHYHGTTFEQSYRCYPASFIDKPQLESGDKIIMPPSALDRLASLHIDYPMLFELRNAGIERVTHCGVLEFIAEEGMIYMPYWMMQNLLLQEGDIVRVRNVTLPKGTYVKLQPHTTDFLDISNPKAILETALRNYSCLTSGDSIMVPYNNKKYFIDIVETKPANAISIIETDCEVDFAPPLDYKEPERPTAPSAAKGPAKAEEVVDEPEPKFNPFTGSGRRLDGRPLAYEPAPASSSKGKQPVVANGNGQSSVASSSEKATRAQGKLVFGANGNRAPKEAAPKVGAAKETKKEEQEKKDEPKFQAFSGKKYSLRG

SEQ ID NO: 107023 - protein, 319 aa, Arabidopsis thaliana
  peptide (1)..(319): Ceres Seq. ID no. 13621162
  misc_feature (10)..(184): Pfam Name: Ubiquitin fusion degradation protein UFD1 Pfam Description: Ubiquitin fusion degradation protein UFD1
  misc_feature (1)..(319): Homolog of NCBI NO: 18399646 NR Description: ubiquitin fusion degradation (UFD) protein,
  misc_feature (2)..(319): Homolog of NCBI NO: 25347017 NR Description: probable ubiquitin fusion-degradation protein
  misc_feature (1)..(319): Homolog of NCBI NO: 21592947 NR Description: putative ubiquitin fusion-degradation protein
  misc_feature (1)..(319): Homolog of NCBI NO: 7488221 NR Description: probable ubiquitin-dependent proteolytic protein -
  misc_feature (1)..(319): Homolog of NCBI NO: 18420341 NR Description: ubiquitin fusion degradation protein UFD1 family thaliana] >gi|16930497|gb|AAL31934.1|AF419602_1 [Arabidopsis thaliana] >gi|22135779|gb|AAM91046.1|
  misc_feature (1)..(318): Homolog of NCBI NO: 38345534 NR Description: OSJNBa0020J04.9 [Oryza sativa (japonica
  misc_feature (32)..(319): Homolog of NCBI NO: 7488408 NR Description: probable ubiquitin fusion-degradation protein
  misc_feature (38)..(319): Homolog of NCBI NO: 30684115 NR Description: ubiquitin fusion degradation (UFD) protein,
  misc_feature (13)..(243): Homolog of NCBI NO: 16758158 NR Description: ubiquitin fusion degradation 1-like [Rattus
  misc_feature (13)..(243): Homolog of NCBI NO: 20891983 NR Description: ubiquitin fusion degradation 1 like [Mus
MFFDGYHYHGTTFEQSYRCYPASFIDKPQLESGDKIIMPPSALDRLASLHIDYPMLFELRNAGIERVTHCGVLEFIAEEGMIYMPYWMMQNLLLQEGDIVRVRNVTLPKGTYVKLQPHTTDFLDISNPKAILETALRNYSCLTSGDSIMVPYNNKKYFIDIVETKPANAISIIETDCEVDFAPPLDYKEPERPTAPSAAKGPAKAEEVVDEPEPKFNPFTGSGRRLDGRPLAYEPAPASSSKGKQPVVANGNGQSSVASSSEKATRAQGKLVFGANGNRAPKEAAPKVGAAKETKKEEQEKKDEPKFQAFSGKKYSLRG

SEQ ID NO: 107024 - protein, 282 aa, Arabidopsis thaliana
  peptide (1)..(282): Ceres Seq. ID no. 13621163
  misc_feature (1)..(147): Pfam Name: Ubiquitin fusion degradation protein UFD1 Pfam Description: Ubiquitin fusion degradation protein UFD1
  misc_feature (1)..(282): Homolog of NCBI NO: 18399646 NR Description: ubiquitin fusion degradation (UFD) protein,
  misc_feature (1)..(282): Homolog of NCBI NO: 25347017 NR Description: probable ubiquitin fusion-degradation protein
  misc_feature (1)..(282): Homolog of NCBI NO: 21592947 NR Description: putative ubiquitin fusion-degradation protein
  misc_feature (1)..(282): Homolog of NCBI NO: 7488221 NR Description: probable ubiquitin-dependent proteolytic protein -
  misc_feature (1)..(282): Homolog of NCBI NO: 18420341 NR Description: ubiquitin fusion degradation protein UFD1 family thaliana] >gi|16930497|gb|AAL31934.1|AF419602_1 [Arabidopsis thaliana] >gi|22135779|gb|AAM91046.1|
  misc_feature (1)..(281): Homolog of NCBI NO: 38345534 NR Description: OSJNBa0020J04.9 [Oryza sativa (japonica
  misc_feature (1)..(282): Homolog of NCBI NO: 7488408 NR Description: probable ubiquitin fusion-degradation protein
  misc_feature (1)..(282): Homolog of NCBI NO: 30684115 NR Description: ubiquitin fusion degradation (UFD) protein,
  misc_feature (1)..(206): Homolog of NCBI NO: 16758158 NR Description: ubiquitin fusion degradation 1-like [Rattus
  misc_feature (1)..(206): Homolog of NCBI NO: 20891983 NR Description: ubiquitin fusion degradation 1 like [Mus
MPPSALDRLASLHIDYPMLFELRNAGIERVTHCGVLEFIAEEGMIYMPYWMMQNLLLQEGDIVRVRNVTLPKGTYVKLQPHTTDFLDISNPKAILETALRNYSCLTSGDSIMVPYNNKKYFIDIVETKPANAISIIETDCEVDFAPPLDYKEPERPTAPSAAKGPAKAEEVVDEPEPKFNPFTGSGRRLDGRPLAYEPAPASSSKGKQPVVANGNGQSSVASSSEKATRAQGKLVFGANGNRAPKEAAPKVGAAKETKKEEQEKKDEPKFQAFSGKKYSLRG

SEQ ID NO: 107025 - DNA, 1959 bp, Arabidopsis thaliana
  misc_feature (1)..(1959): Ceres Seq. ID no. 13621187
  misc_feature: MA Experiment ID: 108433 Result: Down-regulated in Transcription
  misc_feature: MA Experiment 108433 PARAMETER Experiment Name: At_rhl_Mutant2_cDNA_P Parameter: Age (day) Value: 7
  misc_feature: MA Experiment 108433 PARAMETER Experiment Name: At_rhl_Mutant2_cDNA_P Parameter: Organism Value: A. thaliana
  misc_feature: MA Experiment 108433 PARAMETER Experiment Name: At_rhl_Mutant2_cDNA_P Parameter: Plant Line Value: rhl Mutant vs. wt landsburg
  misc_feature: MA Experiment 108433 PARAMETER Experiment Name: At_rhl_Mutant2_cDNA_P Parameter: Tissue Value: Roots
  misc_feature: MA Experiment ID: 108461 Result: Up-regulated in Transcription
  misc_feature: MA Experiment 108461 PARAMETER Experiment Name: At_Germinating_Seeds_cDNA_P Parameter: Age (day) Value: 1 vs. 0
  misc_feature: MA Experiment 108461 PARAMETER Experiment Name: At_Germinating_Seeds_cDNA_P Parameter: Tissue Value: Germinating Seeds
  misc_feature: MA Experiment ID: 108462 Result: Up-regulated in Transcription
  misc_feature: MA Experiment 108462 PARAMETER Experiment Name: At_Germinating_Seeds_cDNA_P Parameter: Age (day) Value: 2 vs. 0
  misc_feature: MA Experiment 108462 PARAMETER Experiment Name: At_Germinating_Seeds_cDNA_P Parameter: Tissue Value: Germinating Seeds
  misc_feature: MA Experiment ID: 108463 Result: Up-regulated in Transcription
  misc_feature: MA Experiment 108463 PARAMETER Experiment Name: At_Germinating_Seeds_cDNA_P Parameter: Age (day) Value: 3 vs. 0
  misc_feature: MA Experiment 108463 PARAMETER Experiment Name: At_Germinating_Seeds_cDNA_P Parameter: Tissue Value: Germinating Seeds
  misc_feature: MA Experiment ID: 108464 Result: Up-regulated in Transcription
  misc_feature: MA Experiment 108464 PARAMETER Experiment Name: At_Germinating_Seeds_cDNA_P Parameter: Age (day) Value: 4 vs. 0
  misc_feature: MA Experiment 108464 PARAMETER Experiment Name: At_Germinating_Seeds_cDNA_P Parameter: Tissue Value: Germinating Seeds
  misc_feature: MA Experiment ID: 108577 Result: Down-regulated in Transcription
  misc_feature: MA Experiment 108577 PARAMETER Experiment Name: At_42deg_Heat_cDNA_P Parameter: Temperature (deg C) Value: 42 vs. 22
  misc_feature: MA Experiment 108577 PARAMETER Experiment Name: At_42deg_Heat_cDNA_P Parameter: Timepoint (hr) Value: 6
  misc_feature: MA Experiment 108577 PARAMETER Experiment Name: At_42deg_Heat_cDNA_P Parameter: Tissue Value: Aerial
  misc_feature: MA Experiment ID: 108585 Result: Up-regulated in Transcription
  misc_feature: MA Experiment 108585 PARAMETER Experiment Name: At_5mM_NaNP_cDNA_P Parameter: Timepoint (hr) Value: 6
  misc_feature: MA Experiment 108585 PARAMETER Experiment Name: At_5mM_NaNP_cDNA_P Parameter: Tissue Value: Aerial
  misc_feature: MA Experiment 108585 PARAMETER Experiment Name: At_5mM_NaNP_cDNA_P Parameter: Treatment Value: null
  misc_feature: MA Experiment ID: 108595 Result: Down-regulated in Transcription
  misc_feature: MA Experiment 108595 PARAMETER Experiment Name: At_Ler-pi_Ovule_cDNA_P Parameter: Plant Line Value: null
  misc_feature: MA Experiment ID: 108668 Result: Down-regulated in Transcription
  misc_feature: MA Experiment 108668 PARAMETER Experiment Name: At_2mM_SA_cDNA_P Parameter: Plant Line Value: WS
  misc_feature: MA Experiment 108668 PARAMETER Experiment Name: At_2mM_SA_cDNA_P Parameter: Timepoint (hr) Value: 6
  misc_feature: MA Experiment 108668 PARAMETER Experiment Name: At_2mM_SA_cDNA_P Parameter: Treatment Value: 2mM SA vs. No Treatment
  misc_feature: MA Experiment ID: 20000180 Result: Up-regulated in Transcription
  misc_feature: MA Experiment 20000180 PARAMETER Experiment Name: At_Germinating_Seeds_P Parameter: Age (hr) Value: 24 vs. 0
  misc_feature: MA Experiment 20000180 PARAMETER Experiment Name: At_Germinating_Seeds_P Parameter: Tissue Value: Germinating Seeds
  misc_feature: MA Experiment ID: 20000224 Result: Down-regulated in Transcription
  misc_feature: MA Experiment ID: 20000451 Result: Up-regulated in Transcription
  misc_feature: MA Experiment 20000451 PARAMETER Experiment Name: At_CS6879_Shoots-Roots_P Parameter: Age (day) Value: 14
  misc_feature: MA Experiment 20000451 PARAMETER Experiment Name: At_CS6879_Shoots-Roots_P Parameter: Organism Value: A. thaliana
  misc_feature: MA Experiment 20000451 PARAMETER Experiment Name: At_CS6879_Shoots-Roots_P Parameter: Plant Line Value: CS6879 vs. WS
  misc_feature: MA Experiment 20000451 PARAMETER Experiment Name: At_CS6879_Shoots-Roots_P Parameter: Tissue Value: Roots
  misc_feature: MA Experiment ID: 20000573 Result: Down-regulated in Transcription
  misc_feature: MA Experiment 20000573 PARAMETER Experiment Name: At_100uM_ABA_Mutants__P Parameter: Organism Value: A. thaliana
  misc_feature: MA Experiment 20000573 PARAMETER Experiment Name: At_100uM_ABA_Mutants__P Parameter: Plant Line Value: CS22 vs. Ler wt
  misc_feature: MA Experiment 20000573 PARAMETER Experiment Name: At_100uM_ABA_Mutants__P Parameter: Timepoint (hr) Value: N/A
  misc_feature: MA Experiment 20000573 PARAMETER Experiment Name: At_100uM_ABA_Mutants__P Parameter: Tissue Value: Whole Plant
  misc_feature: MA Experiment 20000573 PARAMETER Experiment Name: At_100uM_ABA_Mutants__P Parameter: Treatment Value: None
  misc_feature: MA Experiment ID: 20000574 Result: Down-regulated in Transcription
  misc_feature: MA Experiment 20000574 PARAMETER Experiment Name: At_100uM_ABA_Mutants__P Parameter: Organism Value: A. thaliana
  misc_feature: MA Experiment 20000574 PARAMETER Experiment Name: At_100uM_ABA_Mutants__P Parameter: Plant Line Value: CS23 vs. Ler wt
  misc_feature: MA Experiment 20000574 PARAMETER Experiment Name: At_100uM_ABA_Mutants__P Parameter: Timepoint (hr) Value: N/A
  misc_feature: MA Experiment 20000574 PARAMETER Experiment Name: At_100uM_ABA_Mutants__P Parameter: Tissue Value: Whole Plant
  misc_feature: MA Experiment 20000574 PARAMETER Experiment Name: At_100uM_ABA_Mutants__P Parameter: Treatment Value: None
  misc_feature: MA Experiment ID: 20000794 Result: Down-regulated in Transcription
  misc_feature: MA Experiment 20000794 PARAMETER Experiment Name: At_Petals_P Parameter: Age (day) Value: 23-25 days
  misc_feature: MA Experiment 20000794 PARAMETER Experiment Name: At_Petals_P Parameter: Plant Line Value: WS
  misc_feature: MA Experiment 20000794 PARAMETER Experiment Name: At_Petals_P Parameter: Tissue Value: Petals vs. Whole plant
  misc_feature: MA Experiment ID: 20001451 Result: Down-regulated in Transcription
  misc_feature: MA Experiment 20001451 PARAMETER Experiment Name: At_Far-red-induction_P Parameter: Age (day) Value: 7
  misc_feature: MA Experiment 20001451 PARAMETER Experiment Name: At_Far-red-induction_P Parameter: Light Value: Far-red vs. White
  misc_feature: MA Experiment 20001451 PARAMETER Experiment Name: At_Far-red-induction_P Parameter: Organism Value: A. thaliana
  misc_feature: MA Experiment 20001451 PARAMETER Experiment Name: At_Far-red-induction_P Parameter: Plant Line Value: Columbia
  misc_feature: MA Experiment 20001451 PARAMETER Experiment Name: At_Far-red-induction_P Parameter: Timepoint (hr) Value: 24
  misc_feature: MA Experiment 20001451 PARAMETER Experiment Name: At_Far-red-induction_P Parameter: Tissue Value: Whole Plant
  misc_feature: MA Experiment ID: 20001906 Result: Down-regulated in Transcription
  misc_feature: MA Experiment 20001906 PARAMETER Experiment Name: At_Drought_Reproduction_P Parameter: Age (day) Value: 35
  misc_feature: MA Experiment 20001906 PARAMETER Experiment Name: At_Drought_Reproduction_P Parameter: Organism Value: A. thaliana
  misc_feature: MA Experiment 20001906 PARAMETER Experiment Name: At_Drought_Reproduction_P Parameter: Plant Line Value: WS
  misc_feature: MA Experiment 20001906 PARAMETER Experiment Name: At_Drought_Reproduction_P Parameter: Timepoint (day) Value: 5
  misc_feature: MA Experiment 20001906 PARAMETER Experiment Name: At_Drought_Reproduction_P Parameter: Tissue Value: Siliques
  misc_feature: MA Experiment 20001906 PARAMETER Experiment Name: At_Drought_Reproduction_P Parameter: Treatment Value: Drought vs. No Drought
ctctctcgtttctcaactaccgtctctctgcttcttctgttcccaaaaccggaaactttacttcgtggaattttcccttgtttctgaaatggaagacacaacatttaccaaagtgttcgttggaggattagcttgggaaacacacaaagtctctctcaggaattactttgaacagtttggtgacattgttgaagctgtcgttatcactgataaatctagtggtagatctaaaggctatggctttgttactttttgtgatccggaagcagctcagaaagcttgtgtagatccagctcctgttattgatggaagaagagctaattgtaatcttgctgcttttggtgttcagagatccaaaccttcttctcctattcatggacatgtaggaggaagaggcatgaaggtgactagccctttcaagacacactttgggaccgcggctactgctattccttccccacttccattctcccactacacacttccttacactaatccttttgggttctcttcatactcaatggattacaattaccccacgagctattacaatgtttatggaggggcaactgctcagcatccaatgtatggaagcggaccaatgactggtgtagcagcagcaccagcagcagggttctacccatatctccagtttgctgaaggaaatggacctgtcactggttatgctcccctccactaccccaaccacatgtttcactattctgctcccgggggaaactacccgcatcacaatggttcaccagtgtctcttgcaccttcaccagtcataccatcagtttgctttgcagttccacaggcttgaccatgaaggctcgtggttcatagttccatgatgctatgtaggggaccaattcatttaaatccttaaggcaaagctttgtttactactttcatccacatgcctctgaagtttcacaagacctgtggcctaaccatggttgcccttttccctttatgcttctaacccattagacaaagaagcccataatttggagtttgggcgtctttgcaagttctagttaagtctcacataggggtttaactaggaccatcttcatacacattactcatcttttcattttattcattgcattacctgctttctgaacgaaggtttcgttcaagatagcttgttcgagctgtagaagtaaacagttaccgtcttttgcacagtgcctcgcaaaggcaagcaattttgtagaaaaacttaaaaacttaggattggctgatcaacaagaaaggaaataaggatttcccgggaaaggcacaagaagtgaattgccaccacctggaagtgttgaagtagtgtgtgcaaaggtgtgcacactacttcacgctatatccattttaatgtgcagtcttaggattattagatctaggaccatgttgttacacattgtcttgtagtagaacgctagaacataaacttcctttgaggataaaggaattgctaacacatgtatattctcggtggctaagctttggagttatagccacacttgagctaacttagattaagatcatttttaagattcaaaatttagattgctcatcatatcttgaaccaaccccactaatggattgtggggttcttgcatttgcatgtatttttgcctcttgggagatattttggttccctttaggttcttctcataacaatcaaccaaaccagttgaccaaccatggttaggaatttcaggtgagaggtattcatcacctctttatctctcttttgtacttctttcctctatttcttcaagactaaaaactctctttttatgtaatttgttgttatatcttgtaagctgtgtgtttctgattctatgtaagaaaactaaaagctttcagtttccatcctcggtggttggaaaatgaaactgtgattgcaatattttactttgatctgatatataatcctcttgtatgaggttatgacaa

SEQ ID NO: 107026 - protein, 273 aa, Arabidopsis thaliana
  peptide (1)..(273): Ceres Seq. ID no. 13621188
  misc_feature (38)..(93): Pfam Name: RNA recognition motif. (a.k.a. RRM, RBD, or RNP domain) Pfam Description: RNA recognition motif. (a.k.a. RRM, RBD, or RNP
  misc_feature (30)..(273): Homolog of NCBI NO: 14532532 NR Description: At1g33470/F10C21_14 [Arabidopsis thaliana]
  misc_feature (133)..(273): Homolog of NCBI NO: 30692876 NR Description: RRM-containing protein -related [Arabidopsis
  misc_feature (25)..(261): Homolog of NCBI NO: 34907334 NR Description: P0698A10.29 [Oryza sativa (japonica
  misc_feature (32)..(254): Homolog of NCBI NO: 18395177 NR Description: RNA recognition motif (RRM)-containing protein thaliana] >gi|13605871|gb|AAK32921.1|AF367334_1 [Arabidopsis thaliana] >gi|16323282|gb|AAL15396.1|
  misc_feature (32)..(242): Homolog of NCBI NO: 34905758 NR Description: similar to RNA-binding protein [Oryza sativa
  misc_feature (30)..(126): Homolog of NCBI NO: 15217552 NR Description: RNA recognition motif (RRM)-containing protein
  misc_feature (32)..(214): Homolog of NCBI NO: 25518372 NR Description: hypothetical protein F19G10.13 - Arabidopsis
  misc_feature (26)..(265): Homolog of NCBI NO: 15010636 NR Description: At1g20880/F9H16_14 [Arabidopsis thaliana]
  misc_feature (26)..(265): Homolog of NCBI NO: 18394923 NR Description: RNA recognition motif (RRM)-containing protein
  misc_feature (26)..(265): Homolog of NCBI NO: 23505939 NR Description: At1g20880/F9H16_14 [Arabidopsis thaliana]
SLVSQLPSLCFFCSQNRKLYFVEFSLVSEMEDTTFTKVFVGGLAWETHKVSLRNYFEQFGDIVEAVVITDKSSGRSKGYGFVTFCDPEAAQKACVDPAPVIDGRRANCNLAAFGVQRSKPSSPIHGHVGGRGMKVTSPFKTHFGTAATAIPSPLPFSHYTLPYTNPFGFSSYSMDYNYPTSYYNVYGGATAQHPMYGSGPMTGVAAAPAAGFYPYLQFAEGNGPVTGYAPLHYPNHMFHYSAPGGNYPHHNGSPVSLAPSPVIPSVCFAVPQA

SEQ ID NO: 107027 - protein, 244 aa, Arabidopsis thaliana
  peptide (1)..(244): Ceres Seq. ID no. 13621189
  misc_feature (9)..(64): Pfam Name: RNA recognition motif. (a.k.a. RRM, RBD, or RNP domain) Pfam Description: RNA recognition motif. (a.k.a. RRM, RBD, or RNP
  misc_feature (1)..(244): Homolog of NCBI NO: 14532532 NR Description: At1g33470/F10C21_14 [Arabidopsis thaliana]
  misc_feature (104)..(244): Homolog of NCBI NO: 30692876 NR Description: RRM-containing protein -related [Arabidopsis
  misc_feature (1)..(232): Homolog of NCBI NO: 34907334 NR Description: P0698A10.29 [Oryza sativa (japonica
  misc_feature (3)..(225): Homolog of NCBI NO: 18395177 NR Description: RNA recognition motif (RRM)-containing protein thaliana] >gi|13605871|gb|AAK32921.1|AF367334_1 [Arabidopsis thaliana] >gi|16323282|gb|AAL15396.1|
  misc_feature (3)..(213): Homolog of NCBI NO: 34905758 NR Description: similar to RNA-binding protein [Oryza sativa
  misc_feature (1)..(97): Homolog of NCBI NO: 15217552 NR Description: RNA recognition motif (RRM)-containing protein
  misc_feature (3)..(185): Homolog of NCBI NO: 25518372 NR Description: hypothetical protein F19G10.13 - Arabidopsis
  misc_feature (1)..(236): Homolog of NCBI NO: 15010636 NR Description: At1g20880/F9H16_14 [Arabidopsis thaliana]
  misc_feature (1)..(236): Homolog of NCBI NO: 18394923 NR Description: RNA recognition motif (RRM)-containing protein
  misc_feature (1)..(236): Homolog of NCBI NO: 23505939 NR Description: At1g20880/F9H16_14 [Arabidopsis thaliana]
MEDTTFTKVFVGGLAWETHKVSLRNYFEQFGDIVEAVVITDKSSGRSKGYGFVTFCDPEAAQKACVDPAPVIDGRRANCNLAAFGVQRSKPSSPIHGHVGGRGMKVTSPFKTHFGTAATAIPSPLPFSHYTLPYTNPFGFSSYSMDYNYPTSYYNVYGGATAQHPMYGSGPMTGVAAAPAAGFYPYLQFAEGNGPVTGYAPLHYPNHMFHYSAPGGNYPHHNGSPVSLAPSPVIPSVCFAVPQA

SEQ ID NO: 107028 - protein, 141 aa, Arabidopsis thaliana
  peptide (1)..(141): Ceres Seq. ID no. 13621190
  misc_feature (1)..(141): Homolog of NCBI NO: 14532532 NR Description: At1g33470/F10C21_14 [Arabidopsis thaliana]
  misc_feature (1)..(141): Homolog of NCBI NO: 30692876 NR Description: RRM-containing protein -related [Arabidopsis
  misc_feature (1)..(129): Homolog of NCBI NO: 34907334 NR Description: P0698A10.29 [Oryza sativa (japonica
  misc_feature (1)..(122): Homolog of NCBI NO: 18395177 NR Description: RNA recognition motif (RRM)-containing protein thaliana] >gi|13605871|gb|AAK32921.1|AF367334_1 [Arabidopsis thaliana] >gi|16323282|gb|AAL15396.1|
  misc_feature (1)..(110): Homolog of NCBI NO: 34905758 NR Description: similar to RNA-binding protein [Oryza sativa
  misc_feature (1)..(82): Homolog of NCBI NO: 25518372 NR Description: hypothetical protein F19G10.13 - Arabidopsis
  misc_feature (1)..(133): Homolog of NCBI NO: 15010636 NR Description: At1g20880/F9H16_14 [Arabidopsis thaliana]
  misc_feature (1)..(133): Homolog of NCBI NO: 18394923 NR Description: RNA recognition motif (RRM)-containing protein
  misc_feature (1)..(133): Homolog of NCBI NO: 23505939 NR Description: At1g20880/F9H16_14 [Arabidopsis thaliana]
  misc_feature (1)..(141): Homolog of NCBI NO: 22330665 NR Description: RNA recognition motif (RRM)-containing protein
MKVTSPFKTHFGTAATAIPSPLPFSHYTLPYTNPFGFSSYSMDYNYPTSYYNVYGGATAQHPMYGSGPMTGVAAAPAAGFYPYLQFAEGNGPVTGYAPLHYPNHMFHYSAPGGNYPHHNGSPVSLAPSPVIPSVCFAVPQA

SEQ ID NO: 107029 - DNA, 2724 bp, Arabidopsis thaliana
  misc_feature (1)..(2724): Ceres Seq. ID no. 13621191
  misc_feature: MA Experiment ID: 20000346 Result: Up-regulated in Transcription
  misc_feature: MA Experiment 20000346 PARAMETER Experiment Name: At_2mM_SA_Sub_P Parameter: Age (day) Value: 14
  misc_feature: MA Experiment 20000346 PARAMETER Experiment Name: At_2mM_SA_Sub_P Parameter: Organism Value: A. thaliana
  misc_feature: MA Experiment 20000346 PARAMETER Experiment Name: At_2mM_SA_Sub_P Parameter: Plant Line Value: WS
  misc_feature: MA Experiment 20000346 PARAMETER Experiment Name: At_2mM_SA_Sub_P Parameter: Timepoint (hr) Value: 1
  misc_feature: MA Experiment 20000346 PARAMETER Experiment Name: At_2mM_SA_Sub_P Parameter: Tissue Value: Aerial
  misc_feature: MA Experiment 20000346 PARAMETER Experiment Name: At_2mM_SA_Sub_P Parameter: Treatment Value: 2mM SA vs. No Treatment
  misc_feature: MA Experiment ID: 20000347 Result: Up-regulated in Transcription
  misc_feature: MA Experiment 20000347 PARAMETER Experiment Name: At_2mM_SA_Sub_P Parameter: Age (day) Value: 14
  misc_feature: MA Experiment 20000347 PARAMETER Experiment Name: At_2mM_SA_Sub_P Parameter: Organism Value: A. thaliana
  misc_feature: MA Experiment 20000347 PARAMETER Experiment Name: At_2mM_SA_Sub_P Parameter: Plant Line Value: WS
  misc_feature: MA Experiment 20000347 PARAMETER Experiment Name: At_2mM_SA_Sub_P Parameter: Timepoint (hr) Value: 6
  misc_feature: MA Experiment 20000347 PARAMETER Experiment Name: At_2mM_SA_Sub_P Parameter: Tissue Value: Aerial
  misc_feature: MA Experiment 20000347 PARAMETER Experiment Name: At_2mM_SA_Sub_P Parameter: Treatment Value: 2mM SA vs. No Treatment
  misc_feature (2459)..(2459): n is a, c, t, g, unknown, or other
  misc_feature (2669)..(2669): n is a, c, t, g, unknown, or other
atgaattcactctccttcactctcttcatattttctgtcattacctttctacaatgtttaagttcaaccggagctgccacgtgtcatcctgatgacgaggcgggtcttttagctttcaaatccggtataacacaagatccttcgggcatgctcagctcttggaagaagggtacttcttgctgctcgtggaaaggtatcatttgctttaacagtgaccgcgtcaccatgcttgaactagtaggatttcccaaaaaacccgaacgttccctctccggcactctctcaccgtcgctagccaaactccagcacctaagcgtgattagcttaggaggtcatgtgaacatcactggatcttttcctaagttccttctccaattaccaaagctaaggtacgttgacatccaaaataaccgtctctccggtccacttccggctaacatcggcgtgctaagcttgttggaagaaatctttcttcaaggaaataagttcaccggtcccatcccgaactcgatatcgaatctaactcgattatcttatctcatttttggcggtaatctcctaaccgggactatacccttagggattgctaatctcaagctcatgcagaatctgcaactcggcgacaaccgcctctctggcaccatcccggatattttcgaatccatgaagttgctcaaatttctcgatctctccagcaacgaattctacgggaaacttcctctatcgattgctacactggcaccgacactcctggccctccaagtgagccagaacaatctctctggggcgatcccaaactatatatcaagattcaacaagcttgaaaagttagatctctccaagaaccggttctcgggggttgtgcctcaaggtttcgtcaatctcaccaatattaacaatcttgatctctctcacaatcttctaaccggtcaatttcctgacttgaccgtcaacactatcgaatatcttgatctctcttacaaccaatttcaactagaaacgattccacaatgggtgaccttgttgccgagcgtcttcttgttgaagctagcaaaatgcgggatcaagatgagcttagatgattggaagccagcggaaccgttgtactaccattacattgatttgtcgaaaaacgagatctcagggagtctagaaaggttcttgaacgagacgaggtatctgcttgagtttcgggcggcggagaacaaacttcgattcgatatggggaacctaacgtttccgaggacactaaaaactttggatctgtcaaggaacttggtatttggtaaggtgcctgtcacggtggctggtctacaaagactaaacttaagtcaaaaccatctttgtggagaacttcctacgacaaagttcccggctagcgccttcgccggtgctattatctttctccggtgttttcgttccaccggagctgccacgtgtgatcctgatgacgaagcgggtcttttaggtttcaaatcgggtataaccaaagatccttcgggcattctcagctcatggaagaaaggtactgactgctgcttttggagcggtgtcttttgcgtcaacaacgaccgcgtcacacaactaagtgtggatggagacttttctcttgacggaaactctccctccggcactatctcgccgatgctggccaaacttcaacacctcgagaggattcttctcacctctcttcgaaagattactggtccttttcctcaattcattttccgattaccaaagctaaattacataaacatccaaggttgccttctctctggtccccttccagccaacatcggcgagctaagtcaattgaaaactttagttatcgacggaaacatgttcacgggtcatattccaagttcgatagccaatttgactcggttaacttggcttaacctcggcaacaaccgcctctctggcaccattccaaacatatttaaatccatgaaagagctcaattctcttgatctctcccgcaacggatttttcgggagacttcctccgtcgattgcttcgcttgcaccaactctctattacctcgatctgagccagaacaatctctcggggacgatcccaaactatttatcaaggtttgaggcgctctccacattggtactctcgaagaataagtactcgggggtcgtgccaatgagtttcaccaatctgatcaacattaccaatcttgatctctcccacaatcttctaactggtccattccctgtattgaaaagcattaacggcattgaatctctggatttgtcgtacaacaagtttcacctgaaaacgattccaaaatggatgatatcgtcaccatccatctactcattgaagttggcaaaatgtgggctgaagataagcttagatgattggaagctagcagggacctactactatgattccatcgatctgtctgaaaacgagatctcagggagtccggctaagttcctcagccagangaagtatctgatggagttccgagcggcagggaacaaactccgattcgatttggggaagctgacgtttgtgaggactcttgaaaccttggatttgtcaaggaacttgatattcgggagagtgctggcaacatttgctggactgaagacaatgaacgtgagtcaaaaccatctttgcggaaaacttccggtgacaaagttcccggccagtgngtttgcgggtaacgactgtctttgtggctctccactttctccttgtaaagtgtag

SEQ ID NO: 107030 - protein, 907 aa, Arabidopsis thaliana
  peptide (1)..(907): Ceres Seq. ID no. 13621192
  misc_feature (1)..(464): Homolog of NCBI NO: 21536600 NR Description: putative disease resistance protein [Arabidopsis
  misc_feature (1)..(464): Homolog of NCBI NO: 18398912 NR Description: disease resistance protein-related (LRR)
  misc_feature (1)..(464): Homolog of NCBI NO: 25518158 NR Description: Hypothetical 55.6 kDa protein - Arabidopsis >gi|10998936|gb|AAG26075.1|AC069299_1 hypothetical protein
  misc_feature (1)..(464): Homolog of NCBI NO: 15225296 NR Description: disease resistance protien-related (LRR) thaliana] >gi|7487889|pir||T00971 probable disease resistance
  misc_feature (1)..(464): Homolog of NCBI NO: 15217593 NR Description: leucine rich repeat protein family [Arabidopsis
  misc_feature (418)..(906): Homolog of NCBI NO: 25518387 NR Description: hypothetical protein F14M2.19 [imported] - thaliana >gi|9665100|gb|AAF97291.1|AC010164_13 Hypothetical
  misc_feature (457)..(906): Homolog of NCBI NO: 15217610 NR Description: leucine rich repeat protein family [Arabidopsis
  misc_feature (514)..(906): Homolog of NCBI NO: 21536600 NR Description: putative disease resistance protein [Arabidopsis
  misc_feature (514)..(906): Homolog of NCBI NO: 18398912 NR Description: disease resistance protein-related (LRR)
  misc_feature (514)..(906): Homolog of NCBI NO: 25518158 NR Description: Hypothetical 55.6 kDa protein - Arabidopsis >gi|10998936|gb|AAG26075.1|AC069299_1 hypothetical protein
  misc_feature (820)..(820): Xaa is any aa, unknown or other
  misc_feature (890)..(890): Xaa is any aa, unknown or other
MNSLSFTLFIFSVITFLQCLSSTGAATCHPDDEAGLLAFKSGITQDPSGMLSSWKKGTSCCSWKGIICFNSDRVTMLELVGFPKKPERSLSGTLSPSLAKLQHLSVISLGGHVNITGSFPKFLLQLPKLRYVDIQNNRLSGPLPANIGVLSLLEEIFLQGNKFTGPIPNSISNLTRLSYLIFGGNLLTGTIPLGIANLKLMQNLQLGDNRLSGTIPDIFESMKLLKFLDLSSNEFYGKLPLSIATLAPTLLALQVSQNNLSGAIPNYISRFNKLEKLDLSKNRFSGVVPQGFVNLTNINNLDLSHNLLTGQFPDLTVNTIEYLDLSYNQFQLETIPQWVTLLPSVFLLKLAKCGIKMSLDDWKPAEPLYYHYIDLSKNEISGSLERFLNETRYLLEFRAAENKLRFDMGNLTFPRTLKTLDLSRNLVFGKVPVTVAGLQRLNLSQNHLCGELPTTKFPASAFAGAIIFLRCFRSTGAATCDPDDEAGLLGFKSGITKDPSGILSSWKKGTDCCFWSGVFCVNNDRVTQLSVDGDFSLDGNSPSGTISPMLAKLQHLERILLTSLRKITGPFPQFIFRLPKLNYINIQGCLLSGPLPANIGELSQLKTLVIDGNMFTGHIPSSIANLTRLTWLNLGNNRLSGTIPNIFKSMKELNSLDLSRNGFFGRLPPSIASLAPTLYYLDLSQNNLSGTIPNYLSRFEALSTLVLSKNKYSGVVPMSFTNLINITNLDLSHNLLTGPFPVLKSINGIESLDLSYNKFHLKTIPKWMISSPSIYSLKLAKCGLKISLDDWKLAGTYYYDSIDLSENEISGSPAKFLSQXKYLMEFRAAGNKLRFDLGKLTFVRTLETLDLSRNLIFGRVLATFAGLKTMNVSQNHLCGKLPVTKFPASXFAGNDCLCGSPLSPCKV

SEQ ID NO: 107031 - protein, 858 aa, Arabidopsis thaliana
  peptide (1)..(858): Ceres Seq. ID no. 13621193
  misc_feature (1)..(415): Homolog of NCBI NO: 21536600 NR Description: putative disease resistance protein [Arabidopsis
  misc_feature (1)..(415): Homolog of NCBI NO: 18398912 NR Description: disease resistance protein-related (LRR)
  misc_feature (1)..(415): Homolog of NCBI NO: 25518158 NR Description: Hypothetical 55.6 kDa protein - Arabidopsis >gi|10998936|gb|AAG26075.1|AC069299_1 hypothetical protein
  misc_feature (1)..(415): Homolog of NCBI NO: 15225296 NR Description: disease resistance protien-related (LRR) thaliana] >gi|7487889|pir||T00971 probable disease resistance
  misc_feature (1)..(415): Homolog of NCBI NO: 15217593 NR Description: leucine rich repeat protein family [Arabidopsis
  misc_feature (369)..(857): Homolog of NCBI NO: 25518387 NR Description: hypothetical protein F14M2.19 [imported] - thaliana >gi|9665100|gb|AAF97291.1|AC010164_13 Hypothetical
  misc_feature (408)..(857): Homolog of NCBI NO: 15217610 NR Description: leucine rich repeat protein family [Arabidopsis
  misc_feature (465)..(857): Homolog of NCBI NO: 21536600 NR Description: putative disease resistance protein [Arabidopsis
  misc_feature (465)..(857): Homolog of NCBI NO: 18398912 NR Description: disease resistance protein-related (LRR)
  misc_feature (465)..(857): Homolog of NCBI NO: 25518158 NR Description: Hypothetical 55.6 kDa protein - Arabidopsis >gi|10998936|gb|AAG26075.1|AC069299_1 hypothetical protein
  misc_feature (771)..(771): Xaa is any aa, unknown or other
  misc_feature (841)..(841): Xaa is any aa, unknown or other
MLSSWKKGTSCCSWKGIICFNSDRVTMLELVGFPKKPERSLSGTLSPSLAKLQHLSVISLGGHVNITGSFPKFLLQLPKLRYVDIQNNRLSGPLPANIGVLSLLEEIFLQGNKFTGPIPNSISNLTRLSYLIFGGNLLTGTIPLGIANLKLMQNLQLGDNRLSGTIPDIFESMKLLKFLDLSSNEFYGKLPLSIATLAPTLLALQVSQNNLSGAIPNYISRFNKLEKLDLSKNRFSGVVPQGFVNLTNINNLDLSHNLLTGQFPDLTVNTIEYLDLSYNQFQLETIPQWVTLLPSVFLLKLAKCGIKMSLDDWKPAEPLYYHYIDLSKNEISGSLERFLNETRYLLEFRAAENKLRFDMGNLTFPRTLKTLDLSRNLVFGKVPVTVAGLQRLNLSQNHLCGELPTTKFPASAFAGAIIFLRCFRSTGAATCDPDDEAGLLGFKSGITKDPSGILSSWKKGTDCCFWSGVFCVNNDRVTQLSVDGDFSLDGNSPSGTISPMLAKLQHLERILLTSLRKITGPFPQFIFRLPKLNYINIQGCLLSGPLPANIGELSQLKTLVIDGNMFTGHIPSSIANLTRLTWLNLGNNRLSGTIPNIFKSMKELNSLDLSRNGFFGRLPPSIASLAPTLYYLDLSQNNLSGTIPNYLSRFEALSTLVLSKNKYSGVVPMSFTNLINITNLDLSHNLLTGPFPVLKSINGIESLDLSYNKFHLKTIPKWMISSPSIYSLKLAKCGLKISLDDWKLAGTYYYDSIDLSENEISGSPAKFLSQXKYLMEFRAAGNKLRFDLGKLTFVRTLETLDLSRNLIFGRVLATFAGLKTMNVSQNHLCGKLPVTKFPASXFAGNDCLCGSPLSPCKV

SEQ ID NO: 107032 - protein, 832 aa, Arabidopsis thaliana
  peptide (1)..(832): Ceres Seq. ID no. 13621194
  misc_feature (1)..(389): Homolog of NCBI NO: 21536600 NR Description: putative disease resistance protein [Arabidopsis
  misc_feature (1)..(389): Homolog of NCBI NO: 18398912 NR Description: disease resistance protein-related (LRR)
  misc_feature (1)..(389): Homolog of NCBI NO: 25518158 NR Description: Hypothetical 55.6 kDa protein - Arabidopsis >gi|10998936|gb|AAG26075.1|AC069299_1 hypothetical protein
  misc_feature (1)..(389): Homolog of NCBI NO: 15225296 NR Description: disease resistance protien-related (LRR) thaliana] >gi|7487889|pir||T00971 probable disease resistance
  misc_feature (1)..(389): Homolog of NCBI NO: 15217593 NR Description: leucine rich repeat protein family [Arabidopsis
  misc_feature (343)..(831): Homolog of NCBI NO: 25518387 NR Description: hypothetical protein F14M2.19 [imported] - thaliana >gi|9665100|gb|AAF97291.1|AC010164_13 Hypothetical
  misc_feature (382)..(831): Homolog of NCBI NO: 15217610 NR Description: leucine rich repeat protein family [Arabidopsis
  misc_feature (439)..(831): Homolog of NCBI NO: 21536600 NR Description: putative disease resistance protein [Arabidopsis
  misc_feature (439)..(831): Homolog of NCBI NO: 18398912 NR Description: disease resistance protein-related (LRR)
  misc_feature (439)..(831): Homolog of NCBI NO: 25518158 NR Description: Hypothetical 55.6 kDa protein - Arabidopsis >gi|10998936|gb|AAG26075.1|AC069299_1 hypothetical protein
  misc_feature (745)..(745): Xaa is any aa, unknown or other
  misc_feature (815)..(815): Xaa is any aa, unknown or other
MLELVGFPKKPERSLSGTLSPSLAKLQHLSVISLGGHVNITGSFPKFLLQLPKLRYVDIQNNRLSGPLPANIGVLSLLEEIFLQGNKFTGPIPNSISNLTRLSYLIFGGNLLTGTIPLGIANLKLMQNLQLGDNRLSGTIPDIFESMKLLKFLDLSSNEFYGKLPLSIATLAPTLLALQVSQNNLSGAIPNYISRFNKLEKLDLSKNRFSGVVPQGFVNLTNINNLDLSHNLLTGQFPDLTVNTIEYLDLSYNQFQLETIPQWVTLLPSVFLLKLAKCGIKMSLDDWKPAEPLYYHYIDLSKNEISGSLERFLNETRYLLEFRAAENKLRFDMGNLTFPRTLKTLDLSRNLVFGKVPVTVAGLQRLNLSQNHLCGELPTTKFPASAFAGAIIFLRCFRSTGAATCDPDDEAGLLGFKSGITKDPSGILSSWKKGTDCCFWSGVFCVNNDRVTQLSVDGDFSLDGNSPSGTISPMLAKLQHLERILLTSLRKITGPFPQFIFRLPKLNYINIQGCLLSGPLPANIGELSQLKTLVIDGNMFTGHIPSSIANLTRLTWLNLGNNRLSGTIPNIFKSMKELNSLDLSRNGFFGRLPPSIASLAPTLYYLDLSQNNLSGTIPNYLSRFEALSTLVLSKNKYSGVVPMSFTNLINITNLDLSHNLLTGPFPVLKSINGIESLDLSYNKFHLKTIPKWMISSPSIYSLKLAKCGLKISLDDWKLAGTYYYDSIDLSENEISGSPAKFLSQXKYLMEFRAAGNKLRFDLGKLTFVRTLETLDLSRNLIFGRVLATFAGLKTMNVSQNHLCGKLPVTKFPASXFAGNDCLCGSPLSPCKV

SEQ ID NO: 107033 - DNA, 1609 bp, Arabidopsis thaliana
  misc_feature (1)..(1609): Ceres Seq. ID no. 13621209
  misc_feature: MA Experiment ID: 20000234 Result: Up-regulated in Transcription
  misc_feature: MA Experiment 20000234 PARAMETER Experiment Name: At_Siliques_P Parameter: Age (day) Value: 21
  misc_feature: MA Experiment 20000234 PARAMETER Experiment Name: At_Siliques_P Parameter: Organism Value: A. thaliana
  misc_feature: MA Experiment 20000234 PARAMETER Experiment Name: At_Siliques_P Parameter: Plant Line Value: WS
  misc_feature: MA Experiment 20000234 PARAMETER Experiment Name: At_Siliques_P Parameter: Tissue Value: Less Than 5mm Siliques vs. Whole Plant
  misc_feature: MA Experiment ID: 20000264 Result: Up-regulated in Transcription
  misc_feature: MA Experiment 20000264 PARAMETER Experiment Name: At_Open_Flower_P Parameter: Age (day) Value: 21
  misc_feature: MA Experiment 20000264 PARAMETER Experiment Name: At_Open_Flower_P Parameter: Plant Line Value: WS
  misc_feature: MA Experiment 20000264 PARAMETER Experiment Name: At_Open_Flower_P Parameter: Tissue Value: Open Flower vs. Whole Plant
  misc_feature: MA Experiment ID: 20000265 Result: Up-regulated in Transcription
  misc_feature: MA Experiment 20000265 PARAMETER Experiment Name: At_Open_Flower_P Parameter: Age (day) Value: 21
  misc_feature: MA Experiment 20000265 PARAMETER Experiment Name: At_Open_Flower_P Parameter: Plant Line Value: WS
  misc_feature: MA Experiment 20000265 PARAMETER Experiment Name: At_Open_Flower_P Parameter: Tissue Value: Closed Flower vs. Whole Plant
  misc_feature: MA Experiment ID: 20000286 Result: Up-regulated in Transcription
  misc_feature: MA Experiment 20000286 PARAMETER Experiment Name: At_Open_Flower_P Parameter: Age (day) Value: 21
  misc_feature: MA Experiment 20000286 PARAMETER Experiment Name: At_Open_Flower_P Parameter: Plant Line Value: WS
  misc_feature: MA Experiment 20000286 PARAMETER Experiment Name: At_Open_Flower_P Parameter: Tissue Value: Half Open vs. Whole Plant
  misc_feature: MA Experiment ID: 20000794 Result: Up-regulated in Transcription
  misc_feature: MA Experiment 20000794 PARAMETER Experiment Name: At_Petals_P Parameter: Age (day) Value: 23-25 days
  misc_feature: MA Experiment 20000794 PARAMETER Experiment Name: At_Petals_P Parameter: Plant Line Value: WS
  misc_feature: MA Experiment 20000794 PARAMETER Experiment Name: At_Petals_P Parameter: Tissue Value: Petals vs. Whole plant
  misc_feature: MA Experiment ID: 20001910 Result: Up-regulated in Transcription
  misc_feature: MA Experiment 20001910 PARAMETER Experiment Name: At_Drought_Reproduction_P Parameter: Age (day) Value: 37
  misc_feature: MA Experiment 20001910 PARAMETER Experiment Name: At_Drought_Reproduction_P Parameter: Organism Value: A. thaliana
  misc_feature: MA Experiment 20001910 PARAMETER Experiment Name: At_Drought_Reproduction_P Parameter: Plant Line Value: WS
  misc_feature: MA Experiment 20001910 PARAMETER Experiment Name: At_Drought_Reproduction_P Parameter: Timepoint (day) Value: 7
  misc_feature: MA Experiment 20001910 PARAMETER Experiment Name: At_Drought_Reproduction_P Parameter: Tissue Value: Flowers
  misc_feature: MA Experiment 20001910 PARAMETER Experiment Name: At_Drought_Reproduction_P Parameter: Treatment Value: Drought vs. No Drought
atggtaaaacaacaagattggtccgtgactacttgtgttttgctattcttgtttttggcatcacaaatccattgtaggagcggaatacatgtttcaaaacgtttggaggggtcaaagcaaggagatggtaagtcaggtgatacgagcttcaatgtgcttcgtcgcgtgctttcgccaaaggagaaagatctaatcaagaagctccccggacaaccttccggcgttagttttagacagtatggcggttatgtgcccgtaaacgaaccatccagtcggtttttgtactattattttgtggaagccatcaaacccaatacatctactcctctggtcatctggttcaacggaggaccggcctgctcatctctaggtggggcatttctagagcttggtcccttccgcgtacatagcggcggcagaaaacttttccgcaatccttattcatggaacaacgaggcgaacgtgttgttcttagaatcgcctgtaacgacaggtttctcgtactcgagtaatccaattgatttggaggaattgggggagaaaggggacaaggcaacagcagaggataactacattttcttgatgaattggctagaaaggtttcccgaatataaaggaagagacatttacatcgccggtcagagttacgctggccactatgttccccaacttgctcagatcatcattcaccgtaacaagaaaaccttagtcaacctacgaggaattttgatcggtaatccatcacttctcacatcgatccaggatccatacggctacgaatttatgttaagtcatggtttgatgtcccaacaacaaatggacaattataatcaattctgcctaagagatgacttatatgataatgacaagtgcgcactttcggtaaaaacaatcgatgatgcaaaaaagcacttggacacttacaacatatacgctcctgtgtgtctaaactccacgttgagcaggatatccaagaaatgcaccacagttttggaggttgatccgtgcagtaaggactacttgaaggcttatcttaacagaaaaaaggttcaaaaagcgatacatgccaacaccaccaaattaccgtatgagtggacctcttgcaataacgaactgactgagaattggagcgaaaatgatagagacaccccgatgatacctatcctccacgagctgatgggcgagggtgtccgagtcatgatctacaatggagacgtggacctggagattccatttgcatctacattagccgtggtgaaggagatgaatctaacggttgtaaaggaatttcgtccctggtttacgggaggacagctgggagggttcacagaggattacaaagggaacttaacctttgtaactgtgaaaggagcaggtcatagtgttcctacggaccaacctatacatgctcttaatatctttaccagctttatccgtaacactccactccctcacacagcctgatttctaacttgtaccacctcgattgactgaacaatatacgttggtctataaacttaataagacactttggtccagttattgaatgatctaaagatggttatgatatgttttgtatatgtatataaaccaatttacaatgttgttt

SEQ ID NO: 107034 - protein, 487 aa, Arabidopsis thaliana
  peptide (1)..(487): Ceres Seq. ID no. 13621210
  misc_feature (69)..(480): Pfam Name: Serine carboxypeptidase Pfam Description: Serine carboxypeptidase
  misc_feature (1)..(487): Homolog of NCBI NO: 15231101 NR Description: serine carboxypeptidase family [Arabidopsis
  misc_feature (41)..(487): Homolog of NCBI NO: 28393031 NR Description: putative serine-type carboxypeptidase
  misc_feature (1)..(487): Homolog of NCBI NO: 15231099 NR Description: serine carboxypeptidase family [Arabidopsis
  misc_feature (1)..(486): Homolog of NCBI NO: 15224995 NR Description: serine carboxypeptidase family [Arabidopsis
  misc_feature (1)..(486): Homolog of NCBI NO: 15231103 NR Description: serine carboxypeptidase family [Arabidopsis
  misc_feature (7)..(487): Homolog of NCBI NO: 15229439 NR Description: serine carboxypeptidase, putative [Arabidopsis
  misc_feature (60)..(484): Homolog of NCBI NO: 11967861 NR Description: putative serine carboxypeptidase [Pisum sativum]
  misc_feature (60)..(484): Homolog of NCBI NO: 34899032 NR Description: putative serine carboxypeptidase II-3 precursor
  misc_feature (60)..(484): Homolog of NCBI NO: 1706082 NR Description: Serine carboxypeptidase II-3 precursor (CP-MII.3)
  misc_feature (56)..(478): Homolog of NCBI NO: 34329345 NR Description: putative serine carboxypeptidase [Medicago
MVKQQDWSVTTCVLLFLFLASQIHCRSGIHVSKRLEGSKQGDGKSGDTSFNVLRRVLSPKEKDLIKKLPGQPSGVSFRQYGGYVPVNEPSSRFLYYYFVEAIKPNTSTPLVIWFNGGPACSSLGGAFLELGPFRVHSGGRKLFRNPYSWNNEANVLFLESPVTTGFSYSSNPIDLEELGEKGDKATAEDNYIFLMNWLERFPEYKGRDIYIAGQSYAGHYVPQLAQIIIHRNKKTLVNLRGILIGNPSLLTSIQDPYGYEFMLSHGLMSQQQMDNYNQFCLRDDLYDNDKCALSVKTIDDAKKHLDTYNIYAPVCLNSTLSRISKKCTTVLEVDPCSKDYLKAYLNRKKVQKAIHANTTKLPYEWTSCNNELTENWSENDRDTPMIPILHELMGEGVRVMIYNGDVDLEIPFASTLAVVKEMNLTVVKEFRPWFTGGQLGGFTEDYKGNLTFVTVKGAGHSVPTDQPIHALNIFTSFIRNTPLPHTA

SEQ ID NO: 107035 - protein, 293 aa, Arabidopsis thaliana
  peptide (1)..(293): Ceres Seq. ID no. 13621211
  misc_feature (1)..(286): Pfam Name: Serine carboxypeptidase Pfam Description: Serine carboxypeptidase
  misc_feature (1)..(293): Homolog of NCBI NO: 15231101 NR Description: serine carboxypeptidase family [Arabidopsis
  misc_feature (1)..(293): Homolog of NCBI NO: 28393031 NR Description: putative serine-type carboxypeptidase
  misc_feature (1)..(293): Homolog of NCBI NO: 15231099 NR Description: serine carboxypeptidase family [Arabidopsis
  misc_feature (1)..(292): Homolog of NCBI NO: 15224995 NR Description: serine carboxypeptidase family [Arabidopsis
  misc_feature (1)..(292): Homolog of NCBI NO: 15231103 NR Description: serine carboxypeptidase family [Arabidopsis
  misc_feature (1)..(293): Homolog of NCBI NO: 15229439 NR Description: serine carboxypeptidase, putative [Arabidopsis
  misc_feature (1)..(290): Homolog of NCBI NO: 11967861 NR Description: putative serine carboxypeptidase [Pisum sativum]
  misc_feature (1)..(290): Homolog of NCBI NO: 34899032 NR Description: putative serine carboxypeptidase II-3 precursor
  misc_feature (1)..(290): Homolog of NCBI NO: 1706082 NR Description: Serine carboxypeptidase II-3 precursor (CP-MII.3)
  misc_feature (1)..(284): Homolog of NCBI NO: 34329345 NR Description: putative serine carboxypeptidase [Medicago
MNWLERFPEYKGRDIYIAGQSYAGHYVPQLAQIIIHRNKKTLVNLRGILIGNPSLLTSIQDPYGYEFMLSHGLMSQQQMDNYNQFCLRDDLYDNDKCALSVKTIDDAKKHLDTYNIYAPVCLNSTLSRISKKCTTVLEVDPCSKDYLKAYLNRKKVQKAIHANTTKLPYEWTSCNNELTENWSENDRDTPMIPILHELMGEGVRVMIYNGDVDLEIPFASTLAVVKEMNLTVVKEFRPWFTGGQLGGFTEDYKGNLTFVTVKGAGHSVPTDQPIHALNIFTSFIRNTPLPHTA

SEQ ID NO: 107036 - DNA, 1187 bp, Arabidopsis thaliana
  misc_feature (1)..(1187): Ceres Seq. ID no. 13621224
  misc_feature: MA Experiment ID: 108434 Result: Up-regulated in Transcription
  misc_feature: MA Experiment 108434 PARAMETER Experiment Name: At_Root_Tips_cDNA_P Parameter: Tissue Value: Root Tips
  misc_feature: MA Experiment ID: 108577 Result: Down-regulated in Transcription
  misc_feature: MA Experiment 108577 PARAMETER Experiment Name: At_42deg_Heat_cDNA_P Parameter: Temperature (deg C) Value: 42 vs. 22
  misc_feature: MA Experiment 108577 PARAMETER Experiment Name: At_42deg_Heat_cDNA_P Parameter: Timepoint (hr) Value: 6
  misc_feature: MA Experiment 108577 PARAMETER Experiment Name: At_42deg_Heat_cDNA_P Parameter: Tissue Value: Aerial
  misc_feature: MA Experiment ID: 20000069 Result: Up-regulated in Transcription
  misc_feature: MA Experiment 20000069 PARAMETER Experiment Name: At_100uM_ABA_Mutants_cDNA_P Parameter: Plant Line Value: CS23
  misc_feature: MA Experiment 20000069 PARAMETER Experiment Name: At_100uM_ABA_Mutants_cDNA_P Parameter: Timepoint (hr) Value: 6
  misc_feature: MA Experiment 20000069 PARAMETER Experiment Name: At_100uM_ABA_Mutants_cDNA_P Parameter: Tissue Value: Aerial
  misc_feature: MA Experiment 20000069 PARAMETER Experiment Name: At_100uM_ABA_Mutants_cDNA_P Parameter: Treatment Value: 100uM ABA vs. No Treatment
  misc_feature: MA Experiment ID: 20000071 Result: Up-regulated in Transcription
  misc_feature: MA Experiment 20000071 PARAMETER Experiment Name: At_100uM_ABA_Mutants_cDNA_P Parameter: Plant Line Value: CS8104
  misc_feature: MA Experiment 20000071 PARAMETER Experiment Name: At_100uM_ABA_Mutants_cDNA_P Parameter: Timepoint (hr) Value: 6
  misc_feature: MA Experiment 20000071 PARAMETER Experiment Name: At_100uM_ABA_Mutants_cDNA_P Parameter: Tissue Value: Aerial
  misc_feature: MA Experiment 20000071 PARAMETER Experiment Name: At_100uM_ABA_Mutants_cDNA_P Parameter: Treatment Value: 100uM ABA vs. No Treatment
  misc_feature: MA Experiment ID: 20000089 Result: Up-regulated in Transcription
  misc_feature: MA Experiment ID: 20000180 Result: Down-regulated in Transcription
  misc_feature: MA Experiment 20000180 PARAMETER Experiment Name: At_Germinating_Seeds_P Parameter: Age (hr) Value: 24 vs. 0
  misc_feature: MA Experiment 20000180 PARAMETER Experiment Name: At_Germinating_Seeds_P Parameter: Tissue Value: Germinating Seeds
  misc_feature: MA Experiment ID: 20000184 Result: Down-regulated in Transcription
  misc_feature: MA Experiment 20000184 PARAMETER Experiment Name: At_Shoots__P Parameter: Age (day) Value: 7
  misc_feature: MA Experiment 20000184 PARAMETER Experiment Name: At_Shoots__P Parameter: Tissue Value: Shoots vs. Whole Plant
atctcttcgaggtcggttctagggtttcactacgagaatggacggagatgagctcaccgagcaggaaactgctctttatgaccgtcaaattagggtatggggagctggtgctcaaagaagattgagtaaatctcatgttttggtatctggaattaagggcactgttgctgagttttgtaagaacattgtgttggcaggagtaggtagtgtgactctgttggatgatcgattggttacaacggaagtcttcaacgcaaacttcttgattcttcctgatgaaaatgcttatgtaggcaaaaccgtagctgagatttgttgtgattcacttaaggattttaaccctatggttcatgtttcaatagagaaaggtgatttgtcaacacttggtgttgattttttcgagaagtttgatgttgtggttatcggctacagttctcgtgctactaagaaagcagttaatgaaaagtgtaggaacctagcaaaagatgtagcgttctatacagttgattgtagaggctcatgtggcgaaatatttgtcgaccttcagaattataagtacacaaagcttgatgaaacagtggaatgtgaactaacatttccaagttttgaggaggcagtttcagtaccgtggaaaccgatgccaaggagaacagcaaagctctactttgcaatgagagtgatagaactatttgaggaaactgaaggacgtaaacctggggaatgttcgctgtctgatctcccaagagttttgaaactcaaaaaggaactatgtgaaggaaattcggtcagcgagaatcatattccagatatcctcttggagagactcgtatctaataacacagaattcccaccggcttgtgccatcattggagggattctaggacaggaggtgataaaagttatatcaggcaaaggagagccgttgaagaacttcttctactttgatgcagaggatgggaaaggtgtaatcgaggacctatcccacaagctttaacttccaaacatgaaaggtgctgtgaaacgctgctcttagtaattagttccttgttgaagattgtattggaaattagactttagagtacttagaacttggctccttgtcttttgtatctactaacttggttcgctcctaaagacaatctgtaacccactatttactttaatccatcaatttacacactcctatc

SEQ ID NO: 107037 - protein, 318 aa, Arabidopsis thaliana
  peptide (1)..(318): Ceres Seq. ID no. 13621225
  misc_feature (30)..(168): Pfam Name: ThiF family Pfam Description: ThiF family
  misc_feature (1)..(318): Homolog of NCBI NO: 30695912 NR Description: SUMO activating enzyme 1b (SAE1b) [Arabidopsis
  misc_feature (1)..(318): Homolog of NCBI NO: 18423184 NR Description: SUMO activating enzyme 1b (SAE1b) [Arabidopsis >gi|30695915|ref|NP_568732.2| SUMO activating enzyme 1b (SAE1b) thaliana] >gi|8777391|dbj|BAA96981.1| ubiquitin activating enzyme
  misc_feature (1)..(318): Homolog of NCBI NO: 22652852 NR Description: SUMO activating enzyme 1b [Arabidopsis thaliana]
  misc_feature (1)..(318): Homolog of NCBI NO: 21554965 NR Description: ubiquitin activating enzyme [Arabidopsis thaliana]
  misc_feature (1)..(315): Homolog of NCBI NO: 18416454 NR Description: SUMO activating enzyme, putative [Arabidopsis
  misc_feature (1)..(315): Homolog of NCBI NO: 7488411 NR Description: ubiquitin-activating enzyme homolog F13M23.80 -
  misc_feature (3)..(315): Homolog of NCBI NO: 3647283 NR Description: ubiquitin activating enzyme [Lycopersicon
  misc_feature (86)..(317): Homolog of NCBI NO: 25494393 NR Description: probable ubiquitin activating enzyme 2 [imported] Picea mariana (fragment) >gi|2982309|gb|AAC32140.1| probable
  misc_feature (3)..(176): Homolog of NCBI NO: 9790247 NR Description: ubiquitin-like 1 (sentrin) activating enzyme
  misc_feature (173)..(314): Homolog of NCBI NO: 9790247 NR Description: ubiquitin-like 1 (sentrin) activating enzyme
MDGDELTEQETALYDRQIRVWGAGAQRRLSKSHVLVSGIKGTVAEFCKNIVLAGVGSVTLLDDRLVTTEVFNANFLILPDENAYVGKTVAEICCDSLKDFNPMVHVSIEKGDLSTLGVDFFEKFDVVVIGYSSRATKKAVNEKCRNLAKDVAFYTVDCRGSCGEIFVDLQNYKYTKLDETVECELTFPSFEEAVSVPWKPMPRRTAKLYFAMRVIELFEETEGRKPGECSLSDLPRVLKLKKELCEGNSVSENHIPDILLERLVSNNTEFPPACAIIGGILGQEVIKVISGKGEPLKNFFYFDAEDGKGVIEDLSHKL

SEQ ID NO: 107038 - protein, 216 aa, Arabidopsis thaliana
  peptide (1)..(216): Ceres Seq. ID no. 13621226
  misc_feature (1)..(66): Pfam Name: ThiF family Pfam Description: ThiF family
  misc_feature (1)..(216): Homolog of NCBI NO: 30695912 NR Description: SUMO activating enzyme 1b (SAE1b) [Arabidopsis
  misc_feature (1)..(216): Homolog of NCBI NO: 18423184 NR Description: SUMO activating enzyme 1b (SAE1b) [Arabidopsis >gi|30695915|ref|NP_568732.2| SUMO activating enzyme 1b (SAE1b) thaliana] >gi|8777391|dbj|BAA96981.1| ubiquitin activating enzyme
  misc_feature (1)..(216): Homolog of NCBI NO: 22652852 NR Description: SUMO activating enzyme 1b [Arabidopsis thaliana]
  misc_feature (1)..(216): Homolog of NCBI NO: 21554965 NR Description: ubiquitin activating enzyme [Arabidopsis thaliana]
  misc_feature (1)..(213): Homolog of NCBI NO: 18416454 NR Description: SUMO activating enzyme, putative [Arabidopsis
  misc_feature (1)..(213): Homolog of NCBI NO: 7488411 NR Description: ubiquitin-activating enzyme homolog F13M23.80 -
  misc_feature (1)..(213): Homolog of NCBI NO: 3647283 NR Description: ubiquitin activating enzyme [Lycopersicon
  misc_feature (1)..(215): Homolog of NCBI NO: 25494393 NR Description: probable ubiquitin activating enzyme 2 [imported] Picea mariana (fragment) >gi|2982309|gb|AAC32140.1| probable
  misc_feature (1)..(74): Homolog of NCBI NO: 9790247 NR Description: ubiquitin-like 1 (sentrin) activating enzyme
  misc_feature (71)..(212): Homolog of NCBI NO: 9790247 NR Description: ubiquitin-like 1 (sentrin) activating enzyme
MVHVSIEKGDLSTLGVDFFEKFDVVVIGYSSRATKKAVNEKCRNLAKDVAFYTVDCRGSCGEIFVDLQNYKYTKLDETVECELTFPSFEEAVSVPWKPMPRRTAKLYFAMRVIELFEETEGRKPGECSLSDLPRVLKLKKELCEGNSVSENHIPDILLERLVSNNTEFPPACAIIGGILGQEVIKVISGKGEPLKNFFYFDAEDGKGVIEDLSHKL

SEQ ID NO: 107039 - DNA, 1298 bp, Arabidopsis thaliana
  misc_feature (1)..(1298): Ceres Seq. ID no. 13621227
  misc_feature: MA Experiment ID: 20000180 Result: Up-regulated in Transcription
  misc_feature: MA Experiment 20000180 PARAMETER Experiment Name: At_Germinating_Seeds_P Parameter: Age (hr) Value: 24 vs. 0
  misc_feature: MA Experiment 20000180 PARAMETER Experiment Name: At_Germinating_Seeds_P Parameter: Tissue Value: Germinating Seeds
  misc_feature: MA Experiment ID: 20000185 Result: Down-regulated in Transcription
  misc_feature: MA Experiment 20000185 PARAMETER Experiment Name: At_Roots__P Parameter: Age (day) Value: 7 vs. 21
  misc_feature: MA Experiment 20000185 PARAMETER Experiment Name: At_Roots__P Parameter: Organism Value: A. thaliana
  misc_feature: MA Experiment 20000185 PARAMETER Experiment Name: At_Roots__P Parameter: Tissue Value: Roots vs. Whole Plant
  misc_feature: MA Experiment ID: 20000235 Result: Down-regulated in Transcription
  misc_feature: MA Experiment 20000235 PARAMETER Experiment Name: At_Siliques_P Parameter: Age (day) Value: 21
  misc_feature: MA Experiment 20000235 PARAMETER Experiment Name: At_Siliques_P Parameter: Organism Value: A. thaliana
  misc_feature: MA Experiment 20000235 PARAMETER Experiment Name: At_Siliques_P Parameter: Plant Line Value: WS
  misc_feature: MA Experiment 20000235 PARAMETER Experiment Name: At_Siliques_P Parameter: Tissue Value: 5-10mm Siliques vs. Whole Plant
  misc_feature: MA Experiment ID: 20000438 Result: Down-regulated in Transcription
  misc_feature: MA Experiment 20000438 PARAMETER Experiment Name: At_Shoots__P Parameter: Age (day) Value: 14
  misc_feature: MA Experiment 20000438 PARAMETER Experiment Name: At_Shoots__P Parameter: Tissue Value: Shoots vs. Whole Plant
  misc_feature: MA Experiment ID: 20000439 Result: Down-regulated in Transcription
  misc_feature: MA Experiment 20000439 PARAMETER Experiment Name: At_Roots__P Parameter: Age (day) Value: 14 vs. 21
  misc_feature: MA Experiment 20000439 PARAMETER Experiment Name: At_Roots__P Parameter: Organism Value: A. thaliana
  misc_feature: MA Experiment 20000439 PARAMETER Experiment Name: At_Roots__P Parameter: Tissue Value: Roots vs. Whole Plant
  misc_feature: MA Experiment ID: 20001906 Result: Up-regulated in Transcription
  misc_feature: MA Experiment 20001906 PARAMETER Experiment Name: At_Drought_Reproduction_P Parameter: Age (day) Value: 35
  misc_feature: MA Experiment 20001906 PARAMETER Experiment Name: At_Drought_Reproduction_P Parameter: Organism Value: A. thaliana
  misc_feature: MA Experiment 20001906 PARAMETER Experiment Name: At_Drought_Reproduction_P Parameter: Plant Line Value: WS
  misc_feature: MA Experiment 20001906 PARAMETER Experiment Name: At_Drought_Reproduction_P Parameter: Timepoint (day) Value: 5
  misc_feature: MA Experiment 20001906 PARAMETER Experiment Name: At_Drought_Reproduction_P Parameter: Tissue Value: Siliques
  misc_feature: MA Experiment 20001906 PARAMETER Experiment Name: At_Drought_Reproduction_P Parameter: Treatment Value: Drought vs. No Drought
atcttattcacacatctaattaactttaagtaccaaaaatggcgggctacaacctcgaagctatcgaagcggcacctttgaaagacgatctggatattgtgatcccaaccatcagaagcctcgactttctagagcaatggagaccatttttgcaccattaccacctgatcattgtccaagatggagacccttccatcaagatccgagttcccgagggttatgactacgagctctacaaccgtaatgatatcaacaggatccttggtccaagagctaattgtatctcctacaaagatggtggttgtcgctgctttggcttcatggtttctaaaaagaagtatatctacaccattgatgatgattgctttgtggcaaaggatccaagtgggaaagacatcaatgtgatagctcagcacataaagaaccttgaaacaccttcaacaccacactacttcaacactctctatgacccttttagagatggaactgatttcgtcagagggtatcctttcagtctaagggaaggtgtccaaaccgccatatctcatggtctttggctcaacatccctgactatgatgccccaacccaacttgtgaagccccgcgaacgtaacacgaggtatgtggatgcagtaatgacaattccaaaaagagtattgtacccaatgtgtggtatgaatcttgctttcaatagagagcttgttggacctgctatgtactttggacttatgggtgaaggccagcccatttctcggtacgatgacatgtgggctggttgggcagcaaaggtggtgtgtgaccacttgggctttggggtcaagactggtctgccgtatctgtggcacagcaaagccagtaacccattcgtgaacctgaagaaagagcataagggactccactggcaagaagatatggttcctttcttccaaaaccttcgtctctcgaaagaatctgacactgcagctaaatgttatatggaaatttcaaatatgacaaaagaaaagctcactaaagtggatccttactttgagaagttggctgatgcaatggtggtttggattgaggcgtgggaggagcttaacccgccggttaagaagaagcagagcgatggcaaagatgtcaaggccaagtgatgaagataatgagtgatcctattgttgctaatgaataagtatgttgtgagtttatagattatatgatattgtatttattttctccattttggaagtgtgcgttattatgtaataatttggcatgtattaagcgtgattggaagaacaagagaatcttacatttct

SEQ ID NO: 107040 - protein, 364 aa, Arabidopsis thaliana
  peptide (1)..(364): Ceres Seq. ID no. 13621228
  misc_feature (10)..(352): Pfam Name: Reversibly glycosylated polypeptide Pfam Description: Reversibly glycosylated polypeptide
  misc_feature (1)..(364): Homolog of NCBI NO: 15241258 NR Description: UDP-glucose:protein transglucosylase; reversibly
  misc_feature (14)..(352): Homolog of NCBI NO: 15232865 NR Description: reversibly glycosylated polypeptide-1
  misc_feature (14)..(350): Homolog of NCBI NO: 15242351 NR Description: reversibly glycosylated polypeptide-3
  misc_feature (8)..(349): Homolog of NCBI NO: 4158232 NR Description: reversibly glycosylated polypeptide [Triticum
  misc_feature (14)..(352): Homolog of NCBI NO: 2317729 NR Description: reversibly glycosylated polypeptide-1
  misc_feature (6)..(349): Homolog of NCBI NO: 18077708 NR Description: reversibly glycosylated polypeptide [Gossypium
  misc_feature (8)..(349): Homolog of NCBI NO: 4158221 NR Description: reversibly glycosylated polypeptide [Oryza sativa
  misc_feature (8)..(349): Homolog of NCBI NO: 34915190 NR Description: reversibly glycosylated polypeptide [Oryza sativa
  misc_feature (14)..(363): Homolog of NCBI NO: 2317731 NR Description: reversibly glycosylated polypeptide-2
  misc_feature (1)..(350): Homolog of NCBI NO: 34394574 NR Description: putative reversibly glycosylated polypeptide
MAGYNLEAIEAAPLKDDLDIVIPTIRSLDFLEQWRPFLHHYHLIIVQDGDPSIKIRVPEGYDYELYNRNDINRILGPRANCISYKDGGCRCFGFMVSKKKYIYTIDDDCFVAKDPSGKDINVIAQHIKNLETPSTPHYFNTLYDPFRDGTDFVRGYPFSLREGVQTAISHGLWLNIPDYDAPTQLVKPRERNTRYVDAVMTIPKRVLYPMCGMNLAFNRELVGPAMYFGLMGEGQPISRYDDMWAGWAAKVVCDHLGFGVKTGLPYLWHSKASNPFVNLKKEHKGLHWQEDMVPFFQNLRLSKESDTAAKCYMEISNMTKEKLTKVDPYFEKLADAMVVWIEAWEELNPPVKKKQSDGKDVKAK

SEQ ID NO: 107041 - protein, 270 aa, Arabidopsis thaliana
  peptide (1)..(270): Ceres Seq. ID no. 13621229
  misc_feature (1)..(258): Pfam Name: Reversibly glycosylated polypeptide Pfam Description: Reversibly glycosylated polypeptide
  misc_feature (1)..(270): Homolog of NCBI NO: 15241258 NR Description: UDP-glucose:protein transglucosylase; reversibly
  misc_feature (1)..(258): Homolog of NCBI NO: 15232865 NR Description: reversibly glycosylated polypeptide-1
  misc_feature (1)..(256): Homolog of NCBI NO: 15242351 NR Description: reversibly glycosylated polypeptide-3
  misc_feature (1)..(255): Homolog of NCBI NO: 4158232 NR Description: reversibly glycosylated polypeptide [Triticum
  misc_feature (1)..(258): Homolog of NCBI NO: 2317729 NR Description: reversibly glycosylated polypeptide-1
  misc_feature (1)..(255): Homolog of NCBI NO: 18077708 NR Description: reversibly glycosylated polypeptide [Gossypium
  misc_feature (1)..(255): Homolog of NCBI NO: 4158221 NR Description: reversibly glycosylated polypeptide [Oryza sativa
  misc_feature (1)..(255): Homolog of NCBI NO: 34915190 NR Description: reversibly glycosylated polypeptide [Oryza sativa
  misc_feature (1)..(269): Homolog of NCBI NO: 2317731 NR Description: reversibly glycosylated polypeptide-2
  misc_feature (1)..(256): Homolog of NCBI NO: 34394574 NR Description: putative reversibly glycosylated polypeptide
MVSKKKYIYTIDDDCFVAKDPSGKDINVIAQHIKNLETPSTPHYFNTLYDPFRDGTDFVRGYPFSLREGVQTAISHGLWLNIPDYDAPTQLVKPRERNTRYVDAVMTIPKRVLYPMCGMNLAFNRELVGPAMYFGLMGEGQPISRYDDMWAGWAAKVVCDHLGFGVKTGLPYLWHSKASNPFVNLKKEHKGLHWQEDMVPFFQNLRLSKESDTAAKCYMEISNMTKEKLTKVDPYFEKLADAMVVWIEAWEELNPPVKKKQSDGKDVKAK

SEQ ID NO: 107042 - DNA, 3175 bp, Arabidopsis thaliana
  misc_feature (1)..(3175): Ceres Seq. ID no. 13621234
  misc_feature: MA Experiment ID: 20000180 Result: Up-regulated in Transcription
  misc_feature: MA Experiment 20000180 PARAMETER Experiment Name: At_Germinating_Seeds_P Parameter: Age (hr) Value: 24 vs. 0
  misc_feature: MA Experiment 20000180 PARAMETER Experiment Name: At_Germinating_Seeds_P Parameter: Tissue Value: Germinating Seeds
  misc_feature: MA Experiment ID: 20000182 Result: Up-regulated in Transcription
  misc_feature: MA Experiment 20000182 PARAMETER Experiment Name: At_2mM_SA_P Parameter: Age (day) Value: 14
  misc_feature: MA Experiment 20000182 PARAMETER Experiment Name: At_2mM_SA_P Parameter: Organism Value: A. thaliana
  misc_feature: MA Experiment 20000182 PARAMETER Experiment Name: At_2mM_SA_P Parameter: Plant Line Value: WS
  misc_feature: MA Experiment 20000182 PARAMETER Experiment Name: At_2mM_SA_P Parameter: Timepoint (hr) Value: 6
  misc_feature: MA Experiment 20000182 PARAMETER Experiment Name: At_2mM_SA_P Parameter: Tissue Value: Aerial
  misc_feature: MA Experiment 20000182 PARAMETER Experiment Name: At_2mM_SA_P Parameter: Treatment Value: 2mM SA vs. No Treatment
  misc_feature: MA Experiment ID: 20000286 Result: Up-regulated in Transcription
  misc_feature: MA Experiment 20000286 PARAMETER Experiment Name: At_Open_Flower_P Parameter: Age (day) Value: 21
  misc_feature: MA Experiment 20000286 PARAMETER Experiment Name: At_Open_Flower_P Parameter: Plant Line Value: WS
  misc_feature: MA Experiment 20000286 PARAMETER Experiment Name: At_Open_Flower_P Parameter: Tissue Value: Half Open vs. Whole Plant
  misc_feature: MA Experiment ID: 20000496 Result: Down-regulated in Transcription
  misc_feature: MA Experiment 20000496 PARAMETER Experiment Name: At_Guard_Cells_P Parameter: Harvest Date Value: 7/19/2002
  misc_feature: MA Experiment 20000496 PARAMETER Experiment Name: At_Guard_Cells_P Parameter: Organism Value: Canola
  misc_feature: MA Experiment 20000496 PARAMETER Experiment Name: At_Guard_Cells_P Parameter: Tissue Value: Guard Cells vs. Leaves
  misc_feature: MA Experiment ID: 20000527 Result: Down-regulated in Transcription
  misc_feature: MA Experiment 20000527 PARAMETER Experiment Name: At_10percent_PEG_P Parameter: Age (day) Value: 20
  misc_feature: MA Experiment 20000527 PARAMETER Experiment Name: At_10percent_PEG_P Parameter: Organism Value: A. thaliana
  misc_feature: MA Experiment 20000527 PARAMETER Experiment Name: At_10percent_PEG_P Parameter: Plant Line Value: WS
  misc_feature: MA Experiment 20000527 PARAMETER Experiment Name: At_10percent_PEG_P Parameter: Timepoint (day) Value: 20
  misc_feature: MA Experiment 20000527 PARAMETER Experiment Name: At_10percent_PEG_P Parameter: Tissue Value: Whole Plant
  misc_feature: MA Experiment 20000527 PARAMETER Experiment Name: At_10percent_PEG_P Parameter: Treatment Value: 10percent PEG vs. No Treatment
atcgaaaattacttgagagatcgtttactttcagagagaagaataacatcaaatattttcccggaaaaattctctcattttctcgggaaaaatgttgtctctgcgtttacaaaattttcctctaaaaaagtagtgagagattccataagaccataaccagtagacaacaaattcttcatcattttgtgtctcttgtttgagatcccggtgaaatttagcggcgacgagaaaattttcaggtagagtgtgttaaaaaatgtctagagtgagttttgaagtgtcaggaggctatcactctgatgcagaagccggaaacagcggaccaatgagcggtggtcaattaccaccgatctataaaaaaccggggaactccagattcactgctgagaacagtcagagaacacgtacggcaccatacgtggacctcacggtagatgtacaagacgatacagtctctgtacatagcttgaaaatggaaggtggatctagcgttgaagagagtccggagcttactttgctgaaacgaaaccgtcttgagaagaaaacaacggtggtgaaacgtttggcgtctgtttctcacgagcttaagcgtttgacatctgtttctggtggtattggtggaagaaagccgcctcgaccggctaagttagaccggactaaatccgccgcgagtcaagcgttgaagggacttaagttcattagtaaaaccgacggtggcgccggttggtctgccgtggagaagcggtttaatcagattaccgcgactaccggtggactacttcttcggacaaagttcggtgaatgcataggaatgacttcaaaggattttgctttggaactgtttgatgcattggctagaagaaggaatataacaggggaagtgattgatggagatcaactaaaggagttttgggaacaaattaatgatcaaagttttgattctcggcttaagacattctttgacatggtggataaagatgctgatggtagacttacagaagacgaagttagagagattatcagtcttagtgcttctgcgaataatctatctacaatacagaagagagctgatgaatatgcagcattgatcatggaagagttggatccagacaatataggatacatcatgttggagagtcttgagactctgcttttgcaagcggcaacacagtctgtgataacaagtactggggagagaaagaatctgagtcatatgatgagtcagaggcttaagcctacgtttaaccgcaacccgttgaagcgatggtaccgtggtcttagattcttcttgttagacaactggcaaagatgttgggttatagtgctatggttcatagttatggctatactcttcacctacaaatatatccaatacaggcgtagccctgtgtatccagtgatgggtgattgtgtgtgcatggctaaaggtgctgcagaaacagtgaagctgaacatggctttgattctcttacctgtttgtagaaacaccatcacatggcttagaaataagaccaggttgggtcgtgttgtcccatttgatgacaatctcaacttccacaaggttatagcggtggggattatagttggagtaacgatgcacgccggggcacatttagcgtgtgatttcccgcggttactacatgcaactccagaggcatataggcctttaagacagttttttggggatgagcaaccaaagagctactggcattttgtaaactcggtagaaggtataaccggacttgtgatggttttgttaatggcgattgcattcacactagccacgccttggttcagaagagggaagctaaactatcttccaggaccattaaagaaactagctagcttcaatgccttctggtacactcatcatttgtttgtcatagtctacattcttcttgttgctcatggatactacttgtatctcaccagagactggcacaataaaacgacttggatgtatttggtggtaccagtggttctatacgcgtgtgaaaggttgataagagcattcaggtcgagcatcaaggcggtgactattaggaaagtagcagtttatccaggaaacgtgctggcaattcacttgtcaaggcctcaaaacttcaaatacaagagtggtcaatacatgtttgttaactgtgctgctgtttctccatttgaatggcatccattttcaatcacatctgcaccacaagatgattacctaagtgttcacattagagttcttggggattggacacgagctctcaaaggagtcttctctgaggtgtgtaagccaccaccggcaggagttagtggtctgcttagagccgacatgttgcatggtgcaaataatcccgacttcccgaaagtcttgattgatggtccatatggtgcaccagcacaagactacaagaagtacgaggtggttctactagttggtctcgggattggagccacaccaatgatcagtatcgtcaaagacattgttaataacatcaaggccaaggaacaagcccaactaaaccgaatggagaatggaacaagcgaaccacaacgaagtaagaaagagagtttcaggacccgtagagcttacttctattgggttacgcgtgagcaaggctctttcgattggttcaagaacataatgaacgaagtcgcggaacgagatgccaaccgcgtcatcgaaatgcataactattgtacaagtgtctatgaagaaggtgacgctcgttccgcacttatacatatgcttcaatcactaaaccatgcaaagaacggcgtcgacattgtctctggaacaagagttatgtcccatttcgctaaacctaattggagaaatgtttacaagcgtatagctatggatcatcctaacaccaaagttggagtgttttactgtggagcaccagcattgacaaaggagctaaggcatctagctttagatttcacccacaaaacaagcaccagattctccttccacaaagagaatttctaaaggacacacagagttaaaaggcctaaacaaaaaaaataaaagaaagaagcatgagttattatgtttttcgtaattttacttcccttactattttttaaaacattaatatttgtatacatatatatatatatatatatactctcttgactgtagatttctttgtatgcttttttttattgtatgattaatttgttttttctg

SEQ ID NO: 107043 - protein, 905 aa, Arabidopsis thaliana
  peptide (1)..(905): Ceres Seq. ID no. 13621235
  misc_feature (382)..(904): Pfam Name: Ferric reductase like transmembrane component Pfam Description: Ferric reductase like transmembrane component
  misc_feature (53)..(905): Homolog of NCBI NO: 15240778 NR Description: respiratory burst oxidase protein C (NADPH (RbohA) [Arabidopsis thaliana] >gi|11282606|pir||T49878
  misc_feature (129)..(905): Homolog of NCBI NO: 28268678 NR Description: respiratory burst oxidase homolog [Nicotiana
  misc_feature (129)..(905): Homolog of NCBI NO: 17384016 NR Description: NADPH oxidase [Nicotiana tabacum]
  misc_feature (185)..(905): Homolog of NCBI NO: 4585142 NR Description: NADPH oxidase; gp91; phox homolog [Lycopersicon
  misc_feature (129)..(194): Homolog of NCBI NO: 4585142 NR Description: NADPH oxidase; gp91; phox homolog [Lycopersicon
  misc_feature (129)..(905): Homolog of NCBI NO: 16549087 NR Description: respiratory burst oxidase homolog [Solanum
  misc_feature (129)..(905): Homolog of NCBI NO: 18407959 NR Description: respiratory burst oxidase protein F (NADPH (RbohF) (RbohAp108) [Arabidopsis thaliana]
  misc_feature (129)..(905): Homolog of NCBI NO: 3242456 NR Description: Atrboh F [Arabidopsis thaliana]
  misc_feature (129)..(803): Homolog of NCBI NO: 25354658 NR Description: protein F22C12.18 [imported] - Arabidopsis >gi|6692109|gb|AAF24574.1|AC007764_16 F22C12.18 [Arabidopsis
  misc_feature (802)..(905): Homolog of NCBI NO: 25354658 NR Description: protein F22C12.18 [imported] - Arabidopsis >gi|6692109|gb|AAF24574.1|AC007764_16 F22C12.18 [Arabidopsis
MSRVSFEVSGGYHSDAEAGNSGPMSGGQLPPIYKKPGNSRFTAENSQRTRTAPYVDLTVDVQDDTVSVHSLKMEGGSSVEESPELTLLKRNRLEKKTTVVKRLASVSHELKRLTSVSGGIGGRKPPRPAKLDRTKSAASQALKGLKFISKTDGGAGWSAVEKRFNQITATTGGLLLRTKFGECIGMTSKDFALELFDALARRRNITGEVIDGDQLKEFWEQINDQSFDSRLKTFFDMVDKDADGRLTEDEVREIISLSASANNLSTIQKRADEYAALIMEELDPDNIGYIMLESLETLLLQAATQSVITSTGERKNLSHMMSQRLKPTFNRNPLKRWYRGLRFFLLDNWQRCWVIVLWFIVMAILFTYKYIQYRRSPVYPVMGDCVCMAKGAAETVKLNMALILLPVCRNTITWLRNKTRLGRVVPFDDNLNFHKVIAVGIIVGVTMHAGAHLACDFPRLLHATPEAYRPLRQFFGDEQPKSYWHFVNSVEGITGLVMVLLMAIAFTLATPWFRRGKLNYLPGPLKKLASFNAFWYTHHLFVIVYILLVAHGYYLYLTRDWHNKTTWMYLVVPVVLYACERLIRAFRSSIKAVTIRKVAVYPGNVLAIHLSRPQNFKYKSGQYMFVNCAAVSPFEWHPFSITSAPQDDYLSVHIRVLGDWTRALKGVFSEVCKPPPAGVSGLLRADMLHGANNPDFPKVLIDGPYGAPAQDYKKYEVVLLVGLGIGATPMISIVKDIVNNIKAKEQAQLNRMENGTSEPQRSKKESFRTRRAYFYWVTREQGSFDWFKNIMNEVAERDANRVIEMHNYCTSVYEEGDARSALIHMLQSLNHAKNGVDIVSGTRVMSHFAKPNWRNVYKRIAMDHPNTKVGVFYCGAPALTKELRHLALDFTHKTSTRFSFHKENF

SEQ ID NO: 107044 - protein, 882 aa, Arabidopsis thaliana
  peptide (1)..(882): Ceres Seq. ID no. 13621236
  misc_feature (359)..(881): Pfam Name: Ferric reductase like transmembrane component Pfam Description: Ferric reductase like transmembrane component
  misc_feature (30)..(882): Homolog of NCBI NO: 15240778 NR Description: respiratory burst oxidase protein C (NADPH (RbohA) [Arabidopsis thaliana] >gi|11282606|pir||T49878
  misc_feature (106)..(882): Homolog of NCBI NO: 28268678 NR Description: respiratory burst oxidase homolog [Nicotiana
  misc_feature (106)..(882): Homolog of NCBI NO: 17384016 NR Description: NADPH oxidase [Nicotiana tabacum]
  misc_feature (162)..(882): Homolog of NCBI NO: 4585142 NR Description: NADPH oxidase; gp91; phox homolog [Lycopersicon
  misc_feature (106)..(171): Homolog of NCBI NO: 4585142 NR Description: NADPH oxidase; gp91; phox homolog [Lycopersicon
  misc_feature (106)..(882): Homolog of NCBI NO: 16549087 NR Description: respiratory burst oxidase homolog [Solanum
  misc_feature (106)..(882): Homolog of NCBI NO: 18407959 NR Description: respiratory burst oxidase protein F (NADPH (RbohF) (RbohAp108) [Arabidopsis thaliana]
  misc_feature (106)..(882): Homolog of NCBI NO: 3242456 NR Description: Atrboh F [Arabidopsis thaliana]
  misc_feature (106)..(780): Homolog of NCBI NO: 25354658 NR Description: protein F22C12.18 [imported] - Arabidopsis >gi|6692109|gb|AAF24574.1|AC007764_16 F22C12.18 [Arabidopsis
  misc_feature (779)..(882): Homolog of NCBI NO: 25354658 NR Description: protein F22C12.18 [imported] - Arabidopsis >gi|6692109|gb|AAF24574.1|AC007764_16 F22C12.18 [Arabidopsis
MSGGQLPPIYKKPGNSRFTAENSQRTRTAPYVDLTVDVQDDTVSVHSLKMEGGSSVEESPELTLLKRNRLEKKTTVVKRLASVSHELKRLTSVSGGIGGRKPPRPAKLDRTKSAASQALKGLKFISKTDGGAGWSAVEKRFNQITATTGGLLLRTKFGECIGMTSKDFALELFDALARRRNITGEVIDGDQLKEFWEQINDQSFDSRLKTFFDMVDKDADGRLTEDEVREIISLSASANNLSTIQKRADEYAALIMEELDPDNIGYIMLESLETLLLQAATQSVITSTGERKNLSHMMSQRLKPTFNRNPLKRWYRGLRFFLLDNWQRCWVIVLWFIVMAILFTYKYIQYRRSPVYPVMGDCVCMAKGAAETVKLNMALILLPVCRNTITWLRNKTRLGRVVPFDDNLNFHKVIAVGIIVGVTMHAGAHLACDFPRLLHATPEAYRPLRQFFGDEQPKSYWHFVNSVEGITGLVMVLLMAIAFTLATPWFRRGKLNYLPGPLKKLASFNAFWYTHHLFVIVYILLVAHGYYLYLTRDWHNKTTWMYLVVPVVLYACERLIRAFRSSIKAVTIRKVAVYPGNVLAIHLSRPQNFKYKSGQYMFVNCAAVSPFEWHPFSITSAPQDDYLSVHIRVLGDWTRALKGVFSEVCKPPPAGVSGLLRADMLHGANNPDFPKVLIDGPYGAPAQDYKKYEVVLLVGLGIGATPMISIVKDIVNNIKAKEQAQLNRMENGTSEPQRSKKESFRTRRAYFYWVTREQGSFDWFKNIMNEVAERDANRVIEMHNYCTSVYEEGDARSALIHMLQSLNHAKNGVDIVSGTRVMSHFAKPNWRNVYKRIAMDHPNTKVGVFYCGAPALTKELRHLALDFTHKTSTRFSFHKENF

SEQ ID NO: 107045 - protein, 833 aa, Arabidopsis thaliana
  peptide (1)..(833): Ceres Seq. ID no. 13621237
  misc_feature (310)..(832): Pfam Name: Ferric reductase like transmembrane component Pfam Description: Ferric reductase like transmembrane component
  misc_feature (1)..(833): Homolog of NCBI NO: 15240778 NR Description: respiratory burst oxidase protein C (NADPH (RbohA) [Arabidopsis thaliana] >gi|11282606|pir||T49878
  misc_feature (57)..(833): Homolog of NCBI NO: 28268678 NR Description: respiratory burst oxidase homolog [Nicotiana
  misc_feature (57)..(833): Homolog of NCBI NO: 17384016 NR Description: NADPH oxidase [Nicotiana tabacum]
  misc_feature (113)..(833): Homolog of NCBI NO: 4585142 NR Description: NADPH oxidase; gp91; phox homolog [Lycopersicon
  misc_feature (57)..(122): Homolog of NCBI NO: 4585142 NR Description: NADPH oxidase; gp91; phox homolog [Lycopersicon
  misc_feature (57)..(833): Homolog of NCBI NO: 16549087 NR Description: respiratory burst oxidase homolog [Solanum
  misc_feature (57)..(833): Homolog of NCBI NO: 18407959 NR Description: respiratory burst oxidase protein F (NADPH (RbohF) (RbohAp108) [Arabidopsis thaliana]
  misc_feature (57)..(833): Homolog of NCBI NO: 3242456 NR Description: Atrboh F [Arabidopsis thaliana]
  misc_feature (57)..(731): Homolog of NCBI NO: 25354658 NR Description: protein F22C12.18 [imported] - Arabidopsis >gi|6692109|gb|AAF24574.1|AC007764_16 F22C12.18 [Arabidopsis
  misc_feature (730)..(833): Homolog of NCBI NO: 25354658 NR Description: protein F22C12.18 [imported] - Arabidopsis >gi|6692109|gb|AAF24574.1|AC007764_16 F22C12.18 [Arabidopsis
MEGGSSVEESPELTLLKRNRLEKKTTVVKRLASVSHELKRLTSVSGGIGGRKPPRPAKLDRTKSAASQALKGLKFISKTDGGAGWSAVEKRFNQITATTGGLLLRTKFGECIGMTSKDFALELFDALARRRNITGEVIDGDQLKEFWEQINDQSFDSRLKTFFDMVDKDADGRLTEDEVREIISLSASANNLSTIQKRADEYAALIMEELDPDNIGYIMLESLETLLLQAATQSVITSTGERKNLSHMMSQRLKPTFNRNPLKRWYRGLRFFLLDNWQRCWVIVLWFIVMAILFTYKYIQYRRSPVYPVMGDCVCMAKGAAETVKLNMALILLPVCRNTITWLRNKTRLGRVVPFDDNLNFHKVIAVGIIVGVTMHAGAHLACDFPRLLHATPEAYRPLRQFFGDEQPKSYWHFVNSVEGITGLVMVLLMAIAFTLATPWFRRGKLNYLPGPLKKLASFNAFWYTHHLFVIVYILLVAHGYYLYLTRDWHNKTTWMYLVVPVVLYACERLIRAFRSSIKAVTIRKVAVYPGNVLAIHLSRPQNFKYKSGQYMFVNCAAVSPFEWHPFSITSAPQDDYLSVHIRVLGDWTRALKGVFSEVCKPPPAGVSGLLRADMLHGANNPDFPKVLIDGPYGAPAQDYKKYEVVLLVGLGIGATPMISIVKDIVNNIKAKEQAQLNRMENGTSEPQRSKKESFRTRRAYFYWVTREQGSFDWFKNIMNEVAERDANRVIEMHNYCTSVYEEGDARSALIHMLQSLNHAKNGVDIVSGTRVMSHFAKPNWRNVYKRIAMDHPNTKVGVFYCGAPALTKELRHLALDFTHKTSTRFSFHKENF

SEQ ID NO: 107046 - DNA, 1176 bp, Arabidopsis thaliana
  misc_feature (1)..(1176): Ceres Seq. ID no. 13621238
  misc_feature: MA Experiment ID: 108462 Result: Down-regulated in Transcription
  misc_feature: MA Experiment 108462 PARAMETER Experiment Name: At_Germinating_Seeds_cDNA_P Parameter: Age (day) Value: 2 vs. 0
  misc_feature: MA Experiment 108462 PARAMETER Experiment Name: At_Germinating_Seeds_cDNA_P Parameter: Tissue Value: Germinating Seeds
  misc_feature: MA Experiment ID: 108463 Result: Down-regulated in Transcription
  misc_feature: MA Experiment 108463 PARAMETER Experiment Name: At_Germinating_Seeds_cDNA_P Parameter: Age (day) Value: 3 vs. 0
  misc_feature: MA Experiment 108463 PARAMETER Experiment Name: At_Germinating_Seeds_cDNA_P Parameter: Tissue Value: Germinating Seeds
  misc_feature: MA Experiment ID: 108464 Result: Down-regulated in Transcription
  misc_feature: MA Experiment 108464 PARAMETER Experiment Name: At_Germinating_Seeds_cDNA_P Parameter: Age (day) Value: 4 vs. 0
  misc_feature: MA Experiment 108464 PARAMETER Experiment Name: At_Germinating_Seeds_cDNA_P Parameter: Tissue Value: Germinating Seeds
  misc_feature: MA Experiment ID: 108488 Result: Down-regulated in Transcription
  misc_feature: MA Experiment ID: 20000071 Result: Up-regulated in Transcription
  misc_feature: MA Experiment 20000071 PARAMETER Experiment Name: At_100uM_ABA_Mutants_cDNA_P Parameter: Plant Line Value: CS8104
  misc_feature: MA Experiment 20000071 PARAMETER Experiment Name: At_100uM_ABA_Mutants_cDNA_P Parameter: Timepoint (hr) Value: 6
  misc_feature: MA Experiment 20000071 PARAMETER Experiment Name: At_100uM_ABA_Mutants_cDNA_P Parameter: Tissue Value: Aerial
  misc_feature: MA Experiment 20000071 PARAMETER Experiment Name: At_100uM_ABA_Mutants_cDNA_P Parameter: Treatment Value: 100uM ABA vs. No Treatment
  misc_feature: MA Experiment ID: 20000117 Result: Up-regulated in Transcription
  misc_feature: MA Experiment 20000117 PARAMETER Experiment Name: At_100uM_ABA_Mutants_cDNA_P Parameter: Plant Line Value: Columbia
  misc_feature: MA Experiment 20000117 PARAMETER Experiment Name: At_100uM_ABA_Mutants_cDNA_P Parameter: Timepoint (hr) Value: 6
  misc_feature: MA Experiment 20000117 PARAMETER Experiment Name: At_100uM_ABA_Mutants_cDNA_P Parameter: Tissue Value: Aerial
  misc_feature: MA Experiment 20000117 PARAMETER Experiment Name: At_100uM_ABA_Mutants_cDNA_P Parameter: Treatment Value: 100uM ABA vs. No Treatment
  misc_feature: MA Experiment ID: 20000224 Result: Down-regulated in Transcription
  misc_feature: MA Experiment ID: 20000794 Result: Up-regulated in Transcription
  misc_feature: MA Experiment 20000794 PARAMETER Experiment Name: At_Petals_P Parameter: Age (day) Value: 23-25 days
  misc_feature: MA Experiment 20000794 PARAMETER Experiment Name: At_Petals_P Parameter: Plant Line Value: WS
  misc_feature: MA Experiment 20000794 PARAMETER Experiment Name: At_Petals_P Parameter: Tissue Value: Petals vs. Whole plant
aggaagattatttgacattttaagtaagaacagctagctttgccatctccctaaaggcaataaatctcggatccactttcacgatattttgatattttttctatttataatctttctgggttttgagtcttttgaaggctgaattgctctgaaatctcaattgtataatcatctcctgggtcgtcgttatcgtgatcatctagaagaaagcatgactacactagatttgaccagagccgagcttgctcttattgttctctatttgaacaaagctgaggctagagataagatatgcagagctatccaatatggttccaaatttttgagcggtggccaacctggtactgctcaaactgtcgacaaaaacaccagcttggcgagaaaagttttccgtcttttcaagtttgtcaatgattttcacggtcttatcagccccgtgcctaaagggactccacttcctcttgtcttactcgggaagtcgaagaatgcgctcttgtctacctttttgtttcttgatcaaatcgtctggcttggtagatccggcatatacaagaacaaagaacgaactgaattgcttggacgtatatcacttttctgctggctgggatcatccgtttgtacaagtgcagtcgagattggtgagcttggaaggctctcttcatctatgaagaagatggaaaaggaactcaaagctgatgatgagctgtatcgtgctaagcttcagaaatcaaacgacagaactctagctttgattaaatcaagcatggacattattgtagccattggtctccttcagttagctccaaagacgattagtcctcgtgtcactggtgctttcgggtttaccacctcacttatctcttgttatcagttgcttccatcgcgccccaagttgaagacaccttgaagaaggaataagcttgttctctagactttcagaataattgtttcatattcatcagtaaacctattgtgttcaggtattctaaggagtctatgttcctcctttgaatgaatttgctgctcttataacgcgtttgcaagaataatgataagttttagaataagattattatgatacatcttcaagattttttgattagaaatttgtgtttgtttctcattttgaacaagactctgttcctacatagtagagaggaaatcatttgatgttcg

SEQ ID NO: 107047 - protein, 231 aa, Arabidopsis thaliana; identical to SEQ ID NO: 23905
  peptide (1)..(231): Ceres Seq. ID no. 13621239
  misc_feature (11)..(222): Pfam Name: Peroxisomal biogenesis factor 11 (PEX11) Pfam Description: Peroxisomal biogenesis factor 11 (PEX11)
  misc_feature (1)..(231): Homolog of NCBI NO: 30695340 NR Description: expressed protein [Arabidopsis thaliana] unknown protein [Arabidopsis thaliana]
  misc_feature (1)..(231): Homolog of NCBI NO: 11358250 NR Description: hypothetical protein T27I15_160 - Arabidopsis >gi|8388623|emb|CAB94143.1| putative protein [Arabidopsis
  misc_feature (2)..(231): Homolog of NCBI NO: 18406877 NR Description: expressed protein [Arabidopsis thaliana] expressed protein [Arabidopsis thaliana] Unknown protein [Arabidopsis thaliana]
  misc_feature (1)..(229): Homolog of NCBI NO: 18378887 NR Description: expressed protein [Arabidopsis thaliana]
  misc_feature (2)..(221): Homolog of NCBI NO: 7486466 NR Description: hypothetical protein At2g45740 [imported] -
  misc_feature (1)..(229): Homolog of NCBI NO: 8489788 NR Description: unknown [Lycopersicon esculentum]
  misc_feature (1)..(229): Homolog of NCBI NO: 25553559 NR Description: OSJNBa0038F22.7 [Oryza sativa (japonica
  misc_feature (1)..(227): Homolog of NCBI NO: 34898026 NR Description: ESTs AU064537(E31904),AU082147(E31904) correspond a region of the predicted gene.~Similar to Arabidopsis thaliana
  misc_feature (131)..(231): Homolog of NCBI NO: 14335058 NR Description: At2g45740/F4I18.28 [Arabidopsis thaliana]

SEQ ID NO: 107048 - DNA, 1428 bp, Arabidopsis thaliana
  misc_feature (1)..(1428): Ceres Seq. ID no. 13621244
  misc_feature: MA Experiment ID: 108434 Result: Down-regulated in Transcription
  misc_feature: MA Experiment 108434 PARAMETER Experiment Name: At_Root_Tips_cDNA_P Parameter: Tissue Value: Root Tips
  misc_feature: MA Experiment ID: 108461 Result: Up-regulated in Transcription
  misc_feature: MA Experiment 108461 PARAMETER Experiment Name: At_Germinating_Seeds_cDNA_P Parameter: Age (day) Value: 1 vs. 0
  misc_feature: MA Experiment 108461 PARAMETER Experiment Name: At_Germinating_Seeds_cDNA_P Parameter: Tissue Value: Germinating Seeds
  misc_feature: MA Experiment ID: 108462 Result: Up-regulated in Transcription
  misc_feature: MA Experiment 108462 PARAMETER Experiment Name: At_Germinating_Seeds_cDNA_P Parameter: Age (day) Value: 2 vs. 0
  misc_feature: MA Experiment 108462 PARAMETER Experiment Name: At_Germinating_Seeds_cDNA_P Parameter: Tissue Value: Germinating Seeds
  misc_feature: MA Experiment ID: 108464 Result: Up-regulated in Transcription
  misc_feature: MA Experiment 108464 PARAMETER Experiment Name: At_Germinating_Seeds_cDNA_P Parameter: Age (day) Value: 4 vs. 0
  misc_feature: MA Experiment 108464 PARAMETER Experiment Name: At_Germinating_Seeds_cDNA_P Parameter: Tissue Value: Germinating Seeds
  misc_feature: MA Experiment ID: 108577 Result: Up-regulated in Transcription
  misc_feature: MA Experiment 108577 PARAMETER Experiment Name: At_42deg_Heat_cDNA_P Parameter: Temperature (deg C) Value: 42 vs. 22
  misc_feature: MA Experiment 108577 PARAMETER Experiment Name: At_42deg_Heat_cDNA_P Parameter: Timepoint (hr) Value: 6
  misc_feature: MA Experiment 108577 PARAMETER Experiment Name: At_42deg_Heat_cDNA_P Parameter: Tissue Value: Aerial
  misc_feature: MA Experiment ID: 108595 Result: Down-regulated in Transcription
  misc_feature: MA Experiment 108595 PARAMETER Experiment Name: At_Ler-pi_Ovule_cDNA_P Parameter: Plant Line Value: null
  misc_feature: MA Experiment ID: 20000072 Result: Down-regulated in Transcription
  misc_feature: MA Experiment 20000072 PARAMETER Experiment Name: At_100uM_ABA_Mutants_cDNA_P Parameter: Plant Line Value: CS8105
  misc_feature: MA Experiment 20000072 PARAMETER Experiment Name: At_100uM_ABA_Mutants_cDNA_P Parameter: Timepoint (hr) Value: 6
  misc_feature: MA Experiment 20000072 PARAMETER Experiment Name: At_100uM_ABA_Mutants_cDNA_P Parameter: Tissue Value: Aerial
  misc_feature: MA Experiment 20000072 PARAMETER Experiment Name: At_100uM_ABA_Mutants_cDNA_P Parameter: Treatment Value: 100uM ABA vs. No Treatment
  misc_feature: MA Experiment ID: 20000087 Result: Down-regulated in Transcription
  misc_feature: MA Experiment 20000087 PARAMETER Experiment Name: At_100uM_ABA_Mutants_cDNA_P Parameter: Plant Line Value: WS
  misc_feature: MA Experiment 20000087 PARAMETER Experiment Name: At_100uM_ABA_Mutants_cDNA_P Parameter: Timepoint (hr) Value: 6
  misc_feature: MA Experiment 20000087 PARAMETER Experiment Name: At_100uM_ABA_Mutants_cDNA_P Parameter: Tissue Value: Aerial
  misc_feature: MA Experiment 20000087 PARAMETER Experiment Name: At_100uM_ABA_Mutants_cDNA_P Parameter: Treatment Value: 100uM ABA vs. No Treatment
  misc_feature: MA Experiment ID: 20000306 Result: Up-regulated in Transcription
  misc_feature: MA Experiment 20000306 PARAMETER Experiment Name: At_Germinating_Seeds_Sub_P Parameter: Age (hr) Value: 6 vs. 0
  misc_feature: MA Experiment 20000306 PARAMETER Experiment Name: At_Germinating_Seeds_Sub_P Parameter: Organism Value: A. thaliana
  misc_feature: MA Experiment 20000306 PARAMETER Experiment Name: At_Germinating_Seeds_Sub_P Parameter: Plant Line Value: WS
  misc_feature: MA Experiment 20000306 PARAMETER Experiment Name: At_Germinating_Seeds_Sub_P Parameter: Tissue Value: Germinating Seeds
  misc_feature: MA Experiment ID: 20000307 Result: Up-regulated in Transcription
  misc_feature: MA Experiment 20000307 PARAMETER Experiment Name: At_Germinating_Seeds_Sub_P Parameter: Age (hr) Value: 24 vs. 0
  misc_feature: MA Experiment 20000307 PARAMETER Experiment Name: At_Germinating_Seeds_Sub_P Parameter: Organism Value: A. thaliana
  misc_feature: MA Experiment 20000307 PARAMETER Experiment Name: At_Germinating_Seeds_Sub_P Parameter: Plant Line Value: WS
  misc_feature: MA Experiment 20000307 PARAMETER Experiment Name: At_Germinating_Seeds_Sub_P Parameter: Tissue Value: Germinating Seeds
  misc_feature: MA Experiment ID: 20000440 Result: Down-regulated in Transcription
  misc_feature: MA Experiment 20000440 PARAMETER Experiment Name: At_Closed-Flower__Sub_P Parameter: Tissue Value: Closed Flower vs. Whole Plant
gatgcaatgtatttgtctcgttttctcatccatttatatgattgctttcttctccacctcaccaatcactcctcctctaaacttttcttcactctcttgtctcttcaaacttcggttactccgttttagtcgacaacaatggcctctgtttcaaggaggttactgaggagagagacgatcccctgtttcagccacaccgtgaggaaactcttctccaccgttggatctccttcttttgctcagagactcagagatctccccaaagacttcccctctaccaacgccaaacgtgacgcctctctgcttattgggaaaacgcctcttgtgttcctcaacaaagtcactgaaggttgtgaagcgtatgttgcagccaaacaagaacatttccagccaacttgtagcattaaagacagaccagctatagccatgattgcagatgcagagaagaaaaaactaatcatccctggaaaaacaacactgatagagcctacttcaggaaacatgggaatcagtttggctttcatggctgctatgaaagggtacaggattataatgacgatgccttcgtacactagcttggagaggagagtgacgatgagatcctttggtgctgagcttgttctcactgatccagccaaaggaatgggtggaactgttaagaaagcttatgacctccttgatagtactcctgatgctttcatgtgtcaacagtttgctaatcctgcaaacactcagattcattttgatacaactggtcctgagatttgggaagatacacttggaaatgttgatatatttgtgatgggaattggcagtggaggcacagtctctggtgttggccgataccttaaatctaaaaaccccaatgtcaagatatatggagtggagcctgctgaaagcaacatactcaacggtggcaaaccaggtccacatgctatcacaggcaatggtgttggattcaaaccagaaatcttggatatggatgttatggagagtgttcttgaggttagtagtgaggatgctataaagatggctagagaattggcattgaaagaaggtctcatggttgggatatcgtcgggagctaacaccgtggcagcaattagactggcgaaaatgccagagaataaaggcaaactcattgtgacaattcatgcgagcttcggagaaagatatctgtcgtctgttctgtttgatgagctgaggaaagaagcagaggagatgaagccagtttcagtggattgatgaaggaagactgacactttaccaaaaatctcgggagcaaaagattataaaaagaaagatgtaagagtaataagtttgtgtttatattgttctattgttgatgtataatataatcacagtattgttgatgttgatcttggatattgaagatccaactaaataaagttcatcattttctgtttc

SEQ ID NO: 107049 - protein, 368 aa, Arabidopsis thaliana; identical to SEQ ID NO: 22215
  peptide (1)..(368): Ceres Seq. ID no. 13621245
  misc_feature (53)..(342): Pfam Name: Pyridoxal-phosphate dependent enzyme Pfam Description: Pyridoxal-phosphate dependent enzyme
  misc_feature (1)..(368): Homolog of NCBI NO: 15233111 NR Description: cysteine synthase (O-acetylserine
  misc_feature (31)..(368): Homolog of NCBI NO: 30840956 NR Description: beta-cyanoalanine synthase [Betula pendula]
  misc_feature (22)..(368): Homolog of NCBI NO: 11559260 NR Description: beta-cyanoalanine synthase [Solanum tuberosum]
  misc_feature (45)..(368): Homolog of NCBI NO: 11995005 NR Description: beta-cyanoalanine synthase like protein [Solanum
  misc_feature (1)..(368): Homolog of NCBI NO: 1071913 NR Description: cysteine synthase (EC 4.2.99.8) C precursor, - spinach >gi|1066153|dbj|BAA07177.1| cysteine synthase [Spinacia
  misc_feature (25)..(368): Homolog of NCBI NO: 10241630 NR Description: cysteine synthase [Oryza sativa (indica
  misc_feature (25)..(368): Homolog of NCBI NO: 38346461 NR Description: OSJNBa0019G23.9 [Oryza sativa (japonica
  misc_feature (41)..(364): Homolog of NCBI NO: 303902 NR Description: cysteine synthase [Spinacia oleracea]
  misc_feature (41)..(364): Homolog of NCBI NO: 12644209 NR Description: CYSTEINE SYNTHASE, CHLOROPLAST PRECURSOR
  misc_feature (41)..(364): Homolog of NCBI NO: 421795 NR Description: cysteine synthase (EC 4.2.99.8) B precursor, - spinach >gi|312944|emb|CAA47329.1| cysteine synthase [Spinacia

SEQ ID NO: 107050 - protein, 272 aa, Arabidopsis thaliana; identical to SEQ ID NO: 22216
  peptide (1)..(272): Ceres Seq. ID no. 13621246
  misc_feature (1)..(246): Pfam Name: Pyridoxal-phosphate dependent enzyme Pfam Description: Pyridoxal-phosphate dependent enzyme
  misc_feature (1)..(272): Homolog of NCBI NO: 15233111 NR Description: cysteine synthase (O-acetylserine
  misc_feature (1)..(272): Homolog of NCBI NO: 30840956 NR Description: beta-cyanoalanine synthase [Betula pendula]
  misc_feature (1)..(272): Homolog of NCBI NO: 11559260 NR Description: beta-cyanoalanine synthase [Solanum tuberosum]
  misc_feature (1)..(272): Homolog of NCBI NO: 11995005 NR Description: beta-cyanoalanine synthase like protein [Solanum
  misc_feature (1)..(272): Homolog of NCBI NO: 1071913 NR Description: cysteine synthase (EC 4.2.99.8) C precursor, - spinach >gi|1066153|dbj|BAA07177.1| cysteine synthase [Spinacia
  misc_feature (1)..(272): Homolog of NCBI NO: 10241630 NR Description: cysteine synthase [Oryza sativa (indica
  misc_feature (1)..(272): Homolog of NCBI NO: 38346461 NR Description: OSJNBa0019G23.9 [Oryza sativa (japonica
  misc_feature (1)..(268): Homolog of NCBI NO: 303902 NR Description: cysteine synthase [Spinacia oleracea]
  misc_feature (1)..(268): Homolog of NCBI NO: 12644209 NR Description: CYSTEINE SYNTHASE, CHLOROPLAST PRECURSOR
  misc_feature (1)..(268): Homolog of NCBI NO: 421795 NR Description: cysteine synthase (EC 4.2.99.8) B precursor, - spinach >gi|312944|emb|CAA47329.1| cysteine synthase [Spinacia

SEQ ID NO: 107051 - protein, 247 aa, Arabidopsis thaliana; identical to SEQ ID NO: 22217
  peptide (1)..(247): Ceres Seq. ID no. 13621247
  misc_feature (1)..(221): Pfam Name: Pyridoxal-phosphate dependent enzyme Pfam Description: Pyridoxal-phosphate dependent enzyme
  misc_feature (1)..(247): Homolog of NCBI NO: 15233111 NR Description: cysteine synthase (O-acetylserine
  misc_feature (1)..(247): Homolog of NCBI NO: 30840956 NR Description: beta-cyanoalanine synthase [Betula pendula]
  misc_feature (1)..(247): Homolog of NCBI NO: 11559260 NR Description: beta-cyanoalanine synthase [Solanum tuberosum]
  misc_feature (1)..(247): Homolog of NCBI NO: 11995005 NR Description: beta-cyanoalanine synthase like protein [Solanum
  misc_feature (1)..(247): Homolog of NCBI NO: 1071913 NR Description: cysteine synthase (EC 4.2.99.8) C precursor, - spinach >gi|1066153|dbj|BAA07177.1| cysteine synthase [Spinacia
  misc_feature (1)..(247): Homolog of NCBI NO: 10241630 NR Description: cysteine synthase [Oryza sativa (indica
  misc_feature (1)..(247): Homolog of NCBI NO: 38346461 NR Description: OSJNBa0019G23.9 [Oryza sativa (japonica
  misc_feature (1)..(243): Homolog of NCBI NO: 303902 NR Description: cysteine synthase [Spinacia oleracea]
  misc_feature (1)..(243): Homolog of NCBI NO: 12644209 NR Description: CYSTEINE SYNTHASE, CHLOROPLAST PRECURSOR
  misc_feature (1)..(243): Homolog of NCBI NO: 421795 NR Description: cysteine synthase (EC 4.2.99.8) B precursor, - spinach >gi|312944|emb|CAA47329.1| cysteine synthase [Spinacia

SEQ ID NO: 107052 - DNA, 1028 bp, Arabidopsis thaliana
  misc_feature (1)..(1028): Ceres Seq. ID no. 13621248
  misc_feature: MA Experiment ID: 108434 Result: Down-regulated in Transcription
  misc_feature: MA Experiment 108434 PARAMETER Experiment Name: At_Root_Tips_cDNA_P Parameter: Tissue Value: Root Tips
  misc_feature: MA Experiment ID: 108461 Result: Up-regulated in Transcription
  misc_feature: MA Experiment 108461 PARAMETER Experiment Name: At_Germinating_Seeds_cDNA_P Parameter: Age (day) Value: 1 vs. 0
  misc_feature: MA Experiment 108461 PARAMETER Experiment Name: At_Germinating_Seeds_cDNA_P Parameter: Tissue Value: Germinating Seeds
  misc_feature: MA Experiment ID: 108462 Result: Up-regulated in Transcription
  misc_feature: MA Experiment 108462 PARAMETER Experiment Name: At_Germinating_Seeds_cDNA_P Parameter: Age (day) Value: 2 vs. 0
  misc_feature: MA Experiment 108462 PARAMETER Experiment Name: At_Germinating_Seeds_cDNA_P Parameter: Tissue Value: Germinating Seeds
  misc_feature: MA Experiment ID: 108464 Result: Up-regulated in Transcription
  misc_feature: MA Experiment 108464 PARAMETER Experiment Name: At_Germinating_Seeds_cDNA_P Parameter: Age (day) Value: 4 vs. 0
  misc_feature: MA Experiment 108464 PARAMETER Experiment Name: At_Germinating_Seeds_cDNA_P Parameter: Tissue Value: Germinating Seeds
  misc_feature: MA Experiment ID: 108488 Result: Up-regulated in Transcription
  misc_feature: MA Experiment ID: 108489 Result: Down-regulated in Transcription
  misc_feature: MA Experiment ID: 108595 Result: Down-regulated in Transcription
  misc_feature: MA Experiment 108595 PARAMETER Experiment Name: At_Ler-pi_Ovule_cDNA_P Parameter: Plant Line Value: null
  misc_feature: MA Experiment ID: 20000180 Result: Up-regulated in Transcription
  misc_feature: MA Experiment 20000180 PARAMETER Experiment Name: At_Germinating_Seeds_P Parameter: Age (hr) Value: 24 vs. 0
  misc_feature: MA Experiment 20000180 PARAMETER Experiment Name: At_Germinating_Seeds_P Parameter: Tissue Value: Germinating Seeds
  misc_feature: MA Experiment ID: 20000185 Result: Down-regulated in Transcription
  misc_feature: MA Experiment 20000185 PARAMETER Experiment Name: At_Roots__P Parameter: Age (day) Value: 7 vs. 21
  misc_feature: MA Experiment 20000185 PARAMETER Experiment Name: At_Roots__P Parameter: Organism Value: A. thaliana
  misc_feature: MA Experiment 20000185 PARAMETER Experiment Name: At_Roots__P Parameter: Tissue Value: Roots vs. Whole Plant
  misc_feature: MA Experiment ID: 20000227 Result: Down-regulated in Transcription
  misc_feature: MA Experiment 20000227 PARAMETER Experiment Name: At_Root-Tips-vs-Tops_P Parameter: Tissue Value: Root Tips vs. Root Tops
  misc_feature: MA Experiment ID: 20000234 Result: Down-regulated in Transcription
  misc_feature: MA Experiment 20000234 PARAMETER Experiment Name: At_Siliques_P Parameter: Age (day) Value: 21
  misc_feature: MA Experiment 20000234 PARAMETER Experiment Name: At_Siliques_P Parameter: Organism Value: A. thaliana
  misc_feature: MA Experiment 20000234 PARAMETER Experiment Name: At_Siliques_P Parameter: Plant Line Value: WS
  misc_feature: MA Experiment 20000234 PARAMETER Experiment Name: At_Siliques_P Parameter: Tissue Value: Less Than 5mm Siliques vs. Whole Plant
  misc_feature: MA Experiment ID: 20000264 Result: Down-regulated in Transcription
  misc_feature: MA Experiment 20000264 PARAMETER Experiment Name: At_Open_Flower_P Parameter: Age (day) Value: 21
  misc_feature: MA Experiment 20000264 PARAMETER Experiment Name: At_Open_Flower_P Parameter: Plant Line Value: WS
  misc_feature: MA Experiment 20000264 PARAMETER Experiment Name: At_Open_Flower_P Parameter: Tissue Value: Open Flower vs. Whole Plant
  misc_feature: MA Experiment ID: 20000265 Result: Down-regulated in Transcription
  misc_feature: MA Experiment 20000265 PARAMETER Experiment Name: At_Open_Flower_P Parameter: Age (day) Value: 21
  misc_feature: MA Experiment 20000265 PARAMETER Experiment Name: At_Open_Flower_P Parameter: Plant Line Value: WS
  misc_feature: MA Experiment 20000265 PARAMETER Experiment Name: At_Open_Flower_P Parameter: Tissue Value: Closed Flower vs. Whole Plant
  misc_feature: MA Experiment ID: 20000269 Result: Down-regulated in Transcription
  misc_feature: MA Experiment 20000269 PARAMETER Experiment Name: At_1mM_KNO3_L-vs-H_Roots_P Parameter: Age (day) Value: 7,10,12
  misc_feature: MA Experiment 20000269 PARAMETER Experiment Name: At_1mM_KNO3_L-vs-H_Roots_P Parameter: Organism Value: A. thaliana
  misc_feature: MA Experiment 20000269 PARAMETER Experiment Name: At_1mM_KNO3_L-vs-H_Roots_P Parameter: Plant Line Value: WS
  misc_feature: MA Experiment 20000269 PARAMETER Experiment Name: At_1mM_KNO3_L-vs-H_Roots_P Parameter: Timepoint (day) Value: 7,10,12
  misc_feature: MA Experiment 20000269 PARAMETER Experiment Name: At_1mM_KNO3_L-vs-H_Roots_P Parameter: Tissue Value: Roots
  misc_feature: MA Experiment 20000269 PARAMETER Experiment Name: At_1mM_KNO3_L-vs-H_Roots_P Parameter: Treatment Value: 1mM KNO3 vs. 50mM KNO3
  misc_feature: MA Experiment ID: 20000286 Result: Down-regulated in Transcription
  misc_feature: MA Experiment 20000286 PARAMETER Experiment Name: At_Open_Flower_P Parameter: Age (day) Value: 21
  misc_feature: MA Experiment 20000286 PARAMETER Experiment Name: At_Open_Flower_P Parameter: Plant Line Value: WS
  misc_feature: MA Experiment 20000286 PARAMETER Experiment Name: At_Open_Flower_P Parameter: Tissue Value: Half Open vs. Whole Plant
  misc_feature: MA Experiment ID: 20000439 Result: Down-regulated in Transcription
  misc_feature: MA Experiment 20000439 PARAMETER Experiment Name: At_Roots__P Parameter: Age (day) Value: 14 vs. 21
  misc_feature: MA Experiment 20000439 PARAMETER Experiment Name: At_Roots__P Parameter: Organism Value: A. thaliana
  misc_feature: MA Experiment 20000439 PARAMETER Experiment Name: At_Roots__P Parameter: Tissue Value: Roots vs. Whole Plant
  misc_feature: MA Experiment ID: 20000441 Result: Up-regulated in Transcription
  misc_feature: MA Experiment 20000441 PARAMETER Experiment Name: At_1uM_BR-BRZ__P Parameter: Tissue Value: Shoot Apices
  misc_feature: MA Experiment 20000441 PARAMETER Experiment Name: At_1uM_BR-BRZ__P Parameter: Treatment Value: 1uM BR vs. No Treatment
  misc_feature: MA Experiment ID: 20000443 Result: Up-regulated in Transcription
  misc_feature: MA Experiment 20000443 PARAMETER Experiment Name: At_1uM_BR-BRZ__P Parameter: Tissue Value: Shoot Apices
  misc_feature: MA Experiment 20000443 PARAMETER Experiment Name: At_1uM_BR-BRZ__P Parameter: Treatment Value: 1uM BRZ vs. No Treatment
  misc_feature: MA Experiment ID: 20000574 Result: Down-regulated in Transcription
  misc_feature: MA Experiment 20000574 PARAMETER Experiment Name: At_100uM_ABA_Mutants__P Parameter: Organism Value: A. thaliana
  misc_feature: MA Experiment 20000574 PARAMETER Experiment Name: At_100uM_ABA_Mutants__P Parameter: Plant Line Value: CS23 vs. Ler wt
  misc_feature: MA Experiment 20000574 PARAMETER Experiment Name: At_100uM_ABA_Mutants__P Parameter: Timepoint (hr) Value: N/A
  misc_feature: MA Experiment 20000574 PARAMETER Experiment Name: At_100uM_ABA_Mutants__P Parameter: Tissue Value: Whole Plant
  misc_feature: MA Experiment 20000574 PARAMETER Experiment Name: At_100uM_ABA_Mutants__P Parameter: Treatment Value: None
  misc_feature: MA Experiment ID: 20000794 Result: Down-regulated in Transcription
  misc_feature: MA Experiment 20000794 PARAMETER Experiment Name: At_Petals_P Parameter: Age (day) Value: 23-25 days
  misc_feature: MA Experiment 20000794 PARAMETER Experiment Name: At_Petals_P Parameter: Plant Line Value: WS
  misc_feature: MA Experiment 20000794 PARAMETER Experiment Name: At_Petals_P Parameter: Tissue Value: Petals vs. Whole plant
  misc_feature: MA Experiment ID: 20001557 Result: Down-regulated in Transcription
  misc_feature: MA Experiment 20001557 PARAMETER Experiment Name: At_Drought_Soil_Dry_P Parameter: Age (day) Value: 27
  misc_feature: MA Experiment 20001557 PARAMETER Experiment Name: At_Drought_Soil_Dry_P Parameter: Organism Value: A. thaliana
  misc_feature: MA Experiment 20001557 PARAMETER Experiment Name: At_Drought_Soil_Dry_P Parameter: Plant Line Value: WS
  misc_feature: MA Experiment 20001557 PARAMETER Experiment Name: At_Drought_Soil_Dry_P Parameter: Post Timepoint (hr) Value: 3
  misc_feature: MA Experiment 20001557 PARAMETER Experiment Name: At_Drought_Soil_Dry_P Parameter: Post-Treatment Value: Re-Water vs. No Drought
  misc_feature: MA Experiment 20001557 PARAMETER Experiment Name: At_Drought_Soil_Dry_P Parameter: Timepoint (day) Value: 13
  misc_feature: MA Experiment 20001557 PARAMETER Experiment Name: At_Drought_Soil_Dry_P Parameter: Treatment Value: Drought vs. No Drought
  misc_feature: MA Experiment ID: 20001558 Result: Down-regulated in Transcription
  misc_feature: MA Experiment 20001558 PARAMETER Experiment Name: At_Drought_Soil_Dry_P Parameter: Age (day) Value: 27
  misc_feature: MA Experiment 20001558 PARAMETER Experiment Name: At_Drought_Soil_Dry_P Parameter: Organism Value: A. thaliana
  misc_feature: MA Experiment 20001558 PARAMETER Experiment Name: At_Drought_Soil_Dry_P Parameter: Plant Line Value: WS
  misc_feature: MA Experiment 20001558 PARAMETER Experiment Name: At_Drought_Soil_Dry_P Parameter: Post Timepoint (hr) Value: 6
  misc_feature: MA Experiment 20001558 PARAMETER Experiment Name: At_Drought_Soil_Dry_P Parameter: Post-Treatment Value: Re-Water vs. No Drought
  misc_feature: MA Experiment 20001558 PARAMETER Experiment Name: At_Drought_Soil_Dry_P Parameter: Timepoint (day) Value: 13
  misc_feature: MA Experiment 20001558 PARAMETER Experiment Name: At_Drought_Soil_Dry_P Parameter: Treatment Value: Drought vs. No Drought
  misc_feature: MA Experiment ID: 20001757 Result: Up-regulated in Transcription
  misc_feature: MA Experiment 20001757 PARAMETER Experiment Name: At_50mM_NH4NO3_L-to-H_P Parameter: Timepoint (hr) Value: 6
  misc_feature: MA Experiment 20001757 PARAMETER Experiment Name: At_50mM_NH4NO3_L-to-H_P Parameter: Tissue Value: Leaf
  misc_feature: MA Experiment 20001757 PARAMETER Experiment Name: At_50mM_NH4NO3_L-to-H_P Parameter: Treatment Value: 50mM NH4NO3 vs 100mM Mannitol
  misc_feature: MA Experiment ID: 20001905 Result: Down-regulated in Transcription
  misc_feature: MA Experiment 20001905 PARAMETER Experiment Name: At_Drought_Reproduction_P Parameter: Age (day) Value: 40
  misc_feature: MA Experiment 20001905 PARAMETER Experiment Name: At_Drought_Reproduction_P Parameter: Organism Value: A. thaliana
  misc_feature: MA Experiment 20001905 PARAMETER Experiment Name: At_Drought_Reproduction_P Parameter: Plant Line Value: WS
  misc_feature: MA Experiment 20001905 PARAMETER Experiment Name: At_Drought_Reproduction_P Parameter: Timepoint (day) Value: 10
  misc_feature: MA Experiment 20001905 PARAMETER Experiment Name: At_Drought_Reproduction_P Parameter: Tissue Value: Rosettes
  misc_feature: MA Experiment 20001905 PARAMETER Experiment Name: At_Drought_Reproduction_P Parameter: Treatment Value: Drought vs. No Drought
agattacacaacacacgttcgtttctttcttcttctaacacactctgagtcttgaaggtcaacaacgtcgagaataatggcatcatctctttgtgcttcttctgccatcgctgccatttcttctccaagtttcttgggtggtaagaaactgaggctgaagaagaagttgactgttccagctgtgtccaggcaagatgcgtcggtgcgcgccgtcgcagctgatccagatagaccaatctggttcccgggaagcactcctccagagtggctagacggtagcctccctggtgacttcggatttgatcctcttggtctttcatcggacccggacagtctaaaatggaacgtacaagccgagatagtccactgccgatgggctatgctaggagccgccgggatattcatcccagagttcctaacgaagatcggaatcctcaacactccgtcatggtacacggcgggagagcaagagtatttcacggacaaaaccacactctttgtcgttgagctcattttgatcggatgggcagaaggacgtagatgggccgatatcatcaagcccggtagcgtcaacactgacccagtcttcccaaacaacaaactgacgggcacagacgttggttacccaggtgggttatggttcgacccgttgggttggggatccggtagcccggctaagctcaaggagttgaggaccaaggagatcaagaacggaaggttggctatgttggcagtgatgggtgcttggttccaacacatctacactggcactggtcctattgataacctttttgcacatcttgctgatcctggtcacgccacaatcttcgctgctttcacacccaagtgagacaacgaaaaagggttatggggaggtgaatgcgtttgtgtgtgatcatgtttgtacaaatatcattttgaacttaaaattattatgtactttatataaattgtggtcgaatgcaaattaaggttccccgtaacactcttttcctaactcaatgatcataagatgcttttacattgtc

SEQ ID NO: 107053 - protein, 257 aa, Arabidopsis thaliana
  peptide (1)..(257): Ceres Seq. ID no. 13621249
  misc_feature (60)..(228): Pfam Name: Chlorophyll A-B binding protein Pfam Description: Chlorophyll A-B binding protein
  misc_feature (1)..(257): Homolog of NCBI NO: 15233120 NR Description: light-harvesting chlorophyll a/b binding protein
  misc_feature (1)..(257): Homolog of NCBI NO: 11277627 NR Description: PS I antenna protein Lhca2 [imported] - thaliana >gi|4741940|gb|AAD28767.1|AF134120_1 Lhca2 protein thaliana] >gi|15451180|gb|AAK96861.1| Lhca2 protein [Arabidopsis
  misc_feature (1)..(257): Homolog of NCBI NO: 115766 NR Description: Chlorophyll A-B binding protein, chloroplast
  misc_feature (1)..(257): Homolog of NCBI NO: 115765 NR Description: Chlorophyll A-B binding protein 7, chloroplast
  misc_feature (1)..(257): Homolog of NCBI NO: 2129879 NR Description: chlorophyll a/b-binding protein type II precursor,
  misc_feature (2)..(257): Homolog of NCBI NO: 34393511 NR Description: putative photosystem I antenna protein [Oryza
  misc_feature (7)..(257): Homolog of NCBI NO: 1076724 NR Description: LHCI-680, photosystem I antenna protein - barley
  misc_feature (4)..(257): Homolog of NCBI NO: 7443233 NR Description: chlorophyll a/b-binding protein type II, I - Lolium temulentum >gi|551047|emb|CAA55864.1| type II LHCI
  misc_feature (18)..(257): Homolog of NCBI NO: 18376587 NR Description: putative chlorophyll A-B binding protein of LHCI
  misc_feature (1)..(257): Homolog of NCBI NO: 99486 NR Description: chlorophyll a/b-binding protein (clone pINEab 31)
MASSLCASSAIAAISSPSFLGGKKLRLKKKLTVPAVSRQDASVRAVAADPDRPIWFPGSTPPEWLDGSLPGDFGFDPLGLSSDPDSLKWNVQAEIVHCRWAMLGAAGIFIPEFLTKIGILNTPSWYTAGEQEYFTDKTTLFVVELILIGWAEGRRWADIIKPGSVNTDPVFPNNKLTGTDVGYPGGLWFDPLGWGSGSPAKLKELRTKEIKNGRLAMLAVMGAWFQHIYTGTGPIDNLFAHLADPGHATIFAAFTPK

SEQ ID NO: 107054 - protein, 156 aa, Arabidopsis thaliana; identical to SEQ ID NO: 41714
  peptide (1)..(156): Ceres Seq. ID no. 13621250
  misc_feature (1)..(127): Pfam Name: Chlorophyll A-B binding protein Pfam Description: Chlorophyll A-B binding protein
  misc_feature (1)..(156): Homolog of NCBI NO: 15233120 NR Description: light-harvesting chlorophyll a/b binding protein
  misc_feature (1)..(156): Homolog of NCBI NO: 11277627 NR Description: PS I antenna protein Lhca2 [imported] - thaliana >gi|4741940|gb|AAD28767.1|AF134120_1 Lhca2 protein thaliana] >gi|15451180|gb|AAK96861.1| Lhca2 protein [Arabidopsis
  misc_feature (1)..(156): Homolog of NCBI NO: 115766 NR Description: Chlorophyll A-B binding protein, chloroplast
  misc_feature (1)..(156): Homolog of NCBI NO: 115765 NR Description: Chlorophyll A-B binding protein 7, chloroplast
  misc_feature (1)..(156): Homolog of NCBI NO: 2129879 NR Description: chlorophyll a/b-binding protein type II precursor,
  misc_feature (1)..(156): Homolog of NCBI NO: 34393511 NR Description: putative photosystem I antenna protein [Oryza
  misc_feature (1)..(156): Homolog of NCBI NO: 1076724 NR Description: LHCI-680, photosystem I antenna protein - barley
  misc_feature (1)..(156): Homolog of NCBI NO: 7443233 NR Description: chlorophyll a/b-binding protein type II, I - Lolium temulentum >gi|551047|emb|CAA55864.1| type II LHCI
  misc_feature (1)..(156): Homolog of NCBI NO: 18376587 NR Description: putative chlorophyll A-B binding protein of LHCI
  misc_feature (1)..(156): Homolog of NCBI NO: 99486 NR Description: chlorophyll a/b-binding protein (clone pINEab 31)

SEQ ID NO: 107055 - DNA, 851 bp, Arabidopsis thaliana
  misc_feature (1)..(851): Ceres Seq. ID no. 13621254
  misc_feature: MA Experiment ID: 108573 Result: Up-regulated in Transcription
  misc_feature: MA Experiment 108573 PARAMETER Experiment Name: At_Drought_cDNA_P Parameter: Timepoint (hr) Value: 6
  misc_feature: MA Experiment 108573 PARAMETER Experiment Name: At_Drought_cDNA_P Parameter: Tissue Value: Aerial
  misc_feature: MA Experiment 108573 PARAMETER Experiment Name: At_Drought_cDNA_P Parameter: Treatment Value: Drought vs. No Drought
  misc_feature: MA Experiment ID: 108594 Result: Down-regulated in Transcription
  misc_feature: MA Experiment 108594 PARAMETER Experiment Name: At_Ler-rhl_Root_cDNA_P Parameter: Plant Line Value: null
  misc_feature: MA Experiment ID: 20000224 Result: Down-regulated in Transcription
  misc_feature: MA Experiment ID: 20000355 Result: Up-regulated in Transcription
  misc_feature: MA Experiment 20000355 PARAMETER Experiment Name: At_Siliques_Sub_P Parameter: Age (day) Value: 21
  misc_feature: MA Experiment 20000355 PARAMETER Experiment Name: At_Siliques_Sub_P Parameter: Organism Value: A. thaliana
  misc_feature: MA Experiment 20000355 PARAMETER Experiment Name: At_Siliques_Sub_P Parameter: Plant Line Value: WS
  misc_feature: MA Experiment 20000355 PARAMETER Experiment Name: At_Siliques_Sub_P Parameter: Tissue Value: Less Than 5mm Siliques vs. Whole Plant
  misc_feature: MA Experiment ID: 20000440 Result: Up-regulated in Transcription
  misc_feature: MA Experiment 20000440 PARAMETER Experiment Name: At_Closed-Flower__Sub_P Parameter: Tissue Value: Closed Flower vs. Whole Plant
ataagttgcctaataaacctatttctccgttcgttctctccctctctctcgcttcacgttggatcgaaatcggacaaaagtaaacgacaatggcggaagaattggagaaatctatgcacaaggaagaatctctgatggagaagatcgctgataagatccacgatcacgactcttcgtcgtcgtctgattccgagcacgagaaaccagagtctccgtcagctttgaaggccaagatatatcgtttgtttggtagagagaagcctgttcataaggttctcggtggtggcttaccggctgatgtgttcttgtggagggacaaaaaactctcagcttctgttcttggtgtagcgactgcgatatgggttctgtttgaattggttgagtatcatttcttgagtcttgtgtgtcacattttgatattcgctctcgcagccctgtttttattgtccaatgctcatgcctttatgaacaagactccacctaaaattcctgaaatccatattaaagaggaacatttccttatgattgtttctgcactgagaaacgagctgaaccaggcctttgttattttaaggagcattgccttaggaagggacttgaagaaatttctcatggtggtttttgggctgtggataatctcggttgtgggaaactggttcaacttcttgactcttgtatacatctgttttgtggtgttacatacagtaccaatgttgtatgagaaacatgaggacaaggtagatccagtggcagagaagacgttgaaggagctgaagaaacattacatggtgtttgatgagaaggttctttctaagcttcctgttgcttcccttaaggcaaagttgggttaa

SEQ ID NO: 107056 - protein, 253 aa, Arabidopsis thaliana
  peptide (1)..(253): Ceres Seq. ID no. 13621255
  misc_feature (1)..(251): Homolog of NCBI NO: 18406991 NR Description: expressed protein [Arabidopsis thaliana]
  misc_feature (1)..(253): Homolog of NCBI NO: 15233147 NR Description: hypothetical protein [Arabidopsis thaliana]
  misc_feature (1)..(251): Homolog of NCBI NO: 15236556 NR Description: expressed protein [Arabidopsis thaliana]
  misc_feature (10)..(251): Homolog of NCBI NO: 15238125 NR Description: expressed protein [Arabidopsis thaliana] contains similarity to 24 kDa seed maturation [Arabidopsis thaliana] >gi|14334530|gb|AAK59673.1| unknown
  misc_feature (11)..(251): Homolog of NCBI NO: 15237093 NR Description: expressed protein [Arabidopsis thaliana]
  misc_feature (46)..(251): Homolog of NCBI NO: 34904202 NR Description: P0492F05.25 [Oryza sativa (japonica
  misc_feature (1)..(44): Homolog of NCBI NO: 34904202 NR Description: P0492F05.25 [Oryza sativa (japonica
  misc_feature (10)..(251): Homolog of NCBI NO: 34909318 NR Description: OSJNBb0021A09.5 [Oryza sativa (japonica
  misc_feature (1)..(243): Homolog of NCBI NO: 15222616 NR Description: expressed protein [Arabidopsis thaliana] F22C12.15 [Arabidopsis thaliana] >gi|17381218|gb|AAL36421.1| protein [Arabidopsis thaliana] >gi|21436435|gb|AAM51418.1|
  misc_feature (3)..(244): Homolog of NCBI NO: 15234108 NR Description: hypothetical protein [Arabidopsis thaliana]
MAEELEKSMHKEESLMEKIADKIHDHDSSSSSDSEHEKPESPSALKAKIYRLFGREKPVHKVLGGGLPADVFLWRDKKLSASVLGVATAIWVLFELVEYHFLSLVCHILIFALAALFLLSNAHAFMNKTPPKIPEIHIKEEHFLMIVSALRNELNQAFVILRSIALGRDLKKFLMVVFGLWIISVVGNWFNFLTLVYICFVVLHTVPMLYEKHEDKVDPVAEKTLKELKKHYMVFDEKVLSKLPVASLKAKLG

SEQ ID NO: 107057 - protein, 245 aa, Arabidopsis thaliana
  peptide (1)..(245): Ceres Seq. ID no. 13621256
  misc_feature (1)..(243): Homolog of NCBI NO: 18406991 NR Description: expressed protein [Arabidopsis thaliana]
  misc_feature (1)..(245): Homolog of NCBI NO: 15233147 NR Description: hypothetical protein [Arabidopsis thaliana]
  misc_feature (1)..(243): Homolog of NCBI NO: 15236556 NR Description: expressed protein [Arabidopsis thaliana]
  misc_feature (2)..(243): Homolog of NCBI NO: 15238125 NR Description: expressed protein [Arabidopsis thaliana] contains similarity to 24 kDa seed maturation [Arabidopsis thaliana] >gi|14334530|gb|AAK59673.1| unknown
  misc_feature (3)..(243): Homolog of NCBI NO: 15237093 NR Description: expressed protein [Arabidopsis thaliana]
  misc_feature (38)..(243): Homolog of NCBI NO: 34904202 NR Description: P0492F05.25 [Oryza sativa (japonica
  misc_feature (1)..(36): Homolog of NCBI NO: 34904202 NR Description: P0492F05.25 [Oryza sativa (japonica
  misc_feature (2)..(243): Homolog of NCBI NO: 34909318 NR Description: OSJNBb0021A09.5 [Oryza sativa (japonica
  misc_feature (1)..(235): Homolog of NCBI NO: 15222616 NR Description: expressed protein [Arabidopsis thaliana] F22C12.15 [Arabidopsis thaliana] >gi|17381218|gb|AAL36421.1| protein [Arabidopsis thaliana] >gi|21436435|gb|AAM51418.1|
  misc_feature (1)..(236): Homolog of NCBI NO: 15234108 NR Description: hypothetical protein [Arabidopsis thaliana]
MHKEESLMEKIADKIHDHDSSSSSDSEHEKPESPSALKAKIYRLFGREKPVHKVLGGGLPADVFLWRDKKLSASVLGVATAIWVLFELVEYHFLSLVCHILIFALAALFLLSNAHAFMNKTPPKIPEIHIKEEHFLMIVSALRNELNQAFVILRSIALGRDLKKFLMVVFGLWIISVVGNWFNFLTLVYICFVVLHTVPMLYEKHEDKVDPVAEKTLKELKKHYMVFDEKVLSKLPVASLKAKLG

SEQ ID NO: 107058 - protein, 238 aa, Arabidopsis thaliana
  peptide (1)..(238): Ceres Seq. ID no. 13621257
  misc_feature (1)..(236): Homolog of NCBI NO: 18406991 NR Description: expressed protein [Arabidopsis thaliana]
  misc_feature (1)..(238): Homolog of NCBI NO: 15233147 NR Description: hypothetical protein [Arabidopsis thaliana]
  misc_feature (1)..(236): Homolog of NCBI NO: 15236556 NR Description: expressed protein [Arabidopsis thaliana]
  misc_feature (1)..(236): Homolog of NCBI NO: 15238125 NR Description: expressed protein [Arabidopsis thaliana] contains similarity to 24 kDa seed maturation [Arabidopsis thaliana] >gi|14334530|gb|AAK59673.1| unknown
  misc_feature (1)..(236): Homolog of NCBI NO: 15237093 NR Description: expressed protein [Arabidopsis thaliana]
  misc_feature (31)..(236): Homolog of NCBI NO: 34904202 NR Description: P0492F05.25 [Oryza sativa (japonica
  misc_feature (1)..(29): Homolog of NCBI NO: 34904202 NR Description: P0492F05.25 [Oryza sativa (japonica
  misc_feature (1)..(236): Homolog of NCBI NO: 34909318 NR Description: OSJNBb0021A09.5 [Oryza sativa (japonica
  misc_feature (1)..(228): Homolog of NCBI NO: 15222616 NR Description: expressed protein [Arabidopsis thaliana] F22C12.15 [Arabidopsis thaliana] >gi|17381218|gb|AAL36421.1| protein [Arabidopsis thaliana] >gi|21436435|gb|AAM51418.1|
  misc_feature (1)..(229): Homolog of NCBI NO: 15234108 NR Description: hypothetical protein [Arabidopsis thaliana]
MEKIADKIHDHDSSSSSDSEHEKPESPSALKAKIYRLFGREKPVHKVLGGGLPADVFLWRDKKLSASVLGVATAIWVLFELVEYHFLSLVCHILIFALAALFLLSNAHAFMNKTPPKIPEIHIKEEHFLMIVSALRNELNQAFVILRSIALGRDLKKFLMVVFGLWIISVVGNWFNFLTLVYICFVVLHTVPMLYEKHEDKVDPVAEKTLKELKKHYMVFDEKVLSKLPVASLKAKLG

SEQ ID NO: 107059 - DNA, 1329 bp, Arabidopsis thaliana
  misc_feature (1)..(1329): Ceres Seq. ID no. 13621262
  misc_feature: MA Experiment ID: 20000069 Result: Up-regulated in Transcription
  misc_feature: MA Experiment 20000069 PARAMETER Experiment Name: At_100uM_ABA_Mutants_cDNA_P Parameter: Plant Line Value: CS23
  misc_feature: MA Experiment 20000069 PARAMETER Experiment Name: At_100uM_ABA_Mutants_cDNA_P Parameter: Timepoint (hr) Value: 6
  misc_feature: MA Experiment 20000069 PARAMETER Experiment Name: At_100uM_ABA_Mutants_cDNA_P Parameter: Tissue Value: Aerial
  misc_feature: MA Experiment 20000069 PARAMETER Experiment Name: At_100uM_ABA_Mutants_cDNA_P Parameter: Treatment Value: 100uM ABA vs. No Treatment
  misc_feature: MA Experiment ID: 20000070 Result: Up-regulated in Transcription
  misc_feature: MA Experiment 20000070 PARAMETER Experiment Name: At_100uM_ABA_Mutants_cDNA_P Parameter: Plant Line Value: CS24
  misc_feature: MA Experiment 20000070 PARAMETER Experiment Name: At_100uM_ABA_Mutants_cDNA_P Parameter: Timepoint (hr) Value: 6
  misc_feature: MA Experiment 20000070 PARAMETER Experiment Name: At_100uM_ABA_Mutants_cDNA_P Parameter: Tissue Value: Aerial
  misc_feature: MA Experiment 20000070 PARAMETER Experiment Name: At_100uM_ABA_Mutants_cDNA_P Parameter: Treatment Value: 100uM ABA vs. No Treatment
  misc_feature: MA Experiment ID: 20000071 Result: Up-regulated in Transcription
  misc_feature: MA Experiment 20000071 PARAMETER Experiment Name: At_100uM_ABA_Mutants_cDNA_P Parameter: Plant Line Value: CS8104
  misc_feature: MA Experiment 20000071 PARAMETER Experiment Name: At_100uM_ABA_Mutants_cDNA_P Parameter: Timepoint (hr) Value: 6
  misc_feature: MA Experiment 20000071 PARAMETER Experiment Name: At_100uM_ABA_Mutants_cDNA_P Parameter: Tissue Value: Aerial
  misc_feature: MA Experiment 20000071 PARAMETER Experiment Name: At_100uM_ABA_Mutants_cDNA_P Parameter: Treatment Value: 100uM ABA vs. No Treatment
  misc_feature: MA Experiment ID: 20000087 Result: Up-regulated in Transcription
  misc_feature: MA Experiment 20000087 PARAMETER Experiment Name: At_100uM_ABA_Mutants_cDNA_P Parameter: Plant Line Value: WS
  misc_feature: MA Experiment 20000087 PARAMETER Experiment Name: At_100uM_ABA_Mutants_cDNA_P Parameter: Timepoint (hr) Value: 6
  misc_feature: MA Experiment 20000087 PARAMETER Experiment Name: At_100uM_ABA_Mutants_cDNA_P Parameter: Tissue Value: Aerial
  misc_feature: MA Experiment 20000087 PARAMETER Experiment Name: At_100uM_ABA_Mutants_cDNA_P Parameter: Treatment Value: 100uM ABA vs. No Treatment
  misc_feature: MA Experiment ID: 20000088 Result: Up-regulated in Transcription
  misc_feature: MA Experiment 20000088 PARAMETER Experiment Name: At_100uM_ABA_Mutants_cDNA_P Parameter: Plant Line Value: Landsberg
  misc_feature: MA Experiment 20000088 PARAMETER Experiment Name: At_100uM_ABA_Mutants_cDNA_P Parameter: Timepoint (hr) Value: 6
  misc_feature: MA Experiment 20000088 PARAMETER Experiment Name: At_100uM_ABA_Mutants_cDNA_P Parameter: Tissue Value: Aerial
  misc_feature: MA Experiment 20000088 PARAMETER Experiment Name: At_100uM_ABA_Mutants_cDNA_P Parameter: Treatment Value: 100uM ABA vs. No Treatment
  misc_feature: MA Experiment ID: 20000111 Result: Up-regulated in Transcription
  misc_feature: MA Experiment 20000111 PARAMETER Experiment Name: At_42deg_Heat_cDNA_P Parameter: Temperature (deg C) Value: 42 vs. 22
  misc_feature: MA Experiment 20000111 PARAMETER Experiment Name: At_42deg_Heat_cDNA_P Parameter: Timepoint (hr) Value: 6
  misc_feature: MA Experiment 20000111 PARAMETER Experiment Name: At_42deg_Heat_cDNA_P Parameter: Tissue Value: Aerial
  misc_feature: MA Experiment ID: 20000112 Result: Up-regulated in Transcription
  misc_feature: MA Experiment 20000112 PARAMETER Experiment Name: At_42deg_Heat_cDNA_P Parameter: Temperature (deg C) Value: 42 vs. 22
  misc_feature: MA Experiment 20000112 PARAMETER Experiment Name: At_42deg_Heat_cDNA_P Parameter: Timepoint (hr) Value: 2
  misc_feature: MA Experiment 20000112 PARAMETER Experiment Name: At_42deg_Heat_cDNA_P Parameter: Tissue Value: Aerial
  misc_feature: MA Experiment ID: 20000113 Result: Up-regulated in Transcription
  misc_feature: MA Experiment 20000113 PARAMETER Experiment Name: At_42deg_Heat_cDNA_P Parameter: Temperature (deg C) Value: 42 vs. 22
  misc_feature: MA Experiment 20000113 PARAMETER Experiment Name: At_42deg_Heat_cDNA_P Parameter: Timepoint (hr) Value: 8
  misc_feature: MA Experiment 20000113 PARAMETER Experiment Name: At_42deg_Heat_cDNA_P Parameter: Tissue Value: Aerial
  misc_feature: MA Experiment ID: 20000117 Result: Up-regulated in Transcription
  misc_feature: MA Experiment 20000117 PARAMETER Experiment Name: At_100uM_ABA_Mutants_cDNA_P Parameter: Plant Line Value: Columbia
  misc_feature: MA Experiment 20000117 PARAMETER Experiment Name: At_100uM_ABA_Mutants_cDNA_P Parameter: Timepoint (hr) Value: 6
  misc_feature: MA Experiment 20000117 PARAMETER Experiment Name: At_100uM_ABA_Mutants_cDNA_P Parameter: Tissue Value: Aerial
  misc_feature: MA Experiment 20000117 PARAMETER Experiment Name: At_100uM_ABA_Mutants_cDNA_P Parameter: Treatment Value: 100uM ABA vs. No Treatment
  misc_feature: MA Experiment ID: 20000144 Result: Up-regulated in Transcription
  misc_feature: MA Experiment 20000144 PARAMETER Experiment Name: At_42deg_Heat_cDNA_P Parameter: Temperature (deg C) Value: 42 vs. 22
  misc_feature: MA Experiment 20000144 PARAMETER Experiment Name: At_42deg_Heat_cDNA_P Parameter: Timepoint (hr) Value: 1
  misc_feature: MA Experiment 20000144 PARAMETER Experiment Name: At_42deg_Heat_cDNA_P Parameter: Tissue Value: Aerial
  misc_feature: MA Experiment ID: 20000179 Result: Down-regulated in Transcription
  misc_feature: MA Experiment 20000179 PARAMETER Experiment Name: At_Germinating_Seeds_P Parameter: Age (hr) Value: 6 vs. 0
  misc_feature: MA Experiment 20000179 PARAMETER Experiment Name: At_Germinating_Seeds_P Parameter: Tissue Value: Germinating Seeds
  misc_feature: MA Experiment ID: 20000234 Result: Down-regulated in Transcription
  misc_feature: MA Experiment 20000234 PARAMETER Experiment Name: At_Siliques_P Parameter: Age (day) Value: 21
  misc_feature: MA Experiment 20000234 PARAMETER Experiment Name: At_Siliques_P Parameter: Organism Value: A. thaliana
  misc_feature: MA Experiment 20000234 PARAMETER Experiment Name: At_Siliques_P Parameter: Plant Line Value: WS
  misc_feature: MA Experiment 20000234 PARAMETER Experiment Name: At_Siliques_P Parameter: Tissue Value: Less Than 5mm Siliques vs. Whole Plant
  misc_feature: MA Experiment ID: 20000235 Result: Down-regulated in Transcription
  misc_feature: MA Experiment 20000235 PARAMETER Experiment Name: At_Siliques_P Parameter: Age (day) Value: 21
  misc_feature: MA Experiment 20000235 PARAMETER Experiment Name: At_Siliques_P Parameter: Organism Value: A. thaliana
  misc_feature: MA Experiment 20000235 PARAMETER Experiment Name: At_Siliques_P Parameter: Plant Line Value: WS
  misc_feature: MA Experiment 20000235 PARAMETER Experiment Name: At_Siliques_P Parameter: Tissue Value: 5-10mm Siliques vs. Whole Plant
  misc_feature: MA Experiment ID: 20000265 Result: Down-regulated in Transcription
  misc_feature: MA Experiment 20000265 PARAMETER Experiment Name: At_Open_Flower_P Parameter: Age (day) Value: 21
  misc_feature: MA Experiment 20000265 PARAMETER Experiment Name: At_Open_Flower_P Parameter: Plant Line Value: WS
  misc_feature: MA Experiment 20000265 PARAMETER Experiment Name: At_Open_Flower_P Parameter: Tissue Value: Closed Flower vs. Whole Plant
aaccttttgactcttcttctctctctctctgcaaattcaaaacagtgaaaaaaacctctcttcattttttaactccctctctctctctctctctatggagagacgaacgagacgagtgaagttcacagagaatcgtacggtcacaaacgtagcagctacaccatctaacgggtctccgagactggtccgtatcactgttactgatcctttcgctactgactcgtctagcgacgacgacgacaacaacaacgtcacggtggttccaagagtgaaacgatacgtgaaggagattagattctgccaaggtgaatcttcttcctccaccgcggcgaggaaaggtaagcacaaggaggaggaaagcgtagtggttgaagatgacgtgtcgacgtcggtgaagcctaaaaagtacagaggcgtgagacagagaccttggggaaaattcgcggcggagattagagatccgtcgagccgtactcggatttggcttgggacttttgtcacggcggaggaagctgctatagcgtacgatagagccgcgattcatctcaaaggacctaaagcgctcacgaatttcctaactccgccgacgccaacgccggttatcgatctccaaacggtttccgcctgcgattacggtagagattctcggcagagccttcattcaccgacctctgttctaagattcaacgtcaacgaggaaacagagcatgagattgaagcgatcgagctatctccggagagaaagtcgacggttataaaagaagaagaagaatcgtcggcgggtttggtgttcccggatccgtatctgttaccggatttatctctcgccggcgaatgtttttgggataccgaaattgcccctgaccttttgtttctcgatgaagaaaccaaaatccaatcaacgttgttaccaaacacagaggtttcgaaacaaggagaaaacgaaactgaagatttcgagtttggtttgattgatgatttcgagtcttctccatgggatgtggatcatttcttcgaccatcatcatcactctttcgattaaaaatctcttcttttttggggaaatttttgtgtggtgatgatgacgtggatacatcgtgaccgtcggcttaccttttttagtctgaatgacgtggactgttcagatcaactgaagcgcaaacccaaaaaaactagggttttgttttattaatttgtgggtaaatattttagttaagaagaagataagtatgttaatgtttatcaaggtttggacctttcgttgttttggttcctctctctgagattgtctcaacggtaggaagcagtatataaatgtgtttctatgtc

SEQ ID NO: 107060 - protein, 315 aa, Arabidopsis thaliana
  peptide (1)..(315): Ceres Seq. ID no. 13621263
  misc_feature (102)..(166): Pfam Name: AP2 domain Pfam Description: AP2 domain
  misc_feature (1)..(315): Homolog of NCBI NO: 15233169 NR Description: AP2 domain transcription factor, putative
  misc_feature (1)..(310): Homolog of NCBI NO: 15225959 NR Description: AP2 domain transcription factor, putative thaliana] >gi|25347738|pir||C84901 probable AP2 domain
  misc_feature (6)..(270): Homolog of NCBI NO: 15234337 NR Description: putative protein; protein id: At4g27950.1
  misc_feature (7)..(308): Homolog of NCBI NO: 22655200 NR Description: putative Ap2 domain protein [Arabidopsis thaliana]
  misc_feature (7)..(308): Homolog of NCBI NO: 15236595 NR Description: AP2 domain transcription factor, putative
  misc_feature (28)..(241): Homolog of NCBI NO: 15237053 NR Description: AP2 domain transcription factor, putative
  misc_feature (2)..(211): Homolog of NCBI NO: 15238705 NR Description: putative protein; protein id: At5g53290.1
  misc_feature (8)..(195): Homolog of NCBI NO: 7531181 NR Description: PATHOGENESIS-RELATED GENES TRANSCRIPTIONAL
  misc_feature (1)..(196): Homolog of NCBI NO: 34898320 NR Description: Similar to Nicotiana tabacum mRNA for ERF1,
  misc_feature (29)..(196): Homolog of NCBI NO: 7489208 NR Description: Tsi1 protein - common tobacco
MERRTRRVKFTENRTVTNVAATPSNGSPRLVRITVTDPFATDSSSDDDDNNNVTVVPRVKRYVKEIRFCQGESSSSTAARKGKHKEEESVVVEDDVSTSVKPKKYRGVRQRPWGKFAAEIRDPSSRTRIWLGTFVTAEEAAIAYDRAAIHLKGPKALTNFLTPPTPTPVIDLQTVSACDYGRDSRQSLHSPTSVLRFNVNEETEHEIEAIELSPERKSTVIKEEEESSAGLVFPDPYLLPDLSLAGECFWDTEIAPDLLFLDEETKIQSTLLPNTEVSKQGENETEDFEFGLIDDFESSPWDVDHFFDHHHHSFD

SEQ ID NO: 107061 - DNA, 1309 bp, Arabidopsis thaliana
  misc_feature (1)..(1309): Ceres Seq. ID no. 13621272
  misc_feature: MA Experiment ID: 108573 Result: Down-regulated in Transcription
  misc_feature: MA Experiment 108573 PARAMETER Experiment Name: At_Drought_cDNA_P Parameter: Timepoint (hr) Value: 6
  misc_feature: MA Experiment 108573 PARAMETER Experiment Name: At_Drought_cDNA_P Parameter: Tissue Value: Aerial
  misc_feature: MA Experiment 108573 PARAMETER Experiment Name: At_Drought_cDNA_P Parameter: Treatment Value: Drought vs. No Drought
  misc_feature: MA Experiment ID: 20000089 Result: Down-regulated in Transcription
  misc_feature: MA Experiment ID: 20000090 Result: Down-regulated in Transcription
  misc_feature: MA Experiment ID: 20000173 Result: Down-regulated in Transcription
  misc_feature: MA Experiment 20000173 PARAMETER Experiment Name: At_42deg_Heat_P Parameter: Age (day) Value: 14
  misc_feature: MA Experiment 20000173 PARAMETER Experiment Name: At_42deg_Heat_P Parameter: Organism Value: A. thaliana
  misc_feature: MA Experiment 20000173 PARAMETER Experiment Name: At_42deg_Heat_P Parameter: Plant Line Value: WS
  misc_feature: MA Experiment 20000173 PARAMETER Experiment Name: At_42deg_Heat_P Parameter: Temperature (deg C) Value: 42 vs. 22
  misc_feature: MA Experiment 20000173 PARAMETER Experiment Name: At_42deg_Heat_P Parameter: Timepoint (hr) Value: 6
  misc_feature: MA Experiment 20000173 PARAMETER Experiment Name: At_42deg_Heat_P Parameter: Tissue Value: Aerial
  misc_feature: MA Experiment ID: 20000235 Result: Up-regulated in Transcription
  misc_feature: MA Experiment 20000235 PARAMETER Experiment Name: At_Siliques_P Parameter: Age (day) Value: 21
  misc_feature: MA Experiment 20000235 PARAMETER Experiment Name: At_Siliques_P Parameter: Organism Value: A. thaliana
  misc_feature: MA Experiment 20000235 PARAMETER Experiment Name: At_Siliques_P Parameter: Plant Line Value: WS
  misc_feature: MA Experiment 20000235 PARAMETER Experiment Name: At_Siliques_P Parameter: Tissue Value: 5-10mm Siliques vs. Whole Plant
  misc_feature: MA Experiment ID: 20000264 Result: Up-regulated in Transcription
  misc_feature: MA Experiment 20000264 PARAMETER Experiment Name: At_Open_Flower_P Parameter: Age (day) Value: 21
  misc_feature: MA Experiment 20000264 PARAMETER Experiment Name: At_Open_Flower_P Parameter: Plant Line Value: WS
  misc_feature: MA Experiment 20000264 PARAMETER Experiment Name: At_Open_Flower_P Parameter: Tissue Value: Open Flower vs. Whole Plant
  misc_feature: MA Experiment ID: 20000265 Result: Up-regulated in Transcription
  misc_feature: MA Experiment 20000265 PARAMETER Experiment Name: At_Open_Flower_P Parameter: Age (day) Value: 21
  misc_feature: MA Experiment 20000265 PARAMETER Experiment Name: At_Open_Flower_P Parameter: Plant Line Value: WS
  misc_feature: MA Experiment 20000265 PARAMETER Experiment Name: At_Open_Flower_P Parameter: Tissue Value: Closed Flower vs. Whole Plant
  misc_feature: MA Experiment ID: 20000495 Result: Up-regulated in Transcription
  misc_feature: MA Experiment 20000495 PARAMETER Experiment Name: At_Guard_Cells_P Parameter: Harvest Date Value: 8/2/2002
  misc_feature: MA Experiment 20000495 PARAMETER Experiment Name: At_Guard_Cells_P Parameter: Organism Value: A. thaliana
  misc_feature: MA Experiment 20000495 PARAMETER Experiment Name: At_Guard_Cells_P Parameter: Tissue Value: Guard Cells vs. Leaves
  misc_feature: MA Experiment ID: 20001248 Result: Down-regulated in Transcription
  misc_feature: MA Experiment 20001248 PARAMETER Experiment Name: At_Far-red-induction_P Parameter: Age (day) Value: 7
  misc_feature: MA Experiment 20001248 PARAMETER Experiment Name: At_Far-red-induction_P Parameter: Light Value: Far-red vs. White
  misc_feature: MA Experiment 20001248 PARAMETER Experiment Name: At_Far-red-induction_P Parameter: Organism Value: A. thaliana
  misc_feature: MA Experiment 20001248 PARAMETER Experiment Name: At_Far-red-induction_P Parameter: Plant Line Value: Columbia
  misc_feature: MA Experiment 20001248 PARAMETER Experiment Name: At_Far-red-induction_P Parameter: Timepoint (hr) Value: 4
  misc_feature: MA Experiment 20001248 PARAMETER Experiment Name: At_Far-red-induction_P Parameter: Tissue Value: Whole Plant
agaatcagaagagagtacatgagtttcctcttctgcctctttggtgattcttagcatttattattactcactcatcttcttttcattacattacataccaaacaagagctctcaaatggaaaggtttcaaggacacatcaacccctgtttcttcgatcgaaaaccggatgtgagaagcctcgaggttcaaggatttgcagaggctcaaagctttgctttcaaagaaaaagaggaagaaagcttacaagatacagttccatttctacagatgctgcaaagtgaagacccctcatcgtttttttcaatcaaagagccaaactttctgacgctactgtctcttcaaaccctcaaggagccttgggaactcgaaagatatctttcacttgaggattcacaatttcattcaccggtccaatctgagaccaaccgcttcatggaaggagccaatcaagctgtgtcaagccaagaaattccctttagccaagcaaacatgacactcccttcttctacctcatcaccactcagtgcacattcaagacgaaagcgcaaaatcaaccacttgctgcctcaagaaatgactagagaaaagagaaagaggaggaaaacaaaaccaagtaaaaacaatgaagagattgagaatcaaagaataaaccacattgctgttgaacgaaacagaagacgtcaaatgaacgaacatatcaactctctccgggcccttctcccaccttcctacatccaacgaggagaccaagcttccatagtaggaggagcaataaactacgtgaaggtcctcgagcaaatcatacaatctctcgaatcgcaaaagagaacgcaacaacaaagtaacagtgaggtagtagaaaacgcacttaatcatctctcaggcatttcgtcgaacgacctgtggacaactcttgaagatcaaacttgtatccccaaaatcgaagctacagtgatacaaaaccatgtcagccttaaagttcaatgtgagaagaaacaaggacaacttctcaaaggaatcatatcacttgaaaagcttaaactcactgttcttcatctcaatatcactacttcgtctcattcctctgtttcttattccttcaacctcaagatggaagatgagtgcgacttagagtcagccgacgagattacggcggctgttcatcggattttcgatattccgacaatttgattaaacacatataattccaaaaatattaacagctgacaaaatggtatcttttttttttttcctacttgtaccaattttttaagaattaagagaataaaaaaatttcgtttttcgttc

SEQ ID NO: 107062 - protein, 358 aa, Arabidopsis thaliana
  peptide (1)..(358): Ceres Seq. ID no. 13621273
  misc_feature (176)..(227): Pfam Name: Helix-loop-helix DNA-binding domain Pfam Description: Helix-loop-helix DNA-binding domain
  misc_feature (1)..(358): Homolog of NCBI NO: 18412203 NR Description: bHLH protein family [Arabidopsis thaliana]
  misc_feature (1)..(358): Homolog of NCBI NO: 11282339 NR Description: hypothetical protein F21F14.120 - Arabidopsis >gi|6899893|emb|CAB71902.1| putative protein [Arabidopsis
  misc_feature (1)..(358): Homolog of NCBI NO: 21618009 NR Description: unknown [Arabidopsis thaliana]
  misc_feature (52)..(358): Homolog of NCBI NO: 30695519 NR Description: bHLH protein family [Arabidopsis thaliana] putative bHLH transcription factor bHLH067 [Arabidopsis thaliana]
  misc_feature (14)..(354): Homolog of NCBI NO: 15226442 NR Description: bHLH protein family [Arabidopsis thaliana]
  misc_feature (96)..(354): Homolog of NCBI NO: 15234187 NR Description: bHLH protein family [Arabidopsis thaliana]
  misc_feature (273)..(354): Homolog of NCBI NO: 37533680 NR Description: putative helix-loop-helix DNA-binding protein
  misc_feature (158)..(237): Homolog of NCBI NO: 37533680 NR Description: putative helix-loop-helix DNA-binding protein
  misc_feature (158)..(245): Homolog of NCBI NO: 34902426 NR Description: Unknown protein [Oryza sativa (japonica
  misc_feature (273)..(352): Homolog of NCBI NO: 34902426 NR Description: Unknown protein [Oryza sativa (japonica
MERFQGHINPCFFDRKPDVRSLEVQGFAEAQSFAFKEKEEESLQDTVPFLQMLQSEDPSSFFSIKEPNFLTLLSLQTLKEPWELERYLSLEDSQFHSPVQSETNRFMEGANQAVSSQEIPFSQANMTLPSSTSSPLSAHSRRKRKINHLLPQEMTREKRKRRKTKPSKNNEEIENQRINHIAVERNRRRQMNEHINSLRALLPPSYIQRGDQASIVGGAINYVKVLEQIIQSLESQKRTQQQSNSEVVENALNHLSGISSNDLWTTLEDQTCIPKIEATVIQNHVSLKVQCEKKQGQLLKGIISLEKLKLTVLHLNITTSSHSSVSYSFNLKMEDECDLESADEITAAVHRIFDIPTI

SEQ ID NO: 107063 - protein, 307 aa, Arabidopsis thaliana; identical to SEQ ID NO: 39873
  peptide (1)..(307): Ceres Seq. ID no. 13621274
  misc_feature (125)..(176): Pfam Name: Helix-loop-helix DNA-binding domain Pfam Description: Helix-loop-helix DNA-binding domain
  misc_feature (1)..(307): Homolog of NCBI NO: 18412203 NR Description: bHLH protein family [Arabidopsis thaliana]
  misc_feature (1)..(307): Homolog of NCBI NO: 11282339 NR Description: hypothetical protein F21F14.120 - Arabidopsis >gi|6899893|emb|CAB71902.1| putative protein [Arabidopsis
  misc_feature (1)..(307): Homolog of NCBI NO: 21618009 NR Description: unknown [Arabidopsis thaliana]
  misc_feature (1)..(307): Homolog of NCBI NO: 30695519 NR Description: bHLH protein family [Arabidopsis thaliana] putative bHLH transcription factor bHLH067 [Arabidopsis thaliana]
  misc_feature (1)..(303): Homolog of NCBI NO: 15226442 NR Description: bHLH protein family [Arabidopsis thaliana]
  misc_feature (45)..(303): Homolog of NCBI NO: 15234187 NR Description: bHLH protein family [Arabidopsis thaliana]
  misc_feature (222)..(303): Homolog of NCBI NO: 37533680 NR Description: putative helix-loop-helix DNA-binding protein
  misc_feature (107)..(186): Homolog of NCBI NO: 37533680 NR Description: putative helix-loop-helix DNA-binding protein
  misc_feature (107)..(194): Homolog of NCBI NO: 34902426 NR Description: Unknown protein [Oryza sativa (japonica
  misc_feature (222)..(301): Homolog of NCBI NO: 34902426 NR Description: Unknown protein [Oryza sativa (japonica

SEQ ID NO: 107064 - protein, 252 aa, Arabidopsis thaliana; identical to SEQ ID NO: 39874
  peptide (1)..(252): Ceres Seq. ID no. 13621275
  misc_feature (70)..(121): Pfam Name: Helix-loop-helix DNA-binding domain Pfam Description: Helix-loop-helix DNA-binding domain
  misc_feature (1)..(252): Homolog of NCBI NO: 18412203 NR Description: bHLH protein family [Arabidopsis thaliana]
  misc_feature (1)..(252): Homolog of NCBI NO: 11282339 NR Description: hypothetical protein F21F14.120 - Arabidopsis >gi|6899893|emb|CAB71902.1| putative protein [Arabidopsis
  misc_feature (1)..(252): Homolog of NCBI NO: 21618009 NR Description: unknown [Arabidopsis thaliana]
  misc_feature (1)..(252): Homolog of NCBI NO: 30695519 NR Description: bHLH protein family [Arabidopsis thaliana] putative bHLH transcription factor bHLH067 [Arabidopsis thaliana]
  misc_feature (1)..(248): Homolog of NCBI NO: 15226442 NR Description: bHLH protein family [Arabidopsis thaliana]
  misc_feature (1)..(248): Homolog of NCBI NO: 15234187 NR Description: bHLH protein family [Arabidopsis thaliana]
  misc_feature (167)..(248): Homolog of NCBI NO: 37533680 NR Description: putative helix-loop-helix DNA-binding protein
  misc_feature (52)..(131): Homolog of NCBI NO: 37533680 NR Description: putative helix-loop-helix DNA-binding protein
  misc_feature (52)..(139): Homolog of NCBI NO: 34902426 NR Description: Unknown protein [Oryza sativa (japonica
  misc_feature (167)..(246): Homolog of NCBI NO: 34902426 NR Description: Unknown protein [Oryza sativa (japonica

SEQ ID NO: 107065 - DNA, 1126 bp, Arabidopsis thaliana
  misc_feature (1)..(1126): Ceres Seq. ID no. 13621276
  misc_feature: MA Experiment ID: 20000314 Result: Down-regulated in Transcription
  misc_feature: MA Experiment 20000314 PARAMETER Experiment Name: At_14day_Shoots-Roots_Sub_P Parameter: Age (day) Value: 14
  misc_feature: MA Experiment 20000314 PARAMETER Experiment Name: At_14day_Shoots-Roots_Sub_P Parameter: Organism Value: A. thaliana
  misc_feature: MA Experiment 20000314 PARAMETER Experiment Name: At_14day_Shoots-Roots_Sub_P Parameter: Plant Line Value: WS
  misc_feature: MA Experiment 20000314 PARAMETER Experiment Name: At_14day_Shoots-Roots_Sub_P Parameter: Tissue Value: Roots vs. Whole Plant
  misc_feature: MA Experiment ID: 20000315 Result: Down-regulated in Transcription
  misc_feature: MA Experiment 20000315 PARAMETER Experiment Name: At_14day_Shoots-Roots_Sub_P Parameter: Age (day) Value: 14
  misc_feature: MA Experiment 20000315 PARAMETER Experiment Name: At_14day_Shoots-Roots_Sub_P Parameter: Organism Value: A. thaliana
  misc_feature: MA Experiment 20000315 PARAMETER Experiment Name: At_14day_Shoots-Roots_Sub_P Parameter: Plant Line Value: WS
  misc_feature: MA Experiment 20000315 PARAMETER Experiment Name: At_14day_Shoots-Roots_Sub_P Parameter: Tissue Value: Shoots vs. Whole Plant
aattctcttccttctgaaattagggttttttttatctcctcctctctctttcttgtctaccaaaaaaggttttatcgaattactctcaaatcgtatggtgaggaagtcaaaatcttgagagatctgagattgtaagaagatgaatcaagaagataaagagaagcctattgaagaagcttcttcatcaatggagagagaacacatgttcgacaaagtagtaacaccaagcgacgttggcaaactaaaccgactcgtgatccctaagcaacacgcagagagatacttcccattagataactccacaacaaacgacagcaacaaaggtttgcttctaaacttcgaagatcgaagtggaaactcatggaggttccgttactcttactggaacagtagtcaaagctatgtcatgactaaaggttggagccgttttgtcaaagacaagaagcttgatgctggagacatcgtttcttttcagagagattcttgtaataaagacaagctttacatcgattggaggagacgacctaagattcccgatcatcatcatcagcaattcgccggagctatgttccctaggttttacacttttcctcatcctcagatgccgacaaattacgaaactcacaacctttatcatcgatttcatcaacgagatctaggaattggatactatgtgaggtcaatggagaggagtcatccaacggctgtgattgaatctgtgccggtgatgatgcaaaggagagcacaagtggcttcaatggcttcgagaggagagaagcggttaaggctgtttggtgtagatatggagtgcggaggaggaggagggagtgtgaatagtacggaggaagagtcgtcgtcttccggtggtagtataccacgtggcagagtttctatggttggtgctggttctctcctccagttgaggttagtgagcagtgatgatgagtctttagtagcaatggaagctgcaagtcttgaggatcatcacttctttacaaagaaaggaaaaccttctttgtcttttgatttggataggtgatgattatcatgagattaatcactatttaaaaatgcatatatatgataatttataccatatattatatatgacacaaagatgtctttc

SEQ ID NO: 107066 - protein, 299 aa, Arabidopsis thaliana
  peptide (1)..(299): Ceres Seq. ID no. 13621277
  misc_feature (22)..(131): Pfam Name: B3 DNA binding domain Pfam Description: B3 DNA binding domain
  misc_feature (1)..(299): Homolog of NCBI NO: 15228649 NR Description: DNA-binding protein, putative [Arabidopsis
  misc_feature (1)..(299): Homolog of NCBI NO: 26450371 NR Description: putative RAV [Arabidopsis thaliana]
  misc_feature (17)..(299): Homolog of NCBI NO: 21618252 NR Description: RAV-like protein [Arabidopsis thaliana]
  misc_feature (1)..(299): Homolog of NCBI NO: 18407193 NR Description: DNA-binding protein, putative [Arabidopsis
  misc_feature (18)..(181): Homolog of NCBI NO: 15223284 NR Description: DNA-binding protein, putative [Arabidopsis
  misc_feature (17)..(138): Homolog of NCBI NO: 32492293 NR Description: OSJNBa0088A01.1 [Oryza sativa (japonica
  misc_feature (15)..(131): Homolog of NCBI NO: 34902226 NR Description: Putative RAV-like B3 domain DNA binding protein
  misc_feature (3)..(169): Homolog of NCBI NO: 37536454 NR Description: putative DNA-binding protein [Oryza sativa
  misc_feature (18)..(226): Homolog of NCBI NO: 30681787 NR Description: DNA-binding protein, putative [Arabidopsis >gi|20152530|emb|CAD29644.1| putative auxin response factor 32
  misc_feature (19)..(128): Homolog of NCBI NO: 15239984 NR Description: DNA-binding protein, putative [Arabidopsis
MNQEDKEKPIEEASSSMEREHMFDKVVTPSDVGKLNRLVIPKQHAERYFPLDNSTTNDSNKGLLLNFEDRSGNSWRFRYSYWNSSQSYVMTKGWSRFVKDKKLDAGDIVSFQRDSCNKDKLYIDWRRRPKIPDHHHQQFAGAMFPRFYTFPHPQMPTNYETHNLYHRFHQRDLGIGYYVRSMERSHPTAVIESVPVMMQRRAQVASMASRGEKRLRLFGVDMECGGGGGSVNSTEEESSSSGGSIPRGRVSMVGAGSLLQLRLVSSDDESLVAMEAASLEDHHFFTKKGKPSLSFDLDR

SEQ ID NO: 107067 - protein, 283 aa, Arabidopsis thaliana
  peptide (1)..(283): Ceres Seq. ID no. 13621278
  misc_feature (6)..(115): Pfam Name: B3 DNA binding domain Pfam Description: B3 DNA binding domain
  misc_feature (1)..(283): Homolog of NCBI NO: 15228649 NR Description: DNA-binding protein, putative [Arabidopsis
  misc_feature (1)..(283): Homolog of NCBI NO: 26450371 NR Description: putative RAV [Arabidopsis thaliana]
  misc_feature (1)..(283): Homolog of NCBI NO: 21618252 NR Description: RAV-like protein [Arabidopsis thaliana]
  misc_feature (1)..(283): Homolog of NCBI NO: 18407193 NR Description: DNA-binding protein, putative [Arabidopsis
  misc_feature (2)..(165): Homolog of NCBI NO: 15223284 NR Description: DNA-binding protein, putative [Arabidopsis
  misc_feature (1)..(122): Homolog of NCBI NO: 32492293 NR Description: OSJNBa0088A01.1 [Oryza sativa (japonica
  misc_feature (1)..(115): Homolog of NCBI NO: 34902226 NR Description: Putative RAV-like B3 domain DNA binding protein
  misc_feature (1)..(153): Homolog of NCBI NO: 37536454 NR Description: putative DNA-binding protein [Oryza sativa
  misc_feature (2)..(210): Homolog of NCBI NO: 30681787 NR Description: DNA-binding protein, putative [Arabidopsis >gi|20152530|emb|CAD29644.1| putative auxin response factor 32
  misc_feature (3)..(112): Homolog of NCBI NO: 15239984 NR Description: DNA-binding protein, putative [Arabidopsis
MEREHMFDKVVTPSDVGKLNRLVIPKQHAERYFPLDNSTTNDSNKGLLLNFEDRSGNSWRFRYSYWNSSQSYVMTKGWSRFVKDKKLDAGDIVSFQRDSCNKDKLYIDWRRRPKIPDHHHQQFAGAMFPRFYTFPHPQMPTNYETHNLYHRFHQRDLGIGYYVRSMERSHPTAVIESVPVMMQRRAQVASMASRGEKRLRLFGVDMECGGGGGSVNSTEEESSSSGGSIPRGRVSMVGAGSLLQLRLVSSDDESLVAMEAASLEDHHFFTKKGKPSLSFDLDR

SEQ ID NO: 107068 - protein, 278 aa, Arabidopsis thaliana
  peptide (1)..(278): Ceres Seq. ID no. 13621279
  misc_feature (1)..(110): Pfam Name: B3 DNA binding domain Pfam Description: B3 DNA binding domain
  misc_feature (1)..(278): Homolog of NCBI NO: 15228649 NR Description: DNA-binding protein, putative [Arabidopsis
  misc_feature (1)..(278): Homolog of NCBI NO: 26450371 NR Description: putative RAV [Arabidopsis thaliana]
  misc_feature (1)..(278): Homolog of NCBI NO: 21618252 NR Description: RAV-like protein [Arabidopsis thaliana]
  misc_feature (1)..(278): Homolog of NCBI NO: 18407193 NR Description: DNA-binding protein, putative [Arabidopsis
  misc_feature (1)..(160): Homolog of NCBI NO: 15223284 NR Description: DNA-binding protein, putative [Arabidopsis
  misc_feature (1)..(117): Homolog of NCBI NO: 32492293 NR Description: OSJNBa0088A01.1 [Oryza sativa (japonica
  misc_feature (1)..(110): Homolog of NCBI NO: 34902226 NR Description: Putative RAV-like B3 domain DNA binding protein
  misc_feature (1)..(148): Homolog of NCBI NO: 37536454 NR Description: putative DNA-binding protein [Oryza sativa
  misc_feature (1)..(205): Homolog of NCBI NO: 30681787 NR Description: DNA-binding protein, putative [Arabidopsis >gi|20152530|emb|CAD29644.1| putative auxin response factor 32
  misc_feature (1)..(107): Homolog of NCBI NO: 15239984 NR Description: DNA-binding protein, putative [Arabidopsis
MFDKVVTPSDVGKLNRLVIPKQHAERYFPLDNSTTNDSNKGLLLNFEDRSGNSWRFRYSYWNSSQSYVMTKGWSRFVKDKKLDAGDIVSFQRDSCNKDKLYIDWRRRPKIPDHHHQQFAGAMFPRFYTFPHPQMPTNYETHNLYHRFHQRDLGIGYYVRSMERSHPTAVIESVPVMMQRRAQVASMASRGEKRLRLFGVDMECGGGGGSVNSTEEESSSSGGSIPRGRVSMVGAGSLLQLRLVSSDDESLVAMEAASLEDHHFFTKKGKPSLSFDLDR

SEQ ID NO: 107069 - DNA, 699 bp, Arabidopsis thaliana
  misc_feature (1)..(699): Ceres Seq. ID no. 13621280
  misc_feature: MA Experiment ID: 108434 Result: Down-regulated in Transcription
  misc_feature: MA Experiment 108434 PARAMETER Experiment Name: At_Root_Tips_cDNA_P Parameter: Tissue Value: Root Tips
  misc_feature: MA Experiment ID: 108573 Result: Up-regulated in Transcription
  misc_feature: MA Experiment 108573 PARAMETER Experiment Name: At_Drought_cDNA_P Parameter: Timepoint (hr) Value: 6
  misc_feature: MA Experiment 108573 PARAMETER Experiment Name: At_Drought_cDNA_P Parameter: Tissue Value: Aerial
  misc_feature: MA Experiment 108573 PARAMETER Experiment Name: At_Drought_cDNA_P Parameter: Treatment Value: Drought vs. No Drought
  misc_feature: MA Experiment ID: 108585 Result: Up-regulated in Transcription
  misc_feature: MA Experiment 108585 PARAMETER Experiment Name: At_5mM_NaNP_cDNA_P Parameter: Timepoint (hr) Value: 6
  misc_feature: MA Experiment 108585 PARAMETER Experiment Name: At_5mM_NaNP_cDNA_P Parameter: Tissue Value: Aerial
  misc_feature: MA Experiment 108585 PARAMETER Experiment Name: At_5mM_NaNP_cDNA_P Parameter: Treatment Value: null
  misc_feature: MA Experiment ID: 108595 Result: Up-regulated in Transcription
  misc_feature: MA Experiment 108595 PARAMETER Experiment Name: At_Ler-pi_Ovule_cDNA_P Parameter: Plant Line Value: null
  misc_feature: MA Experiment ID: 20000224 Result: Down-regulated in Transcription
  misc_feature: MA Experiment ID: 20000227 Result: Down-regulated in Transcription
  misc_feature: MA Experiment 20000227 PARAMETER Experiment Name: At_Root-Tips-vs-Tops_P Parameter: Tissue Value: Root Tips vs. Root Tops
  misc_feature: MA Experiment ID: 20000286 Result: Down-regulated in Transcription
  misc_feature: MA Experiment 20000286 PARAMETER Experiment Name: At_Open_Flower_P Parameter: Age (day) Value: 21
  misc_feature: MA Experiment 20000286 PARAMETER Experiment Name: At_Open_Flower_P Parameter: Plant Line Value: WS
  misc_feature: MA Experiment 20000286 PARAMETER Experiment Name: At_Open_Flower_P Parameter: Tissue Value: Half Open vs. Whole Plant
  misc_feature: MA Experiment ID: 20001905 Result: Up-regulated in Transcription
  misc_feature: MA Experiment 20001905 PARAMETER Experiment Name: At_Drought_Reproduction_P Parameter: Age (day) Value: 40
  misc_feature: MA Experiment 20001905 PARAMETER Experiment Name: At_Drought_Reproduction_P Parameter: Organism Value: A. thaliana
  misc_feature: MA Experiment 20001905 PARAMETER Experiment Name: At_Drought_Reproduction_P Parameter: Plant Line Value: WS
  misc_feature: MA Experiment 20001905 PARAMETER Experiment Name: At_Drought_Reproduction_P Parameter: Timepoint (day) Value: 10
  misc_feature: MA Experiment 20001905 PARAMETER Experiment Name: At_Drought_Reproduction_P Parameter: Tissue Value: Rosettes
  misc_feature: MA Experiment 20001905 PARAMETER Experiment Name: At_Drought_Reproduction_P Parameter: Treatment Value: Drought vs. No Drought
aaacaacacggttacgcaaactctctctgagaaaatccccaaatctcatgaaattagggtttcaatcattctttgaacgcaaaattagaaacctcctctccatccgccacgaatctctagggttcttctgaaggattagatttctgggttttagaaatctgtctctcgtcatcaacaattcacgtgatgccgtcgttaacactgagcattcgtttccttttcttagttctctgcttgatcggtttacaagctgcggatgatttcccagataaatcccgcggtgacgtatgccctcgggttaaggatcggggtggatgcacaatcaactgtttccgggcggatccggtttgtggaaccgatggagtcacgtactggtgcggttgtcccgacgcagcttgccatggcgctcgcgtagtcaaaaaaggagcttgtgacacaggtaatgcaggaagtgcttctgttcctggacaagctttgttattgattcatattgtttggctcttcttgctcggactctctcttctcgttggtggtttctgatctctagagagttagtggtggaattagacaaggaattagatagatcacacgtcctgagtttgttgtatgtgtatagttgagtattgttttgctttgtgtgctatatatatgtaatagattctgttgcagttcattctaataatgaagatttgatcggac

SEQ ID NO: 107070 - protein, 117 aa, Arabidopsis thaliana; identical to SEQ ID NO: 31083
  peptide (1)..(117): Ceres Seq. ID no. 13621281
  misc_feature (35)..(82): Pfam Name: Kazal-type serine protease inhibitor domain Pfam Description: Kazal-type serine protease inhibitor domain
  misc_feature (1)..(117): Homolog of NCBI NO: 18412211 NR Description: expressed protein [Arabidopsis thaliana]
  misc_feature (1)..(117): Homolog of NCBI NO: 21554106 NR Description: unknown [Arabidopsis thaliana]
  misc_feature (1)..(117): Homolog of NCBI NO: 18411677 NR Description: expressed protein [Arabidopsis thaliana]
  misc_feature (1)..(117): Homolog of NCBI NO: 21555759 NR Description: unknown [Arabidopsis thaliana]
  misc_feature (2)..(115): Homolog of NCBI NO: 34909170 NR Description: P0468B07.28 [Oryza sativa (japonica

SEQ ID NO: 107071 - DNA, 1201 bp, Arabidopsis thaliana
  misc_feature (1)..(1201): Ceres Seq. ID no. 13621282
  misc_feature: MA Experiment ID: 108434 Result: Down-regulated in Transcription
  misc_feature: MA Experiment 108434 PARAMETER Experiment Name: At_Root_Tips_cDNA_P Parameter: Tissue Value: Root Tips
  misc_feature: MA Experiment ID: 108462 Result: Down-regulated in Transcription
  misc_feature: MA Experiment 108462 PARAMETER Experiment Name: At_Germinating_Seeds_cDNA_P Parameter: Age (day) Value: 2 vs. 0
  misc_feature: MA Experiment 108462 PARAMETER Experiment Name: At_Germinating_Seeds_cDNA_P Parameter: Tissue Value: Germinating Seeds
  misc_feature: MA Experiment ID: 108605 Result: Up-regulated in Transcription
  misc_feature: MA Experiment 108605 PARAMETER Experiment Name: At_100uM_ABA_cDNA_P Parameter: Timepoint (hr) Value: 6
  misc_feature: MA Experiment 108605 PARAMETER Experiment Name: At_100uM_ABA_cDNA_P Parameter: Tissue Value: Aerial
  misc_feature: MA Experiment 108605 PARAMETER Experiment Name: At_100uM_ABA_cDNA_P Parameter: Treatment Value: 100uM ABA vs. No Treatment
  misc_feature: MA Experiment ID: 20000069 Result: Up-regulated in Transcription
  misc_feature: MA Experiment 20000069 PARAMETER Experiment Name: At_100uM_ABA_Mutants_cDNA_P Parameter: Plant Line Value: CS23
  misc_feature: MA Experiment 20000069 PARAMETER Experiment Name: At_100uM_ABA_Mutants_cDNA_P Parameter: Timepoint (hr) Value: 6
  misc_feature: MA Experiment 20000069 PARAMETER Experiment Name: At_100uM_ABA_Mutants_cDNA_P Parameter: Tissue Value: Aerial
  misc_feature: MA Experiment 20000069 PARAMETER Experiment Name: At_100uM_ABA_Mutants_cDNA_P Parameter: Treatment Value: 100uM ABA vs. No Treatment
  misc_feature: MA Experiment ID: 20000070 Result: Up-regulated in Transcription
  misc_feature: MA Experiment 20000070 PARAMETER Experiment Name: At_100uM_ABA_Mutants_cDNA_P Parameter: Plant Line Value: CS24
  misc_feature: MA Experiment 20000070 PARAMETER Experiment Name: At_100uM_ABA_Mutants_cDNA_P Parameter: Timepoint (hr) Value: 6
  misc_feature: MA Experiment 20000070 PARAMETER Experiment Name: At_100uM_ABA_Mutants_cDNA_P Parameter: Tissue Value: Aerial
  misc_feature: MA Experiment 20000070 PARAMETER Experiment Name: At_100uM_ABA_Mutants_cDNA_P Parameter: Treatment Value: 100uM ABA vs. No Treatment
  misc_feature: MA Experiment ID: 20000185 Result: Up-regulated in Transcription
  misc_feature: MA Experiment 20000185 PARAMETER Experiment Name: At_Roots__P Parameter: Age (day) Value: 7 vs. 21
  misc_feature: MA Experiment 20000185 PARAMETER Experiment Name: At_Roots__P Parameter: Organism Value: A. thaliana
  misc_feature: MA Experiment 20000185 PARAMETER Experiment Name: At_Roots__P Parameter: Tissue Value: Roots vs. Whole Plant
  misc_feature: MA Experiment ID: 20000224 Result: Up-regulated in Transcription
  misc_feature: MA Experiment ID: 20000227 Result: Down-regulated in Transcription
  misc_feature: MA Experiment 20000227 PARAMETER Experiment Name: At_Root-Tips-vs-Tops_P Parameter: Tissue Value: Root Tips vs. Root Tops
  misc_feature: MA Experiment ID: 20000439 Result: Up-regulated in Transcription
  misc_feature: MA Experiment 20000439 PARAMETER Experiment Name: At_Roots__P Parameter: Age (day) Value: 14 vs. 21
  misc_feature: MA Experiment 20000439 PARAMETER Experiment Name: At_Roots__P Parameter: Organism Value: A. thaliana
  misc_feature: MA Experiment 20000439 PARAMETER Experiment Name: At_Roots__P Parameter: Tissue Value: Roots vs. Whole Plant
accaatcaccactcacatgttatcaataattgcttataagaatttgtattcccactctaatcatcaactctattgattccacgcgatgacgacgttttcaacgagctttcttttccttttgttggttttctgcttgatcggttcactagctgccgatgatctccaacataaatccggtcgggacgtctgctccggtggttctgatcttagaacccccgatattcgtcttaaccggccgacagactctgtcgtcggaaactgcccgacggaggcgagtcctttagttatggctgacgacgagaagtacggtaacaaaatggttatcagtctcactcctcgcctttatgactatgtcctcaacaacgttcgtgagcatgagattttgaagcaacttcgagaagaaactgccattagtcaaattcaggtgtcacctgatcaagcgcaattgcttgcaatgcttgtagagattcttggagctaaacgatgtattgaagttggagtttacacgggatattcatcactggctgtggcgttggttctaccagaatcagggcgtcttgttgcctgtgataaagatgctaacgctcttgaagttgctaagaggtactacgagcttgccggagtgtctcacaaggtcactgtgaaacatggtcttgcagcagaatctttgatgtctatgattcagaacggtgaagagtccagctatgattttgcatttcttgatgctgataaggcgatgtatcaggagtacttcgaatcgctacttcgactcgtcagggttggtggagtcattgtgattgataatgttctttggcatggatgggttgcggattctacggtgaatgatgagaggaccatcagcctaagaaatttcaacaaaaaattaatggatgatcaacgtgtaagcattagtatggtatcaatcggcgatggtatgaccatatgccgcaagaggtaatcatccgtaaaaaccactcagctcgcagtgaacctgtttcaagatagaagaagtctttaaacataaaaggattgatgaagccaagatatccagtctcacaaacactaaagactcatcaacttttcccttttcagtcaaaaataagttgaataattgataaaccaatgtgtgggcctattgggctttgatatgtactgttttctatgtccgtttgaggccttttataaaatcgtcttacgaccc

SEQ ID NO: 107072 - protein, 290 aa, Arabidopsis thaliana; identical to SEQ ID NO: 25215
  peptide (1)..(290): Ceres Seq. ID no. 13621283
  misc_feature (94)..(290): Pfam Name: O-methyltransferase Pfam Description: O-methyltransferase
  misc_feature (1)..(290): Homolog of NCBI NO: 15228651 NR Description: O-methyltransferase family 3 [Arabidopsis
  misc_feature (1)..(290): Homolog of NCBI NO: 21593560 NR Description: unknown [Arabidopsis thaliana]
  misc_feature (35)..(290): Homolog of NCBI NO: 15228652 NR Description: O-methyltransferase family 3 [Arabidopsis
  misc_feature (80)..(289): Homolog of NCBI NO: 17232671 NR Description: O-methyltransferase [Nostoc sp. PCC 7120]
  misc_feature (80)..(290): Homolog of NCBI NO: 23126866 NR Description: hypothetical protein [Nostoc punctiforme]
  misc_feature (79)..(290): Homolog of NCBI NO: 23043526 NR Description: hypothetical protein [Trichodesmium erythraeum
  misc_feature (77)..(290): Homolog of NCBI NO: 23129851 NR Description: hypothetical protein [Nostoc punctiforme]
  misc_feature (80)..(290): Homolog of NCBI NO: 7463011 NR Description: probable O-methyltransferase (EC 2.1.1.-) safC -
  misc_feature (77)..(290): Homolog of NCBI NO: 16331769 NR Description: O-methyltransferase [Synechocystis sp. PCC 6803]
  misc_feature (80)..(290): Homolog of NCBI NO: 32041214 NR Description: hypothetical protein [Pseudomonas aeruginosa

SEQ ID NO: 107073 - protein, 223 aa, Arabidopsis thaliana; identical to SEQ ID NO: 25216
  peptide (1)..(223): Ceres Seq. ID no. 13621284
  misc_feature (27)..(223): Pfam Name: O-methyltransferase Pfam Description: O-methyltransferase
  misc_feature (1)..(223): Homolog of NCBI NO: 15228651 NR Description: O-methyltransferase family 3 [Arabidopsis
  misc_feature (1)..(223): Homolog of NCBI NO: 21593560 NR Description: unknown [Arabidopsis thaliana]
  misc_feature (1)..(223): Homolog of NCBI NO: 15228652 NR Description: O-methyltransferase family 3 [Arabidopsis
  misc_feature (13)..(222): Homolog of NCBI NO: 17232671 NR Description: O-methyltransferase [Nostoc sp. PCC 7120]
  misc_feature (13)..(223): Homolog of NCBI NO: 23126866 NR Description: hypothetical protein [Nostoc punctiforme]
  misc_feature (12)..(223): Homolog of NCBI NO: 23043526 NR Description: hypothetical protein [Trichodesmium erythraeum
  misc_feature (10)..(223): Homolog of NCBI NO: 23129851 NR Description: hypothetical protein [Nostoc punctiforme]
  misc_feature (13)..(223): Homolog of NCBI NO: 7463011 NR Description: probable O-methyltransferase (EC 2.1.1.-) safC -
  misc_feature (10)..(223): Homolog of NCBI NO: 16331769 NR Description: O-methyltransferase [Synechocystis sp. PCC 6803]
  misc_feature (13)..(223): Homolog of NCBI NO: 32041214 NR Description: hypothetical protein [Pseudomonas aeruginosa

SEQ ID NO: 107074 - protein, 213 aa, Arabidopsis thaliana; identical to SEQ ID NO: 25217
  peptide (1)..(213): Ceres Seq. ID no. 13621285
  misc_feature (17)..(213): Pfam Name: O-methyltransferase Pfam Description: O-methyltransferase
  misc_feature (1)..(213): Homolog of NCBI NO: 15228651 NR Description: O-methyltransferase family 3 [Arabidopsis
  misc_feature (1)..(213): Homolog of NCBI NO: 21593560 NR Description: unknown [Arabidopsis thaliana]
  misc_feature (1)..(213): Homolog of NCBI NO: 15228652 NR Description: O-methyltransferase family 3 [Arabidopsis
  misc_feature (3)..(212): Homolog of NCBI NO: 17232671 NR Description: O-methyltransferase [Nostoc sp. PCC 7120]
  misc_feature (3)..(213): Homolog of NCBI NO: 23126866 NR Description: hypothetical protein [Nostoc punctiforme]
  misc_feature (2)..(213): Homolog of NCBI NO: 23043526 NR Description: hypothetical protein [Trichodesmium erythraeum
  misc_feature (1)..(213): Homolog of NCBI NO: 23129851 NR Description: hypothetical protein [Nostoc punctiforme]
  misc_feature (3)..(213): Homolog of NCBI NO: 7463011 NR Description: probable O-methyltransferase (EC 2.1.1.-) safC -
  misc_feature (1)..(213): Homolog of NCBI NO: 16331769 NR Description: O-methyltransferase [Synechocystis sp. PCC 6803]
  misc_feature (3)..(213): Homolog of NCBI NO: 32041214 NR Description: hypothetical protein [Pseudomonas aeruginosa

SEQ ID NO: 107075 - DNA, 1010 bp, Arabidopsis thaliana
  misc_feature (1)..(1010): Ceres Seq. ID no. 13621286
  misc_feature: MA Experiment ID: 20000184 Result: Up-regulated in Transcription
  misc_feature: MA Experiment 20000184 PARAMETER Experiment Name: At_Shoots__P Parameter: Age (day) Value: 7
  misc_feature: MA Experiment 20000184 PARAMETER Experiment Name: At_Shoots__P Parameter: Tissue Value: Shoots vs. Whole Plant
  misc_feature: MA Experiment ID: 20000185 Result: Up-regulated in Transcription
  misc_feature: MA Experiment 20000185 PARAMETER Experiment Name: At_Roots__P Parameter: Age (day) Value: 7 vs. 21
  misc_feature: MA Experiment 20000185 PARAMETER Experiment Name: At_Roots__P Parameter: Organism Value: A. thaliana
  misc_feature: MA Experiment 20000185 PARAMETER Experiment Name: At_Roots__P Parameter: Tissue Value: Roots vs. Whole Plant
  misc_feature: MA Experiment ID: 20000227 Result: Down-regulated in Transcription
  misc_feature: MA Experiment 20000227 PARAMETER Experiment Name: At_Root-Tips-vs-Tops_P Parameter: Tissue Value: Root Tips vs. Root Tops
  misc_feature: MA Experiment ID: 20000265 Result: Down-regulated in Transcription
  misc_feature: MA Experiment 20000265 PARAMETER Experiment Name: At_Open_Flower_P Parameter: Age (day) Value: 21
  misc_feature: MA Experiment 20000265 PARAMETER Experiment Name: At_Open_Flower_P Parameter: Plant Line Value: WS
  misc_feature: MA Experiment 20000265 PARAMETER Experiment Name: At_Open_Flower_P Parameter: Tissue Value: Closed Flower vs. Whole Plant
  misc_feature: MA Experiment ID: 20000451 Result: Up-regulated in Transcription
  misc_feature: MA Experiment 20000451 PARAMETER Experiment Name: At_CS6879_Shoots-Roots_P Parameter: Age (day) Value: 14
  misc_feature: MA Experiment 20000451 PARAMETER Experiment Name: At_CS6879_Shoots-Roots_P Parameter: Organism Value: A. thaliana
  misc_feature: MA Experiment 20000451 PARAMETER Experiment Name: At_CS6879_Shoots-Roots_P Parameter: Plant Line Value: CS6879 vs. WS
  misc_feature: MA Experiment 20000451 PARAMETER Experiment Name: At_CS6879_Shoots-Roots_P Parameter: Tissue Value: Roots
  misc_feature: MA Experiment ID: 20000495 Result: Up-regulated in Transcription
  misc_feature: MA Experiment 20000495 PARAMETER Experiment Name: At_Guard_Cells_P Parameter: Harvest Date Value: 8/2/2002
  misc_feature: MA Experiment 20000495 PARAMETER Experiment Name: At_Guard_Cells_P Parameter: Organism Value: A. thaliana
  misc_feature: MA Experiment 20000495 PARAMETER Experiment Name: At_Guard_Cells_P Parameter: Tissue Value: Guard Cells vs. Leaves
acttttattaaagaacttgtccactgtcttcttctgcccattttaccattttgattaggctctctgtttctctttcttggttctaaaagatatccgtcactctttagtattatgggaatcggtgaagaaagcacaaagcctatttgggggagcgtgagccacacgtcttcaggctacgctctcaacggcaaaatcatgctctcctccgtgatcgttctattcgtcgccgttattatgatcctctgcttccacagctacgcccgttggttattccgtcgtcacaaccgtcgcattcgccgccgtattcgttctcacctccgcactctctccgcctcaccccgagaccaagctctcgaccaggctgttctcgacaagattccgatcttcgtttactcctccaagaatccaccaccaccagaagagaaggaggagtgctccgtctgcttgtcggagttcgaggaagaagacgaaggccgtcttcttcctaaatgtggccactcttttcacgtcgactgcatcgatacttggttccgttccagatccacttgcccgctttgcagagctccggttcaacccccgtttcaggtcattgaaaccggttcttcttcttcttcttcgccgttgacatttccgacggagggttgcgagagagaaccgattgacctcgccggtatcattgtggatatttccagagaagttgaatttgaaggctcaaatccgggtctacccatcgaaaacggatcaaagtttccgggtagtcgggttttgtctttaaaaaggctatggagcatctgattgcgggcgggtaaatgggtttctatttttttcaaaaaacgcatgaactttgacacgtggaatttatatcagcacacgtggccgttactcctggggaccactgagcctgagcgtctacttctaattagtctaatcacattaatttgattacccgttcattattattagatttcgaagaaaaccattcggttgtacaatagtaagttaaagttatt

SEQ ID NO: 107076 - protein, 227 aa, Arabidopsis thaliana
  peptide (1)..(227): Ceres Seq. ID no. 13621287
  misc_feature (108)..(149): Pfam Name: Zinc finger, C3HC4 type (RING finger) Pfam Description: Zinc finger, C3HC4 type (RING finger)
  misc_feature (1)..(227): Homolog of NCBI NO: 15226628 NR Description: hypothetical protein [Arabidopsis thaliana]
  misc_feature (1)..(179): Homolog of NCBI NO: 15228830 NR Description: RING-H2 zinc finger protein ATL5 [Arabidopsis
  misc_feature (162)..(227): Homolog of NCBI NO: 15228830 NR Description: RING-H2 zinc finger protein ATL5 [Arabidopsis
  misc_feature (1)..(179): Homolog of NCBI NO: 4928401 NR Description: RING-H2 zinc finger protein ATL5 [Arabidopsis
  misc_feature (162)..(227): Homolog of NCBI NO: 4928401 NR Description: RING-H2 zinc finger protein ATL5 [Arabidopsis
  misc_feature (19)..(155): Homolog of NCBI NO: 21593806 NR Description: putative RING zinc finger protein [Arabidopsis
  misc_feature (19)..(154): Homolog of NCBI NO: 15228302 NR Description: RING zinc finger protein -related [Arabidopsis
  misc_feature (19)..(154): Homolog of NCBI NO: 25456278 NR Description: probable zinc finger protein [imported] - thaliana >gi|3873408|gb|AAC77829.1| putative zinc finger protein
  misc_feature (13)..(226): Homolog of NCBI NO: 12003386 NR Description: Avr9/Cf-9 rapidly elicited protein 132 [Nicotiana
  misc_feature (29)..(155): Homolog of NCBI NO: 21537244 NR Description: unknown [Arabidopsis thaliana]
MGIGEESTKPIWGSVSHTSSGYALNGKIMLSSVIVLFVAVIMILCFHSYARWLFRRHNRRIRRRIRSHLRTLSASPRDQALDQAVLDKIPIFVYSSKNPPPPEEKEECSVCLSEFEEEDEGRLLPKCGHSFHVDCIDTWFRSRSTCPLCRAPVQPPFQVIETGSSSSSSPLTFPTEGCEREPIDLAGIIVDISREVEFEGSNPGLPIENGSKFPGSRVLSLKRLWSI

SEQ ID NO: 107077 - protein, 199 aa, Arabidopsis thaliana
  peptide (1)..(199): Ceres Seq. ID no. 13621288
  misc_feature (80)..(121): Pfam Name: Zinc finger, C3HC4 type (RING finger) Pfam Description: Zinc finger, C3HC4 type (RING finger)
  misc_feature (1)..(199): Homolog of NCBI NO: 15226628 NR Description: hypothetical protein [Arabidopsis thaliana]
  misc_feature (1)..(151): Homolog of NCBI NO: 15228830 NR Description: RING-H2 zinc finger protein ATL5 [Arabidopsis
  misc_feature (134)..(199): Homolog of NCBI NO: 15228830 NR Description: RING-H2 zinc finger protein ATL5 [Arabidopsis
  misc_feature (1)..(151): Homolog of NCBI NO: 4928401 NR Description: RING-H2 zinc finger protein ATL5 [Arabidopsis
  misc_feature (134)..(199): Homolog of NCBI NO: 4928401 NR Description: RING-H2 zinc finger protein ATL5 [Arabidopsis
  misc_feature (1)..(127): Homolog of NCBI NO: 21593806 NR Description: putative RING zinc finger protein [Arabidopsis
  misc_feature (1)..(126): Homolog of NCBI NO: 15228302 NR Description: RING zinc finger protein -related [Arabidopsis
  misc_feature (1)..(126): Homolog of NCBI NO: 25456278 NR Description: probable zinc finger protein [imported] - thaliana >gi|3873408|gb|AAC77829.1| putative zinc finger protein
  misc_feature (1)..(198): Homolog of NCBI NO: 12003386 NR Description: Avr9/Cf-9 rapidly elicited protein 132 [Nicotiana
  misc_feature (1)..(127): Homolog of NCBI NO: 21537244 NR Description: unknown [Arabidopsis thaliana]
MLSSVIVLFVAVIMILCFHSYARWLFRRHNRRIRRRIRSHLRTLSASPRDQALDQAVLDKIPIFVYSSKNPPPPEEKEECSVCLSEFEEEDEGRLLPKCGHSFHVDCIDTWFRSRSTCPLCRAPVQPPFQVIETGSSSSSSPLTFPTEGCEREPIDLAGIIVDISREVEFEGSNPGLPIENGSKFPGSRVLSLKRLWSI

SEQ ID NO: 107078 - protein, 186 aa, Arabidopsis thaliana
  peptide (1)..(186): Ceres Seq. ID no. 13621289
  misc_feature (67)..(108): Pfam Name: Zinc finger, C3HC4 type (RING finger) Pfam Description: Zinc finger, C3HC4 type (RING finger)
  misc_feature (1)..(186): Homolog of NCBI NO: 15226628 NR Description: hypothetical protein [Arabidopsis thaliana]
  misc_feature (1)..(138): Homolog of NCBI NO: 15228830 NR Description: RING-H2 zinc finger protein ATL5 [Arabidopsis
  misc_feature (121)..(186): Homolog of NCBI NO: 15228830 NR Description: RING-H2 zinc finger protein ATL5 [Arabidopsis
  misc_feature (1)..(138): Homolog of NCBI NO: 4928401 NR Description: RING-H2 zinc finger protein ATL5 [Arabidopsis
  misc_feature (121)..(186): Homolog of NCBI NO: 4928401 NR Description: RING-H2 zinc finger protein ATL5 [Arabidopsis
  misc_feature (1)..(114): Homolog of NCBI NO: 21593806 NR Description: putative RING zinc finger protein [Arabidopsis
  misc_feature (1)..(113): Homolog of NCBI NO: 15228302 NR Description: RING zinc finger protein -related [Arabidopsis
  misc_feature (1)..(113): Homolog of NCBI NO: 25456278 NR Description: probable zinc finger protein [imported] - thaliana >gi|3873408|gb|AAC77829.1| putative zinc finger protein
  misc_feature (1)..(185): Homolog of NCBI NO: 12003386 NR Description: Avr9/Cf-9 rapidly elicited protein 132 [Nicotiana
  misc_feature (1)..(114): Homolog of NCBI NO: 21537244 NR Description: unknown [Arabidopsis thaliana]
MILCFHSYARWLFRRHNRRIRRRIRSHLRTLSASPRDQALDQAVLDKIPIFVYSSKNPPPPEEKEECSVCLSEFEEEDEGRLLPKCGHSFHVDCIDTWFRSRSTCPLCRAPVQPPFQVIETGSSSSSSPLTFPTEGCEREPIDLAGIIVDISREVEFEGSNPGLPIENGSKFPGSRVLSLKRLWSI

SEQ ID NO: 107079 - DNA, 1046 bp, Arabidopsis thaliana
  misc_feature (1)..(1046): Ceres Seq. ID no. 13621290
  misc_feature: MA Experiment ID: 20000169 Result: Up-regulated in Transcription
  misc_feature: MA Experiment 20000169 PARAMETER Experiment Name: At_100uM_ABA_P Parameter: Age (day) Value: 14
  misc_feature: MA Experiment 20000169 PARAMETER Experiment Name: At_100uM_ABA_P Parameter: Organism Value: A. thaliana
  misc_feature: MA Experiment 20000169 PARAMETER Experiment Name: At_100uM_ABA_P Parameter: Plant Line Value: WS
  misc_feature: MA Experiment 20000169 PARAMETER Experiment Name: At_100uM_ABA_P Parameter: Timepoint (hr) Value: 6
  misc_feature: MA Experiment 20000169 PARAMETER Experiment Name: At_100uM_ABA_P Parameter: Tissue Value: Aerial
  misc_feature: MA Experiment 20000169 PARAMETER Experiment Name: At_100uM_ABA_P Parameter: Treatment Value: 100uM ABA vs. No Treatment
  misc_feature: MA Experiment ID: 20000180 Result: Down-regulated in Transcription
  misc_feature: MA Experiment 20000180 PARAMETER Experiment Name: At_Germinating_Seeds_P Parameter: Age (hr) Value: 24 vs. 0
  misc_feature: MA Experiment 20000180 PARAMETER Experiment Name: At_Germinating_Seeds_P Parameter: Tissue Value: Germinating Seeds
  misc_feature: MA Experiment ID: 20000437 Result: Up-regulated in Transcription
  misc_feature: MA Experiment 20000437 PARAMETER Experiment Name: At_Drought_P Parameter: Age (day) Value: 8
  misc_feature: MA Experiment 20000437 PARAMETER Experiment Name: At_Drought_P Parameter: Organism Value: A. thaliana
  misc_feature: MA Experiment 20000437 PARAMETER Experiment Name: At_Drought_P Parameter: Plant Line Value: WS
  misc_feature: MA Experiment 20000437 PARAMETER Experiment Name: At_Drought_P Parameter: Timepoint (hr) Value: 24
  misc_feature: MA Experiment 20000437 PARAMETER Experiment Name: At_Drought_P Parameter: Tissue Value: Whole Plant
  misc_feature: MA Experiment 20000437 PARAMETER Experiment Name: At_Drought_P Parameter: Treatment Value: Drought vs. No Drought
  misc_feature: MA Experiment ID: 20000496 Result: Down-regulated in Transcription
  misc_feature: MA Experiment 20000496 PARAMETER Experiment Name: At_Guard_Cells_P Parameter: Harvest Date Value: 7/19/2002
  misc_feature: MA Experiment 20000496 PARAMETER Experiment Name: At_Guard_Cells_P Parameter: Organism Value: Canola
  misc_feature: MA Experiment 20000496 PARAMETER Experiment Name: At_Guard_Cells_P Parameter: Tissue Value: Guard Cells vs. Leaves
  misc_feature: MA Experiment ID: 20000794 Result: Up-regulated in Transcription
  misc_feature: MA Experiment 20000794 PARAMETER Experiment Name: At_Petals_P Parameter: Age (day) Value: 23-25 days
  misc_feature: MA Experiment 20000794 PARAMETER Experiment Name: At_Petals_P Parameter: Plant Line Value: WS
  misc_feature: MA Experiment 20000794 PARAMETER Experiment Name: At_Petals_P Parameter: Tissue Value: Petals vs. Whole plant
  misc_feature: MA Experiment ID: 20001905 Result: Up-regulated in Transcription
  misc_feature: MA Experiment 20001905 PARAMETER Experiment Name: At_Drought_Reproduction_P Parameter: Age (day) Value: 40
  misc_feature: MA Experiment 20001905 PARAMETER Experiment Name: At_Drought_Reproduction_P Parameter: Organism Value: A. thaliana
  misc_feature: MA Experiment 20001905 PARAMETER Experiment Name: At_Drought_Reproduction_P Parameter: Plant Line Value: WS
  misc_feature: MA Experiment 20001905 PARAMETER Experiment Name: At_Drought_Reproduction_P Parameter: Timepoint (day) Value: 10
  misc_feature: MA Experiment 20001905 PARAMETER Experiment Name: At_Drought_Reproduction_P Parameter: Tissue Value: Rosettes
  misc_feature: MA Experiment 20001905 PARAMETER Experiment Name: At_Drought_Reproduction_P Parameter: Treatment Value: Drought vs. No Drought
atggcggtttctcaccgtctcctcaggccggcgacgacgacgataaagaatactttttcttctctctttattaggtctctctcttcttcttcgtctgggtcctcgctagaccccaaaatcgatctggaggaggctgcggctcagctcgggaagtcttcgtctacgtcaacgtctccatacaaaggcagaaatttccactgggtgtttcttggatgtcctggtgttggtaaaggaacctatgcctctcgtctctcttctctcctcggcgttcctcatattgccactggtgatctcgttcgtgaagagctctcctcctctggcctcctctcctctcagctcaaggagcttgttaaccatggaaaactagttcctgatgaattcataataagtttgttatcaaagcgtctccaagctggcaaagacaagggtgaatctggatacattcttgatggttttccacgcaccgtgactcaagcggaaatactggagggagtaactaatatcgatctggtgattaacctgaagctacgagaagaggcattgcttgcgaaatgtttaggaagaagaatttgcagcgagtgtggtggaaactataacgttgcctgcattgatatcaaaggtgatgatgatactcccagaatgtatatgcctcctcttcttcctccgccaaactgtgaatcgaagcttataagccgagctgatgacactgaagaagttgtcaaggaaagactcaggatttacaacaaaatgactcaaccagtggaggaattctacaagaaacgcgggaagctgttggaatttgaattgcccggtggaatcccagagtcatgggcaaggctccttagggcattacaccttgaagacgataaacagtctgcaatagcctaatctctctctgcattttatgattgaatcaaacaacttgtactacattctttgctcgagtaatcctcctcgtgcatatatgcttaagatagtcaataaaagagatacatgtcccactatggttatttgatgcatatattatatagtgaagtttctttgtg

SEQ ID NO: 107080 - protein, 295 aa, Arabidopsis thaliana
  peptide (1)..(295): Ceres Seq. ID no. 13621291
  misc_feature (110)..(187): Pfam Name: Adenylate kinase Pfam Description: Adenylate kinase
  misc_feature (1)..(295): Homolog of NCBI NO: 30687836 NR Description: adenylate kinase -related [Arabidopsis thaliana]
  misc_feature (45)..(295): Homolog of NCBI NO: 32488408 NR Description: OSJNBa0043A12.38 [Oryza sativa (japonica
  misc_feature (110)..(295): Homolog of NCBI NO: 6063552 NR Description: ESTs AU065232(E60855),C23624(S1554), correspond to a region of the predicted gene.~similar to putative
  misc_feature (1)..(118): Homolog of NCBI NO: 6063552 NR Description: ESTs AU065232(E60855),C23624(S1554), correspond to a region of the predicted gene.~similar to putative
  misc_feature (6)..(295): Homolog of NCBI NO: 15228109 NR Description: adenylate kinase -related [Arabidopsis thaliana]
  misc_feature (1)..(290): Homolog of NCBI NO: 29427816 NR Description: Adenylate kinase, chloroplast precursor (ATP-AMP
  misc_feature (68)..(288): Homolog of NCBI NO: 15644227 NR Description: adenylate kinase [Thermotoga maritima]
  misc_feature (68)..(280): Homolog of NCBI NO: 11498284 NR Description: adenylate kinase (adk) [Archaeoglobus fulgidus
  misc_feature (68)..(268): Homolog of NCBI NO: 28212159 NR Description: adenylate kinase [Clostridium tetani E88]
  misc_feature (68)..(264): Homolog of NCBI NO: 16077205 NR Description: adenylate kinase [Bacillus subtilis]
MAVSHRLLRPATTTIKNTFSSLFIRSLSSSSSGSSLDPKIDLEEAAAQLGKSSSTSTSPYKGRNFHWVFLGCPGVGKGTYASRLSSLLGVPHIATGDLVREELSSSGLLSSQLKELVNHGKLVPDEFIISLLSKRLQAGKDKGESGYILDGFPRTVTQAEILEGVTNIDLVINLKLREEALLAKCLGRRICSECGGNYNVACIDIKGDDDTPRMYMPPLLPPPNCESKLISRADDTEEVVKERLRIYNKMTQPVEEFYKKRGKLLEFELPGGIPESWARLLRALHLEDDKQSAIA

SEQ ID NO: 107081 - DNA, 1193 bp, Arabidopsis thaliana
  misc_feature (1)..(1193): Ceres Seq. ID no. 13621296
  misc_feature: MA Experiment ID: 20000307 Result: Down-regulated in Transcription
  misc_feature: MA Experiment 20000307 PARAMETER Experiment Name: At_Germinating_Seeds_Sub_P Parameter: Age (hr) Value: 24 vs. 0
  misc_feature: MA Experiment 20000307 PARAMETER Experiment Name: At_Germinating_Seeds_Sub_P Parameter: Organism Value: A. thaliana
  misc_feature: MA Experiment 20000307 PARAMETER Experiment Name: At_Germinating_Seeds_Sub_P Parameter: Plant Line Value: WS
  misc_feature: MA Experiment 20000307 PARAMETER Experiment Name: At_Germinating_Seeds_Sub_P Parameter: Tissue Value: Germinating Seeds
  misc_feature: MA Experiment ID: 20000315 Result: Down-regulated in Transcription
  misc_feature: MA Experiment 20000315 PARAMETER Experiment Name: At_14day_Shoots-Roots_Sub_P Parameter: Age (day) Value: 14
  misc_feature: MA Experiment 20000315 PARAMETER Experiment Name: At_14day_Shoots-Roots_Sub_P Parameter: Organism Value: A. thaliana
  misc_feature: MA Experiment 20000315 PARAMETER Experiment Name: At_14day_Shoots-Roots_Sub_P Parameter: Plant Line Value: WS
  misc_feature: MA Experiment 20000315 PARAMETER Experiment Name: At_14day_Shoots-Roots_Sub_P Parameter: Tissue Value: Shoots vs. Whole Plant
  misc_feature: MA Experiment ID: 20000328 Result: Down-regulated in Transcription
  misc_feature: MA Experiment 20000328 PARAMETER Experiment Name: At_42deg_Heat_Sub_P Parameter: Age (day) Value: 14
  misc_feature: MA Experiment 20000328 PARAMETER Experiment Name: At_42deg_Heat_Sub_P Parameter: Organism Value: A. thaliana
  misc_feature: MA Experiment 20000328 PARAMETER Experiment Name: At_42deg_Heat_Sub_P Parameter: Plant Line Value: WS
  misc_feature: MA Experiment 20000328 PARAMETER Experiment Name: At_42deg_Heat_Sub_P Parameter: Temperature (deg C) Value: 42 vs. 22
  misc_feature: MA Experiment 20000328 PARAMETER Experiment Name: At_42deg_Heat_Sub_P Parameter: Timepoint (hr) Value: 6
  misc_feature: MA Experiment 20000328 PARAMETER Experiment Name: At_42deg_Heat_Sub_P Parameter: Tissue Value: Aerial
  misc_feature: MA Experiment ID: 20000440 Result: Down-regulated in Transcription
  misc_feature: MA Experiment 20000440 PARAMETER Experiment Name: At_Closed-Flower__Sub_P Parameter: Tissue Value: Closed Flower vs. Whole Plant
gatatcttatcaaaaactcgctctccatccaacaaaacccgaagaaagagagattcagactcaaatctctcagtaggaatggcaagtgaaacagagaacatcaagtatgaagagagtttcatcaagaacactcgaggaatgaaactgttcacgtgcaaatgggtaccagcaaagcaagagccaaaggctttagtctttatttgccatggatatgcaatggaatgtagcatcaccatgaacagtactgcgaggaggctggtgaaagcaggatttgcggtatatggaattgattacgaagggcatggaaaatctgatgggcttagtgcttatgtcccaaactttgaccatctcgttgatgatgtctctactcactacacaagcatttgcgagaaagaagagaataaagggaagatgaggttcttgttaggagaatcaatgggaggagcagtgcttttgttgttacacagaaagaagcctcagttttgggatggggctgtcttggttgctccaatgtgtaagattgctgaagaaatgaaaccaagccctttggtaatttcgatattggccaaacttagtggagtgataccttcgtggaaaatcatccctggccaagatatcattgagactgcttttaagcagccagaaatcaggaaacaggttagggaaaatccctactgctacaagggacgtccacgtttgaagactgcttatgagcttttgagggttagcaccgatctcgagaagaggcttaatgaggtttcattaccgttcatagttttgcacggtgaagacgataaagtcacagataaagcggtgagtcgacaactgtatgaagttgcatctagttcggacaagactttcaagttgtaccctgggatgtggcatggtttactctatggagagacaccagagaatatcgagactgtttttgctgacatcattggctggttggataagaaagttgctgatgaaagtggaggctttgaatccgagcttaaacgtaaaaatgatggtattcctttgaaagggtagttatcactttaacataaacaaataaaggatagttaaaatctgtttgtctgtttgtttttctctcttttcctgaattctgtttatgttaattagttgttaccatgtttgtcactctctgacttagtgtaatactatttaataatttatggatttgatttccc

SEQ ID NO: 107082 - protein, 343 aa, Arabidopsis thaliana; identical to SEQ ID NO: 103663
  peptide (1)..(343): Ceres Seq. ID no. 13621297
  misc_feature (91)..(311): Pfam Name: alpha/beta hydrolase fold Pfam Description: alpha/beta hydrolase fold
  misc_feature (27)..(343): Homolog of NCBI NO: 30687883 NR Description: esterase/lipase/thioesterase family [Arabidopsis >gi|19423964|gb|AAL87258.1| putative phospholipase [Arabidopsis >gi|21689759|gb|AAM67523.1| putative phospholipase [Arabidopsis
  misc_feature (28)..(343): Homolog of NCBI NO: 7487948 NR Description: lysophospholipase homolog F12L6.8 - Arabidopsis >gi|3355471|gb|AAC27833.1| putative phospholipase [Arabidopsis >gi|13877687|gb|AAK43921.1|AF370602_1 putative phospholipase
  misc_feature (27)..(342): Homolog of NCBI NO: 30687879 NR Description: hydrolase, alpha/beta fold family [Arabidopsis >gi|20197113|gb|AAC27832.2| putative phospholipase; alternative
  misc_feature (39)..(342): Homolog of NCBI NO: 7487947 NR Description: lysophospholipase homolog F12L6.7 - Arabidopsis
  misc_feature (34)..(338): Homolog of NCBI NO: 18405038 NR Description: hydrolase, alpha/beta fold family [Arabidopsis >gi|14532652|gb|AAK64054.1| putative phospholipase [Arabidopsis >gi|15450345|gb|AAK96466.1| At2g39400/F12L6.6 [Arabidopsis
  misc_feature (34)..(342): Homolog of NCBI NO: 15233200 NR Description: esterase/lipase/thioesterase family [Arabidopsis
  misc_feature (81)..(338): Homolog of NCBI NO: 7487946 NR Description: probable phospholipase At2g39400 [imported] -
  misc_feature (27)..(321): Homolog of NCBI NO: 15233203 NR Description: esterase/lipase/thioesterase family [Arabidopsis
  misc_feature (35)..(339): Homolog of NCBI NO: 30695682 NR Description: esterase/lipase/thioesterase family [Arabidopsis
  misc_feature (30)..(323): Homolog of NCBI NO: 18407407 NR Description: esterase/lipase/thioesterase family [Arabidopsis >gi|16323214|gb|AAL15341.1| At2g47630/F17A22.2 [Arabidopsis >gi|20196967|gb|AAM14848.1| putative phospholipase [Arabidopsis

SEQ ID NO: 107083 - protein, 317 aa, Arabidopsis thaliana; identical to SEQ ID NO: 103664
  peptide (1)..(317): Ceres Seq. ID no. 13621298
  misc_feature (65)..(285): Pfam Name: alpha/beta hydrolase fold Pfam Description: alpha/beta hydrolase fold
  misc_feature (1)..(317): Homolog of NCBI NO: 30687883 NR Description: esterase/lipase/thioesterase family [Arabidopsis >gi|19423964|gb|AAL87258.1| putative phospholipase [Arabidopsis >gi|21689759|gb|AAM67523.1| putative phospholipase [Arabidopsis
  misc_feature (2)..(317): Homolog of NCBI NO: 7487948 NR Description: lysophospholipase homolog F12L6.8 - Arabidopsis >gi|3355471|gb|AAC27833.1| putative phospholipase [Arabidopsis >gi|13877687|gb|AAK43921.1|AF370602_1 putative phospholipase
  misc_feature (1)..(316): Homolog of NCBI NO: 30687879 NR Description: hydrolase, alpha/beta fold family [Arabidopsis >gi|20197113|gb|AAC27832.2| putative phospholipase; alternative
  misc_feature (13)..(316): Homolog of NCBI NO: 7487947 NR Description: lysophospholipase homolog F12L6.7 - Arabidopsis
  misc_feature (8)..(312): Homolog of NCBI NO: 18405038 NR Description: hydrolase, alpha/beta fold family [Arabidopsis >gi|14532652|gb|AAK64054.1| putative phospholipase [Arabidopsis >gi|15450345|gb|AAK96466.1| At2g39400/F12L6.6 [Arabidopsis
  misc_feature (8)..(316): Homolog of NCBI NO: 15233200 NR Description: esterase/lipase/thioesterase family [Arabidopsis
  misc_feature (55)..(312): Homolog of NCBI NO: 7487946 NR Description: probable phospholipase At2g39400 [imported] -
  misc_feature (1)..(295): Homolog of NCBI NO: 15233203 NR Description: esterase/lipase/thioesterase family [Arabidopsis
  misc_feature (9)..(313): Homolog of NCBI NO: 30695682 NR Description: esterase/lipase/thioesterase family [Arabidopsis
  misc_feature (4)..(297): Homolog of NCBI NO: 18407407 NR Description: esterase/lipase/thioesterase family [Arabidopsis >gi|16323214|gb|AAL15341.1| At2g47630/F17A22.2 [Arabidopsis >gi|20196967|gb|AAM14848.1| putative phospholipase [Arabidopsis

SEQ ID NO: 107084 - protein, 297 aa, Arabidopsis thaliana; identical to SEQ ID NO: 103665
  peptide (1)..(297): Ceres Seq. ID no. 13621299
  misc_feature (45)..(265): Pfam Name: alpha/beta hydrolase fold Pfam Description: alpha/beta hydrolase fold
  misc_feature (1)..(297): Homolog of NCBI NO: 30687883 NR Description: esterase/lipase/thioesterase family [Arabidopsis >gi|19423964|gb|AAL87258.1| putative phospholipase [Arabidopsis >gi|21689759|gb|AAM67523.1| putative phospholipase [Arabidopsis
  misc_feature (1)..(297): Homolog of NCBI NO: 7487948 NR Description: lysophospholipase homolog F12L6.8 - Arabidopsis >gi|3355471|gb|AAC27833.1| putative phospholipase [Arabidopsis >gi|13877687|gb|AAK43921.1|AF370602_1 putative phospholipase
  misc_feature (1)..(296): Homolog of NCBI NO: 30687879 NR Description: hydrolase, alpha/beta fold family [Arabidopsis >gi|20197113|gb|AAC27832.2| putative phospholipase; alternative
  misc_feature (1)..(296): Homolog of NCBI NO: 7487947 NR Description: lysophospholipase homolog F12L6.7 - Arabidopsis
  misc_feature (1)..(292): Homolog of NCBI NO: 18405038 NR Description: hydrolase, alpha/beta fold family [Arabidopsis >gi|14532652|gb|AAK64054.1| putative phospholipase [Arabidopsis >gi|15450345|gb|AAK96466.1| At2g39400/F12L6.6 [Arabidopsis
  misc_feature (1)..(296): Homolog of NCBI NO: 15233200 NR Description: esterase/lipase/thioesterase family [Arabidopsis
  misc_feature (35)..(292): Homolog of NCBI NO: 7487946 NR Description: probable phospholipase At2g39400 [imported] -
  misc_feature (1)..(275): Homolog of NCBI NO: 15233203 NR Description: esterase/lipase/thioesterase family [Arabidopsis
  misc_feature (1)..(293): Homolog of NCBI NO: 30695682 NR Description: esterase/lipase/thioesterase family [Arabidopsis
  misc_feature (1)..(277): Homolog of NCBI NO: 18407407 NR Description: esterase/lipase/thioesterase family [Arabidopsis >gi|16323214|gb|AAL15341.1| At2g47630/F17A22.2 [Arabidopsis >gi|20196967|gb|AAM14848.1| putative phospholipase [Arabidopsis

SEQ ID NO: 107085 - DNA, 1204 bp, Arabidopsis thaliana
  misc_feature (1)..(1204): Ceres Seq. ID no. 13621324
  misc_feature: MA Experiment ID: 20000347 Result: Up-regulated in Transcription
  misc_feature: MA Experiment 20000347 PARAMETER Experiment Name: At_2mM_SA_Sub_P Parameter: Age (day) Value: 14
  misc_feature: MA Experiment 20000347 PARAMETER Experiment Name: At_2mM_SA_Sub_P Parameter: Organism Value: A. thaliana
  misc_feature: MA Experiment 20000347 PARAMETER Experiment Name: At_2mM_SA_Sub_P Parameter: Plant Line Value: WS
  misc_feature: MA Experiment 20000347 PARAMETER Experiment Name: At_2mM_SA_Sub_P Parameter: Timepoint (hr) Value: 6
  misc_feature: MA Experiment 20000347 PARAMETER Experiment Name: At_2mM_SA_Sub_P Parameter: Tissue Value: Aerial
  misc_feature: MA Experiment 20000347 PARAMETER Experiment Name: At_2mM_SA_Sub_P Parameter: Treatment Value: 2mM SA vs. No Treatment
  misc_feature: MA Experiment ID: 20000348 Result: Up-regulated in Transcription
  misc_feature: MA Experiment 20000348 PARAMETER Experiment Name: At_100uM_ABA_Sub_P Parameter: Age (day) Value: 14
  misc_feature: MA Experiment 20000348 PARAMETER Experiment Name: At_100uM_ABA_Sub_P Parameter: Organism Value: A. thaliana
  misc_feature: MA Experiment 20000348 PARAMETER Experiment Name: At_100uM_ABA_Sub_P Parameter: Plant Line Value: WS
  misc_feature: MA Experiment 20000348 PARAMETER Experiment Name: At_100uM_ABA_Sub_P Parameter: Timepoint (hr) Value: 1
  misc_feature: MA Experiment 20000348 PARAMETER Experiment Name: At_100uM_ABA_Sub_P Parameter: Tissue Value: Aerial
  misc_feature: MA Experiment 20000348 PARAMETER Experiment Name: At_100uM_ABA_Sub_P Parameter: Treatment Value: 100uM ABA vs. No Treatment
  misc_feature: MA Experiment ID: 20000440 Result: Up-regulated in Transcription
  misc_feature: MA Experiment 20000440 PARAMETER Experiment Name: At_Closed-Flower__Sub_P Parameter: Tissue Value: Closed Flower vs. Whole Plant
atgcaactctcaaagaatccgatcaaacaaacgagaaatcgagagaagaattacaccgacgatttcaccatgaagagatctgtaatcatggctcctgaatctccggtttttttcccacctccgcttgttttctctccgacgtcggtcaaaacgccgttgtcttctcctcgttcgtcgccaccgaagctgacgatggttgcttgtcctccaagaaagccaaaggagacgaagactacgggttctgattctgaaacggtgttgaaaaggaaacgaccaccgatgcttgacttaacggcggctccgacggttgcatcgtggtgcagtacgacgagagagacggcggagaaaggagcggaagttgttgaagcagaagaagatggatactactctgtttattgcaagagaggaagacgcggaccaatggaagataggtatttcgcggccgttgatcgtaacgacgacggaggttacaaaaatgctttctttggggtatttgatggtcacggcggatccaaggcggcggaattcgctgcgatgaatctagggaacaatatcgaggcggcaatggcatcggcgagatcaggagaagatggttgttcgatggagagtgcgataagagaaggttatatcaaaacggatgaggatttcttgaaagaaggttcgagaggtggcgcgtgttgtgtaaccgctttgatatcgaaaggcgagcttgcggtttcgaatgcaggcgactgccgggctgttatgagtcgtggtggaaccgcggaagctctcacttccgatcataatccttctcaagcaaatgagctcaaaaggattgaagcattgggtggttatgttgactgctgcaacggcgtttggagaattcaagggacattagcagtctcacgaggaattggagaccggtacctcaaggagtgggtgatagctgaaccggaaaccagaacattacggattaaaccggagttcgaattcttgatcttagcatctgatggcctgtgggacaaggtaacgaaccaagaggccgtcgatgtcgttcgaccgtactgcgtaggcgtagagaatccaatgacactttctgcttgcaagaaactggctgagctatcggttaagagaggctctttggatgatataagtctaattataattcagctacaaaactttcttccatgatatattaacacatagtacattagctaaactt

SEQ ID NO: 107086 - protein, 390 aa, Arabidopsis thaliana
  peptide (1)..(390): Ceres Seq. ID no. 13621325
  misc_feature (127)..(378): Pfam Name: Protein phosphatase 2C Pfam Description: Protein phosphatase 2C
  misc_feature (1)..(390): Homolog of NCBI NO: 15225656 NR Description: protein phosphatase 2C (PP2C), putative thaliana] >gi|25352216|pir||C84826 protein phosphatase 2C
  misc_feature (201)..(390): Homolog of NCBI NO: 28393269 NR Description: putative protein phosphatase 2C (PP2C) thaliana] >gi|28827530|gb|AAO50609.1| putative protein
  misc_feature (41)..(388): Homolog of NCBI NO: 30013681 NR Description: Avr9/Cf-9 rapidly elicited protein 284 [Nicotiana
  misc_feature (17)..(389): Homolog of NCBI NO: 7488754 NR Description: protein phosphatase 2C - alfalfa
  misc_feature (27)..(385): Homolog of NCBI NO: 15222312 NR Description: protein phosphatase 2C (PP2C), putative thaliana] >gi|20258780|gb|AAM13912.1| putative protein
  misc_feature (22)..(389): Homolog of NCBI NO: 15227687 NR Description: protein phosphatase 2C (PP2C), putative thaliana] >gi|7486043|pir||T02483 probable protein phosphatase 2C
  misc_feature (27)..(275): Homolog of NCBI NO: 25352225 NR Description: hypothetical protein [imported] - Arabidopsis >gi|8954030|gb|AAF82204.1|AC067971_12 Contains similarity to phosphatase 2C from Arabidopsis thaliana gb|AF085279. It contains
  misc_feature (277)..(385): Homolog of NCBI NO: 25352225 NR Description: hypothetical protein [imported] - Arabidopsis >gi|8954030|gb|AAF82204.1|AC067971_12 Contains similarity to phosphatase 2C from Arabidopsis thaliana gb|AF085279. It contains
  misc_feature (122)..(388): Homolog of NCBI NO: 6478146 NR Description: putative serine/threonine phosphatase type 2c
  misc_feature (137)..(352): Homolog of NCBI NO: 23506609 NR Description: putative serine/threonine phosphatase [Leymus
MQLSKNPIKQTRNREKNYTDDFTMKRSVIMAPESPVFFPPPLVFSPTSVKTPLSSPRSSPPKLTMVACPPRKPKETKTTGSDSETVLKRKRPPMLDLTAAPTVASWCSTTRETAEKGAEVVEAEEDGYYSVYCKRGRRGPMEDRYFAAVDRNDDGGYKNAFFGVFDGHGGSKAAEFAAMNLGNNIEAAMASARSGEDGCSMESAIREGYIKTDEDFLKEGSRGGACCVTALISKGELAVSNAGDCRAVMSRGGTAEALTSDHNPSQANELKRIEALGGYVDCCNGVWRIQGTLAVSRGIGDRYLKEWVIAEPETRTLRIKPEFEFLILASDGLWDKVTNQEAVDVVRPYCVGVENPMTLSACKKLAELSVKRGSLDDISLIIIQLQNFLP

SEQ ID NO: 107087 - protein, 367 aa, Arabidopsis thaliana
  peptide (1)..(367): Ceres Seq. ID no. 13621326
  misc_feature (104)..(355): Pfam Name: Protein phosphatase 2C Pfam Description: Protein phosphatase 2C
  misc_feature (1)..(367): Homolog of NCBI NO: 15225656 NR Description: protein phosphatase 2C (PP2C), putative thaliana] >gi|25352216|pir||C84826 protein phosphatase 2C
  misc_feature (178)..(367): Homolog of NCBI NO: 28393269 NR Description: putative protein phosphatase 2C (PP2C) thaliana] >gi|28827530|gb|AAO50609.1| putative protein
  misc_feature (18)..(365): Homolog of NCBI NO: 30013681 NR Description: Avr9/Cf-9 rapidly elicited protein 284 [Nicotiana
  misc_feature (1)..(366): Homolog of NCBI NO: 7488754 NR Description: protein phosphatase 2C - alfalfa
  misc_feature (4)..(362): Homolog of NCBI NO: 15222312 NR Description: protein phosphatase 2C (PP2C), putative thaliana] >gi|20258780|gb|AAM13912.1| putative protein
  misc_feature (1)..(366): Homolog of NCBI NO: 15227687 NR Description: protein phosphatase 2C (PP2C), putative thaliana] >gi|7486043|pir||T02483 probable protein phosphatase 2C
  misc_feature (4)..(252): Homolog of NCBI NO: 25352225 NR Description: hypothetical protein [imported] - Arabidopsis >gi|8954030|gb|AAF82204.1|AC067971_12 Contains similarity to phosphatase 2C from Arabidopsis thaliana gb|AF085279. It contains
  misc_feature (254)..(362): Homolog of NCBI NO: 25352225 NR Description: hypothetical protein [imported] - Arabidopsis >gi|8954030|gb|AAF82204.1|AC067971_12 Contains similarity to phosphatase 2C from Arabidopsis thaliana gb|AF085279. It contains
  misc_feature (99)..(365): Homolog of NCBI NO: 6478146 NR Description: putative serine/threonine phosphatase type 2c
  misc_feature (114)..(329): Homolog of NCBI NO: 23506609 NR Description: putative serine/threonine phosphatase [Leymus
MKRSVIMAPESPVFFPPPLVFSPTSVKTPLSSPRSSPPKLTMVACPPRKPKETKTTGSDSETVLKRKRPPMLDLTAAPTVASWCSTTRETAEKGAEVVEAEEDGYYSVYCKRGRRGPMEDRYFAAVDRNDDGGYKNAFFGVFDGHGGSKAAEFAAMNLGNNIEAAMASARSGEDGCSMESAIREGYIKTDEDFLKEGSRGGACCVTALISKGELAVSNAGDCRAVMSRGGTAEALTSDHNPSQANELKRIEALGGYVDCCNGVWRIQGTLAVSRGIGDRYLKEWVIAEPETRTLRIKPEFEFLILASDGLWDKVTNQEAVDVVRPYCVGVENPMTLSACKKLAELSVKRGSLDDISLIIIQLQNFLP

SEQ ID NO: 107088 - protein, 361 aa, Arabidopsis thaliana
  peptide (1)..(361): Ceres Seq. ID no. 13621327
  misc_feature (98)..(349): Pfam Name: Protein phosphatase 2C Pfam Description: Protein phosphatase 2C
  misc_feature (1)..(361): Homolog of NCBI NO: 15225656 NR Description: protein phosphatase 2C (PP2C), putative thaliana] >gi|25352216|pir||C84826 protein phosphatase 2C
  misc_feature (172)..(361): Homolog of NCBI NO: 28393269 NR Description: putative protein phosphatase 2C (PP2C) thaliana] >gi|28827530|gb|AAO50609.1| putative protein
  misc_feature (12)..(359): Homolog of NCBI NO: 30013681 NR Description: Avr9/Cf-9 rapidly elicited protein 284 [Nicotiana
  misc_feature (1)..(360): Homolog of NCBI NO: 7488754 NR Description: protein phosphatase 2C - alfalfa
  misc_feature (1)..(356): Homolog of NCBI NO: 15222312 NR Description: protein phosphatase 2C (PP2C), putative thaliana] >gi|20258780|gb|AAM13912.1| putative protein
  misc_feature (1)..(360): Homolog of NCBI NO: 15227687 NR Description: protein phosphatase 2C (PP2C), putative thaliana] >gi|7486043|pir||T02483 probable protein phosphatase 2C
  misc_feature (1)..(246): Homolog of NCBI NO: 25352225 NR Description: hypothetical protein [imported] - Arabidopsis >gi|8954030|gb|AAF82204.1|AC067971_12 Contains similarity to phosphatase 2C from Arabidopsis thaliana gb|AF085279. It contains
  misc_feature (248)..(356): Homolog of NCBI NO: 25352225 NR Description: hypothetical protein [imported] - Arabidopsis >gi|8954030|gb|AAF82204.1|AC067971_12 Contains similarity to phosphatase 2C from Arabidopsis thaliana gb|AF085279. It contains
  misc_feature (93)..(359): Homolog of NCBI NO: 6478146 NR Description: putative serine/threonine phosphatase type 2c
  misc_feature (108)..(323): Homolog of NCBI NO: 23506609 NR Description: putative serine/threonine phosphatase [Leymus
MAPESPVFFPPPLVFSPTSVKTPLSSPRSSPPKLTMVACPPRKPKETKTTGSDSETVLKRKRPPMLDLTAAPTVASWCSTTRETAEKGAEVVEAEEDGYYSVYCKRGRRGPMEDRYFAAVDRNDDGGYKNAFFGVFDGHGGSKAAEFAAMNLGNNIEAAMASARSGEDGCSMESAIREGYIKTDEDFLKEGSRGGACCVTALISKGELAVSNAGDCRAVMSRGGTAEALTSDHNPSQANELKRIEALGGYVDCCNGVWRIQGTLAVSRGIGDRYLKEWVIAEPETRTLRIKPEFEFLILASDGLWDKVTNQEAVDVVRPYCVGVENPMTLSACKKLAELSVKRGSLDDISLIIIQLQNFLP

SEQ ID NO: 107089 - DNA, 2838 bp, Arabidopsis thaliana
  misc_feature (1)..(2838): Ceres Seq. ID no. 13621339
  misc_feature: MA Experiment ID: 20000184 Result: Up-regulated in Transcription
  misc_feature: MA Experiment 20000184 PARAMETER Experiment Name: At_Shoots__P Parameter: Age (day) Value: 7
  misc_feature: MA Experiment 20000184 PARAMETER Experiment Name: At_Shoots__P Parameter: Tissue Value: Shoots vs. Whole Plant
  misc_feature: MA Experiment ID: 20000234 Result: Up-regulated in Transcription
  misc_feature: MA Experiment 20000234 PARAMETER Experiment Name: At_Siliques_P Parameter: Age (day) Value: 21
  misc_feature: MA Experiment 20000234 PARAMETER Experiment Name: At_Siliques_P Parameter: Organism Value: A. thaliana
  misc_feature: MA Experiment 20000234 PARAMETER Experiment Name: At_Siliques_P Parameter: Plant Line Value: WS
  misc_feature: MA Experiment 20000234 PARAMETER Experiment Name: At_Siliques_P Parameter: Tissue Value: Less Than 5mm Siliques vs. Whole Plant
atgactaaagtatgtcctaaaacagaagaaaagagagtggtgtctgaagctgtggttgaaccaatttcagcagatgtgagctttgcttctaatcattttccaacgtacaagttaggacctgatgatcagattgttgatgaacctgatgaagatgataaagttccatctgtcaaagatgtcgtcggtaaggagaccggagatttgtcagatcagcacaagaagctttctgttcgtgatctcgcttgcaaatttgacaagaatttagctgcagcttctaagttagttgatgaggttccactctatttctcatcctcctatgattatgtgtctgtggcaaagttaaacgatgtgacttctttggaaggacatgttatgctaaagaaacttagggatgctttagaaaccatgagaggtcgtatggatggaagaaacagagaagcagtggaaaaagctatctccatggttgaggcactagccgttaagttaactcaaaatgaaggtgaactaattcatgataagtttgaagtgaagaaactggcaagcttcctcaagaaggcttcagacgacgcgaagaagttagtaaaccaagaaaagtcgtttgcttgtgctgaaatagagagtgcacgggctcttgtgatgaaacttggaggtgcatttgaagaacaggagctttgttctaaagcttctagagatcagggaccggtgatcggtatgcaacatgagcttcgtgatttaaagagtcaaatccaagagaagtctgcatattccgttaaacttcaaagagagatagcaataattaagaaagctgaggggtccaagtcatgtccgtatgttctggatggtgcacaaagtcttggctcgtgcctaagaatccgtgcctcctcagacagtggtatagatatttccaaatgctcaatccattggtaccgtgcagcatctgagtctagtcgaagagaagctatatctggtgccaaccggtcagtatatgctccagaaccatttgatgtcgggcgagtgatacaagcagacattgtttcaaatggccagaagttcaccgttacaaccgatggtccaattaatactgctgctggcttgcagtcacgcgttgaatcactcctgcgcaaatctaacagtgaattcaccgtggttatatcacagatgaatggacaagaccatgcatcacgatcccatgtatttactgttggaaaggcgaggataaagctgtcccgaggatggatcacaaaggctagagaaatatattcaacctccatgcagctttatttgaagttttctttttcttcaagtttaaatggtttggtaacatttcagctctgtggagtgagaggcaatgctaacgttcctgcaaaggcattgttctggcaacttagaaagggtctaactttcttactaactttcgagtcagagcaagaacgtaatgcagccatagtactcgcacgaacatatgcatatgattgtaatgtgagtaaaatccatcgtccgaccgagattttgtcttctcgtgagttcaaatccaaatccatggggaagatccttgtggaaatctgtatgatatcagctcgagggctccgtgtgggaattggaatcggatcctctctactgaaacaccaatggtacgccgttggttggcttgatccagaagacaaatactgcaccacaatcgatgcttcaagagcagacaatcctgtctggagaacaaagtttgctactttgctcgatgattccacgattcaggattcgaagttggctttgcaagtcgaggtttatagcagagaacccttgttcttaaggaagaggcttcatggctctgctactgtttctttgaaggagtttctgactaagtataagcaacaacagagttcttcgaaagctgtaattgaagaaactggaagctatcagcttaggaagacgaactcgagcaagcctcagggttttgtcgatgtgtcgatacgtatatctgcagagcgagaggattttgggggttttactgtttatttgcattttgtctgcaatcagattatatgtaaattgaacaacaatagacgcaaatgtgaatgggttgtgtcaatttgcagaaagaaaccaactttggtgctgcttttgtttcctgtaactcaattcttgaagaaccttaaatttgggtttccgaatatccgatttcgagatcttagcgtttttaagatgggagattttggaggagtcatgctctcgaacaactcagattacaacacttcaggacaggattacatggctggttcatcgcagtatccatttgctccaatggaccagtcaaacccattctcagttcccccatcatataaccaccactcatcaatgcctaaccctccaatgaccaacaccaacccacaaatgcaacaaccttactatcctccaccgatgcagccaccaccaccacctatgaactcagggtacatgcctacatacatccccaaatctgtgaatgactcatcaatgcctaaccctccaatgaacaacaccaacccacaaatgcaacaaccttactatcctccaccaatgcagccagcaccaccacctatgaactcagggtacatgcctacatacatccctaattcagagaatgttacgaacattccatcgtcatcatcatctggaggagtaccaggaggggcgggaagaggatatgctaggactggcccagggtttgctgtaggagtgggagctggtgcagtagttggagctggtgcagctttatatggaagcgagtttatgtcaggaatcgacttaccttcaagcttacctcacccaagtgtccccatttccattgatcctccattttga

SEQ ID NO: 107090 - protein, 945 aa, Arabidopsis thaliana
  peptide (1)..(945): Ceres Seq. ID no. 13621340
  misc_feature (91)..(261): Pfam Name: Transcription factor AP-2 Pfam Description: Transcription factor AP-2
  misc_feature (1)..(426): Homolog of NCBI NO: 30694458 NR Description: expressed protein [Arabidopsis thaliana] unknown protein [Arabidopsis thaliana]
  misc_feature (441)..(495): Homolog of NCBI NO: 30694458 NR Description: expressed protein [Arabidopsis thaliana] unknown protein [Arabidopsis thaliana]
  misc_feature (1)..(426): Homolog of NCBI NO: 11358381 NR Description: hypothetical protein T5P19.130 - Arabidopsis >gi|7594526|emb|CAB88051.1| putative protein [Arabidopsis
  misc_feature (441)..(494): Homolog of NCBI NO: 11358381 NR Description: hypothetical protein T5P19.130 - Arabidopsis >gi|7594526|emb|CAB88051.1| putative protein [Arabidopsis
  misc_feature (19)..(426): Homolog of NCBI NO: 15225786 NR Description: expressed protein [Arabidopsis thaliana]
  misc_feature (443)..(495): Homolog of NCBI NO: 15225786 NR Description: expressed protein [Arabidopsis thaliana]
  misc_feature (1)..(426): Homolog of NCBI NO: 34909052 NR Description: P0034E02.39 [Oryza sativa (japonica
  misc_feature (441)..(495): Homolog of NCBI NO: 34909052 NR Description: P0034E02.39 [Oryza sativa (japonica
  misc_feature (27)..(426): Homolog of NCBI NO: 33146645 NR Description: hypothetical protein [Oryza sativa (japonica
  misc_feature (441)..(494): Homolog of NCBI NO: 33146645 NR Description: hypothetical protein [Oryza sativa (japonica
MTKVCPKTEEKRVVSEAVVEPISADVSFASNHFPTYKLGPDDQIVDEPDEDDKVPSVKDVVGKETGDLSDQHKKLSVRDLACKFDKNLAAASKLVDEVPLYFSSSYDYVSVAKLNDVTSLEGHVMLKKLRDALETMRGRMDGRNREAVEKAISMVEALAVKLTQNEGELIHDKFEVKKLASFLKKASDDAKKLVNQEKSFACAEIESARALVMKLGGAFEEQELCSKASRDQGPVIGMQHELRDLKSQIQEKSAYSVKLQREIAIIKKAEGSKSCPYVLDGAQSLGSCLRIRASSDSGIDISKCSIHWYRAASESSRREAISGANRSVYAPEPFDVGRVIQADIVSNGQKFTVTTDGPINTAAGLQSRVESLLRKSNSEFTVVISQMNGQDHASRSHVFTVGKARIKLSRGWITKAREIYSTSMQLYLKFSFSSSLNGLVTFQLCGVRGNANVPAKALFWQLRKGLTFLLTFESEQERNAAIVLARTYAYDCNVSKIHRPTEILSSREFKSKSMGKILVEICMISARGLRVGIGIGSSLLKHQWYAVGWLDPEDKYCTTIDASRADNPVWRTKFATLLDDSTIQDSKLALQVEVYSREPLFLRKRLHGSATVSLKEFLTKYKQQQSSSKAVIEETGSYQLRKTNSSKPQGFVDVSIRISAEREDFGGFTVYLHFVCNQIICKLNNNRRKCEWVVSICRKKPTLVLLLFPVTQFLKNLKFGFPNIRFRDLSVFKMGDFGGVMLSNNSDYNTSGQDYMAGSSQYPFAPMDQSNPFSVPPSYNHHSSMPNPPMTNTNPQMQQPYYPPPMQPPPPPMNSGYMPTYIPKSVNDSSMPNPPMNNTNPQMQQPYYPPPMQPAPPPMNSGYMPTYIPNSENVTNIPSSSSSGGVPGGAGRGYARTGPGFAVGVGAGAVVGAGAALYGSEFMSGIDLPSSLPHPSVPISIDPPF

SEQ ID NO: 107091 - protein, 821 aa, Arabidopsis thaliana
  peptide (1)..(821): Ceres Seq. ID no. 13621341
  misc_feature (1)..(137): Pfam Name: Transcription factor AP-2 Pfam Description: Transcription factor AP-2
  misc_feature (1)..(302): Homolog of NCBI NO: 30694458 NR Description: expressed protein [Arabidopsis thaliana] unknown protein [Arabidopsis thaliana]
  misc_feature (317)..(371): Homolog of NCBI NO: 30694458 NR Description: expressed protein [Arabidopsis thaliana] unknown protein [Arabidopsis thaliana]
  misc_feature (1)..(302): Homolog of NCBI NO: 11358381 NR Description: hypothetical protein T5P19.130 - Arabidopsis >gi|7594526|emb|CAB88051.1| putative protein [Arabidopsis
  misc_feature (317)..(370): Homolog of NCBI NO: 11358381 NR Description: hypothetical protein T5P19.130 - Arabidopsis >gi|7594526|emb|CAB88051.1| putative protein [Arabidopsis
  misc_feature (1)..(302): Homolog of NCBI NO: 15225786 NR Description: expressed protein [Arabidopsis thaliana]
  misc_feature (319)..(371): Homolog of NCBI NO: 15225786 NR Description: expressed protein [Arabidopsis thaliana]
  misc_feature (1)..(302): Homolog of NCBI NO: 34909052 NR Description: P0034E02.39 [Oryza sativa (japonica
  misc_feature (317)..(371): Homolog of NCBI NO: 34909052 NR Description: P0034E02.39 [Oryza sativa (japonica
  misc_feature (1)..(302): Homolog of NCBI NO: 33146645 NR Description: hypothetical protein [Oryza sativa (japonica
  misc_feature (317)..(370): Homolog of NCBI NO: 33146645 NR Description: hypothetical protein [Oryza sativa (japonica
MLKKLRDALETMRGRMDGRNREAVEKAISMVEALAVKLTQNEGELIHDKFEVKKLASFLKKASDDAKKLVNQEKSFACAEIESARALVMKLGGAFEEQELCSKASRDQGPVIGMQHELRDLKSQIQEKSAYSVKLQREIAIIKKAEGSKSCPYVLDGAQSLGSCLRIRASSDSGIDISKCSIHWYRAASESSRREAISGANRSVYAPEPFDVGRVIQADIVSNGQKFTVTTDGPINTAAGLQSRVESLLRKSNSEFTVVISQMNGQDHASRSHVFTVGKARIKLSRGWITKAREIYSTSMQLYLKFSFSSSLNGLVTFQLCGVRGNANVPAKALFWQLRKGLTFLLTFESEQERNAAIVLARTYAYDCNVSKIHRPTEILSSREFKSKSMGKILVEICMISARGLRVGIGIGSSLLKHQWYAVGWLDPEDKYCTTIDASRADNPVWRTKFATLLDDSTIQDSKLALQVEVYSREPLFLRKRLHGSATVSLKEFLTKYKQQQSSSKAVIEETGSYQLRKTNSSKPQGFVDVSIRISAEREDFGGFTVYLHFVCNQIICKLNNNRRKCEWVVSICRKKPTLVLLLFPVTQFLKNLKFGFPNIRFRDLSVFKMGDFGGVMLSNNSDYNTSGQDYMAGSSQYPFAPMDQSNPFSVPPSYNHHSSMPNPPMTNTNPQMQQPYYPPPMQPPPPPMNSGYMPTYIPKSVNDSSMPNPPMNNTNPQMQQPYYPPPMQPAPPPMNSGYMPTYIPNSENVTNIPSSSSSGGVPGGAGRGYARTGPGFAVGVGAGAVVGAGAALYGSEFMSGIDLPSSLPHPSVPISIDPPF

SEQ ID NO: 107092 - protein, 810 aa, Arabidopsis thaliana
  peptide (1)..(810): Ceres Seq. ID no. 13621342
  misc_feature (1)..(126): Pfam Name: Transcription factor AP-2 Pfam Description: Transcription factor AP-2
  misc_feature (1)..(291): Homolog of NCBI NO: 30694458 NR Description: expressed protein [Arabidopsis thaliana] unknown protein [Arabidopsis thaliana]
  misc_feature (306)..(360): Homolog of NCBI NO: 30694458 NR Description: expressed protein [Arabidopsis thaliana] unknown protein [Arabidopsis thaliana]
  misc_feature (1)..(291): Homolog of NCBI NO: 11358381 NR Description: hypothetical protein T5P19.130 - Arabidopsis >gi|7594526|emb|CAB88051.1| putative protein [Arabidopsis
  misc_feature (306)..(359): Homolog of NCBI NO: 11358381 NR Description: hypothetical protein T5P19.130 - Arabidopsis >gi|7594526|emb|CAB88051.1| putative protein [Arabidopsis
  misc_feature (1)..(291): Homolog of NCBI NO: 15225786 NR Description: expressed protein [Arabidopsis thaliana]
  misc_feature (308)..(360): Homolog of NCBI NO: 15225786 NR Description: expressed protein [Arabidopsis thaliana]
  misc_feature (1)..(291): Homolog of NCBI NO: 34909052 NR Description: P0034E02.39 [Oryza sativa (japonica
  misc_feature (306)..(360): Homolog of NCBI NO: 34909052 NR Description: P0034E02.39 [Oryza sativa (japonica
  misc_feature (1)..(291): Homolog of NCBI NO: 33146645 NR Description: hypothetical protein [Oryza sativa (japonica
  misc_feature (306)..(359): Homolog of NCBI NO: 33146645 NR Description: hypothetical protein [Oryza sativa (japonica
MRGRMDGRNREAVEKAISMVEALAVKLTQNEGELIHDKFEVKKLASFLKKASDDAKKLVNQEKSFACAEIESARALVMKLGGAFEEQELCSKASRDQGPVIGMQHELRDLKSQIQEKSAYSVKLQREIAIIKKAEGSKSCPYVLDGAQSLGSCLRIRASSDSGIDISKCSIHWYRAASESSRREAISGANRSVYAPEPFDVGRVIQADIVSNGQKFTVTTDGPINTAAGLQSRVESLLRKSNSEFTVVISQMNGQDHASRSHVFTVGKARIKLSRGWITKAREIYSTSMQLYLKFSFSSSLNGLVTFQLCGVRGNANVPAKALFWQLRKGLTFLLTFESEQERNAAIVLARTYAYDCNVSKIHRPTEILSSREFKSKSMGKILVEICMISARGLRVGIGIGSSLLKHQWYAVGWLDPEDKYCTTIDASRADNPVWRTKFATLLDDSTIQDSKLALQVEVYSREPLFLRKRLHGSATVSLKEFLTKYKQQQSSSKAVIEETGSYQLRKTNSSKPQGFVDVSIRISAEREDFGGFTVYLHFVCNQIICKLNNNRRKCEWVVSICRKKPTLVLLLFPVTQFLKNLKFGFPNIRFRDLSVFKMGDFGGVMLSNNSDYNTSGQDYMAGSSQYPFAPMDQSNPFSVPPSYNHHSSMPNPPMTNTNPQMQQPYYPPPMQPPPPPMNSGYMPTYIPKSVNDSSMPNPPMNNTNPQMQQPYYPPPMQPAPPPMNSGYMPTYIPNSENVTNIPSSSSSGGVPGGAGRGYARTGPGFAVGVGAGAVVGAGAALYGSEFMSGIDLPSSLPHPSVPISIDPPF

SEQ ID NO: 107093 - DNA, 752 bp, Arabidopsis thaliana
  misc_feature (1)..(752): Ceres Seq. ID no. 13621347
  misc_feature: MA Experiment ID: 108434 Result: Down-regulated in Transcription
  misc_feature: MA Experiment 108434 PARAMETER Experiment Name: At_Root_Tips_cDNA_P Parameter: Tissue Value: Root Tips
  misc_feature: MA Experiment ID: 108435 Result: Down-regulated in Transcription
  misc_feature: MA Experiment 108435 PARAMETER Experiment Name: At_stm_Mutants_cDNA_P Parameter: Plant Line Value: wt Landsburg vs stm
  misc_feature: MA Experiment 108435 PARAMETER Experiment Name: At_stm_Mutants_cDNA_P Parameter: Tissue Value: Shoot Apical Meristem Region
  misc_feature: MA Experiment ID: 108461 Result: Up-regulated in Transcription
  misc_feature: MA Experiment 108461 PARAMETER Experiment Name: At_Germinating_Seeds_cDNA_P Parameter: Age (day) Value: 1 vs. 0
  misc_feature: MA Experiment 108461 PARAMETER Experiment Name: At_Germinating_Seeds_cDNA_P Parameter: Tissue Value: Germinating Seeds
  misc_feature: MA Experiment ID: 108462 Result: Up-regulated in Transcription
  misc_feature: MA Experiment 108462 PARAMETER Experiment Name: At_Germinating_Seeds_cDNA_P Parameter: Age (day) Value: 2 vs. 0
  misc_feature: MA Experiment 108462 PARAMETER Experiment Name: At_Germinating_Seeds_cDNA_P Parameter: Tissue Value: Germinating Seeds
  misc_feature: MA Experiment ID: 108464 Result: Up-regulated in Transcription
  misc_feature: MA Experiment 108464 PARAMETER Experiment Name: At_Germinating_Seeds_cDNA_P Parameter: Age (day) Value: 4 vs. 0
  misc_feature: MA Experiment 108464 PARAMETER Experiment Name: At_Germinating_Seeds_cDNA_P Parameter: Tissue Value: Germinating Seeds
  misc_feature: MA Experiment ID: 108488 Result: Up-regulated in Transcription
  misc_feature: MA Experiment ID: 108489 Result: Down-regulated in Transcription
  misc_feature: MA Experiment ID: 108594 Result: Down-regulated in Transcription
  misc_feature: MA Experiment 108594 PARAMETER Experiment Name: At_Ler-rhl_Root_cDNA_P Parameter: Plant Line Value: null
  misc_feature: MA Experiment ID: 108595 Result: Down-regulated in Transcription
  misc_feature: MA Experiment 108595 PARAMETER Experiment Name: At_Ler-pi_Ovule_cDNA_P Parameter: Plant Line Value: null
  misc_feature: MA Experiment ID: 20000180 Result: Up-regulated in Transcription
  misc_feature: MA Experiment 20000180 PARAMETER Experiment Name: At_Germinating_Seeds_P Parameter: Age (hr) Value: 24 vs. 0
  misc_feature: MA Experiment 20000180 PARAMETER Experiment Name: At_Germinating_Seeds_P Parameter: Tissue Value: Germinating Seeds
  misc_feature: MA Experiment ID: 20000185 Result: Down-regulated in Transcription
  misc_feature: MA Experiment 20000185 PARAMETER Experiment Name: At_Roots__P Parameter: Age (day) Value: 7 vs. 21
  misc_feature: MA Experiment 20000185 PARAMETER Experiment Name: At_Roots__P Parameter: Organism Value: A. thaliana
  misc_feature: MA Experiment 20000185 PARAMETER Experiment Name: At_Roots__P Parameter: Tissue Value: Roots vs. Whole Plant
  misc_feature: MA Experiment ID: 20000224 Result: Down-regulated in Transcription
  misc_feature: MA Experiment ID: 20000439 Result: Down-regulated in Transcription
  misc_feature: MA Experiment 20000439 PARAMETER Experiment Name: At_Roots__P Parameter: Age (day) Value: 14 vs. 21
  misc_feature: MA Experiment 20000439 PARAMETER Experiment Name: At_Roots__P Parameter: Organism Value: A. thaliana
  misc_feature: MA Experiment 20000439 PARAMETER Experiment Name: At_Roots__P Parameter: Tissue Value: Roots vs. Whole Plant
  misc_feature: MA Experiment ID: 20000794 Result: Down-regulated in Transcription
  misc_feature: MA Experiment 20000794 PARAMETER Experiment Name: At_Petals_P Parameter: Age (day) Value: 23-25 days
  misc_feature: MA Experiment 20000794 PARAMETER Experiment Name: At_Petals_P Parameter: Plant Line Value: WS
  misc_feature: MA Experiment 20000794 PARAMETER Experiment Name: At_Petals_P Parameter: Tissue Value: Petals vs. Whole plant
  misc_feature: MA Experiment ID: 20001556 Result: Down-regulated in Transcription
  misc_feature: MA Experiment 20001556 PARAMETER Experiment Name: At_Drought_Soil_Dry_P Parameter: Age (day) Value: 26
  misc_feature: MA Experiment 20001556 PARAMETER Experiment Name: At_Drought_Soil_Dry_P Parameter: Organism Value: A. thaliana
  misc_feature: MA Experiment 20001556 PARAMETER Experiment Name: At_Drought_Soil_Dry_P Parameter: Plant Line Value: WS
  misc_feature: MA Experiment 20001556 PARAMETER Experiment Name: At_Drought_Soil_Dry_P Parameter: Post Timepoint (hr) Value: None
  misc_feature: MA Experiment 20001556 PARAMETER Experiment Name: At_Drought_Soil_Dry_P Parameter: Post-Treatment Value: None
  misc_feature: MA Experiment 20001556 PARAMETER Experiment Name: At_Drought_Soil_Dry_P Parameter: Timepoint (day) Value: 12
  misc_feature: MA Experiment 20001556 PARAMETER Experiment Name: At_Drought_Soil_Dry_P Parameter: Treatment Value: Drought vs. No Drought
  misc_feature: MA Experiment ID: 20001557 Result: Down-regulated in Transcription
  misc_feature: MA Experiment 20001557 PARAMETER Experiment Name: At_Drought_Soil_Dry_P Parameter: Age (day) Value: 27
  misc_feature: MA Experiment 20001557 PARAMETER Experiment Name: At_Drought_Soil_Dry_P Parameter: Organism Value: A. thaliana
  misc_feature: MA Experiment 20001557 PARAMETER Experiment Name: At_Drought_Soil_Dry_P Parameter: Plant Line Value: WS
  misc_feature: MA Experiment 20001557 PARAMETER Experiment Name: At_Drought_Soil_Dry_P Parameter: Post Timepoint (hr) Value: 3
  misc_feature: MA Experiment 20001557 PARAMETER Experiment Name: At_Drought_Soil_Dry_P Parameter: Post-Treatment Value: Re-Water vs. No Drought
  misc_feature: MA Experiment 20001557 PARAMETER Experiment Name: At_Drought_Soil_Dry_P Parameter: Timepoint (day) Value: 13
  misc_feature: MA Experiment 20001557 PARAMETER Experiment Name: At_Drought_Soil_Dry_P Parameter: Treatment Value: Drought vs. No Drought
  misc_feature: MA Experiment ID: 20001558 Result: Down-regulated in Transcription
  misc_feature: MA Experiment 20001558 PARAMETER Experiment Name: At_Drought_Soil_Dry_P Parameter: Age (day) Value: 27
  misc_feature: MA Experiment 20001558 PARAMETER Experiment Name: At_Drought_Soil_Dry_P Parameter: Organism Value: A. thaliana
  misc_feature: MA Experiment 20001558 PARAMETER Experiment Name: At_Drought_Soil_Dry_P Parameter: Plant Line Value: WS
  misc_feature: MA Experiment 20001558 PARAMETER Experiment Name: At_Drought_Soil_Dry_P Parameter: Post Timepoint (hr) Value: 6
  misc_feature: MA Experiment 20001558 PARAMETER Experiment Name: At_Drought_Soil_Dry_P Parameter: Post-Treatment Value: Re-Water vs. No Drought
  misc_feature: MA Experiment 20001558 PARAMETER Experiment Name: At_Drought_Soil_Dry_P Parameter: Timepoint (day) Value: 13
  misc_feature: MA Experiment 20001558 PARAMETER Experiment Name: At_Drought_Soil_Dry_P Parameter: Treatment Value: Drought vs. No Drought
  misc_feature: MA Experiment ID: 20001560 Result: Down-regulated in Transcription
  misc_feature: MA Experiment 20001560 PARAMETER Experiment Name: At_Drought_Soil_Dry_P Parameter: Age (day) Value: 28
  misc_feature: MA Experiment 20001560 PARAMETER Experiment Name: At_Drought_Soil_Dry_P Parameter: Organism Value: A. thaliana
  misc_feature: MA Experiment 20001560 PARAMETER Experiment Name: At_Drought_Soil_Dry_P Parameter: Plant Line Value: WS
  misc_feature: MA Experiment 20001560 PARAMETER Experiment Name: At_Drought_Soil_Dry_P Parameter: Post Timepoint (hr) Value: None
  misc_feature: MA Experiment 20001560 PARAMETER Experiment Name: At_Drought_Soil_Dry_P Parameter: Post-Treatment Value: None
  misc_feature: MA Experiment 20001560 PARAMETER Experiment Name: At_Drought_Soil_Dry_P Parameter: Timepoint (day) Value: 14
  misc_feature: MA Experiment 20001560 PARAMETER Experiment Name: At_Drought_Soil_Dry_P Parameter: Treatment Value: Drought vs. No Drought
  misc_feature: MA Experiment ID: 20001906 Result: Down-regulated in Transcription
  misc_feature: MA Experiment 20001906 PARAMETER Experiment Name: At_Drought_Reproduction_P Parameter: Age (day) Value: 35
  misc_feature: MA Experiment 20001906 PARAMETER Experiment Name: At_Drought_Reproduction_P Parameter: Organism Value: A. thaliana
  misc_feature: MA Experiment 20001906 PARAMETER Experiment Name: At_Drought_Reproduction_P Parameter: Plant Line Value: WS
  misc_feature: MA Experiment 20001906 PARAMETER Experiment Name: At_Drought_Reproduction_P Parameter: Timepoint (day) Value: 5
  misc_feature: MA Experiment 20001906 PARAMETER Experiment Name: At_Drought_Reproduction_P Parameter: Tissue Value: Siliques
  misc_feature: MA Experiment 20001906 PARAMETER Experiment Name: At_Drought_Reproduction_P Parameter: Treatment Value: Drought vs. No Drought
  misc_feature: MA Experiment ID: 20001908 Result: Down-regulated in Transcription
  misc_feature: MA Experiment 20001908 PARAMETER Experiment Name: At_Drought_Reproduction_P Parameter: Age (day) Value: 40
  misc_feature: MA Experiment 20001908 PARAMETER Experiment Name: At_Drought_Reproduction_P Parameter: Organism Value: A. thaliana
  misc_feature: MA Experiment 20001908 PARAMETER Experiment Name: At_Drought_Reproduction_P Parameter: Plant Line Value: WS
  misc_feature: MA Experiment 20001908 PARAMETER Experiment Name: At_Drought_Reproduction_P Parameter: Timepoint (day) Value: 10
  misc_feature: MA Experiment 20001908 PARAMETER Experiment Name: At_Drought_Reproduction_P Parameter: Tissue Value: Siliques
  misc_feature: MA Experiment 20001908 PARAMETER Experiment Name: At_Drought_Reproduction_P Parameter: Treatment Value: Drought vs. No Drought
atccaccacatatttatgtttgatccaaaagccaacacaagcaaagaaattaaaagtgttcttgttgctgtagaacacaaacagaacaaacaaaaaatcaattgaagagtctctcagtcgttaggggaagcaaatagagaaatggctagctttactgcctccgcttccaccgtctccgccgctcgtccggctctccttctcaagcctaccgtcgccatctctgctcctgttcttggtttgcctccaatgggtaagaagaagggaggagtgagatgttcaatggagacaaagcaaggaaacgtctcagtcatgggggctggagtttcagctgcagcaacagctgctttgacggcggtgatgagcaatcccgcgatggctttggttgatgagaggatgtcaacagaaggaacaggattaccctttggtctaagcaacaacctcttgggttggattctgtttggagtctttggtttgatctggactttcttcttcgtctacacttcatctctcgaggaggatgaagaatctggtctttcactctgaaggaagaatcaatctttcgtcttctcatttccattttcatgtgagaacatgaatcaaaagtgttcacccttctagtttcttgtaattgttaagtaaagactaaaaactattttcatgtgtgtttactttcccccattctctttatcttgtcataacattgataaggaggagattatgtgattattaaatatcatgcatgacatgttcat

SEQ ID NO: 107094 - protein, 133 aa, Arabidopsis thaliana; identical to SEQ ID NO: 20530
  peptide (1)..(133): Ceres Seq. ID no. 13621348
  misc_feature (1)..(133): Homolog of NCBI NO: 15224531 NR Description: photosystem II reaction center 6.1KD protein thaliana] >gi|30684638|ref|NP_850149.1| photosystem II reaction
  misc_feature (1)..(133): Homolog of NCBI NO: 2129672 NR Description: photosystem II protein psbW - Arabidopsis >gi|950023|emb|CAA62296.1| component of 6.1 kDa polypeptide of
  misc_feature (1)..(112): Homolog of NCBI NO: 16226722 NR Description: At2g30570/T6B20.8 [Arabidopsis thaliana]
  misc_feature (1)..(133): Homolog of NCBI NO: 2493694 NR Description: Photosystem II reaction center W protein, precursor (PSII 6.1 kDa protein) >gi|1076268|pir||S53025
  misc_feature (41)..(133): Homolog of NCBI NO: 16930765 NR Description: photosystem II reaction center [Retama raetam]
  misc_feature (1)..(118): Homolog of NCBI NO: 12584906 NR Description: PSII subunit PsbW [Physcomitrella patens]
  misc_feature (29)..(118): Homolog of NCBI NO: 12584902 NR Description: PSII subunit PsbW [Physcomitrella patens]
  misc_feature (68)..(133): Homolog of NCBI NO: 12584904 NR Description: PSII subunit PsbW [Physcomitrella patens]
  misc_feature (28)..(133): Homolog of NCBI NO: 20139842 NR Description: Photosystem II reaction center W protein, precursor >gi|5739404|gb|AAD50464.1|AF170026_1 core subunit of
  misc_feature (1)..(133): Homolog of NCBI NO: 32307612 NR Description: photosystem II protein PsbW [Bigelowiella natans]

SEQ ID NO: 107095 - protein, 98 aa, Arabidopsis thaliana; identical to SEQ ID NO: 20531
  peptide (1)..(98): Ceres Seq. ID no. 13621349
  misc_feature (1)..(98): Homolog of NCBI NO: 15224531 NR Description: photosystem II reaction center 6.1KD protein thaliana] >gi|30684638|ref|NP_850149.1| photosystem II reaction
  misc_feature (1)..(98): Homolog of NCBI NO: 2129672 NR Description: photosystem II protein psbW - Arabidopsis >gi|950023|emb|CAA62296.1| component of 6.1 kDa polypeptide of
  misc_feature (1)..(77): Homolog of NCBI NO: 16226722 NR Description: At2g30570/T6B20.8 [Arabidopsis thaliana]
  misc_feature (1)..(98): Homolog of NCBI NO: 2493694 NR Description: Photosystem II reaction center W protein, precursor (PSII 6.1 kDa protein) >gi|1076268|pir||S53025
  misc_feature (6)..(98): Homolog of NCBI NO: 16930765 NR Description: photosystem II reaction center [Retama raetam]
  misc_feature (1)..(83): Homolog of NCBI NO: 12584906 NR Description: PSII subunit PsbW [Physcomitrella patens]
  misc_feature (1)..(83): Homolog of NCBI NO: 12584902 NR Description: PSII subunit PsbW [Physcomitrella patens]
  misc_feature (33)..(98): Homolog of NCBI NO: 12584904 NR Description: PSII subunit PsbW [Physcomitrella patens]
  misc_feature (1)..(98): Homolog of NCBI NO: 20139842 NR Description: Photosystem II reaction center W protein, precursor >gi|5739404|gb|AAD50464.1|AF170026_1 core subunit of
  misc_feature (1)..(98): Homolog of NCBI NO: 32307612 NR Description: photosystem II protein PsbW [Bigelowiella natans]

SEQ ID NO: 107096 - protein, 87 aa, Arabidopsis thaliana; identical to SEQ ID NO: 20532
  peptide (1)..(87): Ceres Seq. ID no. 13621350
  misc_feature (1)..(87): Homolog of NCBI NO: 15224531 NR Description: photosystem II reaction center 6.1KD protein thaliana] >gi|30684638|ref|NP_850149.1| photosystem II reaction
  misc_feature (1)..(87): Homolog of NCBI NO: 2129672 NR Description: photosystem II protein psbW - Arabidopsis >gi|950023|emb|CAA62296.1| component of 6.1 kDa polypeptide of
  misc_feature (1)..(66): Homolog of NCBI NO: 16226722 NR Description: At2g30570/T6B20.8 [Arabidopsis thaliana]
  misc_feature (1)..(87): Homolog of NCBI NO: 2493694 NR Description: Photosystem II reaction center W protein, precursor (PSII 6.1 kDa protein) >gi|1076268|pir||S53025
  misc_feature (1)..(87): Homolog of NCBI NO: 16930765 NR Description: photosystem II reaction center [Retama raetam]
  misc_feature (1)..(72): Homolog of NCBI NO: 12584906 NR Description: PSII subunit PsbW [Physcomitrella patens]
  misc_feature (1)..(72): Homolog of NCBI NO: 12584902 NR Description: PSII subunit PsbW [Physcomitrella patens]
  misc_feature (22)..(87): Homolog of NCBI NO: 12584904 NR Description: PSII subunit PsbW [Physcomitrella patens]
  misc_feature (1)..(87): Homolog of NCBI NO: 20139842 NR Description: Photosystem II reaction center W protein, precursor >gi|5739404|gb|AAD50464.1|AF170026_1 core subunit of
  misc_feature (1)..(87): Homolog of NCBI NO: 32307612 NR Description: photosystem II protein PsbW [Bigelowiella natans]

SEQ ID NO: 107097 - DNA, 1252 bp, Arabidopsis thaliana
  misc_feature (1)..(1252): Ceres Seq. ID no. 13621353
  misc_feature: MA Experiment ID: 20000185 Result: Up-regulated in Transcription
  misc_feature: MA Experiment 20000185 PARAMETER Experiment Name: At_Roots__P Parameter: Age (day) Value: 7 vs. 21
  misc_feature: MA Experiment 20000185 PARAMETER Experiment Name: At_Roots__P Parameter: Organism Value: A. thaliana
  misc_feature: MA Experiment 20000185 PARAMETER Experiment Name: At_Roots__P Parameter: Tissue Value: Roots vs. Whole Plant
  misc_feature: MA Experiment ID: 20000227 Result: Down-regulated in Transcription
  misc_feature: MA Experiment 20000227 PARAMETER Experiment Name: At_Root-Tips-vs-Tops_P Parameter: Tissue Value: Root Tips vs. Root Tops
  misc_feature: MA Experiment ID: 20000439 Result: Up-regulated in Transcription
  misc_feature: MA Experiment 20000439 PARAMETER Experiment Name: At_Roots__P Parameter: Age (day) Value: 14 vs. 21
  misc_feature: MA Experiment 20000439 PARAMETER Experiment Name: At_Roots__P Parameter: Organism Value: A. thaliana
  misc_feature: MA Experiment 20000439 PARAMETER Experiment Name: At_Roots__P Parameter: Tissue Value: Roots vs. Whole Plant
  misc_feature: MA Experiment ID: 20000496 Result: Down-regulated in Transcription
  misc_feature: MA Experiment 20000496 PARAMETER Experiment Name: At_Guard_Cells_P Parameter: Harvest Date Value: 7/19/2002
  misc_feature: MA Experiment 20000496 PARAMETER Experiment Name: At_Guard_Cells_P Parameter: Organism Value: Canola
  misc_feature: MA Experiment 20000496 PARAMETER Experiment Name: At_Guard_Cells_P Parameter: Tissue Value: Guard Cells vs. Leaves
  misc_feature: MA Experiment ID: 20001905 Result: Down-regulated in Transcription
  misc_feature: MA Experiment 20001905 PARAMETER Experiment Name: At_Drought_Reproduction_P Parameter: Age (day) Value: 40
  misc_feature: MA Experiment 20001905 PARAMETER Experiment Name: At_Drought_Reproduction_P Parameter: Organism Value: A. thaliana
  misc_feature: MA Experiment 20001905 PARAMETER Experiment Name: At_Drought_Reproduction_P Parameter: Plant Line Value: WS
  misc_feature: MA Experiment 20001905 PARAMETER Experiment Name: At_Drought_Reproduction_P Parameter: Timepoint (day) Value: 10
  misc_feature: MA Experiment 20001905 PARAMETER Experiment Name: At_Drought_Reproduction_P Parameter: Tissue Value: Rosettes
  misc_feature: MA Experiment 20001905 PARAMETER Experiment Name: At_Drought_Reproduction_P Parameter: Treatment Value: Drought vs. No Drought
acaaaggaagaagaagatggaagcaacatacgatcgtgctagtgaggtaaaagcttttgacgagttgaagatcggcgtaaaaggtctcctagacgccggagttactcagatcccacgtatcttccatcatccacatcttaatttaaccgactcaaatctacttctttcctctacaacgatggttataccaacaatcgatcttaaaggaggcgtgttcgacgagtacacagtcacgcgagagagcgtcatcgcgatgatcagagacgcggttgagagattcgggtttttccaggtgattaaccatgggattagtaatgatgttatggagaagatgaaagatgggattcgtgggtttcatgagcaagactcagacgttaggaaaaagttttatactcgtgacgtcaccaaaacagttaagtataacagtaattttgatctttatagctctccttcagcgaactggagagataccttgagttgctttatggctcctgatgttccagaaacagaggacttaccagatatttgtggggaaatcatgttggaatatgcgaaacgagtgatgaaactaggggaactaatctttgagcttttatcagaagctttagggctgaatcctaaccacttgaaagaaatggattgcacaaaaggtttattgatgctttctcattactacccgccttgtcctgagcctggtttaacttttggcacaagtccgcattcagacagatcttttctcactattcttcttcaagatcacattggtgggcttcaagttcgtcagaatggttattgggttgatgttcctcctgttccgggagctcttctcgttaacctcggagatcttttacagcttatgaccaatgatcagtttgtgagcgtagagcatagagttctggctaataaaggtgaaaagccgcggatctcagtagcatctttctttgtgcatcctttaccgagtttacgagtttatggaccgataaaagaacttttgtctgagcaaaaccttcccaagtatagagacactaccgtcactgagtacacgagtcattacatggcaagaggactttatggaaattctgtgttgcttgatttcaagatctgataaaataaactttggagtttaccaacataactcaggtcttctacagtttcacttgattgttccgtaccttatgaaagaaagcttctcgcacactcaaacaaatgtactcatgatgctattaatttaggcaatgagttgggatatgtt

SEQ ID NO: 107098 - protein, 367 aa, Arabidopsis thaliana
  peptide (1)..(367): Ceres Seq. ID no. 13621354
  misc_feature (216)..(316): Pfam Name: 2OG-Fe(II) oxygenase superfamily Pfam Description: 2OG-Fe(II) oxygenase superfamily
  misc_feature (6)..(367): Homolog of NCBI NO: 15224576 NR Description: 2-oxoglutarate-dependent dioxygenase, putative
  misc_feature (6)..(367): Homolog of NCBI NO: 15224575 NR Description: 2-oxoglutarate-dependent dioxygenase, putative
  misc_feature (6)..(367): Homolog of NCBI NO: 15224730 NR Description: 2-oxoglutarate-dependent dioxygenase, putative
  misc_feature (8)..(367): Homolog of NCBI NO: 30679748 NR Description: 2-oxoglutarate-dependent dioxygenase, putative thaliana] >gi|30102640|gb|AAP21238.1| At1g06620 [Arabidopsis
  misc_feature (5)..(367): Homolog of NCBI NO: 13878119 NR Description: putative oxidoreductase [Arabidopsis thaliana]
  misc_feature (5)..(367): Homolog of NCBI NO: 15221545 NR Description: 2-oxoglutarate-dependent dioxygenase, putative thaliana] >gi|23296334|gb|AAN13044.1| putative oxidoreductase
  misc_feature (5)..(367): Homolog of NCBI NO: 15221544 NR Description: 2-oxoglutarate-dependent dioxygenase, putative thaliana] >gi|13430546|gb|AAK25895.1|AF360185_1 putative [Arabidopsis thaliana] >gi|14532752|gb|AAK64077.1| putative
  misc_feature (5)..(296): Homolog of NCBI NO: 25406927 NR Description: protein F12K11.6 [imported] - Arabidopsis >gi|6692693|gb|AAF24827.1|AC007592_20 F12K11.6 [Arabidopsis
  misc_feature (282)..(367): Homolog of NCBI NO: 25406927 NR Description: protein F12K11.6 [imported] - Arabidopsis >gi|6692693|gb|AAF24827.1|AC007592_20 F12K11.6 [Arabidopsis
  misc_feature (5)..(292): Homolog of NCBI NO: 25406927 NR Description: protein F12K11.6 [imported] - Arabidopsis >gi|6692693|gb|AAF24827.1|AC007592_20 F12K11.6 [Arabidopsis
QRKKKMEATYDRASEVKAFDELKIGVKGLLDAGVTQIPRIFHHPHLNLTDSNLLLSSTTMVIPTIDLKGGVFDEYTVTRESVIAMIRDAVERFGFFQVINHGISNDVMEKMKDGIRGFHEQDSDVRKKFYTRDVTKTVKYNSNFDLYSSPSANWRDTLSCFMAPDVPETEDLPDICGEIMLEYAKRVMKLGELIFELLSEALGLNPNHLKEMDCTKGLLMLSHYYPPCPEPGLTFGTSPHSDRSFLTILLQDHIGGLQVRQNGYWVDVPPVPGALLVNLGDLLQLMTNDQFVSVEHRVLANKGEKPRISVASFFVHPLPSLRVYGPIKELLSEQNLPKYRDTTVTEYTSHYMARGLYGNSVLLDFKI

SEQ ID NO: 107099 - protein, 362 aa, Arabidopsis thaliana
  peptide (1)..(362): Ceres Seq. ID no. 13621355
  misc_feature (211)..(311): Pfam Name: 2OG-Fe(II) oxygenase superfamily Pfam Description: 2OG-Fe(II) oxygenase superfamily
  misc_feature (1)..(362): Homolog of NCBI NO: 15224576 NR Description: 2-oxoglutarate-dependent dioxygenase, putative
  misc_feature (1)..(362): Homolog of NCBI NO: 15224575 NR Description: 2-oxoglutarate-dependent dioxygenase, putative
  misc_feature (1)..(362): Homolog of NCBI NO: 15224730 NR Description: 2-oxoglutarate-dependent dioxygenase, putative
  misc_feature (3)..(362): Homolog of NCBI NO: 30679748 NR Description: 2-oxoglutarate-dependent dioxygenase, putative thaliana] >gi|30102640|gb|AAP21238.1| At1g06620 [Arabidopsis
  misc_feature (1)..(362): Homolog of NCBI NO: 13878119 NR Description: putative oxidoreductase [Arabidopsis thaliana]
  misc_feature (1)..(362): Homolog of NCBI NO: 15221545 NR Description: 2-oxoglutarate-dependent dioxygenase, putative thaliana] >gi|23296334|gb|AAN13044.1| putative oxidoreductase
  misc_feature (1)..(362): Homolog of NCBI NO: 15221544 NR Description: 2-oxoglutarate-dependent dioxygenase, putative thaliana] >gi|13430546|gb|AAK25895.1|AF360185_1 putative [Arabidopsis thaliana] >gi|14532752|gb|AAK64077.1| putative
  misc_feature (1)..(291): Homolog of NCBI NO: 25406927 NR Description: protein F12K11.6 [imported] - Arabidopsis >gi|6692693|gb|AAF24827.1|AC007592_20 F12K11.6 [Arabidopsis
  misc_feature (277)..(362): Homolog of NCBI NO: 25406927 NR Description: protein F12K11.6 [imported] - Arabidopsis >gi|6692693|gb|AAF24827.1|AC007592_20 F12K11.6 [Arabidopsis
  misc_feature (1)..(287): Homolog of NCBI NO: 25406927 NR Description: protein F12K11.6 [imported] - Arabidopsis >gi|6692693|gb|AAF24827.1|AC007592_20 F12K11.6 [Arabidopsis
MEATYDRASEVKAFDELKIGVKGLLDAGVTQIPRIFHHPHLNLTDSNLLLSSTTMVIPTIDLKGGVFDEYTVTRESVIAMIRDAVERFGFFQVINHGISNDVMEKMKDGIRGFHEQDSDVRKKFYTRDVTKTVKYNSNFDLYSSPSANWRDTLSCFMAPDVPETEDLPDICGEIMLEYAKRVMKLGELIFELLSEALGLNPNHLKEMDCTKGLLMLSHYYPPCPEPGLTFGTSPHSDRSFLTILLQDHIGGLQVRQNGYWVDVPPVPGALLVNLGDLLQLMTNDQFVSVEHRVLANKGEKPRISVASFFVHPLPSLRVYGPIKELLSEQNLPKYRDTTVTEYTSHYMARGLYGNSVLLDFKI

SEQ ID NO: 107100 - protein, 308 aa, Arabidopsis thaliana
  peptide (1)..(308): Ceres Seq. ID no. 13621356
  misc_feature (157)..(257): Pfam Name: 2OG-Fe(II) oxygenase superfamily Pfam Description: 2OG-Fe(II) oxygenase superfamily
  misc_feature (1)..(308): Homolog of NCBI NO: 15224576 NR Description: 2-oxoglutarate-dependent dioxygenase, putative
  misc_feature (1)..(308): Homolog of NCBI NO: 15224575 NR Description: 2-oxoglutarate-dependent dioxygenase, putative
  misc_feature (1)..(308): Homolog of NCBI NO: 15224730 NR Description: 2-oxoglutarate-dependent dioxygenase, putative
  misc_feature (1)..(308): Homolog of NCBI NO: 30679748 NR Description: 2-oxoglutarate-dependent dioxygenase, putative thaliana] >gi|30102640|gb|AAP21238.1| At1g06620 [Arabidopsis
  misc_feature (1)..(308): Homolog of NCBI NO: 13878119 NR Description: putative oxidoreductase [Arabidopsis thaliana]
  misc_feature (1)..(308): Homolog of NCBI NO: 15221545 NR Description: 2-oxoglutarate-dependent dioxygenase, putative thaliana] >gi|23296334|gb|AAN13044.1| putative oxidoreductase
  misc_feature (1)..(308): Homolog of NCBI NO: 15221544 NR Description: 2-oxoglutarate-dependent dioxygenase, putative thaliana] >gi|13430546|gb|AAK25895.1|AF360185_1 putative [Arabidopsis thaliana] >gi|14532752|gb|AAK64077.1| putative
  misc_feature (1)..(237): Homolog of NCBI NO: 25406927 NR Description: protein F12K11.6 [imported] - Arabidopsis >gi|6692693|gb|AAF24827.1|AC007592_20 F12K11.6 [Arabidopsis
  misc_feature (223)..(308): Homolog of NCBI NO: 25406927 NR Description: protein F12K11.6 [imported] - Arabidopsis >gi|6692693|gb|AAF24827.1|AC007592_20 F12K11.6 [Arabidopsis
  misc_feature (1)..(233): Homolog of NCBI NO: 25406927 NR Description: protein F12K11.6 [imported] - Arabidopsis >gi|6692693|gb|AAF24827.1|AC007592_20 F12K11.6 [Arabidopsis
MVIPTIDLKGGVFDEYTVTRESVIAMIRDAVERFGFFQVINHGISNDVMEKMKDGIRGFHEQDSDVRKKFYTRDVTKTVKYNSNFDLYSSPSANWRDTLSCFMAPDVPETEDLPDICGEIMLEYAKRVMKLGELIFELLSEALGLNPNHLKEMDCTKGLLMLSHYYPPCPEPGLTFGTSPHSDRSFLTILLQDHIGGLQVRQNGYWVDVPPVPGALLVNLGDLLQLMTNDQFVSVEHRVLANKGEKPRISVASFFVHPLPSLRVYGPIKELLSEQNLPKYRDTTVTEYTSHYMARGLYGNSVLLDFKI

SEQ ID NO: 107101 - DNA, 1893 bp, Arabidopsis thaliana
  misc_feature (1)..(1893): Ceres Seq. ID no. 13621365
  misc_feature: MA Experiment ID: 20000495 Result: Down-regulated in Transcription
  misc_feature: MA Experiment 20000495 PARAMETER Experiment Name: At_Guard_Cells_P Parameter: Harvest Date Value: 8/2/2002
  misc_feature: MA Experiment 20000495 PARAMETER Experiment Name: At_Guard_Cells_P Parameter: Organism Value: A. thaliana
  misc_feature: MA Experiment 20000495 PARAMETER Experiment Name: At_Guard_Cells_P Parameter: Tissue Value: Guard Cells vs. Leaves
cactataaatactgtttccatacaaaatcatcatgtacacataaaaaaatcaccaaacacaaaaatggtactcttcactttatcaacaacttcttcttcttcttctaagctaaaacaacattcacaccaaagcttctcagagtctctaatggaacacactatcgaagacgctgaatccatcatccatcgatggatttcaccagaacacgtccactcttcttccttctgcttcatctcatcgctattttcaaccgaaaaccgcgaagaagcgaaacgattcatcgacgctgttaccaccttacactccggtatgataagactaatctcagtgaatccaacgtcaatgaaactcgttaaagcagagaatctaatgcgtatctcaatgactcatctctccaaagagttttaccgcattctcaaatcgaaccgacgttatctcgaccccgaatccgtctctatccgttcttcaaaagcttccgattccgactccgattccgattccaacaccatggatgatctaaagatgatcgcggattgtatgatatcatctggctacagcaaagaatgctttaaaatctacaaaagaatccgtaaatcgatcattaacgaagcgttaaaccaactcggattcgagaatttaacgttttcgcagattcagaaacttgaatgggaagttatggagaagaagatacgtaaatggttaagaacaacaacaagagcagtgaatactctgttttccggtgaacaaatcctctccgatcatgtcttctcttcatcatcatcaacaattcgtgaatctgcatttgcagaaatcacatcacaaaccgctttagctttgttcactttcccggaaaaaatggcgaaatgtcgaaaatctccggagaagatcttcctcactctcgatgtttatcaaacgatcgttgatctattacctaagatcaacgaactctttagctctgattcaacctccaccgttagatcacaagtcgatttaacattagtgaatctcagagaaggtgtggtttcgatgatcgacgagttcgaatcttcgatttcgaaagaatcatcgaaatcgttaatctccggtggtggaattcatcaattgacaaggtatgtaatgaatttcatcgtcttcctcgctgattacagtgatacactctccgatatcatctcgaaaccgtcgttaccttcaccggaagaagaaaaagactccggagattcgtcaccggtgaaatcacgaatctcgaggttgattttgttcttactctgtaaaatcgacgccaagtctcgtctctataacgacgtagctctctcgtatctgtttttgattaataacgttaattacgttgttgttaaagtccgatcttcgaatttgaagacggttttgagtgaggattgggttaagaagcatgaagcgaaggtgaagaagtatgtggcgaagtttgaggagattgtttggggagagatgatgacgtcactttctgatgatgtgacgatgactgcggaggaagggattaagcggtttagtgatgggtttgaggaagcgtataagagacaaaccggttggattgtaccggattcgaaattgagagatgagattaaacggtctgttgggatgatgattataccgagatattccgggttttgtgaaaggaaccgggtcaggttattggagaatgtcggatttgaccctgaggatattgggaattatctttcggatttgtattttgggtctggtggatcagggagtggttcgtcagttcattcttcgggttcttctgtttaacacgtttgtgatgatttaatttatattgataagtaaataatattggtatttgatatcttgtcccaaaaatagaaagtaaatatattgatgtaattattttggaagcc

SEQ ID NO: 107102 - protein, 594 aa, Arabidopsis thaliana
  peptide (1)..(594): Ceres Seq. ID no. 13621366
  misc_feature (42)..(576): Pfam Name: Exo70 exocyst complex subunit Pfam Description: Exo70 exocyst complex subunit
  misc_feature (22)..(594): Homolog of NCBI NO: 15226919 NR Description: exocyst subunit EXO70 family [Arabidopsis
  misc_feature (147)..(581): Homolog of NCBI NO: 25308573 NR Description: hypothetical protein [imported] - Arabidopsis >gi|8439895|gb|AAF75081.1|AC007583_17 It contains a interferon domain PF|00143. EST gb|N96176 comes from this gene. [Arabidopsis
  misc_feature (22)..(173): Homolog of NCBI NO: 25308573 NR Description: hypothetical protein [imported] - Arabidopsis >gi|8439895|gb|AAF75081.1|AC007583_17 It contains a interferon domain PF|00143. EST gb|N96176 comes from this gene. [Arabidopsis
  misc_feature (22)..(581): Homolog of NCBI NO: 15226917 NR Description: exocyst subunit EXO70 family [Arabidopsis
  misc_feature (147)..(543): Homolog of NCBI NO: 22329407 NR Description: exocyst subunit EXO70 family [Arabidopsis
  misc_feature (22)..(173): Homolog of NCBI NO: 22329407 NR Description: exocyst subunit EXO70 family [Arabidopsis
  misc_feature (113)..(495): Homolog of NCBI NO: 15238510 NR Description: exocyst subunit EXO70 family [Arabidopsis >gi|9758838|dbj|BAB09510.1| gb|AAD24370.1~gene_id:MTH12.6~strong to unknown protein [Arabidopsis thaliana]
  misc_feature (113)..(495): Homolog of NCBI NO: 23397289 NR Description: unknown protein [Arabidopsis thaliana]
  misc_feature (113)..(495): Homolog of NCBI NO: 23397263 NR Description: unknown protein [Arabidopsis thaliana]
  misc_feature (48)..(548): Homolog of NCBI NO: 15225082 NR Description: exocyst subunit EXO70 family [Arabidopsis
TINTVSIQNHHVHIKKSPNTKMVLFTLSTTSSSSSKLKQHSHQSFSESLMEHTIEDAESIIHRWISPEHVHSSSFCFISSLFSTENREEAKRFIDAVTTLHSGMIRLISVNPTSMKLVKAENLMRISMTHLSKEFYRILKSNRRYLDPESVSIRSSKASDSDSDSDSNTMDDLKMIADCMISSGYSKECFKIYKRIRKSIINEALNQLGFENLTFSQIQKLEWEVMEKKIRKWLRTTTRAVNTLFSGEQILSDHVFSSSSSTIRESAFAEITSQTALALFTFPEKMAKCRKSPEKIFLTLDVYQTIVDLLPKINELFSSDSTSTVRSQVDLTLVNLREGVVSMIDEFESSISKESSKSLISGGGIHQLTRYVMNFIVFLADYSDTLSDIISKPSLPSPEEEKDSGDSSPVKSRISRLILFLLCKIDAKSRLYNDVALSYLFLINNVNYVVVKVRSSNLKTVLSEDWVKKHEAKVKKYVAKFEEIVWGEMMTSLSDDVTMTAEEGIKRFSDGFEEAYKRQTGWIVPDSKLRDEIKRSVGMMIIPRYSGFCERNRVRLLENVGFDPEDIGNYLSDLYFGSGGSGSGSSVHSSGSSV

SEQ ID NO: 107103 - protein, 573 aa, Arabidopsis thaliana
  peptide (1)..(573): Ceres Seq. ID no. 13621367
  misc_feature (21)..(555): Pfam Name: Exo70 exocyst complex subunit Pfam Description: Exo70 exocyst complex subunit
  misc_feature (1)..(573): Homolog of NCBI NO: 15226919 NR Description: exocyst subunit EXO70 family [Arabidopsis
  misc_feature (126)..(560): Homolog of NCBI NO: 25308573 NR Description: hypothetical protein [imported] - Arabidopsis >gi|8439895|gb|AAF75081.1|AC007583_17 It contains a interferon domain PF|00143. EST gb|N96176 comes from this gene. [Arabidopsis
  misc_feature (1)..(152): Homolog of NCBI NO: 25308573 NR Description: hypothetical protein [imported] - Arabidopsis >gi|8439895|gb|AAF75081.1|AC007583_17 It contains a interferon domain PF|00143. EST gb|N96176 comes from this gene. [Arabidopsis
  misc_feature (1)..(560): Homolog of NCBI NO: 15226917 NR Description: exocyst subunit EXO70 family [Arabidopsis
  misc_feature (126)..(522): Homolog of NCBI NO: 22329407 NR Description: exocyst subunit EXO70 family [Arabidopsis
  misc_feature (1)..(152): Homolog of NCBI NO: 22329407 NR Description: exocyst subunit EXO70 family [Arabidopsis
  misc_feature (92)..(474): Homolog of NCBI NO: 15238510 NR Description: exocyst subunit EXO70 family [Arabidopsis >gi|9758838|dbj|BAB09510.1| gb|AAD24370.1~gene_id:MTH12.6~strong to unknown protein [Arabidopsis thaliana]
  misc_feature (92)..(474): Homolog of NCBI NO: 23397289 NR Description: unknown protein [Arabidopsis thaliana]
  misc_feature (92)..(474): Homolog of NCBI NO: 23397263 NR Description: unknown protein [Arabidopsis thaliana]
  misc_feature (27)..(527): Homolog of NCBI NO: 15225082 NR Description: exocyst subunit EXO70 family [Arabidopsis
MVLFTLSTTSSSSSKLKQHSHQSFSESLMEHTIEDAESIIHRWISPEHVHSSSFCFISSLFSTENREEAKRFIDAVTTLHSGMIRLISVNPTSMKLVKAENLMRISMTHLSKEFYRILKSNRRYLDPESVSIRSSKASDSDSDSDSNTMDDLKMIADCMISSGYSKECFKIYKRIRKSIINEALNQLGFENLTFSQIQKLEWEVMEKKIRKWLRTTTRAVNTLFSGEQILSDHVFSSSSSTIRESAFAEITSQTALALFTFPEKMAKCRKSPEKIFLTLDVYQTIVDLLPKINELFSSDSTSTVRSQVDLTLVNLREGVVSMIDEFESSISKESSKSLISGGGIHQLTRYVMNFIVFLADYSDTLSDIISKPSLPSPEEEKDSGDSSPVKSRISRLILFLLCKIDAKSRLYNDVALSYLFLINNVNYVVVKVRSSNLKTVLSEDWVKKHEAKVKKYVAKFEEIVWGEMMTSLSDDVTMTAEEGIKRFSDGFEEAYKRQTGWIVPDSKLRDEIKRSVGMMIIPRYSGFCERNRVRLLENVGFDPEDIGNYLSDLYFGSGGSGSGSSVHSSGSSV

SEQ ID NO: 107104 - protein, 545 aa, Arabidopsis thaliana
  peptide (1)..(545): Ceres Seq. ID no. 13621368
  misc_feature (1)..(527): Pfam Name: Exo70 exocyst complex subunit Pfam Description: Exo70 exocyst complex subunit
  misc_feature (1)..(545): Homolog of NCBI NO: 15226919 NR Description: exocyst subunit EXO70 family [Arabidopsis
  misc_feature (98)..(532): Homolog of NCBI NO: 25308573 NR Description: hypothetical protein [imported] - Arabidopsis >gi|8439895|gb|AAF75081.1|AC007583_17 It contains a interferon domain PF|00143. EST gb|N96176 comes from this gene. [Arabidopsis
  misc_feature (1)..(124): Homolog of NCBI NO: 25308573 NR Description: hypothetical protein [imported] - Arabidopsis >gi|8439895|gb|AAF75081.1|AC007583_17 It contains a interferon domain PF|00143. EST gb|N96176 comes from this gene. [Arabidopsis
  misc_feature (1)..(532): Homolog of NCBI NO: 15226917 NR Description: exocyst subunit EXO70 family [Arabidopsis
  misc_feature (98)..(494): Homolog of NCBI NO: 22329407 NR Description: exocyst subunit EXO70 family [Arabidopsis
  misc_feature (1)..(124): Homolog of NCBI NO: 22329407 NR Description: exocyst subunit EXO70 family [Arabidopsis
  misc_feature (64)..(446): Homolog of NCBI NO: 15238510 NR Description: exocyst subunit EXO70 family [Arabidopsis >gi|9758838|dbj|BAB09510.1| gb|AAD24370.1~gene_id:MTH12.6~strong to unknown protein [Arabidopsis thaliana]
  misc_feature (64)..(446): Homolog of NCBI NO: 23397289 NR Description: unknown protein [Arabidopsis thaliana]
  misc_feature (64)..(446): Homolog of NCBI NO: 23397263 NR Description: unknown protein [Arabidopsis thaliana]
  misc_feature (1)..(499): Homolog of NCBI NO: 15225082 NR Description: exocyst subunit EXO70 family [Arabidopsis
MEHTIEDAESIIHRWISPEHVHSSSFCFISSLFSTENREEAKRFIDAVTTLHSGMIRLISVNPTSMKLVKAENLMRISMTHLSKEFYRILKSNRRYLDPESVSIRSSKASDSDSDSDSNTMDDLKMIADCMISSGYSKECFKIYKRIRKSIINEALNQLGFENLTFSQIQKLEWEVMEKKIRKWLRTTTRAVNTLFSGEQILSDHVFSSSSSTIRESAFAEITSQTALALFTFPEKMAKCRKSPEKIFLTLDVYQTIVDLLPKINELFSSDSTSTVRSQVDLTLVNLREGVVSMIDEFESSISKESSKSLISGGGIHQLTRYVMNFIVFLADYSDTLSDIISKPSLPSPEEEKDSGDSSPVKSRISRLILFLLCKIDAKSRLYNDVALSYLFLINNVNYVVVKVRSSNLKTVLSEDWVKKHEAKVKKYVAKFEEIVWGEMMTSLSDDVTMTAEEGIKRFSDGFEEAYKRQTGWIVPDSKLRDEIKRSVGMMIIPRYSGFCERNRVRLLENVGFDPEDIGNYLSDLYFGSGGSGSGSSVHSSGSSV

SEQ ID NO: 107105 - DNA, 1398 bp, Arabidopsis thaliana
  misc_feature (1)..(1398): Ceres Seq. ID no. 13621377
  misc_feature: MA Experiment ID: 20000496 Result: Up-regulated in Transcription
  misc_feature: MA Experiment 20000496 PARAMETER Experiment Name: At_Guard_Cells_P Parameter: Harvest Date Value: 7/19/2002
  misc_feature: MA Experiment 20000496 PARAMETER Experiment Name: At_Guard_Cells_P Parameter: Organism Value: Canola
  misc_feature: MA Experiment 20000496 PARAMETER Experiment Name: At_Guard_Cells_P Parameter: Tissue Value: Guard Cells vs. Leaves
  misc_feature: MA Experiment ID: 20001905 Result: Down-regulated in Transcription
  misc_feature: MA Experiment 20001905 PARAMETER Experiment Name: At_Drought_Reproduction_P Parameter: Age (day) Value: 40
  misc_feature: MA Experiment 20001905 PARAMETER Experiment Name: At_Drought_Reproduction_P Parameter: Organism Value: A. thaliana
  misc_feature: MA Experiment 20001905 PARAMETER Experiment Name: At_Drought_Reproduction_P Parameter: Plant Line Value: WS
  misc_feature: MA Experiment 20001905 PARAMETER Experiment Name: At_Drought_Reproduction_P Parameter: Timepoint (day) Value: 10
  misc_feature: MA Experiment 20001905 PARAMETER Experiment Name: At_Drought_Reproduction_P Parameter: Tissue Value: Rosettes
  misc_feature: MA Experiment 20001905 PARAMETER Experiment Name: At_Drought_Reproduction_P Parameter: Treatment Value: Drought vs. No Drought
aatattgactaatctcagagcacacaccagtcttcgggtctctcctcctcgcggctcgaaacgcaagcttcacgcttgaaaatctccgttcgttttctacctcgtttagatcggagatggcggagaagccggcgcaagagcaagagcagaagcgagcgatggaacctgcagttctcgacgatattattcgtcgtttggttgagtttcggaacacgagacctggatcggggaagcaagttcatctcagtgaaggtgaaattcgtcagctttgtgctgtctccaaagaaatatttcttcaacagcccaatctgcttgaattggaagctcccatcaagatctgcggtgatattcatgggcagtattcagatctattgaggctttttgagtatggagggttccctcccgaagctaattatttgttcttgggtgattatgttgaccgtggcaagcaaagcttggaaacaatatgtcttcttctagcttacaaaatcaagtaccctgagaacttcttcttgttgagagggaatcatgaatctgcttccattaatcgtatttacggtttctatgatgagtgcaaacgcaggttcaatgtcagactctggaaaatattcaccgattgctttaactgtcttcctgtggccgccttaattgatgacagaatactatgtatgcatggtgggatttccccagagctgaaaagtttggaccagattagaaatattgcacggccgatggatattccggagtctggtttggtatgtgatttactatggtcggatcctagtggagacgtaggctggggcatgaatgatcgtggtgtttcatacacttttggagctgacaaagtcgcagagttcttggagaaacatgacatggaccttatctgtcgtgcccaccaggttgttgaagatgggtatgagttctttgcagaaagacaacttgttacagtattttcagctcccaactattgcggggaatttgacaacgctggcgcaatgatgagcattgatgagagcttaatgtgctcattccagattctaaagccgtcagaaaagaagtcgccttttctgtgacaccgattatccagtgaccaccattgcttcaaattaacaattctacaaaagttgtatactggcaagaggatctagagacggaaactgctcaattgggaccttaatggtactgataatagagcattagacatgtagctgttgacagtgatggcatcgagcagaaggaacaagtcaagtctgtactgtgattttagcatctctcacatctatgtttgtctaaaatgtgtgtgtgtttttagtcttctctctgaataatattagattctcatttgtactctctatttatttaggagaacccaaattcaaaactttttttagtctcttc

SEQ ID NO: 107106 - protein, 318 aa, Arabidopsis thaliana; identical to SEQ ID NO: 76986
  peptide (1)..(318): Ceres Seq. ID no. 13621378
  misc_feature (70)..(264): Pfam Name: Calcineurin-like phosphoesterase Pfam Description: Calcineurin-like phosphoesterase
  misc_feature (1)..(318): Homolog of NCBI NO: 15227080 NR Description: phosphoprotein phosphatase-type 1 catalytic [Arabidopsis thaliana] >gi|266829|sp|P30366|PP11_ARATH
  misc_feature (1)..(318): Homolog of NCBI NO: 25289017 NR Description: phosphoprotein phosphatase (EC 3.1.3.16) 1
  misc_feature (1)..(314): Homolog of NCBI NO: 1346762 NR Description: SERINE/THREONINE PROTEIN PHOSPHATASE PP1
  misc_feature (15)..(318): Homolog of NCBI NO: 5917726 NR Description: serine/threonine protein phosphatase 1; PP1
  misc_feature (9)..(318): Homolog of NCBI NO: 15237829 NR Description: protein phosphatase 1A [Arabidopsis thaliana] protein phosphatase 1A [Arabidopsis thaliana] Serine/threonine protein phosphatase PP1 isozyme 2
  misc_feature (15)..(318): Homolog of NCBI NO: 1346764 NR Description: SERINE/THREONINE PROTEIN PHOSPHATASE PP1
  misc_feature (9)..(318): Homolog of NCBI NO: 99751 NR Description: phosphoprotein phosphatase (EC 3.1.3.16) 1A
  misc_feature (13)..(318): Homolog of NCBI NO: 11133833 NR Description: Serine/threonine protein phosphatase PP1 isozyme 2
  misc_feature (9)..(318): Homolog of NCBI NO: 15225576 NR Description: phosphoprotein phosphatase type 1 catalytic [Arabidopsis thaliana] >gi|1346758|sp|P48484|PP14_ARATH protein phosphatase PP1 isozyme 4 >gi|421853|pir||S31088
  misc_feature (1)..(318): Homolog of NCBI NO: 11133831 NR Description: Serine/threonine protein phosphatase PP1 isozyme 1

SEQ ID NO: 107107 - protein, 304 aa, Arabidopsis thaliana; identical to SEQ ID NO: 76987
  peptide (1)..(304): Ceres Seq. ID no. 13621379
  misc_feature (56)..(250): Pfam Name: Calcineurin-like phosphoesterase Pfam Description: Calcineurin-like phosphoesterase
  misc_feature (1)..(304): Homolog of NCBI NO: 15227080 NR Description: phosphoprotein phosphatase-type 1 catalytic [Arabidopsis thaliana] >gi|266829|sp|P30366|PP11_ARATH
  misc_feature (1)..(304): Homolog of NCBI NO: 25289017 NR Description: phosphoprotein phosphatase (EC 3.1.3.16) 1
  misc_feature (1)..(300): Homolog of NCBI NO: 1346762 NR Description: SERINE/THREONINE PROTEIN PHOSPHATASE PP1
  misc_feature (1)..(304): Homolog of NCBI NO: 5917726 NR Description: serine/threonine protein phosphatase 1; PP1
  misc_feature (1)..(304): Homolog of NCBI NO: 15237829 NR Description: protein phosphatase 1A [Arabidopsis thaliana] protein phosphatase 1A [Arabidopsis thaliana] Serine/threonine protein phosphatase PP1 isozyme 2
  misc_feature (1)..(304): Homolog of NCBI NO: 1346764 NR Description: SERINE/THREONINE PROTEIN PHOSPHATASE PP1
  misc_feature (1)..(304): Homolog of NCBI NO: 99751 NR Description: phosphoprotein phosphatase (EC 3.1.3.16) 1A
  misc_feature (1)..(304): Homolog of NCBI NO: 11133833 NR Description: Serine/threonine protein phosphatase PP1 isozyme 2
  misc_feature (1)..(304): Homolog of NCBI NO: 15225576 NR Description: phosphoprotein phosphatase type 1 catalytic [Arabidopsis thaliana] >gi|1346758|sp|P48484|PP14_ARATH protein phosphatase PP1 isozyme 4 >gi|421853|pir||S31088
  misc_feature (1)..(304): Homolog of NCBI NO: 11133831 NR Description: Serine/threonine protein phosphatase PP1 isozyme 1

SEQ ID NO: 107108 - DNA, 990 bp, Arabidopsis thaliana
  misc_feature (1)..(990): Ceres Seq. ID no. 13621396
  misc_feature: MA Experiment ID: 20000451 Result: Up-regulated in Transcription
  misc_feature: MA Experiment 20000451 PARAMETER Experiment Name: At_CS6879_Shoots-Roots_P Parameter: Age (day) Value: 14
  misc_feature: MA Experiment 20000451 PARAMETER Experiment Name: At_CS6879_Shoots-Roots_P Parameter: Organism Value: A. thaliana
  misc_feature: MA Experiment 20000451 PARAMETER Experiment Name: At_CS6879_Shoots-Roots_P Parameter: Plant Line Value: CS6879 vs. WS
  misc_feature: MA Experiment 20000451 PARAMETER Experiment Name: At_CS6879_Shoots-Roots_P Parameter: Tissue Value: Roots
  misc_feature: MA Experiment ID: 20000573 Result: Down-regulated in Transcription
  misc_feature: MA Experiment 20000573 PARAMETER Experiment Name: At_100uM_ABA_Mutants__P Parameter: Organism Value: A. thaliana
  misc_feature: MA Experiment 20000573 PARAMETER Experiment Name: At_100uM_ABA_Mutants__P Parameter: Plant Line Value: CS22 vs. Ler wt
  misc_feature: MA Experiment 20000573 PARAMETER Experiment Name: At_100uM_ABA_Mutants__P Parameter: Timepoint (hr) Value: N/A
  misc_feature: MA Experiment 20000573 PARAMETER Experiment Name: At_100uM_ABA_Mutants__P Parameter: Tissue Value: Whole Plant
  misc_feature: MA Experiment 20000573 PARAMETER Experiment Name: At_100uM_ABA_Mutants__P Parameter: Treatment Value: None
  misc_feature: MA Experiment ID: 20000574 Result: Down-regulated in Transcription
  misc_feature: MA Experiment 20000574 PARAMETER Experiment Name: At_100uM_ABA_Mutants__P Parameter: Organism Value: A. thaliana
  misc_feature: MA Experiment 20000574 PARAMETER Experiment Name: At_100uM_ABA_Mutants__P Parameter: Plant Line Value: CS23 vs. Ler wt
  misc_feature: MA Experiment 20000574 PARAMETER Experiment Name: At_100uM_ABA_Mutants__P Parameter: Timepoint (hr) Value: N/A
  misc_feature: MA Experiment 20000574 PARAMETER Experiment Name: At_100uM_ABA_Mutants__P Parameter: Tissue Value: Whole Plant
  misc_feature: MA Experiment 20000574 PARAMETER Experiment Name: At_100uM_ABA_Mutants__P Parameter: Treatment Value: None
caatctctcaaacacacaagaaggaaaaaaaaaaaaaaaatctctcaaacacataacttcaaacatcaatcaaagcttatacagaacttttttttctttctatttctcggacaaaaagaaaaatggatgacatatcagtgagcaaaagcnaccacggaaatgttgttgtgctcaacatcaaagcntcttctcttgcagacacttctcttccttccaacaaacacgagtnatcgtccccgcctttgctctctgtcnatttnttgcaaaagctcttagcggagctcgttggaacttactatctgatatttgctggctgtgccgccattgccgtgaatgctcaacacaaccatgtagtgactcttgtggggattgctgtggtttggggtatagtgataatggttcttgtttactgtctcggccacctctctgcacatttcaatcctgctgtcactcttgccttagcatcttcccaaagattccctctgaatcaagtcccggcctacataactgttcaagtcatcggatcaaccttggcatctgcgactctgcgtcttctgtttgatctgaacaatgatgtgtgcagcaagaaacacgatgtcttcctcggggtcatctccttctgggtctgatcttcaagcattcgtgatggagttcatcattaccggcttcctcatgttagtcgtctgtgccgtcacaaccaccaagagaactacagaggaactagaggggctaatcattggggcaaccgtcacactgaatgttatctttgttggagaggtatcaggagcatcgatgaatccagcaagaagcataggacctgcacttgtgtggggatgttacaaagggatttggatatacttgctggctccaacacttggtgccgtctctcgggccttgattcataaaatgttaccgtcaataccaaacgcagagcctaagttctccaagacaggatcttctcataaacgagtttccgatcttcctctgtga

SEQ ID NO: 107109 - protein, 168 aa, Arabidopsis thaliana
  peptide (1)..(168): Ceres Seq. ID no. 13621397
  misc_feature (1)..(162): Homolog of NCBI NO: 15226298 NR Description: major intrinsic protein (MIP) family [Arabidopsis
  misc_feature (1)..(162): Homolog of NCBI NO: 18072851 NR Description: putative aquaglyceroporin [Arabidopsis thaliana]
  misc_feature (15)..(164): Homolog of NCBI NO: 21536953 NR Description: major intrinsic protein (MIP)- like [Arabidopsis
  misc_feature (42)..(164): Homolog of NCBI NO: 15234059 NR Description: major intrinsic protein (MIP) family [Arabidopsis
  misc_feature (6)..(162): Homolog of NCBI NO: 18415224 NR Description: major intrinsic protein (MIP) family [Arabidopsis
  misc_feature (42)..(162): Homolog of NCBI NO: 2677614 NR Description: NLM1 protein (NodLikeMip1) [Arabidopsis thaliana]
  misc_feature (49)..(162): Homolog of NCBI NO: 7449725 NR Description: nodulin-26-like protein F13C5.200 - Arabidopsis
  misc_feature (6)..(162): Homolog of NCBI NO: 25324917 NR Description: nodulin-26-like protein [imported] - Arabidopsis
  misc_feature (13)..(165): Homolog of NCBI NO: 5139541 NR Description: nodulin26-like major intrinsic protein [Pisum
  misc_feature (60)..(162): Homolog of NCBI NO: 15222501 NR Description: major intrinsic protein (MIP) family [Arabidopsis
  misc_feature (10)..(10): Xaa is any aa, unknown or other
  misc_feature (21)..(21): Xaa is any aa, unknown or other
  misc_feature (36)..(36): Xaa is any aa, unknown or other
  misc_feature (45)..(45): Xaa is any aa, unknown or other
  misc_feature (46)..(46): Xaa is any aa, unknown or other
MDDISVSKSXHGNVVVLNIKXSSLADTSLPSNKHEXSSPPLLSVXXLQKLLAELVGTYYLIFAGCAAIAVNAQHNHVVTLVGIAVVWGIVIMVLVYCLGHLSAHFNPAVTLALASSQRFPLNQVPAYITVQVIGSTLASATLRLLFDLNNDVCSKKHDVFLGVISFWV

SEQ ID NO: 107110 - protein, 139 aa, Arabidopsis thaliana
  peptide (1)..(139): Ceres Seq. ID no. 13621398
  misc_feature (13)..(139): Homolog of NCBI NO: 15226298 NR Description: major intrinsic protein (MIP) family [Arabidopsis
  misc_feature (13)..(98): Homolog of NCBI NO: 18072851 NR Description: putative aquaglyceroporin [Arabidopsis thaliana]
  misc_feature (2)..(134): Homolog of NCBI NO: 21536953 NR Description: major intrinsic protein (MIP)- like [Arabidopsis
  misc_feature (2)..(134): Homolog of NCBI NO: 15234059 NR Description: major intrinsic protein (MIP) family [Arabidopsis
  misc_feature (2)..(134): Homolog of NCBI NO: 18415224 NR Description: major intrinsic protein (MIP) family [Arabidopsis
  misc_feature (2)..(134): Homolog of NCBI NO: 2677614 NR Description: NLM1 protein (NodLikeMip1) [Arabidopsis thaliana]
  misc_feature (2)..(134): Homolog of NCBI NO: 7449725 NR Description: nodulin-26-like protein F13C5.200 - Arabidopsis
  misc_feature (2)..(134): Homolog of NCBI NO: 25324917 NR Description: nodulin-26-like protein [imported] - Arabidopsis
  misc_feature (1)..(139): Homolog of NCBI NO: 15227662 NR Description: major intrinsic protein (MIP) family [Arabidopsis
  misc_feature (13)..(129): Homolog of NCBI NO: 5139541 NR Description: nodulin26-like major intrinsic protein [Pisum
MMCAARNTMSSSGSSPSGSDLQAFVMEFIITGFLMLVVCAVTTTKRTTEELEGLIIGATVTLNVIFVGEVSGASMNPARSIGPALVWGCYKGIWIYLLAPTLGAVSRALIHKMLPSIPNAEPKFSKTGSSHKRVSDLPL

SEQ ID NO: 107111 - protein, 138 aa, Arabidopsis thaliana
  peptide (1)..(138): Ceres Seq. ID no. 13621399
  misc_feature (12)..(138): Homolog of NCBI NO: 15226298 NR Description: major intrinsic protein (MIP) family [Arabidopsis
  misc_feature (12)..(97): Homolog of NCBI NO: 18072851 NR Description: putative aquaglyceroporin [Arabidopsis thaliana]
  misc_feature (1)..(133): Homolog of NCBI NO: 21536953 NR Description: major intrinsic protein (MIP)- like [Arabidopsis
  misc_feature (1)..(133): Homolog of NCBI NO: 15234059 NR Description: major intrinsic protein (MIP) family [Arabidopsis
  misc_feature (1)..(133): Homolog of NCBI NO: 18415224 NR Description: major intrinsic protein (MIP) family [Arabidopsis
  misc_feature (1)..(133): Homolog of NCBI NO: 2677614 NR Description: NLM1 protein (NodLikeMip1) [Arabidopsis thaliana]
  misc_feature (1)..(133): Homolog of NCBI NO: 7449725 NR Description: nodulin-26-like protein F13C5.200 - Arabidopsis
  misc_feature (1)..(133): Homolog of NCBI NO: 25324917 NR Description: nodulin-26-like protein [imported] - Arabidopsis
  misc_feature (1)..(138): Homolog of NCBI NO: 15227662 NR Description: major intrinsic protein (MIP) family [Arabidopsis
  misc_feature (12)..(128): Homolog of NCBI NO: 5139541 NR Description: nodulin26-like major intrinsic protein [Pisum
MCAARNTMSSSGSSPSGSDLQAFVMEFIITGFLMLVVCAVTTTKRTTEELEGLIIGATVTLNVIFVGEVSGASMNPARSIGPALVWGCYKGIWIYLLAPTLGAVSRALIHKMLPSIPNAEPKFSKTGSSHKRVSDLPL

SEQ ID NO: 107112 - DNA, 1460 bp, Arabidopsis thaliana
  misc_feature (1)..(1460): Ceres Seq. ID no. 13621408
  misc_feature: MA Experiment ID: 20000495 Result: Down-regulated in Transcription
  misc_feature: MA Experiment 20000495 PARAMETER Experiment Name: At_Guard_Cells_P Parameter: Harvest Date Value: 8/2/2002
  misc_feature: MA Experiment 20000495 PARAMETER Experiment Name: At_Guard_Cells_P Parameter: Organism Value: A. thaliana
  misc_feature: MA Experiment 20000495 PARAMETER Experiment Name: At_Guard_Cells_P Parameter: Tissue Value: Guard Cells vs. Leaves
acacgaaaagttagttaagcagcaacaaaaaaaaaacatggagaaacagaacattatctcaaacacttcttcttcttcgtcttcttggattcgtggttcttgtgttggaagaggttgttttggtacagtaagcaaagctttgagtaaaatcgacggtggacttttcgccgtgaagtcgatagatctcgccacgtgtcttccttctcaagcagagtcgttagagaacgaaatcgttattctacggtcgatgaagtctcatccaaacatagtgaggtttctcggtgatgatgtgtctaaagaaggaacggcgtcgtttcgaaatcttcatttagagtattcaccggaaggtgacgttgctaacggtggaatcgttaacgaaacgcttctcaggcgttacgtgtggtgtcttgtctctgctttgagtcacgttcattctaacggaattgttcactgcgacgttaaatctaagaacgttcttgtttttaacggtggtagctccgttaagctagcggattttggatcggcggttgagtttgagaaatctacgattcatgtttcgccacgtggaagtccgctttggatggctccggaggtggttagaagagagtaccaaggaccggagagtgacgtgtggtctttagggtgtaccgtcatcgagatgctcaccggaaaaccagcttgggaagatcacggtttcgactcgctgagtcggatcgggttctctaacgatttgccttttattccggtggggttatcggaactcgggagagatttcttagagaaatgcttgaaacgtgatcggagtcagcgttggagctgtgatcagctcttgcagcatccgtttctgtgtcaagatcatcatgactcgttcttcactgagtcgtctccgcgttgtgttcttgactgggtcaactcggagtttgacgaagaagaagagagcgacgaatggagaccagaatccatggtttcggcgatggcaaggataagtaaattagctataaccggaggagcaaattgggaatctaatggttggactgaggttagagacacttccgaagagtcagaggcaaaaaaggaagttcttgtttctccaagggtagaattggaatcttacatatcattggagtcgtcaagcgatgattccgtaagacaaccgaggaatgaagagtcggcgacggagttggcgtcggcagtgacgtgtgaagcaatattgttggtgatgatattggtggtagagaatattcaaatatatgccacgttttacaccagtagtattattatgcatattctatattgttgtagttgttgttgttattatcattatcaaaacaataataagaagaataatttttcgaaatctacatctttcattctcagccttaactttttgtttggtattgcatgtgattcggatcggtctatctattaacataaaaactcttttacgtgagtgtccttaa

SEQ ID NO: 107113 - protein, 475 aa, Arabidopsis thaliana
  peptide (1)..(475): Ceres Seq. ID no. 13621409
  misc_feature (29)..(282): Pfam Name: Protein kinase domain Pfam Description: Protein kinase domain
  misc_feature (13)..(475): Homolog of NCBI NO: 15227689 NR Description: protein kinase family [Arabidopsis thaliana]
  misc_feature (13)..(458): Homolog of NCBI NO: 15222311 NR Description: protein kinase family [Arabidopsis thaliana]
  misc_feature (28)..(301): Homolog of NCBI NO: 15240456 NR Description: protein kinase family [Arabidopsis thaliana]
  misc_feature (28)..(348): Homolog of NCBI NO: 15220416 NR Description: protein kinase family [Arabidopsis thaliana]
  misc_feature (29)..(320): Homolog of NCBI NO: 15225692 NR Description: protein kinase family [Arabidopsis thaliana]
  misc_feature (29)..(348): Homolog of NCBI NO: 21554379 NR Description: protein kinase-like protein [Arabidopsis thaliana]
  misc_feature (29)..(348): Homolog of NCBI NO: 15229715 NR Description: protein kinase-related [Arabidopsis thaliana]
  misc_feature (28)..(332): Homolog of NCBI NO: 15236903 NR Description: protein kinase family [Arabidopsis thaliana]
  misc_feature (28)..(332): Homolog of NCBI NO: 19423926 NR Description: unknown protein [Arabidopsis thaliana]
  misc_feature (29)..(348): Homolog of NCBI NO: 15240194 NR Description: protein kinase family [Arabidopsis thaliana]
HEKLVKQQQKKNMEKQNIISNTSSSSSSWIRGSCVGRGCFGTVSKALSKIDGGLFAVKSIDLATCLPSQAESLENEIVILRSMKSHPNIVRFLGDDVSKEGTASFRNLHLEYSPEGDVANGGIVNETLLRRYVWCLVSALSHVHSNGIVHCDVKSKNVLVFNGGSSVKLADFGSAVEFEKSTIHVSPRGSPLWMAPEVVRREYQGPESDVWSLGCTVIEMLTGKPAWEDHGFDSLSRIGFSNDLPFIPVGLSELGRDFLEKCLKRDRSQRWSCDQLLQHPFLCQDHHDSFFTESSPRCVLDWVNSEFDEEEESDEWRPESMVSAMARISKLAITGGANWESNGWTEVRDTSEESEAKKEVLVSPRVELESYISLESSSDDSVRQPRNEESATELASAVTCEAILLVMILVVENIQIYATFYTSSIIMHILYCCSCCCYYHYQNNNKKNNFSKSTSFILSLNFLFGIACDSDRSIY

SEQ ID NO: 107114 - protein, 463 aa, Arabidopsis thaliana
  peptide (1)..(463): Ceres Seq. ID no. 13621410
  misc_feature (17)..(270): Pfam Name: Protein kinase domain Pfam Description: Protein kinase domain
  misc_feature (1)..(463): Homolog of NCBI NO: 15227689 NR Description: protein kinase family [Arabidopsis thaliana]
  misc_feature (1)..(446): Homolog of NCBI NO: 15222311 NR Description: protein kinase family [Arabidopsis thaliana]
  misc_feature (16)..(289): Homolog of NCBI NO: 15240456 NR Description: protein kinase family [Arabidopsis thaliana]
  misc_feature (16)..(336): Homolog of NCBI NO: 15220416 NR Description: protein kinase family [Arabidopsis thaliana]
  misc_feature (17)..(308): Homolog of NCBI NO: 15225692 NR Description: protein kinase family [Arabidopsis thaliana]
  misc_feature (17)..(336): Homolog of NCBI NO: 21554379 NR Description: protein kinase-like protein [Arabidopsis thaliana]
  misc_feature (17)..(336): Homolog of NCBI NO: 15229715 NR Description: protein kinase-related [Arabidopsis thaliana]
  misc_feature (16)..(320): Homolog of NCBI NO: 15236903 NR Description: protein kinase family [Arabidopsis thaliana]
  misc_feature (16)..(320): Homolog of NCBI NO: 19423926 NR Description: unknown protein [Arabidopsis thaliana]
  misc_feature (17)..(336): Homolog of NCBI NO: 15240194 NR Description: protein kinase family [Arabidopsis thaliana]
MEKQNIISNTSSSSSSWIRGSCVGRGCFGTVSKALSKIDGGLFAVKSIDLATCLPSQAESLENEIVILRSMKSHPNIVRFLGDDVSKEGTASFRNLHLEYSPEGDVANGGIVNETLLRRYVWCLVSALSHVHSNGIVHCDVKSKNVLVFNGGSSVKLADFGSAVEFEKSTIHVSPRGSPLWMAPEVVRREYQGPESDVWSLGCTVIEMLTGKPAWEDHGFDSLSRIGFSNDLPFIPVGLSELGRDFLEKCLKRDRSQRWSCDQLLQHPFLCQDHHDSFFTESSPRCVLDWVNSEFDEEEESDEWRPESMVSAMARISKLAITGGANWESNGWTEVRDTSEESEAKKEVLVSPRVELESYISLESSSDDSVRQPRNEESATELASAVTCEAILLVMILVVENIQIYATFYTSSIIMHILYCCSCCCYYHYQNNNKKNNFSKSTSFILSLNFLFGIACDSDRSIY

SEQ ID NO: 107115 - protein, 393 aa, Arabidopsis thaliana
  peptide (1)..(393): Ceres Seq. ID no. 13621411
  misc_feature (1)..(200): Pfam Name: Protein kinase domain Pfam Description: Protein kinase domain
  misc_feature (1)..(393): Homolog of NCBI NO: 15227689 NR Description: protein kinase family [Arabidopsis thaliana]
  misc_feature (1)..(376): Homolog of NCBI NO: 15222311 NR Description: protein kinase family [Arabidopsis thaliana]
  misc_feature (1)..(219): Homolog of NCBI NO: 15240456 NR Description: protein kinase family [Arabidopsis thaliana]
  misc_feature (1)..(266): Homolog of NCBI NO: 15220416 NR Description: protein kinase family [Arabidopsis thaliana]
  misc_feature (1)..(238): Homolog of NCBI NO: 15225692 NR Description: protein kinase family [Arabidopsis thaliana]
  misc_feature (1)..(266): Homolog of NCBI NO: 21554379 NR Description: protein kinase-like protein [Arabidopsis thaliana]
  misc_feature (1)..(266): Homolog of NCBI NO: 15229715 NR Description: protein kinase-related [Arabidopsis thaliana]
  misc_feature (1)..(250): Homolog of NCBI NO: 15236903 NR Description: protein kinase family [Arabidopsis thaliana]
  misc_feature (1)..(250): Homolog of NCBI NO: 19423926 NR Description: unknown protein [Arabidopsis thaliana]
  misc_feature (1)..(266): Homolog of NCBI NO: 15240194 NR Description: protein kinase family [Arabidopsis thaliana]
MKSHPNIVRFLGDDVSKEGTASFRNLHLEYSPEGDVANGGIVNETLLRRYVWCLVSALSHVHSNGIVHCDVKSKNVLVFNGGSSVKLADFGSAVEFEKSTIHVSPRGSPLWMAPEVVRREYQGPESDVWSLGCTVIEMLTGKPAWEDHGFDSLSRIGFSNDLPFIPVGLSELGRDFLEKCLKRDRSQRWSCDQLLQHPFLCQDHHDSFFTESSPRCVLDWVNSEFDEEEESDEWRPESMVSAMARISKLAITGGANWESNGWTEVRDTSEESEAKKEVLVSPRVELESYISLESSSDDSVRQPRNEESATELASAVTCEAILLVMILVVENIQIYATFYTSSIIMHILYCCSCCCYYHYQNNNKKNNFSKSTSFILSLNFLFGIACDSDRSIY

SEQ ID NO: 107116 - DNA, 929 bp, Arabidopsis thaliana
  misc_feature (1)..(929): Ceres Seq. ID no. 13621423
  misc_feature: MA Experiment ID: 20000184 Result: Up-regulated in Transcription
  misc_feature: MA Experiment 20000184 PARAMETER Experiment Name: At_Shoots__P Parameter: Age (day) Value: 7
  misc_feature: MA Experiment 20000184 PARAMETER Experiment Name: At_Shoots__P Parameter: Tissue Value: Shoots vs. Whole Plant
  misc_feature: MA Experiment ID: 20000185 Result: Up-regulated in Transcription
  misc_feature: MA Experiment 20000185 PARAMETER Experiment Name: At_Roots__P Parameter: Age (day) Value: 7 vs. 21
  misc_feature: MA Experiment 20000185 PARAMETER Experiment Name: At_Roots__P Parameter: Organism Value: A. thaliana
  misc_feature: MA Experiment 20000185 PARAMETER Experiment Name: At_Roots__P Parameter: Tissue Value: Roots vs. Whole Plant
aaagcacaattttagaaaggatttaattaagtataataacacaaagaaacagagtaaaagaaagaaaaatggattttaagaaggaagaaacacttcgtagagggccatggctcgaagaagaagacgaacggctagtgaaggtcattagtcttttgggagaacgtcgttgggattctttagcaatagtttccggtttgaagaggagtggtaagagttgcaggctaaggtggatgaactatctgaatccgactctgaagcgtggaccgatgagtcaagaagaagagagaatcatctttcagctccatgctctatggggtaacaagtggtcgaagattgcgagaagattacccggtaggactgataacgagataaagaactattggagaactcattatagaaagaaacaggaagctcaaaactatggaaagctctttgagtggagaggaaatacaggagaagaattgttgcacaagtataaggaaacagagatcactaggacaaagacgacgtctcaagaacatggttttgttgaagttgtgagcatggaaagtggtaaagaagccaacggtggtgttggtggaagagaaagcttcggtgttatgaaatcaccgtatgaaaatcggatttcggattggatatcagagatttctactgaccagagtgaagcaaatctttcagaagatcacagcagcaatagctgcagtgagaacaatattaacattggtacttggtggtttcaagagactagggactttgaggagttttcatgttctctatggtcataattctaaagttggtttatttactttttaactgatggataattgaattcgaaagtgctatattaaagtaacaagtgttccaatattcaaccttaatgtacacaaatatgtaaaatttgaactcaatttgaatcggttatcaatagg

SEQ ID NO: 107117 - protein, 238 aa, Arabidopsis thaliana
  peptide (1)..(238): Ceres Seq. ID no. 13621424
  misc_feature (64)..(109): Pfam Name: Myb-like DNA-binding domain Pfam Description: Myb-like DNA-binding domain
  misc_feature (1)..(238): Homolog of NCBI NO: 18409792 NR Description: myb family transcription factor [Arabidopsis
  misc_feature (73)..(238): Homolog of NCBI NO: 11358533 NR Description: myb-related transcription factor MYB27 [imported] Arabidopsis thaliana (fragment) >gi|3941434|gb|AAC83593.1|
  misc_feature (5)..(202): Homolog of NCBI NO: 15231343 NR Description: Myb family transcription factor [Arabidopsis
  misc_feature (6)..(114): Homolog of NCBI NO: 11358547 NR Description: myb-related transcription factor MYB59 [imported] Arabidopsis thaliana >gi|3941480|gb|AAC83616.1| putative
  misc_feature (6)..(114): Homolog of NCBI NO: 15238519 NR Description: myb family transcription factor [Arabidopsis
  misc_feature (9)..(116): Homolog of NCBI NO: 34906070 NR Description: putative Myb factor protein [Oryza sativa
  misc_feature (9)..(116): Homolog of NCBI NO: 11967859 NR Description: Myb factor protein [Oryza sativa (japonica
  misc_feature (6)..(175): Homolog of NCBI NO: 15236297 NR Description: myb family transcription factor [Arabidopsis
  misc_feature (6)..(116): Homolog of NCBI NO: 1732513 NR Description: snapdragon myb protein 305 homolog [Arabidopsis
  misc_feature (6)..(115): Homolog of NCBI NO: 15230095 NR Description: myb family transcription factor [Arabidopsis
MDFKKEETLRRGPWLEEEDERLVKVISLLGERRWDSLAIVSGLKRSGKSCRLRWMNYLNPTLKRGPMSQEEERIIFQLHALWGNKWSKIARRLPGRTDNEIKNYWRTHYRKKQEAQNYGKLFEWRGNTGEELLHKYKETEITRTKTTSQEHGFVEVVSMESGKEANGGVGGRESFGVMKSPYENRISDWISEISTDQSEANLSEDHSSNSCSENNINIGTWWFQETRDFEEFSCSLWS

SEQ ID NO: 107118 - protein, 184 aa, Arabidopsis thaliana
  peptide (1)..(184): Ceres Seq. ID no. 13621425
  misc_feature (10)..(55): Pfam Name: Myb-like DNA-binding domain Pfam Description: Myb-like DNA-binding domain
  misc_feature (1)..(184): Homolog of NCBI NO: 18409792 NR Description: myb family transcription factor [Arabidopsis
  misc_feature (19)..(184): Homolog of NCBI NO: 11358533 NR Description: myb-related transcription factor MYB27 [imported] Arabidopsis thaliana (fragment) >gi|3941434|gb|AAC83593.1|
  misc_feature (1)..(148): Homolog of NCBI NO: 15231343 NR Description: Myb family transcription factor [Arabidopsis
  misc_feature (1)..(60): Homolog of NCBI NO: 11358547 NR Description: myb-related transcription factor MYB59 [imported] Arabidopsis thaliana >gi|3941480|gb|AAC83616.1| putative
  misc_feature (1)..(60): Homolog of NCBI NO: 15238519 NR Description: myb family transcription factor [Arabidopsis
  misc_feature (1)..(62): Homolog of NCBI NO: 34906070 NR Description: putative Myb factor protein [Oryza sativa
  misc_feature (1)..(62): Homolog of NCBI NO: 11967859 NR Description: Myb factor protein [Oryza sativa (japonica
  misc_feature (1)..(121): Homolog of NCBI NO: 15236297 NR Description: myb family transcription factor [Arabidopsis
  misc_feature (1)..(62): Homolog of NCBI NO: 1732513 NR Description: snapdragon myb protein 305 homolog [Arabidopsis
  misc_feature (1)..(61): Homolog of NCBI NO: 15230095 NR Description: myb family transcription factor [Arabidopsis
MNYLNPTLKRGPMSQEEERIIFQLHALWGNKWSKIARRLPGRTDNEIKNYWRTHYRKKQEAQNYGKLFEWRGNTGEELLHKYKETEITRTKTTSQEHGFVEVVSMESGKEANGGVGGRESFGVMKSPYENRISDWISEISTDQSEANLSEDHSSNSCSENNINIGTWWFQETRDFEEFSCSLWS

SEQ ID NO: 107119 - protein, 172 aa, Arabidopsis thaliana
  peptide (1)..(172): Ceres Seq. ID no. 13621426
  misc_feature (1)..(43): Pfam Name: Myb-like DNA-binding domain Pfam Description: Myb-like DNA-binding domain
  misc_feature (1)..(172): Homolog of NCBI NO: 18409792 NR Description: myb family transcription factor [Arabidopsis
  misc_feature (7)..(172): Homolog of NCBI NO: 11358533 NR Description: myb-related transcription factor MYB27 [imported] Arabidopsis thaliana (fragment) >gi|3941434|gb|AAC83593.1|
  misc_feature (1)..(136): Homolog of NCBI NO: 15231343 NR Description: Myb family transcription factor [Arabidopsis
  misc_feature (1)..(48): Homolog of NCBI NO: 11358547 NR Description: myb-related transcription factor MYB59 [imported] Arabidopsis thaliana >gi|3941480|gb|AAC83616.1| putative
  misc_feature (1)..(48): Homolog of NCBI NO: 15238519 NR Description: myb family transcription factor [Arabidopsis
  misc_feature (1)..(50): Homolog of NCBI NO: 34906070 NR Description: putative Myb factor protein [Oryza sativa
  misc_feature (1)..(50): Homolog of NCBI NO: 11967859 NR Description: Myb factor protein [Oryza sativa (japonica
  misc_feature (1)..(109): Homolog of NCBI NO: 15236297 NR Description: myb family transcription factor [Arabidopsis
  misc_feature (1)..(50): Homolog of NCBI NO: 1732513 NR Description: snapdragon myb protein 305 homolog [Arabidopsis
  misc_feature (1)..(49): Homolog of NCBI NO: 15230095 NR Description: myb family transcription factor [Arabidopsis
MSQEEERIIFQLHALWGNKWSKIARRLPGRTDNEIKNYWRTHYRKKQEAQNYGKLFEWRGNTGEELLHKYKETEITRTKTTSQEHGFVEVVSMESGKEANGGVGGRESFGVMKSPYENRISDWISEISTDQSEANLSEDHSSNSCSENNINIGTWWFQETRDFEEFSCSLWS

SEQ ID NO: 107120 - DNA, 1295 bp, Arabidopsis thaliana
  misc_feature (1)..(1295): Ceres Seq. ID no. 13621451
  misc_feature: MA Experiment ID: 20000184 Result: Up-regulated in Transcription
  misc_feature: MA Experiment 20000184 PARAMETER Experiment Name: At_Shoots__P Parameter: Age (day) Value: 7
  misc_feature: MA Experiment 20000184 PARAMETER Experiment Name: At_Shoots__P Parameter: Tissue Value: Shoots vs. Whole Plant
  misc_feature: MA Experiment ID: 20000234 Result: Down-regulated in Transcription
  misc_feature: MA Experiment 20000234 PARAMETER Experiment Name: At_Siliques_P Parameter: Age (day) Value: 21
  misc_feature: MA Experiment 20000234 PARAMETER Experiment Name: At_Siliques_P Parameter: Organism Value: A. thaliana
  misc_feature: MA Experiment 20000234 PARAMETER Experiment Name: At_Siliques_P Parameter: Plant Line Value: WS
  misc_feature: MA Experiment 20000234 PARAMETER Experiment Name: At_Siliques_P Parameter: Tissue Value: Less Than 5mm Siliques vs. Whole Plant
  misc_feature: MA Experiment ID: 20000235 Result: Down-regulated in Transcription
  misc_feature: MA Experiment 20000235 PARAMETER Experiment Name: At_Siliques_P Parameter: Age (day) Value: 21
  misc_feature: MA Experiment 20000235 PARAMETER Experiment Name: At_Siliques_P Parameter: Organism Value: A. thaliana
  misc_feature: MA Experiment 20000235 PARAMETER Experiment Name: At_Siliques_P Parameter: Plant Line Value: WS
  misc_feature: MA Experiment 20000235 PARAMETER Experiment Name: At_Siliques_P Parameter: Tissue Value: 5-10mm Siliques vs. Whole Plant
  misc_feature: MA Experiment ID: 20000264 Result: Down-regulated in Transcription
  misc_feature: MA Experiment 20000264 PARAMETER Experiment Name: At_Open_Flower_P Parameter: Age (day) Value: 21
  misc_feature: MA Experiment 20000264 PARAMETER Experiment Name: At_Open_Flower_P Parameter: Plant Line Value: WS
  misc_feature: MA Experiment 20000264 PARAMETER Experiment Name: At_Open_Flower_P Parameter: Tissue Value: Open Flower vs. Whole Plant
  misc_feature: MA Experiment ID: 20000265 Result: Down-regulated in Transcription
  misc_feature: MA Experiment 20000265 PARAMETER Experiment Name: At_Open_Flower_P Parameter: Age (day) Value: 21
  misc_feature: MA Experiment 20000265 PARAMETER Experiment Name: At_Open_Flower_P Parameter: Plant Line Value: WS
  misc_feature: MA Experiment 20000265 PARAMETER Experiment Name: At_Open_Flower_P Parameter: Tissue Value: Closed Flower vs. Whole Plant
  misc_feature: MA Experiment ID: 20000437 Result: Up-regulated in Transcription
  misc_feature: MA Experiment 20000437 PARAMETER Experiment Name: At_Drought_P Parameter: Age (day) Value: 8
  misc_feature: MA Experiment 20000437 PARAMETER Experiment Name: At_Drought_P Parameter: Organism Value: A. thaliana
  misc_feature: MA Experiment 20000437 PARAMETER Experiment Name: At_Drought_P Parameter: Plant Line Value: WS
  misc_feature: MA Experiment 20000437 PARAMETER Experiment Name: At_Drought_P Parameter: Timepoint (hr) Value: 24
  misc_feature: MA Experiment 20000437 PARAMETER Experiment Name: At_Drought_P Parameter: Tissue Value: Whole Plant
  misc_feature: MA Experiment 20000437 PARAMETER Experiment Name: At_Drought_P Parameter: Treatment Value: Drought vs. No Drought
  misc_feature: MA Experiment ID: 20001248 Result: Down-regulated in Transcription
  misc_feature: MA Experiment 20001248 PARAMETER Experiment Name: At_Far-red-induction_P Parameter: Age (day) Value: 7
  misc_feature: MA Experiment 20001248 PARAMETER Experiment Name: At_Far-red-induction_P Parameter: Light Value: Far-red vs. White
  misc_feature: MA Experiment 20001248 PARAMETER Experiment Name: At_Far-red-induction_P Parameter: Organism Value: A. thaliana
  misc_feature: MA Experiment 20001248 PARAMETER Experiment Name: At_Far-red-induction_P Parameter: Plant Line Value: Columbia
  misc_feature: MA Experiment 20001248 PARAMETER Experiment Name: At_Far-red-induction_P Parameter: Timepoint (hr) Value: 4
  misc_feature: MA Experiment 20001248 PARAMETER Experiment Name: At_Far-red-induction_P Parameter: Tissue Value: Whole Plant
  misc_feature: MA Experiment ID: 20001451 Result: Up-regulated in Transcription
  misc_feature: MA Experiment 20001451 PARAMETER Experiment Name: At_Far-red-induction_P Parameter: Age (day) Value: 7
  misc_feature: MA Experiment 20001451 PARAMETER Experiment Name: At_Far-red-induction_P Parameter: Light Value: Far-red vs. White
  misc_feature: MA Experiment 20001451 PARAMETER Experiment Name: At_Far-red-induction_P Parameter: Organism Value: A. thaliana
  misc_feature: MA Experiment 20001451 PARAMETER Experiment Name: At_Far-red-induction_P Parameter: Plant Line Value: Columbia
  misc_feature: MA Experiment 20001451 PARAMETER Experiment Name: At_Far-red-induction_P Parameter: Timepoint (hr) Value: 24
  misc_feature: MA Experiment 20001451 PARAMETER Experiment Name: At_Far-red-induction_P Parameter: Tissue Value: Whole Plant
  misc_feature: MA Experiment ID: 20001906 Result: Up-regulated in Transcription
  misc_feature: MA Experiment 20001906 PARAMETER Experiment Name: At_Drought_Reproduction_P Parameter: Age (day) Value: 35
  misc_feature: MA Experiment 20001906 PARAMETER Experiment Name: At_Drought_Reproduction_P Parameter: Organism Value: A. thaliana
  misc_feature: MA Experiment 20001906 PARAMETER Experiment Name: At_Drought_Reproduction_P Parameter: Plant Line Value: WS
  misc_feature: MA Experiment 20001906 PARAMETER Experiment Name: At_Drought_Reproduction_P Parameter: Timepoint (day) Value: 5
  misc_feature: MA Experiment 20001906 PARAMETER Experiment Name: At_Drought_Reproduction_P Parameter: Tissue Value: Siliques
  misc_feature: MA Experiment 20001906 PARAMETER Experiment Name: At_Drought_Reproduction_P Parameter: Treatment Value: Drought vs. No Drought
agggactcagtaaggccacctcaaaacaagacccatcgataacagcgatcatggtggctaaagccttagcacagctgataacatgcatcatcttattctgccacgttgtagcttccgtagaagacctcaccatacgccaagtcacggccgacaatcggcgaattcgcccgaatcttctcgggactcacacagagagtaaattccggcttttcatgtccgattacggcaagaactactccacgagggaggagtacatccaccgcctcggaatatttgccaaaaacgtccttaaggccgcagagcaccagatgatggacccctccgccgtccacggagtcacacagttctctgacctcacggaagaggagttcaagcggatgtacactggagtagccgatgttggcggcagccgtggcggtacggttggagcggaggcacctatggttgaggttgatggattgcctgaagattttgactggagggagaagggtggagttactgaggttaagaatcaaggtgcatgtggatcgtgctgggcttttagcacaacgggagcagctgaaggagcccatttcgtctccaccgggaagctcctcagtcttagcgaacaacaacttgtcgattgtgatcatatagtcgatccaaaggacaagaaagcatgcgacaatggatgtggcgggggactgatgacaaatgcctacgagtatttgatggaggcaggaggattagaagaagaaagatcatatccttacactggtaaacgaggccattgcaagtttgatcctgagaaggttgcggtaagagtactgaacttcacgactataccactggatgagaaccaaatcgcagcaaacttagttcggcatggtcccttagcagtgggattaaacgccgtgttcatgcaaacatatataggaggagtgtcatgtccgcttatatgcagcaagcgaaacgttaaccacggagtacttcttgttgggtacggatcaaaagggttttcgatcttgcggcttagtaataaaccttattggattatcaaaaactcgtgggggaaaaagtggggagagaatggatactacaagctgtgtcgtgggcacgatatatgtgggattaactcgatggtatctgcagtagccacccaagtttcctcgtagatgggtcttgtctttcctctgctctcttgttttctaatctagggtttgatcatgttttaggagtggagtttggggtttgaatattgggttgtttctttccgtgaccgttcttgtagtaaaagtgggtgattatttccgttt

SEQ ID NO: 107121 - protein, 383 aa, Arabidopsis thaliana
  peptide (1)..(383): Ceres Seq. ID no. 13621452
  misc_feature (153)..(378): Pfam Name: Papain family cysteine protease Pfam Description: Papain family cysteine protease
  misc_feature (17)..(383): Homolog of NCBI NO: 17979125 NR Description: putative cysteine proteinase [Arabidopsis
  misc_feature (17)..(383): Homolog of NCBI NO: 7435812 NR Description: cysteine proteinase (EC 3.4.22.-) F28P10.80 -
GLSKATSKQDPSITAIMVAKALAQLITCIILFCHVVASVEDLTIRQVTADNRRIRPNLLGTHTESKFRLFMSDYGKNYSTREEYIHRLGIFAKNVLKAAEHQMMDPSAVHGVTQFSDLTEEEFKRMYTGVADVGGSRGGTVGAEAPMVEVDGLPEDFDWREKGGVTEVKNQGACGSCWAFSTTGAAEGAHFVSTGKLLSLSEQQLVDCDHIVDPKDKKACDNGCGGGLMTNAYEYLMEAGGLEEERSYPYTGKRGHCKFDPEKVAVRVLNFTTIPLDENQIAANLVRHGPLAVGLNAVFMQTYIGGVSCPLICSKRNVNHGVLLVGYGSKGFSILRLSNKPYWIIKNSWGKKWGENGYYKLCRGHDICGINSMVSAVATQVSS

SEQ ID NO: 107122 - protein, 367 aa, Arabidopsis thaliana
  peptide (1)..(367): Ceres Seq. ID no. 13621453
  misc_feature (137)..(362): Pfam Name: Papain family cysteine protease Pfam Description: Papain family cysteine protease
  misc_feature (1)..(367): Homolog of NCBI NO: 17979125 NR Description: putative cysteine proteinase [Arabidopsis
  misc_feature (1)..(367): Homolog of NCBI NO: 7435812 NR Description: cysteine proteinase (EC 3.4.22.-) F28P10.80 -
MVAKALAQLITCIILFCHVVASVEDLTIRQVTADNRRIRPNLLGTHTESKFRLFMSDYGKNYSTREEYIHRLGIFAKNVLKAAEHQMMDPSAVHGVTQFSDLTEEEFKRMYTGVADVGGSRGGTVGAEAPMVEVDGLPEDFDWREKGGVTEVKNQGACGSCWAFSTTGAAEGAHFVSTGKLLSLSEQQLVDCDHIVDPKDKKACDNGCGGGLMTNAYEYLMEAGGLEEERSYPYTGKRGHCKFDPEKVAVRVLNFTTIPLDENQIAANLVRHGPLAVGLNAVFMQTYIGGVSCPLICSKRNVNHGVLLVGYGSKGFSILRLSNKPYWIIKNSWGKKWGENGYYKLCRGHDICGINSMVSAVATQVSS

SEQ ID NO: 107123 - protein, 313 aa, Arabidopsis thaliana
  peptide (1)..(313): Ceres Seq. ID no. 13621454
  misc_feature (83)..(308): Pfam Name: Papain family cysteine protease Pfam Description: Papain family cysteine protease
  misc_feature (1)..(313): Homolog of NCBI NO: 17979125 NR Description: putative cysteine proteinase [Arabidopsis
  misc_feature (1)..(313): Homolog of NCBI NO: 7435812 NR Description: cysteine proteinase (EC 3.4.22.-) F28P10.80 -
MSDYGKNYSTREEYIHRLGIFAKNVLKAAEHQMMDPSAVHGVTQFSDLTEEEFKRMYTGVADVGGSRGGTVGAEAPMVEVDGLPEDFDWREKGGVTEVKNQGACGSCWAFSTTGAAEGAHFVSTGKLLSLSEQQLVDCDHIVDPKDKKACDNGCGGGLMTNAYEYLMEAGGLEEERSYPYTGKRGHCKFDPEKVAVRVLNFTTIPLDENQIAANLVRHGPLAVGLNAVFMQTYIGGVSCPLICSKRNVNHGVLLVGYGSKGFSILRLSNKPYWIIKNSWGKKWGENGYYKLCRGHDICGINSMVSAVATQVSS

SEQ ID NO: 107124 - DNA, 2701 bp, Arabidopsis thaliana
  misc_feature (1)..(2701): Ceres Seq. ID no. 13621455
  misc_feature: MA Experiment ID: 20000179 Result: Down-regulated in Transcription
  misc_feature: MA Experiment 20000179 PARAMETER Experiment Name: At_Germinating_Seeds_P Parameter: Age (hr) Value: 6 vs. 0
  misc_feature: MA Experiment 20000179 PARAMETER Experiment Name: At_Germinating_Seeds_P Parameter: Tissue Value: Germinating Seeds
  misc_feature: MA Experiment ID: 20000180 Result: Down-regulated in Transcription
  misc_feature: MA Experiment 20000180 PARAMETER Experiment Name: At_Germinating_Seeds_P Parameter: Age (hr) Value: 24 vs. 0
  misc_feature: MA Experiment 20000180 PARAMETER Experiment Name: At_Germinating_Seeds_P Parameter: Tissue Value: Germinating Seeds
  misc_feature: MA Experiment ID: 20000184 Result: Down-regulated in Transcription
  misc_feature: MA Experiment 20000184 PARAMETER Experiment Name: At_Shoots__P Parameter: Age (day) Value: 7
  misc_feature: MA Experiment 20000184 PARAMETER Experiment Name: At_Shoots__P Parameter: Tissue Value: Shoots vs. Whole Plant
  misc_feature: MA Experiment ID: 20001451 Result: Down-regulated in Transcription
  misc_feature: MA Experiment 20001451 PARAMETER Experiment Name: At_Far-red-induction_P Parameter: Age (day) Value: 7
  misc_feature: MA Experiment 20001451 PARAMETER Experiment Name: At_Far-red-induction_P Parameter: Light Value: Far-red vs. White
  misc_feature: MA Experiment 20001451 PARAMETER Experiment Name: At_Far-red-induction_P Parameter: Organism Value: A. thaliana
  misc_feature: MA Experiment 20001451 PARAMETER Experiment Name: At_Far-red-induction_P Parameter: Plant Line Value: Columbia
  misc_feature: MA Experiment 20001451 PARAMETER Experiment Name: At_Far-red-induction_P Parameter: Timepoint (hr) Value: 24
  misc_feature: MA Experiment 20001451 PARAMETER Experiment Name: At_Far-red-induction_P Parameter: Tissue Value: Whole Plant
atttatttctccgatcatcttttctctgctgaagatagttgagagaagaacctcgaaagatgagatctttattggtttttagaaaaatcccttcacggattcgtcttcgtaacttgagaaacaataaacccttttgttcacagtctcagtttcccaaagaatctgagaatccaagtcaagagcagagactactagtttacggatccacttctgaagaaaacccagttacctccaaagtgagtcttttgtctgcgaagcctgaacagaaggacgatgcatctgtaatcgatgttcttctcaatcgcaggaacaacccagaagctgctcttcgtttctataattgggctagaccatggcgtggaagttttgaagatggtgacgtcttctgggtactcattcatattctggtcagttctcctgagacctatggacgtgcaagtgatttgctcatacggtacgtttctacgagcaatccaactccaatggcaagtgttttggtcagtaaattggtggattcggcgaaatcatttgggtttgaagtcaattcacgagcttttaattacttattgaatgcttattctaaagataggcaaacggatcatgcggtggatatcgtcaaccagatgttggaactagatgtgattccattttttccatatgtgaataggaccttgagtgctttagttcaaaggaattcgttaactgaagctaaggaactctacagtaggatggttgccattggtgttgatggtgataatgtaacaacgcaattgttaatgagagctagtttgagagaagaaaagcctgcggaggctttggaggttttaagtagagctattgagagaggagcagaaccggatagtttactgtatagtcttgctgttcaggcttgttgcaagacgcttgatttggctatggctaatagtttattgagagagatgaaggagaagaagttgtgtgtcccgtcgcaggaaacttatacttctgtgattttggcttctgtgaagcaaggtaatatggatgatgcaattagattgaaggatgagatgttgagtgatgggatatcgatgaatgtagttgctgcgacgagtctgatcacgggacactgcaagaacaatgacttggttagtgctttggttttgtttgataagatggaaaaggaaggcccctctccgaacagcgttactttttcggttctgatagaatggtttcgtaagaacggggaaatggaaaaggcgcttgaattttacaagaaaatggaagtcttaggtcttactccttctgtctttcatgtccacacgataattcaagggtggttgaaaggtcagaaacatgaagaggcactgaaactctttgacgagtcttttgaaaccggtcttgcaaacgtgtttgtatgtaacactatattatcctggttatgcaagcaaggtaagacagacgaagctacagagttattaagcaagatggaaagtagaggtattggaccgaatgtagtttcttacaataacgtgatgcttggccactgcagacagaaaaacatggacttggctcgtattgttttttcaaatatactggaaaagggtctaaagccgaataactacacgtattccattctgattgatggatgtttcaggaatcatgatgaacaaaacgctttggaagtcgtcaatcatatgacttcttccaatattgaagtcaacggggttgtataccaaacaattatcaatggtttatgcaaagttggtcagacatccaaagcaagagaattgttggcaaatatgatcgaagaaaaacggttatgtgttagttgcatgagttacaatagcattatagatggatttttcaaagagggtgaaatggattctgcggttgcagcatacgaagagatgtgtggcaatggtatttctccaaacgtcataacttataccagcttgatgaatgggttatgcaaaaataacagaatggatcaagcattggaaatgagagacgaaatgaagaacaaaggtgtcaaactcgatattccagcctatggtgctcttatcgatgggttctgcaaaaggagtaacatggaaagcgcatctgctctgttctctgaactccttgaagaaggattgaatccaagccaacctatatacaacagcttgatttctggatttcgtaatctgggaaacatggtagcagcccttgatttgtacaagaaaatgttgaaagacggtctacgatgtgatctgggtacatatacaacactgattgatggattgttgaaagatggaaatttgatcctggcctctgagttgtacacagaaatgcaggcggtgggtcttgtccctgatgaaatcatttacacagtaattgtaaacggtcttagcaagaaggggcagtttgtaaaagtggttaagatgtttgaggagatgaagaagaataatgtcactccgaatgtccttatctacaacgcggtgattgccggacattatagagaaggaaatctcgatgaggcttttagacttcacgatgagatgcttgacaagggtattttacccgatggtgctacatttgatattctagttagtgggcaagtcggaaacctccaacctgtacgtgcagcaagtttgtagtctgccaaaaccagaccacattattgactgatgacttagctttggcttttcgtgagaccccgataatatgactgcttaaggtgtgc

SEQ ID NO: 107125 - protein, 851 aa, Arabidopsis thaliana
  peptide (1)..(851): Ceres Seq. ID no. 13621456
  misc_feature (514)..(548): Pfam Name: PPR repeat Pfam Description: PPR repeat
  misc_feature (1)..(851): Homolog of NCBI NO: 15225055 NR Description: pentatricopeptide (PPR) repeat-containing protein
  misc_feature (107)..(848): Homolog of NCBI NO: 34912586 NR Description: P0046B10.10 [Oryza sativa (japonica
  misc_feature (75)..(837): Homolog of NCBI NO: 15238562 NR Description: pentatricopeptide (PPR) repeat-containing protein thaliana] >gi|9757911|dbj|BAB08358.1|
  misc_feature (157)..(840): Homolog of NCBI NO: 6630464 NR Description: F23N19.4 [Arabidopsis thaliana]
  misc_feature (83)..(846): Homolog of NCBI NO: 34394343 NR Description: putative fertility restorer homologue [Oryza
  misc_feature (320)..(840): Homolog of NCBI NO: 15221549 NR Description: pentatricopeptide (PPR) repeat-containing protein
  misc_feature (102)..(838): Homolog of NCBI NO: 15238562 NR Description: pentatricopeptide (PPR) repeat-containing protein thaliana] >gi|9757911|dbj|BAB08358.1|
  misc_feature (320)..(851): Homolog of NCBI NO: 15221635 NR Description: pentatricopeptide (PPR) repeat-containing protein
  misc_feature (320)..(851): Homolog of NCBI NO: 25404380 NR Description: hypothetical protein F16P17.7 [imported] - thaliana >gi|8493580|gb|AAF75803.1|AC011000_6 Contains weak to leaf protein from Ipomea nil gb|D85101 and contains a RepB
  misc_feature (202)..(826): Homolog of NCBI NO: 34910106 NR Description: B1100D10.28 [Oryza sativa (japonica
MRSLLVFRKIPSRIRLRNLRNNKPFCSQSQFPKESENPSQEQRLLVYGSTSEENPVTSKVSLLSAKPEQKDDASVIDVLLNRRNNPEAALRFYNWARPWRGSFEDGDVFWVLIHILVSSPETYGRASDLLIRYVSTSNPTPMASVLVSKLVDSAKSFGFEVNSRAFNYLLNAYSKDRQTDHAVDIVNQMLELDVIPFFPYVNRTLSALVQRNSLTEAKELYSRMVAIGVDGDNVTTQLLMRASLREEKPAEALEVLSRAIERGAEPDSLLYSLAVQACCKTLDLAMANSLLREMKEKKLCVPSQETYTSVILASVKQGNMDDAIRLKDEMLSDGISMNVVAATSLITGHCKNNDLVSALVLFDKMEKEGPSPNSVTFSVLIEWFRKNGEMEKALEFYKKMEVLGLTPSVFHVHTIIQGWLKGQKHEEALKLFDESFETGLANVFVCNTILSWLCKQGKTDEATELLSKMESRGIGPNVVSYNNVMLGHCRQKNMDLARIVFSNILEKGLKPNNYTYSILIDGCFRNHDEQNALEVVNHMTSSNIEVNGVVYQTIINGLCKVGQTSKARELLANMIEEKRLCVSCMSYNSIIDGFFKEGEMDSAVAAYEEMCGNGISPNVITYTSLMNGLCKNNRMDQALEMRDEMKNKGVKLDIPAYGALIDGFCKRSNMESASALFSELLEEGLNPSQPIYNSLISGFRNLGNMVAALDLYKKMLKDGLRCDLGTYTTLIDGLLKDGNLILASELYTEMQAVGLVPDEIIYTVIVNGLSKKGQFVKVVKMFEEMKKNNVTPNVLIYNAVIAGHYREGNLDEAFRLHDEMLDKGILPDGATFDILVSGQVGNLQPVRAASL

SEQ ID NO: 107126 - protein, 710 aa, Arabidopsis thaliana
  peptide (1)..(710): Ceres Seq. ID no. 13621457
  misc_feature (373)..(407): Pfam Name: PPR repeat Pfam Description: PPR repeat
  misc_feature (1)..(710): Homolog of NCBI NO: 15225055 NR Description: pentatricopeptide (PPR) repeat-containing protein
  misc_feature (1)..(707): Homolog of NCBI NO: 34912586 NR Description: P0046B10.10 [Oryza sativa (japonica
  misc_feature (1)..(696): Homolog of NCBI NO: 15238562 NR Description: pentatricopeptide (PPR) repeat-containing protein thaliana] >gi|9757911|dbj|BAB08358.1|
  misc_feature (16)..(699): Homolog of NCBI NO: 6630464 NR Description: F23N19.4 [Arabidopsis thaliana]
  misc_feature (1)..(705): Homolog of NCBI NO: 34394343 NR Description: putative fertility restorer homologue [Oryza
  misc_feature (179)..(699): Homolog of NCBI NO: 15221549 NR Description: pentatricopeptide (PPR) repeat-containing protein
  misc_feature (1)..(697): Homolog of NCBI NO: 15238562 NR Description: pentatricopeptide (PPR) repeat-containing protein thaliana] >gi|9757911|dbj|BAB08358.1|
  misc_feature (179)..(710): Homolog of NCBI NO: 15221635 NR Description: pentatricopeptide (PPR) repeat-containing protein
  misc_feature (179)..(710): Homolog of NCBI NO: 25404380 NR Description: hypothetical protein F16P17.7 [imported] - thaliana >gi|8493580|gb|AAF75803.1|AC011000_6 Contains weak to leaf protein from Ipomea nil gb|D85101 and contains a RepB
  misc_feature (61)..(685): Homolog of NCBI NO: 34910106 NR Description: B1100D10.28 [Oryza sativa (japonica
MASVLVSKLVDSAKSFGFEVNSRAFNYLLNAYSKDRQTDHAVDIVNQMLELDVIPFFPYVNRTLSALVQRNSLTEAKELYSRMVAIGVDGDNVTTQLLMRASLREEKPAEALEVLSRAIERGAEPDSLLYSLAVQACCKTLDLAMANSLLREMKEKKLCVPSQETYTSVILASVKQGNMDDAIRLKDEMLSDGISMNVVAATSLITGHCKNNDLVSALVLFDKMEKEGPSPNSVTFSVLIEWFRKNGEMEKALEFYKKMEVLGLTPSVFHVHTIIQGWLKGQKHEEALKLFDESFETGLANVFVCNTILSWLCKQGKTDEATELLSKMESRGIGPNVVSYNNVMLGHCRQKNMDLARIVFSNILEKGLKPNNYTYSILIDGCFRNHDEQNALEVVNHMTSSNIEVNGVVYQTIINGLCKVGQTSKARELLANMIEEKRLCVSCMSYNSIIDGFFKEGEMDSAVAAYEEMCGNGISPNVITYTSLMNGLCKNNRMDQALEMRDEMKNKGVKLDIPAYGALIDGFCKRSNMESASALFSELLEEGLNPSQPIYNSLISGFRNLGNMVAALDLYKKMLKDGLRCDLGTYTTLIDGLLKDGNLILASELYTEMQAVGLVPDEIIYTVIVNGLSKKGQFVKVVKMFEEMKKNNVTPNVLIYNAVIAGHYREGNLDEAFRLHDEMLDKGILPDGATFDILVSGQVGNLQPVRAASL

SEQ ID NO: 107127 - protein, 663 aa, Arabidopsis thaliana
  peptide (1)..(663): Ceres Seq. ID no. 13621458
  misc_feature (326)..(360): Pfam Name: PPR repeat Pfam Description: PPR repeat
  misc_feature (1)..(663): Homolog of NCBI NO: 15225055 NR Description: pentatricopeptide (PPR) repeat-containing protein
  misc_feature (1)..(660): Homolog of NCBI NO: 34912586 NR Description: P0046B10.10 [Oryza sativa (japonica
  misc_feature (1)..(649): Homolog of NCBI NO: 15238562 NR Description: pentatricopeptide (PPR) repeat-containing protein thaliana] >gi|9757911|dbj|BAB08358.1|
  misc_feature (1)..(652): Homolog of NCBI NO: 6630464 NR Description: F23N19.4 [Arabidopsis thaliana]
  misc_feature (1)..(658): Homolog of NCBI NO: 34394343 NR Description: putative fertility restorer homologue [Oryza
  misc_feature (132)..(652): Homolog of NCBI NO: 15221549 NR Description: pentatricopeptide (PPR) repeat-containing protein
  misc_feature (1)..(650): Homolog of NCBI NO: 15238562 NR Description: pentatricopeptide (PPR) repeat-containing protein thaliana] >gi|9757911|dbj|BAB08358.1|
  misc_feature (132)..(663): Homolog of NCBI NO: 15221635 NR Description: pentatricopeptide (PPR) repeat-containing protein
  misc_feature (132)..(663): Homolog of NCBI NO: 25404380 NR Description: hypothetical protein F16P17.7 [imported] - thaliana >gi|8493580|gb|AAF75803.1|AC011000_6 Contains weak to leaf protein from Ipomea nil gb|D85101 and contains a RepB
  misc_feature (14)..(638): Homolog of NCBI NO: 34910106 NR Description: B1100D10.28 [Oryza sativa (japonica
MLELDVIPFFPYVNRTLSALVQRNSLTEAKELYSRMVAIGVDGDNVTTQLLMRASLREEKPAEALEVLSRAIERGAEPDSLLYSLAVQACCKTLDLAMANSLLREMKEKKLCVPSQETYTSVILASVKQGNMDDAIRLKDEMLSDGISMNVVAATSLITGHCKNNDLVSALVLFDKMEKEGPSPNSVTFSVLIEWFRKNGEMEKALEFYKKMEVLGLTPSVFHVHTIIQGWLKGQKHEEALKLFDESFETGLANVFVCNTILSWLCKQGKTDEATELLSKMESRGIGPNVVSYNNVMLGHCRQKNMDLARIVFSNILEKGLKPNNYTYSILIDGCFRNHDEQNALEVVNHMTSSNIEVNGVVYQTIINGLCKVGQTSKARELLANMIEEKRLCVSCMSYNSIIDGFFKEGEMDSAVAAYEEMCGNGISPNVITYTSLMNGLCKNNRMDQALEMRDEMKNKGVKLDIPAYGALIDGFCKRSNMESASALFSELLEEGLNPSQPIYNSLISGFRNLGNMVAALDLYKKMLKDGLRCDLGTYTTLIDGLLKDGNLILASELYTEMQAVGLVPDEIIYTVIVNGLSKKGQFVKVVKMFEEMKKNNVTPNVLIYNAVIAGHYREGNLDEAFRLHDEMLDKGILPDGATFDILVSGQVGNLQPVRAASL

SEQ ID NO: 107128 - DNA, 1852 bp, Arabidopsis thaliana
  misc_feature (1)..(1852): Ceres Seq. ID no. 13621459
  misc_feature: MA Experiment ID: 108461 Result: Down-regulated in Transcription
  misc_feature: MA Experiment 108461 PARAMETER Experiment Name: At_Germinating_Seeds_cDNA_P Parameter: Age (day) Value: 1 vs. 0
  misc_feature: MA Experiment 108461 PARAMETER Experiment Name: At_Germinating_Seeds_cDNA_P Parameter: Tissue Value: Germinating Seeds
  misc_feature: MA Experiment ID: 108462 Result: Down-regulated in Transcription
  misc_feature: MA Experiment 108462 PARAMETER Experiment Name: At_Germinating_Seeds_cDNA_P Parameter: Age (day) Value: 2 vs. 0
  misc_feature: MA Experiment 108462 PARAMETER Experiment Name: At_Germinating_Seeds_cDNA_P Parameter: Tissue Value: Germinating Seeds
  misc_feature: MA Experiment ID: 108463 Result: Down-regulated in Transcription
  misc_feature: MA Experiment 108463 PARAMETER Experiment Name: At_Germinating_Seeds_cDNA_P Parameter: Age (day) Value: 3 vs. 0
  misc_feature: MA Experiment 108463 PARAMETER Experiment Name: At_Germinating_Seeds_cDNA_P Parameter: Tissue Value: Germinating Seeds
  misc_feature: MA Experiment ID: 108464 Result: Down-regulated in Transcription
  misc_feature: MA Experiment 108464 PARAMETER Experiment Name: At_Germinating_Seeds_cDNA_P Parameter: Age (day) Value: 4 vs. 0
  misc_feature: MA Experiment 108464 PARAMETER Experiment Name: At_Germinating_Seeds_cDNA_P Parameter: Tissue Value: Germinating Seeds
ctctcaatttgggattcgagacgaaaccctagctctgatttttttcaattccgatggaggcgggagagcggcgcaatggcgattcgatgagtcacaatcaccgcgcaccgaagaagccacgtctcgctgggttattaaccgagtcagatatcgactctgagttcgctcaccaccagaccggtgttgccagaatcaacaacggtagcttcgggtgctgtcctggctccgttctcgaggcgcaacgcgagtggcagcttcgttatctccgtcagcctgatgagttctacttcaacggtctccgtcgtggacttctcgcttctcgaactgtgatcagtgacctaatcaacgccgatgatgttgatgaggtctctctcgttgataacgccaccactgctgctgctattgttcttcagaaagttggaaggtgtttctcggaagggaagtataagaaggaagatactgtagtgatgtttcactgtgcgtttcagagtgtgaagaagtcgattcaggcttatgtctctcgtgtgggaggttctactgttgaggttaggttacctttccctgtaaattcgaacgaagagattatctccaagtttagagaaggactagagaaaggtagagcgaatggtagaacggttaggttagctatcattgatcatataacgtcgatgccgtgtgttttgatgccggtacgagaattggttaagatctgcagagaggaaggtgtggagcaggtttttgttgatgcagctcatgccattggtagtgttaaagttgatgtgaaagaaatcggagctgattactatgtgagtaatctgcataaatggttcttttgtccaccgtctatcgcgtttttctattgtaagaaacgtggttctgagtctgatgttcatcaccctgtggtgtctcatgagtttggaaatggtttgcctatagaaagtgcctggattgggactagggattacagttcacagcttgtggttccatctgtgatggagtttgtaaacaggttcgagggagggatggaagggataatgatgaagaaccatgatgaagctgttagaatgggtttaatgctggctgatgcttggggaacgaatctagggtcacctccagaaatgtgtgttgggatggttatgatcggtttaccttcaaaactctgtgttggaagtgatgaagatgctattaagttgcggtcatatctgcgggttcattactcagttgaggttccagttttttatctcggattgagggatggagaggaaggagtgaaagacaaagacagtggactaattactgcgtatgttcggatctctcatcaggtctataacaaaactgaggattatgagagattgagagacgcaataacagagttagtcaaggatcagatgacttgtcaaaaccttcctgcattgtagtaaccagatatactttgataatccacaagagcctcattgagactctttcatagatcaactgccggtgtaacaataaggcgatggaagagccacgggcaaagattccggaggtaacatgtattgatgagcttgtggaggagcggcttgcaatggaagaagaagctaaccttgagaggccctctctttttattagtcttttataacgtttaacggctttgtatgattattgcaaataaaatcatgtgcgtctaatcttatcttcctcaaacattctgcttgcgaatctcctgtcgcagttccaataatttttccttattgaaaactttttccctcacattgaaagcatattcatagatatgtaatgacacctaatttatcattgttttgtatgattctggttcgttttcacatctatgtctattatgtctatttac

SEQ ID NO: 107129 - protein, 454 aa, Arabidopsis thaliana; identical to SEQ ID NO: 20963
  peptide (1)..(454): Ceres Seq. ID no. 13621460
  misc_feature (55)..(434): Pfam Name: Aminotransferase class-V Pfam Description: Aminotransferase class-V
  misc_feature (1)..(454): Homolog of NCBI NO: 15228693 NR Description: expressed protein [Arabidopsis thaliana]
  misc_feature (1)..(451): Homolog of NCBI NO: 30690360 NR Description: expressed protein [Arabidopsis thaliana]
  misc_feature (8)..(451): Homolog of NCBI NO: 34894318 NR Description: unnamed protein product [Oryza sativa (japonica group)] >gi|8467955|dbj|BAA96579.1| unnamed protein product
  misc_feature (20)..(451): Homolog of NCBI NO: 34894322 NR Description: unnamed protein product [Oryza sativa (japonica group)] >gi|8467957|dbj|BAA96581.1| unnamed protein product
  misc_feature (30)..(394): Homolog of NCBI NO: 21230669 NR Description: isopenicillin N epimerase [Xanthomonas campestris campestris str. ATCC 33913] >gi|21112256|gb|AAM40510.1| N epimerase [Xanthomonas campestris pv. campestris str. ATCC
  misc_feature (44)..(392): Homolog of NCBI NO: 17548917 NR Description: PUTATIVE ISOPENICILLIN N EPIMERASE PROTEIN solanacearum] >gi|17431167|emb|CAD17847.1| PUTATIVE ISOPENICILLIN
  misc_feature (47)..(441): Homolog of NCBI NO: 32474893 NR Description: isopenicillin N-epimerase [Pirellula sp.]
  misc_feature (47)..(276): Homolog of NCBI NO: 40738451 NR Description: hypothetical protein AN6227.2 [Aspergillus
  misc_feature (37)..(368): Homolog of NCBI NO: 25463395 NR Description: hypothetical protein [imported] - yeast (Candida >gi|3859696|emb|CAA21971.1| unknown hypothetical protein [Candida
  misc_feature (47)..(377): Homolog of NCBI NO: 32415651 NR Description: hypothetical protein [Neurospora crassa]

SEQ ID NO: 107130 - protein, 443 aa, Arabidopsis thaliana; identical to SEQ ID NO: 20964
  peptide (1)..(443): Ceres Seq. ID no. 13621461
  misc_feature (44)..(423): Pfam Name: Aminotransferase class-V Pfam Description: Aminotransferase class-V
  misc_feature (1)..(443): Homolog of NCBI NO: 15228693 NR Description: expressed protein [Arabidopsis thaliana]
  misc_feature (1)..(440): Homolog of NCBI NO: 30690360 NR Description: expressed protein [Arabidopsis thaliana]
  misc_feature (1)..(440): Homolog of NCBI NO: 34894318 NR Description: unnamed protein product [Oryza sativa (japonica group)] >gi|8467955|dbj|BAA96579.1| unnamed protein product
  misc_feature (9)..(440): Homolog of NCBI NO: 34894322 NR Description: unnamed protein product [Oryza sativa (japonica group)] >gi|8467957|dbj|BAA96581.1| unnamed protein product
  misc_feature (19)..(383): Homolog of NCBI NO: 21230669 NR Description: isopenicillin N epimerase [Xanthomonas campestris campestris str. ATCC 33913] >gi|21112256|gb|AAM40510.1| N epimerase [Xanthomonas campestris pv. campestris str. ATCC
  misc_feature (33)..(381): Homolog of NCBI NO: 17548917 NR Description: PUTATIVE ISOPENICILLIN N EPIMERASE PROTEIN solanacearum] >gi|17431167|emb|CAD17847.1| PUTATIVE ISOPENICILLIN
  misc_feature (36)..(430): Homolog of NCBI NO: 32474893 NR Description: isopenicillin N-epimerase [Pirellula sp.]
  misc_feature (36)..(265): Homolog of NCBI NO: 40738451 NR Description: hypothetical protein AN6227.2 [Aspergillus
  misc_feature (26)..(357): Homolog of NCBI NO: 25463395 NR Description: hypothetical protein [imported] - yeast (Candida >gi|3859696|emb|CAA21971.1| unknown hypothetical protein [Candida
  misc_feature (36)..(366): Homolog of NCBI NO: 32415651 NR Description: hypothetical protein [Neurospora crassa]

SEQ ID NO: 107131 - protein, 316 aa, Arabidopsis thaliana; identical to SEQ ID NO: 20965
  peptide (1)..(316): Ceres Seq. ID no. 13621462
  misc_feature (1)..(296): Pfam Name: Aminotransferase class-V Pfam Description: Aminotransferase class-V
  misc_feature (1)..(316): Homolog of NCBI NO: 15228693 NR Description: expressed protein [Arabidopsis thaliana]
  misc_feature (1)..(313): Homolog of NCBI NO: 30690360 NR Description: expressed protein [Arabidopsis thaliana]
  misc_feature (1)..(313): Homolog of NCBI NO: 34894318 NR Description: unnamed protein product [Oryza sativa (japonica group)] >gi|8467955|dbj|BAA96579.1| unnamed protein product
  misc_feature (1)..(313): Homolog of NCBI NO: 34894322 NR Description: unnamed protein product [Oryza sativa (japonica group)] >gi|8467957|dbj|BAA96581.1| unnamed protein product
  misc_feature (1)..(256): Homolog of NCBI NO: 21230669 NR Description: isopenicillin N epimerase [Xanthomonas campestris campestris str. ATCC 33913] >gi|21112256|gb|AAM40510.1| N epimerase [Xanthomonas campestris pv. campestris str. ATCC
  misc_feature (1)..(254): Homolog of NCBI NO: 17548917 NR Description: PUTATIVE ISOPENICILLIN N EPIMERASE PROTEIN solanacearum] >gi|17431167|emb|CAD17847.1| PUTATIVE ISOPENICILLIN
  misc_feature (1)..(303): Homolog of NCBI NO: 32474893 NR Description: isopenicillin N-epimerase [Pirellula sp.]
  misc_feature (1)..(138): Homolog of NCBI NO: 40738451 NR Description: hypothetical protein AN6227.2 [Aspergillus
  misc_feature (1)..(230): Homolog of NCBI NO: 25463395 NR Description: hypothetical protein [imported] - yeast (Candida >gi|3859696|emb|CAA21971.1| unknown hypothetical protein [Candida
  misc_feature (1)..(239): Homolog of NCBI NO: 32415651 NR Description: hypothetical protein [Neurospora crassa]

SEQ ID NO: 107132 - DNA, 1251 bp, Arabidopsis thaliana
  misc_feature (1)..(1251): Ceres Seq. ID no. 13621467
  misc_feature: MA Experiment ID: 108434 Result: Down-regulated in Transcription
  misc_feature: MA Experiment 108434 PARAMETER Experiment Name: At_Root_Tips_cDNA_P Parameter: Tissue Value: Root Tips
  misc_feature: MA Experiment ID: 108488 Result: Down-regulated in Transcription
  misc_feature: MA Experiment ID: 20000224 Result: Down-regulated in Transcription
  misc_feature: MA Experiment ID: 20000268 Result: Down-regulated in Transcription
  misc_feature: MA Experiment 20000268 PARAMETER Experiment Name: At_100mM_NaCl__P Parameter: Age (day) Value: 14
  misc_feature: MA Experiment 20000268 PARAMETER Experiment Name: At_100mM_NaCl__P Parameter: Organism Value: A. thaliana
  misc_feature: MA Experiment 20000268 PARAMETER Experiment Name: At_100mM_NaCl__P Parameter: Plant Line Value: WS
  misc_feature: MA Experiment 20000268 PARAMETER Experiment Name: At_100mM_NaCl__P Parameter: Timepoint (hr) Value: 6
  misc_feature: MA Experiment 20000268 PARAMETER Experiment Name: At_100mM_NaCl__P Parameter: Tissue Value: Whole Plant
  misc_feature: MA Experiment 20000268 PARAMETER Experiment Name: At_100mM_NaCl__P Parameter: Treatment Value: 100mM NaCl vs. No Treatment
aaaaggataagcttggtgttactttatcgccttctttcgtttggcctttgatcctatcataagctttttttcgtttatcaatcttctcgattcagccacaattcttgtttctcagataattcatctcctttctttgattcgtttccttctcttctgtcactcagatctagatctagatctaggtttttttctttctcatcggaaatttggcttagaggcttgttttgatctagggtttggtttttgggaattttgaaaaaaaaacaaaattaggaatgaatctatgagctactcaatcctgtttcgtcggattcgaattctacactctttctccgtcgtttacctctactacacctacgttttctcatgaagtaatcgttctcgatctcagttttcgtttttgatctaacttattctttgatagatttagaaatcggggattttcagattgtgtttttgagaggtttttataggaaaatatctctagaagaagaagaataatattatattgattttaattttggtgagaagaagtcaaaaagtcaacgagaaatggggtcgttgcaaatgcaaacaagtcctgaatccgataatgatccgaggtacgccacggtgacggatgagaggaagaggaagagaatgatctctaacagagaatctgctcggaggtcaaggatgaggaaacagaagcaacttggtgatttgatcaacgaagtcactcttctcaagaatgataacgctaaaatcactgagcaggttgatgaagcttcaaagaaatacattgaaatggagtctaagaacaatgtcttgagggcacaggcttcggagttgacggataggttgagatcattgaactctgtgcttgagatggttgaagaaattagtggtcaggctttggatattcctgagattcctgaatctatgcagaacccttggcagatgccttgtccaatgcaaccaatcagagcttctgctgatatgtttgattgctgaagatggatgattcatatctgaaggatcaaaaatgaagcattgagttcgagtctttggtctgttttacttactgtccttgttgtaacaattagtgtgtcattggtgaattgagtcttgtgttgtcaatggacaacgcaatctttatgcaatttcaatttgttcgtgtctttgtatggttttgtagcctcagtcctctagtcttgtgtctcatgtaattggtgtctaatgtgtttcttattgaattcaagctttcttatt

SEQ ID NO: 107133 - protein, 146 aa, Arabidopsis thaliana; identical to SEQ ID NO: 21432
  peptide (1)..(146): Ceres Seq. ID no. 13621468
  misc_feature (21)..(85): Pfam Name: bZIP transcription factor Pfam Description: bZIP transcription factor
  misc_feature (1)..(146): Homolog of NCBI NO: 15228754 NR Description: bZIP family transcription factor [Arabidopsis
  misc_feature (5)..(144): Homolog of NCBI NO: 9650826 NR Description: common plant regulatory factor 6 [Petroselinum
  misc_feature (1)..(144): Homolog of NCBI NO: 10241920 NR Description: TBZF [Nicotiana tabacum]
  misc_feature (1)..(144): Homolog of NCBI NO: 16580132 NR Description: bZIP transcription factor BZI-3 [Nicotiana
  misc_feature (7)..(144): Homolog of NCBI NO: 7489298 NR Description: DNA-binding protein bZIP-2 - garden snapdragon
  misc_feature (1)..(143): Homolog of NCBI NO: 7489118 NR Description: DNA-binding protein tbz17 - common tobacco
  misc_feature (1)..(144): Homolog of NCBI NO: 5901747 NR Description: bZIP DNA-binding protein [Lycopersicon esculentum]
  misc_feature (1)..(146): Homolog of NCBI NO: 7489297 NR Description: DNA-binding protein bZIP-1 - garden snapdragon
  misc_feature (1)..(143): Homolog of NCBI NO: 3986151 NR Description: rdLIP [Raphanus sativus]
  misc_feature (12)..(141): Homolog of NCBI NO: 40019253 NR Description: ocs-element binding factor 1 [Secale cereale]

SEQ ID NO: 107134 - protein, 141 aa, Arabidopsis thaliana; identical to SEQ ID NO: 21433
  peptide (1)..(141): Ceres Seq. ID no. 13621469
  misc_feature (16)..(80): Pfam Name: bZIP transcription factor Pfam Description: bZIP transcription factor
  misc_feature (1)..(141): Homolog of NCBI NO: 15228754 NR Description: bZIP family transcription factor [Arabidopsis
  misc_feature (1)..(139): Homolog of NCBI NO: 9650826 NR Description: common plant regulatory factor 6 [Petroselinum
  misc_feature (1)..(139): Homolog of NCBI NO: 10241920 NR Description: TBZF [Nicotiana tabacum]
  misc_feature (1)..(139): Homolog of NCBI NO: 16580132 NR Description: bZIP transcription factor BZI-3 [Nicotiana
  misc_feature (2)..(139): Homolog of NCBI NO: 7489298 NR Description: DNA-binding protein bZIP-2 - garden snapdragon
  misc_feature (1)..(138): Homolog of NCBI NO: 7489118 NR Description: DNA-binding protein tbz17 - common tobacco
  misc_feature (1)..(139): Homolog of NCBI NO: 5901747 NR Description: bZIP DNA-binding protein [Lycopersicon esculentum]
  misc_feature (1)..(141): Homolog of NCBI NO: 7489297 NR Description: DNA-binding protein bZIP-1 - garden snapdragon
  misc_feature (1)..(138): Homolog of NCBI NO: 3986151 NR Description: rdLIP [Raphanus sativus]
  misc_feature (7)..(136): Homolog of NCBI NO: 40019253 NR Description: ocs-element binding factor 1 [Secale cereale]

SEQ ID NO: 107135 - protein, 117 aa, Arabidopsis thaliana; identical to SEQ ID NO: 21434
  peptide (1)..(117): Ceres Seq. ID no. 13621470
  misc_feature (1)..(56): Pfam Name: bZIP transcription factor Pfam Description: bZIP transcription factor
  misc_feature (1)..(117): Homolog of NCBI NO: 15228754 NR Description: bZIP family transcription factor [Arabidopsis
  misc_feature (1)..(115): Homolog of NCBI NO: 9650826 NR Description: common plant regulatory factor 6 [Petroselinum
  misc_feature (1)..(115): Homolog of NCBI NO: 10241920 NR Description: TBZF [Nicotiana tabacum]
  misc_feature (1)..(115): Homolog of NCBI NO: 16580132 NR Description: bZIP transcription factor BZI-3 [Nicotiana
  misc_feature (1)..(115): Homolog of NCBI NO: 7489298 NR Description: DNA-binding protein bZIP-2 - garden snapdragon
  misc_feature (1)..(114): Homolog of NCBI NO: 7489118 NR Description: DNA-binding protein tbz17 - common tobacco
  misc_feature (1)..(115): Homolog of NCBI NO: 5901747 NR Description: bZIP DNA-binding protein [Lycopersicon esculentum]
  misc_feature (1)..(117): Homolog of NCBI NO: 7489297 NR Description: DNA-binding protein bZIP-1 - garden snapdragon
  misc_feature (1)..(114): Homolog of NCBI NO: 3986151 NR Description: rdLIP [Raphanus sativus]
  misc_feature (1)..(112): Homolog of NCBI NO: 40019253 NR Description: ocs-element binding factor 1 [Secale cereale]

SEQ ID NO: 107136 - DNA, 776 bp, Arabidopsis thaliana
  misc_feature (1)..(776): Ceres Seq. ID no. 13621471
  misc_feature: MA Experiment ID: 20000173 Result: Up-regulated in Transcription
  misc_feature: MA Experiment 20000173 PARAMETER Experiment Name: At_42deg_Heat_P Parameter: Age (day) Value: 14
  misc_feature: MA Experiment 20000173 PARAMETER Experiment Name: At_42deg_Heat_P Parameter: Organism Value: A. thaliana
  misc_feature: MA Experiment 20000173 PARAMETER Experiment Name: At_42deg_Heat_P Parameter: Plant Line Value: WS
  misc_feature: MA Experiment 20000173 PARAMETER Experiment Name: At_42deg_Heat_P Parameter: Temperature (deg C) Value: 42 vs. 22
  misc_feature: MA Experiment 20000173 PARAMETER Experiment Name: At_42deg_Heat_P Parameter: Timepoint (hr) Value: 6
  misc_feature: MA Experiment 20000173 PARAMETER Experiment Name: At_42deg_Heat_P Parameter: Tissue Value: Aerial
  misc_feature: MA Experiment ID: 20001557 Result: Down-regulated in Transcription
  misc_feature: MA Experiment 20001557 PARAMETER Experiment Name: At_Drought_Soil_Dry_P Parameter: Age (day) Value: 27
  misc_feature: MA Experiment 20001557 PARAMETER Experiment Name: At_Drought_Soil_Dry_P Parameter: Organism Value: A. thaliana
  misc_feature: MA Experiment 20001557 PARAMETER Experiment Name: At_Drought_Soil_Dry_P Parameter: Plant Line Value: WS
  misc_feature: MA Experiment 20001557 PARAMETER Experiment Name: At_Drought_Soil_Dry_P Parameter: Post Timepoint (hr) Value: 3
  misc_feature: MA Experiment 20001557 PARAMETER Experiment Name: At_Drought_Soil_Dry_P Parameter: Post-Treatment Value: Re-Water vs. No Drought
  misc_feature: MA Experiment 20001557 PARAMETER Experiment Name: At_Drought_Soil_Dry_P Parameter: Timepoint (day) Value: 13
  misc_feature: MA Experiment 20001557 PARAMETER Experiment Name: At_Drought_Soil_Dry_P Parameter: Treatment Value: Drought vs. No Drought
gtgaaaatcttcaatctcgcgagagagaagaagaagaagaagaagaagaagaagcgatgttcctggtggattggttctatggagttctggcaactctgggactatggcagaaagaagcgaagattctgtttctaggtctcgacaacgccggcaaaaccaccttgcttcacatgttaaaggacgagagactggtccagcatcagccgacacagcatccgacatcggaagagcttagtatcggcaaaatcaagttcaaagccttcgatttgggaggtcatcagattgctcgtagagtctggaaggactattacgctaaggttgatgcagtggtatacctagttgatgcatatgacaaagagaggtttgcagaatcaaagaaagagcttgacgctcttctctctgatgaatccctagcaaatgtccctttcctcatccttggaaacaaaatcgacattccgtacgctgcatcagaagacgagctgcgttatcatctaggcctcaccagtttcaccactgggaaaggtaaagtgaatctagcaggaacaaatgttcgtcctcttgaggtgttcatgtgcagcattgtcagaaagatgggttacggcgaaggatttaaatgggtttctcaatatatcgactagatcaatcatatttaagtcttatctatctatactgtgtgattggtatctgtacgtgttataacctaatgtataattacgattaatgtgtgtatacaacaagatttgacggcttttaaattatcaattttgtgtttacag

SEQ ID NO: 107137 - protein, 211 aa, Arabidopsis thaliana
  peptide (1)..(211): Ceres Seq. ID no. 13621472
  misc_feature (23)..(210): Pfam Name: ADP-ribosylation factor family Pfam Description: ADP-ribosylation factor family
  misc_feature (19)..(211): Homolog of NCBI NO: 15228793 NR Description: GTP-binding protein SAR1A, putative [Arabidopsis >gi|17979297|gb|AAL49874.1| putative Sar1 GTP binding protein thaliana] >gi|21436475|gb|AAM51438.1| putative Sar1 GTP binding
  misc_feature (19)..(210): Homolog of NCBI NO: 15235226 NR Description: GTP-binding protein SAR1A [Arabidopsis thaliana]
  misc_feature (19)..(210): Homolog of NCBI NO: 3334321 NR Description: GTP-binding protein SAR1A
  misc_feature (19)..(211): Homolog of NCBI NO: 25294172 NR Description: ras-like small monomeric GTP-binding protein
  misc_feature (19)..(210): Homolog of NCBI NO: 25294173 NR Description: small GTP-binding protein Sar1BNt [imported] -
  misc_feature (19)..(211): Homolog of NCBI NO: 15223516 NR Description: GTP-binding protein SAR1B [Arabidopsis thaliana]
  misc_feature (19)..(210): Homolog of NCBI NO: 34894960 NR Description: putative GTP-binding protein [Oryza sativa
  misc_feature (19)..(210): Homolog of NCBI NO: 1549222 NR Description: NtSar1 protein [Nicotiana tabacum]
  misc_feature (19)..(211): Homolog of NCBI NO: 3334322 NR Description: GTP-binding protein SAR1B
  misc_feature (19)..(210): Homolog of NCBI NO: 34902852 NR Description: unnamed protein product [Oryza sativa (japonica group)] >gi|5922611|dbj|BAA84612.1| unnamed protein product
ENLQSREREEEEEEEEEAMFLVDWFYGVLATLGLWQKEAKILFLGLDNAGKTTLLHMLKDERLVQHQPTQHPTSEELSIGKIKFKAFDLGGHQIARRVWKDYYAKVDAVVYLVDAYDKERFAESKKELDALLSDESLANVPFLILGNKIDIPYAASEDELRYHLGLTSFTTGKGKVNLAGTNVRPLEVFMCSIVRKMGYGEGFKWVSQYID

SEQ ID NO: 107138 - protein, 193 aa, Arabidopsis thaliana
  peptide (1)..(193): Ceres Seq. ID no. 13621473
  misc_feature (5)..(192): Pfam Name: ADP-ribosylation factor family Pfam Description: ADP-ribosylation factor family
  misc_feature (1)..(193): Homolog of NCBI NO: 15228793 NR Description: GTP-binding protein SAR1A, putative [Arabidopsis >gi|17979297|gb|AAL49874.1| putative Sar1 GTP binding protein thaliana] >gi|21436475|gb|AAM51438.1| putative Sar1 GTP binding
  misc_feature (1)..(192): Homolog of NCBI NO: 15235226 NR Description: GTP-binding protein SAR1A [Arabidopsis thaliana]
  misc_feature (1)..(192): Homolog of NCBI NO: 3334321 NR Description: GTP-binding protein SAR1A
  misc_feature (1)..(193): Homolog of NCBI NO: 25294172 NR Description: ras-like small monomeric GTP-binding protein
  misc_feature (1)..(192): Homolog of NCBI NO: 25294173 NR Description: small GTP-binding protein Sar1BNt [imported] -
  misc_feature (1)..(193): Homolog of NCBI NO: 15223516 NR Description: GTP-binding protein SAR1B [Arabidopsis thaliana]
  misc_feature (1)..(192): Homolog of NCBI NO: 34894960 NR Description: putative GTP-binding protein [Oryza sativa
  misc_feature (1)..(192): Homolog of NCBI NO: 1549222 NR Description: NtSar1 protein [Nicotiana tabacum]
  misc_feature (1)..(193): Homolog of NCBI NO: 3334322 NR Description: GTP-binding protein SAR1B
  misc_feature (1)..(192): Homolog of NCBI NO: 34902852 NR Description: unnamed protein product [Oryza sativa (japonica group)] >gi|5922611|dbj|BAA84612.1| unnamed protein product
MFLVDWFYGVLATLGLWQKEAKILFLGLDNAGKTTLLHMLKDERLVQHQPTQHPTSEELSIGKIKFKAFDLGGHQIARRVWKDYYAKVDAVVYLVDAYDKERFAESKKELDALLSDESLANVPFLILGNKIDIPYAASEDELRYHLGLTSFTTGKGKVNLAGTNVRPLEVFMCSIVRKMGYGEGFKWVSQYID

SEQ ID NO: 107139 - protein, 155 aa, Arabidopsis thaliana
  peptide (1)..(155): Ceres Seq. ID no. 13621474
  misc_feature (1)..(154): Pfam Name: ADP-ribosylation factor family Pfam Description: ADP-ribosylation factor family
  misc_feature (1)..(155): Homolog of NCBI NO: 15228793 NR Description: GTP-binding protein SAR1A, putative [Arabidopsis >gi|17979297|gb|AAL49874.1| putative Sar1 GTP binding protein thaliana] >gi|21436475|gb|AAM51438.1| putative Sar1 GTP binding
  misc_feature (1)..(154): Homolog of NCBI NO: 15235226 NR Description: GTP-binding protein SAR1A [Arabidopsis thaliana]
  misc_feature (1)..(154): Homolog of NCBI NO: 3334321 NR Description: GTP-binding protein SAR1A
  misc_feature (1)..(155): Homolog of NCBI NO: 25294172 NR Description: ras-like small monomeric GTP-binding protein
  misc_feature (1)..(154): Homolog of NCBI NO: 25294173 NR Description: small GTP-binding protein Sar1BNt [imported] -
  misc_feature (1)..(155): Homolog of NCBI NO: 15223516 NR Description: GTP-binding protein SAR1B [Arabidopsis thaliana]
  misc_feature (1)..(154): Homolog of NCBI NO: 34894960 NR Description: putative GTP-binding protein [Oryza sativa
  misc_feature (1)..(154): Homolog of NCBI NO: 1549222 NR Description: NtSar1 protein [Nicotiana tabacum]
  misc_feature (1)..(155): Homolog of NCBI NO: 3334322 NR Description: GTP-binding protein SAR1B
  misc_feature (1)..(154): Homolog of NCBI NO: 34902852 NR Description: unnamed protein product [Oryza sativa (japonica group)] >gi|5922611|dbj|BAA84612.1| unnamed protein product
MLKDERLVQHQPTQHPTSEELSIGKIKFKAFDLGGHQIARRVWKDYYAKVDAVVYLVDAYDKERFAESKKELDALLSDESLANVPFLILGNKIDIPYAASEDELRYHLGLTSFTTGKGKVNLAGTNVRPLEVFMCSIVRKMGYGEGFKWVSQYID

SEQ ID NO: 107140 - DNA, 1395 bp, Arabidopsis thaliana
  misc_feature (1)..(1395): Ceres Seq. ID no. 13621479
  misc_feature: MA Experiment ID: 108461 Result: Up-regulated in Transcription
  misc_feature: MA Experiment 108461 PARAMETER Experiment Name: At_Germinating_Seeds_cDNA_P Parameter: Age (day) Value: 1 vs. 0
  misc_feature: MA Experiment 108461 PARAMETER Experiment Name: At_Germinating_Seeds_cDNA_P Parameter: Tissue Value: Germinating Seeds
  misc_feature: MA Experiment ID: 108573 Result: Down-regulated in Transcription
  misc_feature: MA Experiment 108573 PARAMETER Experiment Name: At_Drought_cDNA_P Parameter: Timepoint (hr) Value: 6
  misc_feature: MA Experiment 108573 PARAMETER Experiment Name: At_Drought_cDNA_P Parameter: Tissue Value: Aerial
  misc_feature: MA Experiment 108573 PARAMETER Experiment Name: At_Drought_cDNA_P Parameter: Treatment Value: Drought vs. No Drought
  misc_feature: MA Experiment ID: 108576 Result: Up-regulated in Transcription
  misc_feature: MA Experiment 108576 PARAMETER Experiment Name: At_42deg_Heat_cDNA_P Parameter: Temperature (deg C) Value: 42 vs. 22
  misc_feature: MA Experiment 108576 PARAMETER Experiment Name: At_42deg_Heat_cDNA_P Parameter: Timepoint (hr) Value: 1
  misc_feature: MA Experiment 108576 PARAMETER Experiment Name: At_42deg_Heat_cDNA_P Parameter: Tissue Value: Aerial
  misc_feature: MA Experiment ID: 108668 Result: Up-regulated in Transcription
  misc_feature: MA Experiment 108668 PARAMETER Experiment Name: At_2mM_SA_cDNA_P Parameter: Plant Line Value: WS
  misc_feature: MA Experiment 108668 PARAMETER Experiment Name: At_2mM_SA_cDNA_P Parameter: Timepoint (hr) Value: 6
  misc_feature: MA Experiment 108668 PARAMETER Experiment Name: At_2mM_SA_cDNA_P Parameter: Treatment Value: 2mM SA vs. No Treatment
  misc_feature: MA Experiment ID: 20000090 Result: Up-regulated in Transcription
  misc_feature: MA Experiment ID: 20000093 Result: Up-regulated in Transcription
  misc_feature: MA Experiment 20000093 PARAMETER Experiment Name: At_42deg_Heat_cDNA_P Parameter: Temperature (deg C) Value: 42 vs. 22
  misc_feature: MA Experiment 20000093 PARAMETER Experiment Name: At_42deg_Heat_cDNA_P Parameter: Timepoint (hr) Value: 0.5
  misc_feature: MA Experiment 20000093 PARAMETER Experiment Name: At_42deg_Heat_cDNA_P Parameter: Tissue Value: Aerial
  misc_feature: MA Experiment ID: 20000112 Result: Up-regulated in Transcription
  misc_feature: MA Experiment 20000112 PARAMETER Experiment Name: At_42deg_Heat_cDNA_P Parameter: Temperature (deg C) Value: 42 vs. 22
  misc_feature: MA Experiment 20000112 PARAMETER Experiment Name: At_42deg_Heat_cDNA_P Parameter: Timepoint (hr) Value: 2
  misc_feature: MA Experiment 20000112 PARAMETER Experiment Name: At_42deg_Heat_cDNA_P Parameter: Tissue Value: Aerial
  misc_feature: MA Experiment ID: 20000144 Result: Up-regulated in Transcription
  misc_feature: MA Experiment 20000144 PARAMETER Experiment Name: At_42deg_Heat_cDNA_P Parameter: Temperature (deg C) Value: 42 vs. 22
  misc_feature: MA Experiment 20000144 PARAMETER Experiment Name: At_42deg_Heat_cDNA_P Parameter: Timepoint (hr) Value: 1
  misc_feature: MA Experiment 20000144 PARAMETER Experiment Name: At_42deg_Heat_cDNA_P Parameter: Tissue Value: Aerial
  misc_feature: MA Experiment ID: 20000179 Result: Up-regulated in Transcription
  misc_feature: MA Experiment 20000179 PARAMETER Experiment Name: At_Germinating_Seeds_P Parameter: Age (hr) Value: 6 vs. 0
  misc_feature: MA Experiment 20000179 PARAMETER Experiment Name: At_Germinating_Seeds_P Parameter: Tissue Value: Germinating Seeds
  misc_feature: MA Experiment ID: 20000180 Result: Up-regulated in Transcription
  misc_feature: MA Experiment 20000180 PARAMETER Experiment Name: At_Germinating_Seeds_P Parameter: Age (hr) Value: 24 vs. 0
  misc_feature: MA Experiment 20000180 PARAMETER Experiment Name: At_Germinating_Seeds_P Parameter: Tissue Value: Germinating Seeds
  misc_feature: MA Experiment ID: 20000224 Result: Up-regulated in Transcription
  misc_feature: MA Experiment ID: 20000227 Result: Up-regulated in Transcription
  misc_feature: MA Experiment 20000227 PARAMETER Experiment Name: At_Root-Tips-vs-Tops_P Parameter: Tissue Value: Root Tips vs. Root Tops
  misc_feature: MA Experiment ID: 20001248 Result: Down-regulated in Transcription
  misc_feature: MA Experiment 20001248 PARAMETER Experiment Name: At_Far-red-induction_P Parameter: Age (day) Value: 7
  misc_feature: MA Experiment 20001248 PARAMETER Experiment Name: At_Far-red-induction_P Parameter: Light Value: Far-red vs. White
  misc_feature: MA Experiment 20001248 PARAMETER Experiment Name: At_Far-red-induction_P Parameter: Organism Value: A. thaliana
  misc_feature: MA Experiment 20001248 PARAMETER Experiment Name: At_Far-red-induction_P Parameter: Plant Line Value: Columbia
  misc_feature: MA Experiment 20001248 PARAMETER Experiment Name: At_Far-red-induction_P Parameter: Timepoint (hr) Value: 4
  misc_feature: MA Experiment 20001248 PARAMETER Experiment Name: At_Far-red-induction_P Parameter: Tissue Value: Whole Plant
  misc_feature: MA Experiment ID: 20001450 Result: Down-regulated in Transcription
  misc_feature: MA Experiment 20001450 PARAMETER Experiment Name: At_Far-red-induction_P Parameter: Age (day) Value: 7
  misc_feature: MA Experiment 20001450 PARAMETER Experiment Name: At_Far-red-induction_P Parameter: Light Value: Far-red vs. White
  misc_feature: MA Experiment 20001450 PARAMETER Experiment Name: At_Far-red-induction_P Parameter: Organism Value: A. thaliana
  misc_feature: MA Experiment 20001450 PARAMETER Experiment Name: At_Far-red-induction_P Parameter: Plant Line Value: Columbia
  misc_feature: MA Experiment 20001450 PARAMETER Experiment Name: At_Far-red-induction_P Parameter: Timepoint (hr) Value: 8
  misc_feature: MA Experiment 20001450 PARAMETER Experiment Name: At_Far-red-induction_P Parameter: Tissue Value: Whole Plant
aatcgtttccacgaaaacaagtagagagagtgattcgagttttccaatcataaaaatcagcgaagaagatcttcgttcttgttcattctgtgaggtttcattgttaaaatcgaaacgaatctcaggttggagtaatccttgggagagatccgatttccgtttccatggcgattcggtggtcggagctgtgtatcgtactgttcgctctttcctacgccatctgcgtccttgccgggaagagttactacgatgtgttgcaagtcccgaaaggtgcatctgatgaacagatcaagagagcttataggaaactagctttgaagtatcatcccgataagaatcaaggaaatgaggaagcgactcgcaaattcgctgagatcaacaatgcttatgaagtgttatcggatgaggagaagagggagatatataacaagtatggtgaagagggacttaaacagttttctgcaaatggaggaagaggaggaggaggaggcggcatgaatatgcaggacatcttcagctcgttttttggtggaggttcgatggaggaagaagagaaggttgtcaagggggatgacgtaattgtggaacttgaggcaactctagaagatttgtacatgggaggctctatgaaggtatggagggaaaagaatgtgataaaaccagctcctggaaagagaaagtgtaactgcaggaacgaggtctatcacagacaaattggtcctggaatgttccaacagatgacagagcaggtctgtgacaaatgccctaatgtcaaatacgaacgggagggatactttgtgacagttgatatcgagaaaggaatgaaagatggagaagaagtgtctttctatgaagacggcgaacccattcttgacggtgaccctggtgaccttaagttccgaatcagaactgcaccacatgcccgtttcagaagggatggcaacgatctacacatgaacgtgaacattacactggttgaggcgctagttggttttgagaaatcattcaaacacttggatgatcacgaagttgacatcagttccaagggaattacaaagccgaaggaagtaaagaagttcaaaggagaagggatgccacttcactacagcacaaagaaaggcaacctctttgtcacttttgaggttttgtttccgtcttctctcactgacgatcagaagaagaagattaaagaagtctttgcttagtgctcttctctcgctttcgctctctctctctttagaagtttggggattaaagagaagaacatgtgatggtcctaatgtataacatgattaggttttaatatagaaagaaaaaagatatggggagacaaagtcggaaggacgttttgatcaagttgtcatttttgtttgctctttgttaatcatattagtg

SEQ ID NO: 107141 - protein, 346 aa, Arabidopsis thaliana; identical to SEQ ID NO: 23911
  peptide (1)..(346): Ceres Seq. ID no. 13621480
  misc_feature (224)..(345): Pfam Name: DnaJ C terminal region Pfam Description: DnaJ C terminal region
  misc_feature (1)..(346): Homolog of NCBI NO: 15228802 NR Description: expressed protein [Arabidopsis thaliana]
  misc_feature (2)..(344): Homolog of NCBI NO: 34897648 NR Description: hypothetical protein [Oryza sativa]
  misc_feature (1)..(344): Homolog of NCBI NO: 38488745 NR Description: DnaJ (Hsp40) homolog, subfamily B, member 11 rerio] >gi|28279964|gb|AAH44559.1| Similar to DnaJ (Hsp40)
  misc_feature (6)..(344): Homolog of NCBI NO: 37361854 NR Description: LRRGT00084 [Rattus norvegicus]
  misc_feature (6)..(344): Homolog of NCBI NO: 20892117 NR Description: RIKEN cDNA 1810031F23 [Mus musculus] DnaJ homolog subfamily B member 11 precursor DnaJ (Hsp40) homolog, subfamily B, member 11 [Mus musculus]
  misc_feature (6)..(344): Homolog of NCBI NO: 27754067 NR Description: DnaJ (Hsp40) homolog, subfamily B, member 11 [Mus >gi|17390665|gb|AAH18282.1| DnaJ (Hsp40) homolog, subfamily B,
  misc_feature (6)..(344): Homolog of NCBI NO: 7706495 NR Description: DnaJ (Hsp40) homolog, subfamily B, member 11;
  misc_feature (6)..(344): Homolog of NCBI NO: 30584551 NR Description: Homo sapiens DnaJ (Hsp40) homolog, subfamily B,
  misc_feature (6)..(344): Homolog of NCBI NO: 14579002 NR Description: PWP1-interacting protein 4 [Homo sapiens]
  misc_feature (6)..(344): Homolog of NCBI NO: 26344614 NR Description: unnamed protein product [Mus musculus]

SEQ ID NO: 107142 - protein, 236 aa, Arabidopsis thaliana; identical to SEQ ID NO: 23912
  peptide (1)..(236): Ceres Seq. ID no. 13621481
  misc_feature (114)..(235): Pfam Name: DnaJ C terminal region Pfam Description: DnaJ C terminal region
  misc_feature (1)..(236): Homolog of NCBI NO: 15228802 NR Description: expressed protein [Arabidopsis thaliana]
  misc_feature (1)..(234): Homolog of NCBI NO: 34897648 NR Description: hypothetical protein [Oryza sativa]
  misc_feature (1)..(234): Homolog of NCBI NO: 38488745 NR Description: DnaJ (Hsp40) homolog, subfamily B, member 11 rerio] >gi|28279964|gb|AAH44559.1| Similar to DnaJ (Hsp40)
  misc_feature (1)..(234): Homolog of NCBI NO: 37361854 NR Description: LRRGT00084 [Rattus norvegicus]
  misc_feature (1)..(234): Homolog of NCBI NO: 20892117 NR Description: RIKEN cDNA 1810031F23 [Mus musculus] DnaJ homolog subfamily B member 11 precursor DnaJ (Hsp40) homolog, subfamily B, member 11 [Mus musculus]
  misc_feature (1)..(234): Homolog of NCBI NO: 27754067 NR Description: DnaJ (Hsp40) homolog, subfamily B, member 11 [Mus >gi|17390665|gb|AAH18282.1| DnaJ (Hsp40) homolog, subfamily B,
  misc_feature (1)..(234): Homolog of NCBI NO: 7706495 NR Description: DnaJ (Hsp40) homolog, subfamily B, member 11;
  misc_feature (1)..(234): Homolog of NCBI NO: 30584551 NR Description: Homo sapiens DnaJ (Hsp40) homolog, subfamily B,
  misc_feature (1)..(234): Homolog of NCBI NO: 14579002 NR Description: PWP1-interacting protein 4 [Homo sapiens]
  misc_feature (1)..(234): Homolog of NCBI NO: 26344614 NR Description: unnamed protein product [Mus musculus]

SEQ ID NO: 107143 - protein, 234 aa, Arabidopsis thaliana; identical to SEQ ID NO: 23913
  peptide (1)..(234): Ceres Seq. ID no. 13621482
  misc_feature (112)..(233): Pfam Name: DnaJ C terminal region Pfam Description: DnaJ C terminal region
  misc_feature (1)..(234): Homolog of NCBI NO: 15228802 NR Description: expressed protein [Arabidopsis thaliana]
  misc_feature (1)..(232): Homolog of NCBI NO: 34897648 NR Description: hypothetical protein [Oryza sativa]
  misc_feature (1)..(232): Homolog of NCBI NO: 38488745 NR Description: DnaJ (Hsp40) homolog, subfamily B, member 11 rerio] >gi|28279964|gb|AAH44559.1| Similar to DnaJ (Hsp40)
  misc_feature (1)..(232): Homolog of NCBI NO: 37361854 NR Description: LRRGT00084 [Rattus norvegicus]
  misc_feature (1)..(232): Homolog of NCBI NO: 20892117 NR Description: RIKEN cDNA 1810031F23 [Mus musculus] DnaJ homolog subfamily B member 11 precursor DnaJ (Hsp40) homolog, subfamily B, member 11 [Mus musculus]
  misc_feature (1)..(232): Homolog of NCBI NO: 27754067 NR Description: DnaJ (Hsp40) homolog, subfamily B, member 11 [Mus >gi|17390665|gb|AAH18282.1| DnaJ (Hsp40) homolog, subfamily B,
  misc_feature (1)..(232): Homolog of NCBI NO: 7706495 NR Description: DnaJ (Hsp40) homolog, subfamily B, member 11;
  misc_feature (1)..(232): Homolog of NCBI NO: 30584551 NR Description: Homo sapiens DnaJ (Hsp40) homolog, subfamily B,
  misc_feature (1)..(232): Homolog of NCBI NO: 14579002 NR Description: PWP1-interacting protein 4 [Homo sapiens]
  misc_feature (1)..(232): Homolog of NCBI NO: 26344614 NR Description: unnamed protein product [Mus musculus]

SEQ ID NO: 107144 - DNA, 1904 bp, Arabidopsis thaliana
  misc_feature (1)..(1904): Ceres Seq. ID no. 13621491
  misc_feature: MA Experiment ID: 108464 Result: Up-regulated in Transcription
  misc_feature: MA Experiment 108464 PARAMETER Experiment Name: At_Germinating_Seeds_cDNA_P Parameter: Age (day) Value: 4 vs. 0
  misc_feature: MA Experiment 108464 PARAMETER Experiment Name: At_Germinating_Seeds_cDNA_P Parameter: Tissue Value: Germinating Seeds
  misc_feature: MA Experiment ID: 108572 Result: Up-regulated in Transcription
  misc_feature: MA Experiment 108572 PARAMETER Experiment Name: At_Drought_cDNA_P Parameter: Timepoint (hr) Value: 1
  misc_feature: MA Experiment 108572 PARAMETER Experiment Name: At_Drought_cDNA_P Parameter: Tissue Value: Aerial
  misc_feature: MA Experiment 108572 PARAMETER Experiment Name: At_Drought_cDNA_P Parameter: Treatment Value: Drought vs. No Drought
  misc_feature: MA Experiment ID: 108573 Result: Up-regulated in Transcription
  misc_feature: MA Experiment 108573 PARAMETER Experiment Name: At_Drought_cDNA_P Parameter: Timepoint (hr) Value: 6
  misc_feature: MA Experiment 108573 PARAMETER Experiment Name: At_Drought_cDNA_P Parameter: Tissue Value: Aerial
  misc_feature: MA Experiment 108573 PARAMETER Experiment Name: At_Drought_cDNA_P Parameter: Treatment Value: Drought vs. No Drought
  misc_feature: MA Experiment ID: 20000069 Result: Up-regulated in Transcription
  misc_feature: MA Experiment 20000069 PARAMETER Experiment Name: At_100uM_ABA_Mutants_cDNA_P Parameter: Plant Line Value: CS23
  misc_feature: MA Experiment 20000069 PARAMETER Experiment Name: At_100uM_ABA_Mutants_cDNA_P Parameter: Timepoint (hr) Value: 6
  misc_feature: MA Experiment 20000069 PARAMETER Experiment Name: At_100uM_ABA_Mutants_cDNA_P Parameter: Tissue Value: Aerial
  misc_feature: MA Experiment 20000069 PARAMETER Experiment Name: At_100uM_ABA_Mutants_cDNA_P Parameter: Treatment Value: 100uM ABA vs. No Treatment
  misc_feature: MA Experiment ID: 20000070 Result: Up-regulated in Transcription
  misc_feature: MA Experiment 20000070 PARAMETER Experiment Name: At_100uM_ABA_Mutants_cDNA_P Parameter: Plant Line Value: CS24
  misc_feature: MA Experiment 20000070 PARAMETER Experiment Name: At_100uM_ABA_Mutants_cDNA_P Parameter: Timepoint (hr) Value: 6
  misc_feature: MA Experiment 20000070 PARAMETER Experiment Name: At_100uM_ABA_Mutants_cDNA_P Parameter: Tissue Value: Aerial
  misc_feature: MA Experiment 20000070 PARAMETER Experiment Name: At_100uM_ABA_Mutants_cDNA_P Parameter: Treatment Value: 100uM ABA vs. No Treatment
  misc_feature: MA Experiment ID: 20000071 Result: Up-regulated in Transcription
  misc_feature: MA Experiment 20000071 PARAMETER Experiment Name: At_100uM_ABA_Mutants_cDNA_P Parameter: Plant Line Value: CS8104
  misc_feature: MA Experiment 20000071 PARAMETER Experiment Name: At_100uM_ABA_Mutants_cDNA_P Parameter: Timepoint (hr) Value: 6
  misc_feature: MA Experiment 20000071 PARAMETER Experiment Name: At_100uM_ABA_Mutants_cDNA_P Parameter: Tissue Value: Aerial
  misc_feature: MA Experiment 20000071 PARAMETER Experiment Name: At_100uM_ABA_Mutants_cDNA_P Parameter: Treatment Value: 100uM ABA vs. No Treatment
  misc_feature: MA Experiment ID: 20000072 Result: Up-regulated in Transcription
  misc_feature: MA Experiment 20000072 PARAMETER Experiment Name: At_100uM_ABA_Mutants_cDNA_P Parameter: Plant Line Value: CS8105
  misc_feature: MA Experiment 20000072 PARAMETER Experiment Name: At_100uM_ABA_Mutants_cDNA_P Parameter: Timepoint (hr) Value: 6
  misc_feature: MA Experiment 20000072 PARAMETER Experiment Name: At_100uM_ABA_Mutants_cDNA_P Parameter: Tissue Value: Aerial
  misc_feature: MA Experiment 20000072 PARAMETER Experiment Name: At_100uM_ABA_Mutants_cDNA_P Parameter: Treatment Value: 100uM ABA vs. No Treatment
  misc_feature: MA Experiment ID: 20000088 Result: Up-regulated in Transcription
  misc_feature: MA Experiment 20000088 PARAMETER Experiment Name: At_100uM_ABA_Mutants_cDNA_P Parameter: Plant Line Value: Landsberg
  misc_feature: MA Experiment 20000088 PARAMETER Experiment Name: At_100uM_ABA_Mutants_cDNA_P Parameter: Timepoint (hr) Value: 6
  misc_feature: MA Experiment 20000088 PARAMETER Experiment Name: At_100uM_ABA_Mutants_cDNA_P Parameter: Tissue Value: Aerial
  misc_feature: MA Experiment 20000088 PARAMETER Experiment Name: At_100uM_ABA_Mutants_cDNA_P Parameter: Treatment Value: 100uM ABA vs. No Treatment
  misc_feature: MA Experiment ID: 20000112 Result: Down-regulated in Transcription
  misc_feature: MA Experiment 20000112 PARAMETER Experiment Name: At_42deg_Heat_cDNA_P Parameter: Temperature (deg C) Value: 42 vs. 22
  misc_feature: MA Experiment 20000112 PARAMETER Experiment Name: At_42deg_Heat_cDNA_P Parameter: Timepoint (hr) Value: 2
  misc_feature: MA Experiment 20000112 PARAMETER Experiment Name: At_42deg_Heat_cDNA_P Parameter: Tissue Value: Aerial
  misc_feature: MA Experiment ID: 20000117 Result: Up-regulated in Transcription
  misc_feature: MA Experiment 20000117 PARAMETER Experiment Name: At_100uM_ABA_Mutants_cDNA_P Parameter: Plant Line Value: Columbia
  misc_feature: MA Experiment 20000117 PARAMETER Experiment Name: At_100uM_ABA_Mutants_cDNA_P Parameter: Timepoint (hr) Value: 6
  misc_feature: MA Experiment 20000117 PARAMETER Experiment Name: At_100uM_ABA_Mutants_cDNA_P Parameter: Tissue Value: Aerial
  misc_feature: MA Experiment 20000117 PARAMETER Experiment Name: At_100uM_ABA_Mutants_cDNA_P Parameter: Treatment Value: 100uM ABA vs. No Treatment
  misc_feature: MA Experiment ID: 20000144 Result: Down-regulated in Transcription
  misc_feature: MA Experiment 20000144 PARAMETER Experiment Name: At_42deg_Heat_cDNA_P Parameter: Temperature (deg C) Value: 42 vs. 22
  misc_feature: MA Experiment 20000144 PARAMETER Experiment Name: At_42deg_Heat_cDNA_P Parameter: Timepoint (hr) Value: 1
  misc_feature: MA Experiment 20000144 PARAMETER Experiment Name: At_42deg_Heat_cDNA_P Parameter: Tissue Value: Aerial
  misc_feature: MA Experiment ID: 20000171 Result: Down-regulated in Transcription
  misc_feature: MA Experiment 20000171 PARAMETER Experiment Name: At_42deg_Heat_P Parameter: Age (day) Value: 14
  misc_feature: MA Experiment 20000171 PARAMETER Experiment Name: At_42deg_Heat_P Parameter: Organism Value: A. thaliana
  misc_feature: MA Experiment 20000171 PARAMETER Experiment Name: At_42deg_Heat_P Parameter: Plant Line Value: WS
  misc_feature: MA Experiment 20000171 PARAMETER Experiment Name: At_42deg_Heat_P Parameter: Temperature (deg C) Value: 42 vs. 22
  misc_feature: MA Experiment 20000171 PARAMETER Experiment Name: At_42deg_Heat_P Parameter: Timepoint (hr) Value: 1
  misc_feature: MA Experiment 20000171 PARAMETER Experiment Name: At_42deg_Heat_P Parameter: Tissue Value: Aerial
  misc_feature: MA Experiment ID: 20000173 Result: Down-regulated in Transcription
  misc_feature: MA Experiment 20000173 PARAMETER Experiment Name: At_42deg_Heat_P Parameter: Age (day) Value: 14
  misc_feature: MA Experiment 20000173 PARAMETER Experiment Name: At_42deg_Heat_P Parameter: Organism Value: A. thaliana
  misc_feature: MA Experiment 20000173 PARAMETER Experiment Name: At_42deg_Heat_P Parameter: Plant Line Value: WS
  misc_feature: MA Experiment 20000173 PARAMETER Experiment Name: At_42deg_Heat_P Parameter: Temperature (deg C) Value: 42 vs. 22
  misc_feature: MA Experiment 20000173 PARAMETER Experiment Name: At_42deg_Heat_P Parameter: Timepoint (hr) Value: 6
  misc_feature: MA Experiment 20000173 PARAMETER Experiment Name: At_42deg_Heat_P Parameter: Tissue Value: Aerial
  misc_feature: MA Experiment ID: 20000180 Result: Up-regulated in Transcription
  misc_feature: MA Experiment 20000180 PARAMETER Experiment Name: At_Germinating_Seeds_P Parameter: Age (hr) Value: 24 vs. 0
  misc_feature: MA Experiment 20000180 PARAMETER Experiment Name: At_Germinating_Seeds_P Parameter: Tissue Value: Germinating Seeds
  misc_feature: MA Experiment ID: 20000224 Result: Down-regulated in Transcription
  misc_feature: MA Experiment ID: 20000436 Result: Up-regulated in Transcription
  misc_feature: MA Experiment 20000436 PARAMETER Experiment Name: At_Drought_P Parameter: Age (day) Value: 7
  misc_feature: MA Experiment 20000436 PARAMETER Experiment Name: At_Drought_P Parameter: Organism Value: A. thaliana
  misc_feature: MA Experiment 20000436 PARAMETER Experiment Name: At_Drought_P Parameter: Plant Line Value: WS
  misc_feature: MA Experiment 20000436 PARAMETER Experiment Name: At_Drought_P Parameter: Timepoint (hr) Value: 12
  misc_feature: MA Experiment 20000436 PARAMETER Experiment Name: At_Drought_P Parameter: Tissue Value: Whole Plant
  misc_feature: MA Experiment 20000436 PARAMETER Experiment Name: At_Drought_P Parameter: Treatment Value: Drought vs. No Drought
  misc_feature: MA Experiment ID: 20000437 Result: Up-regulated in Transcription
  misc_feature: MA Experiment 20000437 PARAMETER Experiment Name: At_Drought_P Parameter: Age (day) Value: 8
  misc_feature: MA Experiment 20000437 PARAMETER Experiment Name: At_Drought_P Parameter: Organism Value: A. thaliana
  misc_feature: MA Experiment 20000437 PARAMETER Experiment Name: At_Drought_P Parameter: Plant Line Value: WS
  misc_feature: MA Experiment 20000437 PARAMETER Experiment Name: At_Drought_P Parameter: Timepoint (hr) Value: 24
  misc_feature: MA Experiment 20000437 PARAMETER Experiment Name: At_Drought_P Parameter: Tissue Value: Whole Plant
  misc_feature: MA Experiment 20000437 PARAMETER Experiment Name: At_Drought_P Parameter: Treatment Value: Drought vs. No Drought
  misc_feature: MA Experiment ID: 20000794 Result: Up-regulated in Transcription
  misc_feature: MA Experiment 20000794 PARAMETER Experiment Name: At_Petals_P Parameter: Age (day) Value: 23-25 days
  misc_feature: MA Experiment 20000794 PARAMETER Experiment Name: At_Petals_P Parameter: Plant Line Value: WS
  misc_feature: MA Experiment 20000794 PARAMETER Experiment Name: At_Petals_P Parameter: Tissue Value: Petals vs. Whole plant
  misc_feature: MA Experiment ID: 20001558 Result: Down-regulated in Transcription
  misc_feature: MA Experiment 20001558 PARAMETER Experiment Name: At_Drought_Soil_Dry_P Parameter: Age (day) Value: 27
  misc_feature: MA Experiment 20001558 PARAMETER Experiment Name: At_Drought_Soil_Dry_P Parameter: Organism Value: A. thaliana
  misc_feature: MA Experiment 20001558 PARAMETER Experiment Name: At_Drought_Soil_Dry_P Parameter: Plant Line Value: WS
  misc_feature: MA Experiment 20001558 PARAMETER Experiment Name: At_Drought_Soil_Dry_P Parameter: Post Timepoint (hr) Value: 6
  misc_feature: MA Experiment 20001558 PARAMETER Experiment Name: At_Drought_Soil_Dry_P Parameter: Post-Treatment Value: Re-Water vs. No Drought
  misc_feature: MA Experiment 20001558 PARAMETER Experiment Name: At_Drought_Soil_Dry_P Parameter: Timepoint (day) Value: 13
  misc_feature: MA Experiment 20001558 PARAMETER Experiment Name: At_Drought_Soil_Dry_P Parameter: Treatment Value: Drought vs. No Drought
caaaatgaatagagataatatataaacacaagcattaggctgtcgagaaaacataaattttctatgattaggccatacaaatcataataagtagtagaaatacaaaaaaatctgtttgttggctaaagagaaatcgaaggaattagtcttttcacccatttttctctctctgtgtggcttcttcttcttcttcttcttcctatcaaaatcatcatcatcatcttctctatattactaaaatagagagagccaacaaaagagaggagagggcgtaaaacagcagacggtggcgcaccgtagcaccgccccctcctaacctgcgcctttcttccttctctttcattttttttttttccggtttcaggaattattcctctcctcctctctcaggtcgcttcgatcccaaggcaaaatagtttcctgatttttgattcttaccttcgattttggcttcttcttcttcttcttcagatgcattcacctagaaaactctggcggacatcaaaggaaccctagcttttctccggtcttgttatatcgcctctatcgccgccgatcggtggtttgatttcaaatccaagagaaagaaacgcagaggttcatttctcaggatgctttggatcatgagattctccggtttattctccgccgctttggttatcatcgtcctctctccttctctccaatcgtttcctccagctgaagctatcagatcctctcatctcgacgcttacctccgtttcccctcctccgatccaccgccgcatagattctccttcagaaaagctcctgttttccgcaatgccgccgattgcgccgccgcagatatcgattccggcgtctgtaacccttccttggtccacgtcgcgattactctcgatttcgagtacctgcgtggctcaatcgccgccgttcattcgattctcaagcactcgtcgtgtcccgagagcgtcttcttccatttcctcgtctccgagactgacctagaatccttgattcgttcgacttttcccgaattgaaattaaaggtttactacttcgatccggagattgtacggacgctgatctcaacctccgtgagacaagcgctcgagcagccgttgaattacgctagaaattacctagctgaccttctcgagccttgcgtgcgtcgcgtgatctacctagattccgatctaatcgtcgtcgacgacatcgcaaagctctggatgacgaaactgggatcgaaaacgatcggagctcccgagtactgtcacgcgaacttcacaaagtatttcacaccggcgttctggtccgacgagaggttctccggagctttctccgggaggaaaccgtgctacttcaacacgggagtgatggtgatggatctagagagatggaggcgcgtagggtacacggaggtgatagagaaatggatggagattcagaagagtgataggatttacgagctgggatcattgccgccgttcttgttggtgttcgccggagaagtagctccgatagagcatcggtggaaccagcatgggcttggtggagataacgtgagaggaagctgtagagatttacatcccggtccggttagcttgcttcattggtccggtagtggtaaaccgtggtttcggttagattcgagacggccttgtccacttgatactctttgggcaccttatgatttgtatggacactactctcgctgatgatgattgatgatctctgttattacatattattatagtctcagtctcagctggtaaattctctcatctcctttgacaaaaaaaaaaacattctttcttctctcttttgattttaccaacttttggttggaatttgtttcgttactctgtattctattcgattgttctgtgcatcaaaccataggatacaatcagatttgttgttgt

SEQ ID NO: 107145 - protein, 361 aa, Arabidopsis thaliana; identical to SEQ ID NO: 39815
  peptide (1)..(361): Ceres Seq. ID no. 13621492
  misc_feature (1)..(361): Homolog of NCBI NO: 22331906 NR Description: glycosyltransferase family 8 [Arabidopsis >gi|18175835|gb|AAL59936.1| unknown protein [Arabidopsis >gi|20465549|gb|AAM20257.1| unknown protein [Arabidopsis
  misc_feature (5)..(361): Homolog of NCBI NO: 11281926 NR Description: hypothetical protein F26K9.90 - Arabidopsis >gi|7362746|emb|CAB83116.1| putative protein [Arabidopsis
  misc_feature (1)..(358): Homolog of NCBI NO: 15217851 NR Description: glycosyltransferase family 8 [Arabidopsis
  misc_feature (1)..(358): Homolog of NCBI NO: 15235247 NR Description: glycosyltransferase family 8 [Arabidopsis >gi|30679061|ref|NP_849285.1| glycosyltransferase family 8 thaliana] >gi|7484990|pir||T01514 glycosyl transferase predicted
  misc_feature (1)..(358): Homolog of NCBI NO: 21554300 NR Description: putative glycosyl transferase [Arabidopsis
  misc_feature (1)..(327): Homolog of NCBI NO: 20258800 NR Description: putative glycosyl transferase [Arabidopsis
  misc_feature (55)..(358): Homolog of NCBI NO: 18409445 NR Description: glycosyltransferase family 8 [Arabidopsis
  misc_feature (56)..(358): Homolog of NCBI NO: 15221684 NR Description: glycosyltransferase family 8 [Arabidopsis
  misc_feature (15)..(356): Homolog of NCBI NO: 12003394 NR Description: Avr9/Cf-9 rapidly elicited protein 231 [Nicotiana
  misc_feature (55)..(360): Homolog of NCBI NO: 18391493 NR Description: glycosyltransferase family 8 [Arabidopsis

SEQ ID NO: 107146 - protein, 357 aa, Arabidopsis thaliana; identical to SEQ ID NO: 39816
  peptide (1)..(357): Ceres Seq. ID no. 13621493
  misc_feature (1)..(357): Homolog of NCBI NO: 22331906 NR Description: glycosyltransferase family 8 [Arabidopsis >gi|18175835|gb|AAL59936.1| unknown protein [Arabidopsis >gi|20465549|gb|AAM20257.1| unknown protein [Arabidopsis
  misc_feature (1)..(357): Homolog of NCBI NO: 11281926 NR Description: hypothetical protein F26K9.90 - Arabidopsis >gi|7362746|emb|CAB83116.1| putative protein [Arabidopsis
  misc_feature (1)..(354): Homolog of NCBI NO: 15217851 NR Description: glycosyltransferase family 8 [Arabidopsis
  misc_feature (1)..(354): Homolog of NCBI NO: 15235247 NR Description: glycosyltransferase family 8 [Arabidopsis >gi|30679061|ref|NP_849285.1| glycosyltransferase family 8 thaliana] >gi|7484990|pir||T01514 glycosyl transferase predicted
  misc_feature (1)..(354): Homolog of NCBI NO: 21554300 NR Description: putative glycosyl transferase [Arabidopsis
  misc_feature (1)..(323): Homolog of NCBI NO: 20258800 NR Description: putative glycosyl transferase [Arabidopsis
  misc_feature (51)..(354): Homolog of NCBI NO: 18409445 NR Description: glycosyltransferase family 8 [Arabidopsis
  misc_feature (52)..(354): Homolog of NCBI NO: 15221684 NR Description: glycosyltransferase family 8 [Arabidopsis
  misc_feature (11)..(352): Homolog of NCBI NO: 12003394 NR Description: Avr9/Cf-9 rapidly elicited protein 231 [Nicotiana
  misc_feature (51)..(356): Homolog of NCBI NO: 18391493 NR Description: glycosyltransferase family 8 [Arabidopsis

SEQ ID NO: 107147 - DNA, 1762 bp, Arabidopsis thaliana
  misc_feature (1)..(1762): Ceres Seq. ID no. 13621498
  misc_feature: MA Experiment ID: 108434 Result: Down-regulated in Transcription
  misc_feature: MA Experiment 108434 PARAMETER Experiment Name: At_Root_Tips_cDNA_P Parameter: Tissue Value: Root Tips
  misc_feature: MA Experiment ID: 108435 Result: Up-regulated in Transcription
  misc_feature: MA Experiment 108435 PARAMETER Experiment Name: At_stm_Mutants_cDNA_P Parameter: Plant Line Value: wt Landsburg vs stm
  misc_feature: MA Experiment 108435 PARAMETER Experiment Name: At_stm_Mutants_cDNA_P Parameter: Tissue Value: Shoot Apical Meristem Region
  misc_feature: MA Experiment ID: 108461 Result: Down-regulated in Transcription
  misc_feature: MA Experiment 108461 PARAMETER Experiment Name: At_Germinating_Seeds_cDNA_P Parameter: Age (day) Value: 1 vs. 0
  misc_feature: MA Experiment 108461 PARAMETER Experiment Name: At_Germinating_Seeds_cDNA_P Parameter: Tissue Value: Germinating Seeds
  misc_feature: MA Experiment ID: 108462 Result: Down-regulated in Transcription
  misc_feature: MA Experiment 108462 PARAMETER Experiment Name: At_Germinating_Seeds_cDNA_P Parameter: Age (day) Value: 2 vs. 0
  misc_feature: MA Experiment 108462 PARAMETER Experiment Name: At_Germinating_Seeds_cDNA_P Parameter: Tissue Value: Germinating Seeds
  misc_feature: MA Experiment ID: 108576 Result: Up-regulated in Transcription
  misc_feature: MA Experiment 108576 PARAMETER Experiment Name: At_42deg_Heat_cDNA_P Parameter: Temperature (deg C) Value: 42 vs. 22
  misc_feature: MA Experiment 108576 PARAMETER Experiment Name: At_42deg_Heat_cDNA_P Parameter: Timepoint (hr) Value: 1
  misc_feature: MA Experiment 108576 PARAMETER Experiment Name: At_42deg_Heat_cDNA_P Parameter: Tissue Value: Aerial
  misc_feature: MA Experiment ID: 20000185 Result: Down-regulated in Transcription
  misc_feature: MA Experiment 20000185 PARAMETER Experiment Name: At_Roots__P Parameter: Age (day) Value: 7 vs. 21
  misc_feature: MA Experiment 20000185 PARAMETER Experiment Name: At_Roots__P Parameter: Organism Value: A. thaliana
  misc_feature: MA Experiment 20000185 PARAMETER Experiment Name: At_Roots__P Parameter: Tissue Value: Roots vs. Whole Plant
  misc_feature: MA Experiment ID: 20000224 Result: Down-regulated in Transcription
  misc_feature: MA Experiment ID: 20000268 Result: Down-regulated in Transcription
  misc_feature: MA Experiment 20000268 PARAMETER Experiment Name: At_100mM_NaCl__P Parameter: Age (day) Value: 14
  misc_feature: MA Experiment 20000268 PARAMETER Experiment Name: At_100mM_NaCl__P Parameter: Organism Value: A. thaliana
  misc_feature: MA Experiment 20000268 PARAMETER Experiment Name: At_100mM_NaCl__P Parameter: Plant Line Value: WS
  misc_feature: MA Experiment 20000268 PARAMETER Experiment Name: At_100mM_NaCl__P Parameter: Timepoint (hr) Value: 6
  misc_feature: MA Experiment 20000268 PARAMETER Experiment Name: At_100mM_NaCl__P Parameter: Tissue Value: Whole Plant
  misc_feature: MA Experiment 20000268 PARAMETER Experiment Name: At_100mM_NaCl__P Parameter: Treatment Value: 100mM NaCl vs. No Treatment
  misc_feature: MA Experiment ID: 20000438 Result: Down-regulated in Transcription
  misc_feature: MA Experiment 20000438 PARAMETER Experiment Name: At_Shoots__P Parameter: Age (day) Value: 14
  misc_feature: MA Experiment 20000438 PARAMETER Experiment Name: At_Shoots__P Parameter: Tissue Value: Shoots vs. Whole Plant
  misc_feature: MA Experiment ID: 20000439 Result: Down-regulated in Transcription
  misc_feature: MA Experiment 20000439 PARAMETER Experiment Name: At_Roots__P Parameter: Age (day) Value: 14 vs. 21
  misc_feature: MA Experiment 20000439 PARAMETER Experiment Name: At_Roots__P Parameter: Organism Value: A. thaliana
  misc_feature: MA Experiment 20000439 PARAMETER Experiment Name: At_Roots__P Parameter: Tissue Value: Roots vs. Whole Plant
  misc_feature: MA Experiment ID: 20000460 Result: Up-regulated in Transcription
  misc_feature: MA Experiment 20000460 PARAMETER Experiment Name: At_10percent_PEG_P Parameter: Age (day) Value: 12
  misc_feature: MA Experiment 20000460 PARAMETER Experiment Name: At_10percent_PEG_P Parameter: Organism Value: A. thaliana
  misc_feature: MA Experiment 20000460 PARAMETER Experiment Name: At_10percent_PEG_P Parameter: Plant Line Value: WS
  misc_feature: MA Experiment 20000460 PARAMETER Experiment Name: At_10percent_PEG_P Parameter: Timepoint (day) Value: 12
  misc_feature: MA Experiment 20000460 PARAMETER Experiment Name: At_10percent_PEG_P Parameter: Tissue Value: Whole Plant
  misc_feature: MA Experiment 20000460 PARAMETER Experiment Name: At_10percent_PEG_P Parameter: Treatment Value: 10percent PEG vs. No Treatment
  misc_feature: MA Experiment ID: 20000527 Result: Up-regulated in Transcription
  misc_feature: MA Experiment 20000527 PARAMETER Experiment Name: At_10percent_PEG_P Parameter: Age (day) Value: 20
  misc_feature: MA Experiment 20000527 PARAMETER Experiment Name: At_10percent_PEG_P Parameter: Organism Value: A. thaliana
  misc_feature: MA Experiment 20000527 PARAMETER Experiment Name: At_10percent_PEG_P Parameter: Plant Line Value: WS
  misc_feature: MA Experiment 20000527 PARAMETER Experiment Name: At_10percent_PEG_P Parameter: Timepoint (day) Value: 20
  misc_feature: MA Experiment 20000527 PARAMETER Experiment Name: At_10percent_PEG_P Parameter: Tissue Value: Whole Plant
  misc_feature: MA Experiment 20000527 PARAMETER Experiment Name: At_10percent_PEG_P Parameter: Treatment Value: 10percent PEG vs. No Treatment
  misc_feature: MA Experiment ID: 20001247 Result: Up-regulated in Transcription
  misc_feature: MA Experiment 20001247 PARAMETER Experiment Name: At_Far-red-induction_P Parameter: Age (day) Value: 7
  misc_feature: MA Experiment 20001247 PARAMETER Experiment Name: At_Far-red-induction_P Parameter: Light Value: Far-red vs. White
  misc_feature: MA Experiment 20001247 PARAMETER Experiment Name: At_Far-red-induction_P Parameter: Organism Value: A. thaliana
  misc_feature: MA Experiment 20001247 PARAMETER Experiment Name: At_Far-red-induction_P Parameter: Plant Line Value: Columbia
  misc_feature: MA Experiment 20001247 PARAMETER Experiment Name: At_Far-red-induction_P Parameter: Timepoint (hr) Value: 1
  misc_feature: MA Experiment 20001247 PARAMETER Experiment Name: At_Far-red-induction_P Parameter: Tissue Value: Whole Plant
  misc_feature: MA Experiment ID: 20001248 Result: Up-regulated in Transcription
  misc_feature: MA Experiment 20001248 PARAMETER Experiment Name: At_Far-red-induction_P Parameter: Age (day) Value: 7
  misc_feature: MA Experiment 20001248 PARAMETER Experiment Name: At_Far-red-induction_P Parameter: Light Value: Far-red vs. White
  misc_feature: MA Experiment 20001248 PARAMETER Experiment Name: At_Far-red-induction_P Parameter: Organism Value: A. thaliana
  misc_feature: MA Experiment 20001248 PARAMETER Experiment Name: At_Far-red-induction_P Parameter: Plant Line Value: Columbia
  misc_feature: MA Experiment 20001248 PARAMETER Experiment Name: At_Far-red-induction_P Parameter: Timepoint (hr) Value: 4
  misc_feature: MA Experiment 20001248 PARAMETER Experiment Name: At_Far-red-induction_P Parameter: Tissue Value: Whole Plant
  misc_feature: MA Experiment ID: 20001450 Result: Up-regulated in Transcription
  misc_feature: MA Experiment 20001450 PARAMETER Experiment Name: At_Far-red-induction_P Parameter: Age (day) Value: 7
  misc_feature: MA Experiment 20001450 PARAMETER Experiment Name: At_Far-red-induction_P Parameter: Light Value: Far-red vs. White
  misc_feature: MA Experiment 20001450 PARAMETER Experiment Name: At_Far-red-induction_P Parameter: Organism Value: A. thaliana
  misc_feature: MA Experiment 20001450 PARAMETER Experiment Name: At_Far-red-induction_P Parameter: Plant Line Value: Columbia
  misc_feature: MA Experiment 20001450 PARAMETER Experiment Name: At_Far-red-induction_P Parameter: Timepoint (hr) Value: 8
  misc_feature: MA Experiment 20001450 PARAMETER Experiment Name: At_Far-red-induction_P Parameter: Tissue Value: Whole Plant
  misc_feature: MA Experiment ID: 20001557 Result: Up-regulated in Transcription
  misc_feature: MA Experiment 20001557 PARAMETER Experiment Name: At_Drought_Soil_Dry_P Parameter: Age (day) Value: 27
  misc_feature: MA Experiment 20001557 PARAMETER Experiment Name: At_Drought_Soil_Dry_P Parameter: Organism Value: A. thaliana
  misc_feature: MA Experiment 20001557 PARAMETER Experiment Name: At_Drought_Soil_Dry_P Parameter: Plant Line Value: WS
  misc_feature: MA Experiment 20001557 PARAMETER Experiment Name: At_Drought_Soil_Dry_P Parameter: Post Timepoint (hr) Value: 3
  misc_feature: MA Experiment 20001557 PARAMETER Experiment Name: At_Drought_Soil_Dry_P Parameter: Post-Treatment Value: Re-Water vs. No Drought
  misc_feature: MA Experiment 20001557 PARAMETER Experiment Name: At_Drought_Soil_Dry_P Parameter: Timepoint (day) Value: 13
  misc_feature: MA Experiment 20001557 PARAMETER Experiment Name: At_Drought_Soil_Dry_P Parameter: Treatment Value: Drought vs. No Drought
  misc_feature: MA Experiment ID: 20001558 Result: Up-regulated in Transcription
  misc_feature: MA Experiment 20001558 PARAMETER Experiment Name: At_Drought_Soil_Dry_P Parameter: Age (day) Value: 27
  misc_feature: MA Experiment 20001558 PARAMETER Experiment Name: At_Drought_Soil_Dry_P Parameter: Organism Value: A. thaliana
  misc_feature: MA Experiment 20001558 PARAMETER Experiment Name: At_Drought_Soil_Dry_P Parameter: Plant Line Value: WS
  misc_feature: MA Experiment 20001558 PARAMETER Experiment Name: At_Drought_Soil_Dry_P Parameter: Post Timepoint (hr) Value: 6
  misc_feature: MA Experiment 20001558 PARAMETER Experiment Name: At_Drought_Soil_Dry_P Parameter: Post-Treatment Value: Re-Water vs. No Drought
  misc_feature: MA Experiment 20001558 PARAMETER Experiment Name: At_Drought_Soil_Dry_P Parameter: Timepoint (day) Value: 13
  misc_feature: MA Experiment 20001558 PARAMETER Experiment Name: At_Drought_Soil_Dry_P Parameter: Treatment Value: Drought vs. No Drought
  misc_feature: MA Experiment ID: 20001560 Result: Up-regulated in Transcription
  misc_feature: MA Experiment 20001560 PARAMETER Experiment Name: At_Drought_Soil_Dry_P Parameter: Age (day) Value: 28
  misc_feature: MA Experiment 20001560 PARAMETER Experiment Name: At_Drought_Soil_Dry_P Parameter: Organism Value: A. thaliana
  misc_feature: MA Experiment 20001560 PARAMETER Experiment Name: At_Drought_Soil_Dry_P Parameter: Plant Line Value: WS
  misc_feature: MA Experiment 20001560 PARAMETER Experiment Name: At_Drought_Soil_Dry_P Parameter: Post Timepoint (hr) Value: None
  misc_feature: MA Experiment 20001560 PARAMETER Experiment Name: At_Drought_Soil_Dry_P Parameter: Post-Treatment Value: None
  misc_feature: MA Experiment 20001560 PARAMETER Experiment Name: At_Drought_Soil_Dry_P Parameter: Timepoint (day) Value: 14
  misc_feature: MA Experiment 20001560 PARAMETER Experiment Name: At_Drought_Soil_Dry_P Parameter: Treatment Value: Drought vs. No Drought
  misc_feature: MA Experiment ID: 20001906 Result: Down-regulated in Transcription
  misc_feature: MA Experiment 20001906 PARAMETER Experiment Name: At_Drought_Reproduction_P Parameter: Age (day) Value: 35
  misc_feature: MA Experiment 20001906 PARAMETER Experiment Name: At_Drought_Reproduction_P Parameter: Organism Value: A. thaliana
  misc_feature: MA Experiment 20001906 PARAMETER Experiment Name: At_Drought_Reproduction_P Parameter: Plant Line Value: WS
  misc_feature: MA Experiment 20001906 PARAMETER Experiment Name: At_Drought_Reproduction_P Parameter: Timepoint (day) Value: 5
  misc_feature: MA Experiment 20001906 PARAMETER Experiment Name: At_Drought_Reproduction_P Parameter: Tissue Value: Siliques
  misc_feature: MA Experiment 20001906 PARAMETER Experiment Name: At_Drought_Reproduction_P Parameter: Treatment Value: Drought vs. No Drought
aaatttaaatcttcattgaatgctttttctgaagctttatctaataaatctcttcgttgatccttcctttccattaacgaggtagaaattccaaaacgcgtaataatcttgtcgtcattacaaattacaataaaaagaagacatttttatttagatttccctctgatcctctcttttagatttcgaatcgagaccagatctgcgtgaagatgatagagaagtgtataggagcgcatcggtttcggagattacagagattcatgcgtcaagggaaagtgacgattctttgtctcgttctcaccgtcatcgtcttacgtggcacaatcggagccggtaagtttggtacgccggagaaagatatcgaggagatccgtgagcatttcttctacacgcgtaaacgcggcgagcctcaccgtgtcctcgtcgaggtctcttccaaaacgacgtcgtccgaagacggaggaaatggtggtaacagctacgagaccttcgatatcaacaagctattcgttgatgaaggagacgaagagaaatctcgagaccggactaataaaccttattctcttggtcccaagatctctgattgggatgagcagagacgtgattggctcaaacaaaaccctagcttccctaatttcgtggcgccaaacaagcctagggttcttcttgtcacaggttcagctcctaaaccgtgtgagaatcctgtaggagaccattacctcttgaaatcgattaagaacaaaatcgattactgtagaatacacggaatcgagatcttctacaacatggcgttgctcgatgctgagatggctggattctgggctaagcttccgttgattaggaagttactcttgtcacatcctgagattgagtttctatggtggatggatagtgatgccatgttcacggacatggtgttcgagcttccatgggagaggtacaaagattacaacttggtgatgcatggttggaacgagatggtttatgaccagaagaattggattggtctcaacacgggaagtttcttgctcaggaactcacagtggtcgcttgatcttcttgacgcttgggctcctatgggcccaaaagggaagatccgagaagaagcgggtaaagtcttgacccgggaacttaaagaccgacccgctttcgaagctgacgatcaatcggcgatggtttatctgctggcgacggagagagagaaatggggaggcaaagtttatctagagagtggttattacttgcacggttattgggggattttggtagaccggtacgaggagatgattgagaatcataaaccgggttttggagaccatcggtggccattggttacgcatttcgtcgggtgtaaaccgtgcgggaaatttggagattatccggtggaacggtgtctacggcagatggatagagcgtttaatttcggagacaatcagatccttcaaatgtatggtttcacgcataaatcgcttgggagccggcgcgtgaaacccacgcgcaatcagacggataggccgctcgatgccaaggacgagtttgggctgcttcatccgccgttcaaagcggccaagcttagtacgacgacgacgtgagtgagtgagaggatatattgttttgtatcttttaattttgcgtttaggggacacacgtttatttgttttattcaattttatttgtttgtagtttacttaattgttttgatctcccattcatggtggagtcgtgtatggagtatttaatgatttattgtagacgttatttc

SEQ ID NO: 107148 - protein, 460 aa, Arabidopsis thaliana; identical to SEQ ID NO: 39965
  peptide (1)..(460): Ceres Seq. ID no. 13621499
  misc_feature (147)..(391): Pfam Name: galactosyl transferase GMA12/MNN10 family Pfam Description: galactosyl transferase GMA12/MNN10 family
  misc_feature (1)..(460): Homolog of NCBI NO: 15228843 NR Description: transferase - related [Arabidopsis thaliana]
  misc_feature (1)..(457): Homolog of NCBI NO: 18411962 NR Description: transferase - related [Arabidopsis thaliana]
  misc_feature (1)..(454): Homolog of NCBI NO: 25349323 NR Description: probable glycosyltransferase [imported] - thaliana >gi|3892054|gb|AAC78266.1|AAC78266 putative [Arabidopsis thaliana] >gi|7269010|emb|CAB80743.1| putative
  misc_feature (105)..(449): Homolog of NCBI NO: 15221224 NR Description: transferase - related [Arabidopsis thaliana]
  misc_feature (10)..(108): Homolog of NCBI NO: 15221224 NR Description: transferase - related [Arabidopsis thaliana]
  misc_feature (114)..(445): Homolog of NCBI NO: 15240848 NR Description: transferase - related [Arabidopsis thaliana] putative golgi glycosyltransferase [Arabidopsis thaliana]
  misc_feature (10)..(82): Homolog of NCBI NO: 15240848 NR Description: transferase - related [Arabidopsis thaliana] putative golgi glycosyltransferase [Arabidopsis thaliana]
  misc_feature (114)..(445): Homolog of NCBI NO: 15221850 NR Description: transferase - related [Arabidopsis thaliana]
  misc_feature (114)..(445): Homolog of NCBI NO: 25349326 NR Description: hypothetical protein F6A14.20 - Arabidopsis >gi|6730715|gb|AAF27110.1|AC011809_19 Similar to
  misc_feature (89)..(359): Homolog of NCBI NO: 32127690 NR Description: galactomannan galactosyltransferase [Lotus

SEQ ID NO: 107149 - protein, 443 aa, Arabidopsis thaliana; identical to SEQ ID NO: 39966
  peptide (1)..(443): Ceres Seq. ID no. 13621500
  misc_feature (130)..(374): Pfam Name: galactosyl transferase GMA12/MNN10 family Pfam Description: galactosyl transferase GMA12/MNN10 family
  misc_feature (1)..(443): Homolog of NCBI NO: 15228843 NR Description: transferase - related [Arabidopsis thaliana]
  misc_feature (1)..(440): Homolog of NCBI NO: 18411962 NR Description: transferase - related [Arabidopsis thaliana]
  misc_feature (1)..(437): Homolog of NCBI NO: 25349323 NR Description: probable glycosyltransferase [imported] - thaliana >gi|3892054|gb|AAC78266.1|AAC78266 putative [Arabidopsis thaliana] >gi|7269010|emb|CAB80743.1| putative
  misc_feature (88)..(432): Homolog of NCBI NO: 15221224 NR Description: transferase - related [Arabidopsis thaliana]
  misc_feature (1)..(91): Homolog of NCBI NO: 15221224 NR Description: transferase - related [Arabidopsis thaliana]
  misc_feature (97)..(428): Homolog of NCBI NO: 15240848 NR Description: transferase - related [Arabidopsis thaliana] putative golgi glycosyltransferase [Arabidopsis thaliana]
  misc_feature (1)..(65): Homolog of NCBI NO: 15240848 NR Description: transferase - related [Arabidopsis thaliana] putative golgi glycosyltransferase [Arabidopsis thaliana]
  misc_feature (97)..(428): Homolog of NCBI NO: 15221850 NR Description: transferase - related [Arabidopsis thaliana]
  misc_feature (97)..(428): Homolog of NCBI NO: 25349326 NR Description: hypothetical protein F6A14.20 - Arabidopsis >gi|6730715|gb|AAF27110.1|AC011809_19 Similar to
  misc_feature (72)..(342): Homolog of NCBI NO: 32127690 NR Description: galactomannan galactosyltransferase [Lotus

SEQ ID NO: 107150 - protein, 268 aa, Arabidopsis thaliana; identical to SEQ ID NO: 39967
  peptide (1)..(268): Ceres Seq. ID no. 13621501
  misc_feature (1)..(199): Pfam Name: galactosyl transferase GMA12/MNN10 family Pfam Description: galactosyl transferase GMA12/MNN10 family
  misc_feature (1)..(268): Homolog of NCBI NO: 15228843 NR Description: transferase - related [Arabidopsis thaliana]
  misc_feature (1)..(265): Homolog of NCBI NO: 18411962 NR Description: transferase - related [Arabidopsis thaliana]
  misc_feature (1)..(262): Homolog of NCBI NO: 25349323 NR Description: probable glycosyltransferase [imported] - thaliana >gi|3892054|gb|AAC78266.1|AAC78266 putative [Arabidopsis thaliana] >gi|7269010|emb|CAB80743.1| putative
  misc_feature (1)..(257): Homolog of NCBI NO: 15221224 NR Description: transferase - related [Arabidopsis thaliana]
  misc_feature (1)..(253): Homolog of NCBI NO: 15240848 NR Description: transferase - related [Arabidopsis thaliana] putative golgi glycosyltransferase [Arabidopsis thaliana]
  misc_feature (1)..(253): Homolog of NCBI NO: 15221850 NR Description: transferase - related [Arabidopsis thaliana]
  misc_feature (1)..(253): Homolog of NCBI NO: 25349326 NR Description: hypothetical protein F6A14.20 - Arabidopsis >gi|6730715|gb|AAF27110.1|AC011809_19 Similar to
  misc_feature (1)..(167): Homolog of NCBI NO: 32127690 NR Description: galactomannan galactosyltransferase [Lotus
  misc_feature (162)..(236): Homolog of NCBI NO: 32127690 NR Description: galactomannan galactosyltransferase [Lotus
  misc_feature (1)..(171): Homolog of NCBI NO: 25486551 NR Description: alpha galactosyltransferase (EC 2.4.1.-)

SEQ ID NO: 107151 - DNA, 1698 bp, Arabidopsis thaliana
  misc_feature (1)..(1698): Ceres Seq. ID no. 13621506
  misc_feature: MA Experiment ID: 20000307 Result: Up-regulated in Transcription
  misc_feature: MA Experiment 20000307 PARAMETER Experiment Name: At_Germinating_Seeds_Sub_P Parameter: Age (hr) Value: 24 vs. 0
  misc_feature: MA Experiment 20000307 PARAMETER Experiment Name: At_Germinating_Seeds_Sub_P Parameter: Organism Value: A. thaliana
  misc_feature: MA Experiment 20000307 PARAMETER Experiment Name: At_Germinating_Seeds_Sub_P Parameter: Plant Line Value: WS
  misc_feature: MA Experiment 20000307 PARAMETER Experiment Name: At_Germinating_Seeds_Sub_P Parameter: Tissue Value: Germinating Seeds
actctctcgttcaaggtccgactcagttcccggcgagttcgactcggtgattgattttttcctagaaaaataaaatttcttcttaacgattgatcgattttggttttctatctttcgattctagatctagaattcaatttgtgaggtttggagatggcgagcgagctgatcaatcggcgacacgagacggatcaaccaaccgccgatgcttattacccgaaaccaatcaaaccatggttcacggtgactcgtccgatgcgttacatgctccgtgaacagagacttatcttcgttctcgttggcattgcaatcgctactttggttttcacaattttccctcgctccacacaatcaaccccttactcggatcctttctccggttacggaatccgacccgacgaatcgtacgttccggctatacaagctcagaggaaacctagcctcgagtacctgaaccggatcggagcaacaggcgggaaaatcccactgggattgaaacgcaaagggctaagagtggttgtgaccggtggtgctggattcgttggatcgcatctcgtggatcgtttgatggctagaggagatactgtgattgttgttgataatttcttcactggaaggaaagagaacgttatgcaccatttcagtaaccctaactttgagatgatccgtcacgatgtggttgagccgattcttcttgaggttgatcagatctaccatttggcttgccctgcttctcctgttcattacaaattcaatcccgtcaagactatcataacgaatgtggttggaacattgaacatgcttggtttggctaagcgagttggggctagatttcttctgacgagtaccagtgaggtttatggtgatcctctgcagcatcctcaggttgagacttactggggcaacgttaatcccattggtgttcgtagttgctacgatgaaggaaaacgtacggcagagacgttgaccatggactatcaccgaggtgccaatgttgaggtcagaattgctaggatcttcaacacctatggtccaagaatgtgtatagatgatgggcgtgttgttagtaacttcgttgcacaggcactaaggaaagagccattgactgtttacggtgatgggaagcagacaaggagtttccaatttgtttctgatctggttgaaggtttgatgagactgatggaaggagaacatgtcggcccattcaacctcggtaaccctggtgaattcacgatgctcgagctcgctaaggtggtccaagagacaattgatccgaatgcaaacatagagttcagaccaaacacagaagacgaccctcacaagagaaagcctgacatcacaaaggccaaagagcttttaggttgggaaccaaaggtctctcttcgtcagggactgcctctcatggtcaaagatttccgtcaacgtgtctttggtgaccagaaggaaggctcctccgcagctgcaaccaccaccaagacaacttcagcttgagcaaatgcagaatctgagtagcagccactgcggctggtagtgggtttataacaaaattgcaagagcgtcgtttctttaaatttatttcgcttttgatttctgttttgataatcgtgtaaacgtagagtaagaatttggtacctttacttactactattcatggacctcactacagttttaaaagaaaaaagaacttctcttttgata

SEQ ID NO: 107152 - protein, 445 aa, Arabidopsis thaliana
  peptide (1)..(445): Ceres Seq. ID no. 13621507
  misc_feature (121)..(425): Pfam Name: NAD dependent epimerase/dehydratase family Pfam Description: NAD dependent epimerase/dehydratase family
  misc_feature (1)..(445): Homolog of NCBI NO: 15229334 NR Description: NAD-dependent epimerase/dehydratase family
  misc_feature (1)..(445): Homolog of NCBI NO: 2129578 NR Description: dTDP-glucose 4-6-dehydratase homolog D18 -
  misc_feature (1)..(441): Homolog of NCBI NO: 15227109 NR Description: NAD-dependent epimerase/dehydratase family
  misc_feature (1)..(432): Homolog of NCBI NO: 17473549 NR Description: dTDP-glucose 4-6-dehydratase-like protein
  misc_feature (1)..(432): Homolog of NCBI NO: 11270116 NR Description: dTDP-glucose 4-6-dehydratase-like protein -
  misc_feature (77)..(428): Homolog of NCBI NO: 25396402 NR Description: UDP-glucuronic acid decarboxylase [Oryza sativa
  misc_feature (37)..(71): Homolog of NCBI NO: 25396402 NR Description: UDP-glucuronic acid decarboxylase [Oryza sativa
  misc_feature (1)..(432): Homolog of NCBI NO: 30693847 NR Description: NAD-dependent epimerase/dehydratase family
  misc_feature (207)..(428): Homolog of NCBI NO: 34908082 NR Description: P0506B12.30 [Oryza sativa (japonica
  misc_feature (77)..(167): Homolog of NCBI NO: 34908082 NR Description: P0506B12.30 [Oryza sativa (japonica
MASELINRRHETDQPTADAYYPKPIKPWFTVTRPMRYMLREQRLIFVLVGIAIATLVFTIFPRSTQSTPYSDPFSGYGIRPDESYVPAIQAQRKPSLEYLNRIGATGGKIPLGLKRKGLRVVVTGGAGFVGSHLVDRLMARGDTVIVVDNFFTGRKENVMHHFSNPNFEMIRHDVVEPILLEVDQIYHLACPASPVHYKFNPVKTIITNVVGTLNMLGLAKRVGARFLLTSTSEVYGDPLQHPQVETYWGNVNPIGVRSCYDEGKRTAETLTMDYHRGANVEVRIARIFNTYGPRMCIDDGRVVSNFVAQALRKEPLTVYGDGKQTRSFQFVSDLVEGLMRLMEGEHVGPFNLGNPGEFTMLELAKVVQETIDPNANIEFRPNTEDDPHKRKPDITKAKELLGWEPKVSLRQGLPLMVKDFRQRVFGDQKEGSSAAATTTKTTSA

SEQ ID NO: 107153 - protein, 411 aa, Arabidopsis thaliana
  peptide (1)..(411): Ceres Seq. ID no. 13621508
  misc_feature (87)..(391): Pfam Name: NAD dependent epimerase/dehydratase family Pfam Description: NAD dependent epimerase/dehydratase family
  misc_feature (1)..(411): Homolog of NCBI NO: 15229334 NR Description: NAD-dependent epimerase/dehydratase family
  misc_feature (1)..(411): Homolog of NCBI NO: 2129578 NR Description: dTDP-glucose 4-6-dehydratase homolog D18 -
  misc_feature (1)..(407): Homolog of NCBI NO: 15227109 NR Description: NAD-dependent epimerase/dehydratase family
  misc_feature (1)..(398): Homolog of NCBI NO: 17473549 NR Description: dTDP-glucose 4-6-dehydratase-like protein
  misc_feature (1)..(398): Homolog of NCBI NO: 11270116 NR Description: dTDP-glucose 4-6-dehydratase-like protein -
  misc_feature (43)..(394): Homolog of NCBI NO: 25396402 NR Description: UDP-glucuronic acid decarboxylase [Oryza sativa
  misc_feature (3)..(37): Homolog of NCBI NO: 25396402 NR Description: UDP-glucuronic acid decarboxylase [Oryza sativa
  misc_feature (1)..(398): Homolog of NCBI NO: 30693847 NR Description: NAD-dependent epimerase/dehydratase family
  misc_feature (173)..(394): Homolog of NCBI NO: 34908082 NR Description: P0506B12.30 [Oryza sativa (japonica
  misc_feature (43)..(133): Homolog of NCBI NO: 34908082 NR Description: P0506B12.30 [Oryza sativa (japonica
MRYMLREQRLIFVLVGIAIATLVFTIFPRSTQSTPYSDPFSGYGIRPDESYVPAIQAQRKPSLEYLNRIGATGGKIPLGLKRKGLRVVVTGGAGFVGSHLVDRLMARGDTVIVVDNFFTGRKENVMHHFSNPNFEMIRHDVVEPILLEVDQIYHLACPASPVHYKFNPVKTIITNVVGTLNMLGLAKRVGARFLLTSTSEVYGDPLQHPQVETYWGNVNPIGVRSCYDEGKRTAETLTMDYHRGANVEVRIARIFNTYGPRMCIDDGRVVSNFVAQALRKEPLTVYGDGKQTRSFQFVSDLVEGLMRLMEGEHVGPFNLGNPGEFTMLELAKVVQETIDPNANIEFRPNTEDDPHKRKPDITKAKELLGWEPKVSLRQGLPLMVKDFRQRVFGDQKEGSSAAATTTKTTSA

SEQ ID NO: 107154 - protein, 408 aa, Arabidopsis thaliana
  peptide (1)..(408): Ceres Seq. ID no. 13621509
  misc_feature (84)..(388): Pfam Name: NAD dependent epimerase/dehydratase family Pfam Description: NAD dependent epimerase/dehydratase family
  misc_feature (1)..(408): Homolog of NCBI NO: 15229334 NR Description: NAD-dependent epimerase/dehydratase family
  misc_feature (1)..(408): Homolog of NCBI NO: 2129578 NR Description: dTDP-glucose 4-6-dehydratase homolog D18 -
  misc_feature (1)..(404): Homolog of NCBI NO: 15227109 NR Description: NAD-dependent epimerase/dehydratase family
  misc_feature (1)..(395): Homolog of NCBI NO: 17473549 NR Description: dTDP-glucose 4-6-dehydratase-like protein
  misc_feature (1)..(395): Homolog of NCBI NO: 11270116 NR Description: dTDP-glucose 4-6-dehydratase-like protein -
  misc_feature (40)..(391): Homolog of NCBI NO: 25396402 NR Description: UDP-glucuronic acid decarboxylase [Oryza sativa
  misc_feature (1)..(34): Homolog of NCBI NO: 25396402 NR Description: UDP-glucuronic acid decarboxylase [Oryza sativa
  misc_feature (1)..(395): Homolog of NCBI NO: 30693847 NR Description: NAD-dependent epimerase/dehydratase family
  misc_feature (170)..(391): Homolog of NCBI NO: 34908082 NR Description: P0506B12.30 [Oryza sativa (japonica
  misc_feature (40)..(130): Homolog of NCBI NO: 34908082 NR Description: P0506B12.30 [Oryza sativa (japonica
MLREQRLIFVLVGIAIATLVFTIFPRSTQSTPYSDPFSGYGIRPDESYVPAIQAQRKPSLEYLNRIGATGGKIPLGLKRKGLRVVVTGGAGFVGSHLVDRLMARGDTVIVVDNFFTGRKENVMHHFSNPNFEMIRHDVVEPILLEVDQIYHLACPASPVHYKFNPVKTIITNVVGTLNMLGLAKRVGARFLLTSTSEVYGDPLQHPQVETYWGNVNPIGVRSCYDEGKRTAETLTMDYHRGANVEVRIARIFNTYGPRMCIDDGRVVSNFVAQALRKEPLTVYGDGKQTRSFQFVSDLVEGLMRLMEGEHVGPFNLGNPGEFTMLELAKVVQETIDPNANIEFRPNTEDDPHKRKPDITKAKELLGWEPKVSLRQGLPLMVKDFRQRVFGDQKEGSSAAATTTKTTSA

SEQ ID NO: 107155 - DNA, 1047 bp, Arabidopsis thaliana
  misc_feature (1)..(1047): Ceres Seq. ID no. 13621510
  misc_feature: MA Experiment ID: 108433 Result: Up-regulated in Transcription
  misc_feature: MA Experiment 108433 PARAMETER Experiment Name: At_rhl_Mutant2_cDNA_P Parameter: Age (day) Value: 7
  misc_feature: MA Experiment 108433 PARAMETER Experiment Name: At_rhl_Mutant2_cDNA_P Parameter: Organism Value: A. thaliana
  misc_feature: MA Experiment 108433 PARAMETER Experiment Name: At_rhl_Mutant2_cDNA_P Parameter: Plant Line Value: rhl Mutant vs. wt landsburg
  misc_feature: MA Experiment 108433 PARAMETER Experiment Name: At_rhl_Mutant2_cDNA_P Parameter: Tissue Value: Roots
  misc_feature: MA Experiment ID: 108464 Result: Down-regulated in Transcription
  misc_feature: MA Experiment 108464 PARAMETER Experiment Name: At_Germinating_Seeds_cDNA_P Parameter: Age (day) Value: 4 vs. 0
  misc_feature: MA Experiment 108464 PARAMETER Experiment Name: At_Germinating_Seeds_cDNA_P Parameter: Tissue Value: Germinating Seeds
  misc_feature: MA Experiment ID: 108574 Result: Down-regulated in Transcription
  misc_feature: MA Experiment 108574 PARAMETER Experiment Name: At_Wounding__cDNA_P Parameter: Timepoint (hr) Value: 1
  misc_feature: MA Experiment 108574 PARAMETER Experiment Name: At_Wounding__cDNA_P Parameter: Tissue Value: Aerial
  misc_feature: MA Experiment 108574 PARAMETER Experiment Name: At_Wounding__cDNA_P Parameter: Treatment Value: Wounding vs. No Wounding
  misc_feature: MA Experiment ID: 108577 Result: Down-regulated in Transcription
  misc_feature: MA Experiment 108577 PARAMETER Experiment Name: At_42deg_Heat_cDNA_P Parameter: Temperature (deg C) Value: 42 vs. 22
  misc_feature: MA Experiment 108577 PARAMETER Experiment Name: At_42deg_Heat_cDNA_P Parameter: Timepoint (hr) Value: 6
  misc_feature: MA Experiment 108577 PARAMETER Experiment Name: At_42deg_Heat_cDNA_P Parameter: Tissue Value: Aerial
  misc_feature: MA Experiment ID: 108579 Result: Down-regulated in Transcription
  misc_feature: MA Experiment 108579 PARAMETER Experiment Name: At_4deg_Cold_cDNA_P Parameter: Temperature (deg C) Value: 4 vs. 22
  misc_feature: MA Experiment 108579 PARAMETER Experiment Name: At_4deg_Cold_cDNA_P Parameter: Timepoint (hr) Value: 6
  misc_feature: MA Experiment 108579 PARAMETER Experiment Name: At_4deg_Cold_cDNA_P Parameter: Tissue Value: Aerial
  misc_feature: MA Experiment ID: 108595 Result: Down-regulated in Transcription
  misc_feature: MA Experiment 108595 PARAMETER Experiment Name: At_Ler-pi_Ovule_cDNA_P Parameter: Plant Line Value: null
  misc_feature: MA Experiment ID: 20000224 Result: Down-regulated in Transcription
  misc_feature: MA Experiment ID: 20000306 Result: Up-regulated in Transcription
  misc_feature: MA Experiment 20000306 PARAMETER Experiment Name: At_Germinating_Seeds_Sub_P Parameter: Age (hr) Value: 6 vs. 0
  misc_feature: MA Experiment 20000306 PARAMETER Experiment Name: At_Germinating_Seeds_Sub_P Parameter: Organism Value: A. thaliana
  misc_feature: MA Experiment 20000306 PARAMETER Experiment Name: At_Germinating_Seeds_Sub_P Parameter: Plant Line Value: WS
  misc_feature: MA Experiment 20000306 PARAMETER Experiment Name: At_Germinating_Seeds_Sub_P Parameter: Tissue Value: Germinating Seeds
  misc_feature: MA Experiment ID: 20000314 Result: Up-regulated in Transcription
  misc_feature: MA Experiment 20000314 PARAMETER Experiment Name: At_14day_Shoots-Roots_Sub_P Parameter: Age (day) Value: 14
  misc_feature: MA Experiment 20000314 PARAMETER Experiment Name: At_14day_Shoots-Roots_Sub_P Parameter: Organism Value: A. thaliana
  misc_feature: MA Experiment 20000314 PARAMETER Experiment Name: At_14day_Shoots-Roots_Sub_P Parameter: Plant Line Value: WS
  misc_feature: MA Experiment 20000314 PARAMETER Experiment Name: At_14day_Shoots-Roots_Sub_P Parameter: Tissue Value: Roots vs. Whole Plant
  misc_feature: MA Experiment ID: 20000329 Result: Down-regulated in Transcription
  misc_feature: MA Experiment 20000329 PARAMETER Experiment Name: At_4deg_Cold_Sub_P Parameter: Age (day) Value: 14
  misc_feature: MA Experiment 20000329 PARAMETER Experiment Name: At_4deg_Cold_Sub_P Parameter: Organism Value: A. thaliana
  misc_feature: MA Experiment 20000329 PARAMETER Experiment Name: At_4deg_Cold_Sub_P Parameter: Plant Line Value: WS
  misc_feature: MA Experiment 20000329 PARAMETER Experiment Name: At_4deg_Cold_Sub_P Parameter: Temperature (deg C) Value: 4 vs. 22
  misc_feature: MA Experiment 20000329 PARAMETER Experiment Name: At_4deg_Cold_Sub_P Parameter: Timepoint (hr) Value: 6
  misc_feature: MA Experiment 20000329 PARAMETER Experiment Name: At_4deg_Cold_Sub_P Parameter: Tissue Value: Aerial
  misc_feature: MA Experiment ID: 20000332 Result: Down-regulated in Transcription
  misc_feature: MA Experiment 20000332 PARAMETER Experiment Name: At_4deg_Cold_Sub_P Parameter: Age (day) Value: 14
  misc_feature: MA Experiment 20000332 PARAMETER Experiment Name: At_4deg_Cold_Sub_P Parameter: Organism Value: A. thaliana
  misc_feature: MA Experiment 20000332 PARAMETER Experiment Name: At_4deg_Cold_Sub_P Parameter: Plant Line Value: WS
  misc_feature: MA Experiment 20000332 PARAMETER Experiment Name: At_4deg_Cold_Sub_P Parameter: Temperature (deg C) Value: 4 vs. 22
  misc_feature: MA Experiment 20000332 PARAMETER Experiment Name: At_4deg_Cold_Sub_P Parameter: Timepoint (hr) Value: 2
  misc_feature: MA Experiment 20000332 PARAMETER Experiment Name: At_4deg_Cold_Sub_P Parameter: Tissue Value: Aerial
atgatgaagttcaagttccagtacgaggaggaatacatcaaaaactcgagagacgttgagttgttcgcttgcagatggcttccttcttcttctccccgagctctagtcttcctctgccatggttatggaatggagtgcagtagcttcatgagagaatgcggaatacggctggcatcagcgggatatgcagtgtttgggatggactacgaggggcatggtcggtccaagggtgctcgttgctatataaaaaaattcagtaatatagtaaatgactgctttgactattacacatccatctctgcacaagaagaatacaaagagaaaggtagatttttgtatggagaatcaatgggaggtgcagttgctttgttgcttcacaagaaagatccttctttttggaacggggctcttctcgttgctcccatgtgtaagatatcagagaaggtgaaaccacacccagtagtcataaatctactaacgagagttgaagatattataccaaaatggaagatagttcctacaaaagatgttatcgatgctgccttcaaggatccggtcaagcgcgaagagataaggaacaacaagctgatatatcaagacaagccaagacttaaaaccgcacttgaaatgcttagaacgagcatggaccttgaagacactctccacgagatcacattgcctttctttgtccttcacggtgaagcagacattgtgactgatccagagataagcaaagccttgttcgagaaggcaagcacacgcgacaaaaccattaaactttacccaggaatgtggcatggattaacttctggtgagcctgatgctaacgttgacctcgtttttgctgacattgtcaattggcttgatgctcgtaccggcgactccgcttctctgacagtcactcccgtacatgattttacctccaatgttcaaaaggtcgttgacggtgttagtaacggtcaaggaaaatctaaacgaccacaagctagtctcctttgtggtttaaatggtggtggacgtcgtttggtccatagatcttctatgtaa

SEQ ID NO: 107156 - protein, 348 aa, Arabidopsis thaliana
  peptide (1)..(348): Ceres Seq. ID no. 13621511
  misc_feature (62)..(282): Pfam Name: alpha/beta hydrolase fold Pfam Description: alpha/beta hydrolase fold
  misc_feature (1)..(348): Homolog of NCBI NO: 30695682 NR Description: esterase/lipase/thioesterase family [Arabidopsis
  misc_feature (1)..(348): Homolog of NCBI NO: 18407407 NR Description: esterase/lipase/thioesterase family [Arabidopsis >gi|16323214|gb|AAL15341.1| At2g47630/F17A22.2 [Arabidopsis >gi|20196967|gb|AAM14848.1| putative phospholipase [Arabidopsis
  misc_feature (44)..(348): Homolog of NCBI NO: 21592863 NR Description: putative phospholipase [Arabidopsis thaliana]
  misc_feature (52)..(348): Homolog of NCBI NO: 7487574 NR Description: probable phospholipase [imported] - Arabidopsis
  misc_feature (9)..(348): Homolog of NCBI NO: 34894592 NR Description: phospholipase-like protein [Oryza sativa
  misc_feature (117)..(342): Homolog of NCBI NO: 11357678 NR Description: hypothetical protein F26K9.290 - Arabidopsis (fragment) >gi|7362766|emb|CAB83136.1| putative protein
  misc_feature (7)..(317): Homolog of NCBI NO: 7487948 NR Description: lysophospholipase homolog F12L6.8 - Arabidopsis >gi|3355471|gb|AAC27833.1| putative phospholipase [Arabidopsis >gi|13877687|gb|AAK43921.1|AF370602_1 putative phospholipase
  misc_feature (7)..(317): Homolog of NCBI NO: 30687883 NR Description: esterase/lipase/thioesterase family [Arabidopsis >gi|19423964|gb|AAL87258.1| putative phospholipase [Arabidopsis >gi|21689759|gb|AAM67523.1| putative phospholipase [Arabidopsis
  misc_feature (7)..(292): Homolog of NCBI NO: 30687879 NR Description: hydrolase, alpha/beta fold family [Arabidopsis >gi|20197113|gb|AAC27832.2| putative phospholipase; alternative
  misc_feature (12)..(292): Homolog of NCBI NO: 7487947 NR Description: lysophospholipase homolog F12L6.7 - Arabidopsis
MMKFKFQYEEEYIKNSRDVELFACRWLPSSSPRALVFLCHGYGMECSSFMRECGIRLASAGYAVFGMDYEGHGRSKGARCYIKKFSNIVNDCFDYYTSISAQEEYKEKGRFLYGESMGGAVALLLHKKDPSFWNGALLVAPMCKISEKVKPHPVVINLLTRVEDIIPKWKIVPTKDVIDAAFKDPVKREEIRNNKLIYQDKPRLKTALEMLRTSMDLEDTLHEITLPFFVLHGEADIVTDPEISKALFEKASTRDKTIKLYPGMWHGLTSGEPDANVDLVFADIVNWLDARTGDSASLTVTPVHDFTSNVQKVVDGVSNGQGKSKRPQASLLCGLNGGGRRLVHRSSM

SEQ ID NO: 107157 - protein, 347 aa, Arabidopsis thaliana
  peptide (1)..(347): Ceres Seq. ID no. 13621512
  misc_feature (61)..(281): Pfam Name: alpha/beta hydrolase fold Pfam Description: alpha/beta hydrolase fold
  misc_feature (1)..(347): Homolog of NCBI NO: 30695682 NR Description: esterase/lipase/thioesterase family [Arabidopsis
  misc_feature (1)..(347): Homolog of NCBI NO: 18407407 NR Description: esterase/lipase/thioesterase family [Arabidopsis >gi|16323214|gb|AAL15341.1| At2g47630/F17A22.2 [Arabidopsis >gi|20196967|gb|AAM14848.1| putative phospholipase [Arabidopsis
  misc_feature (43)..(347): Homolog of NCBI NO: 21592863 NR Description: putative phospholipase [Arabidopsis thaliana]
  misc_feature (51)..(347): Homolog of NCBI NO: 7487574 NR Description: probable phospholipase [imported] - Arabidopsis
  misc_feature (8)..(347): Homolog of NCBI NO: 34894592 NR Description: phospholipase-like protein [Oryza sativa
  misc_feature (116)..(341): Homolog of NCBI NO: 11357678 NR Description: hypothetical protein F26K9.290 - Arabidopsis (fragment) >gi|7362766|emb|CAB83136.1| putative protein
  misc_feature (6)..(316): Homolog of NCBI NO: 7487948 NR Description: lysophospholipase homolog F12L6.8 - Arabidopsis >gi|3355471|gb|AAC27833.1| putative phospholipase [Arabidopsis >gi|13877687|gb|AAK43921.1|AF370602_1 putative phospholipase
  misc_feature (6)..(316): Homolog of NCBI NO: 30687883 NR Description: esterase/lipase/thioesterase family [Arabidopsis >gi|19423964|gb|AAL87258.1| putative phospholipase [Arabidopsis >gi|21689759|gb|AAM67523.1| putative phospholipase [Arabidopsis
  misc_feature (6)..(291): Homolog of NCBI NO: 30687879 NR Description: hydrolase, alpha/beta fold family [Arabidopsis >gi|20197113|gb|AAC27832.2| putative phospholipase; alternative
  misc_feature (11)..(291): Homolog of NCBI NO: 7487947 NR Description: lysophospholipase homolog F12L6.7 - Arabidopsis
MKFKFQYEEEYIKNSRDVELFACRWLPSSSPRALVFLCHGYGMECSSFMRECGIRLASAGYAVFGMDYEGHGRSKGARCYIKKFSNIVNDCFDYYTSISAQEEYKEKGRFLYGESMGGAVALLLHKKDPSFWNGALLVAPMCKISEKVKPHPVVINLLTRVEDIIPKWKIVPTKDVIDAAFKDPVKREEIRNNKLIYQDKPRLKTALEMLRTSMDLEDTLHEITLPFFVLHGEADIVTDPEISKALFEKASTRDKTIKLYPGMWHGLTSGEPDANVDLVFADIVNWLDARTGDSASLTVTPVHDFTSNVQKVVDGVSNGQGKSKRPQASLLCGLNGGGRRLVHRSSM

SEQ ID NO: 107158 - protein, 305 aa, Arabidopsis thaliana
  peptide (1)..(305): Ceres Seq. ID no. 13621513
  misc_feature (19)..(239): Pfam Name: alpha/beta hydrolase fold Pfam Description: alpha/beta hydrolase fold
  misc_feature (1)..(305): Homolog of NCBI NO: 30695682 NR Description: esterase/lipase/thioesterase family [Arabidopsis
  misc_feature (1)..(305): Homolog of NCBI NO: 18407407 NR Description: esterase/lipase/thioesterase family [Arabidopsis >gi|16323214|gb|AAL15341.1| At2g47630/F17A22.2 [Arabidopsis >gi|20196967|gb|AAM14848.1| putative phospholipase [Arabidopsis
  misc_feature (1)..(305): Homolog of NCBI NO: 21592863 NR Description: putative phospholipase [Arabidopsis thaliana]
  misc_feature (9)..(305): Homolog of NCBI NO: 7487574 NR Description: probable phospholipase [imported] - Arabidopsis
  misc_feature (1)..(305): Homolog of NCBI NO: 34894592 NR Description: phospholipase-like protein [Oryza sativa
  misc_feature (74)..(299): Homolog of NCBI NO: 11357678 NR Description: hypothetical protein F26K9.290 - Arabidopsis (fragment) >gi|7362766|emb|CAB83136.1| putative protein
  misc_feature (1)..(274): Homolog of NCBI NO: 7487948 NR Description: lysophospholipase homolog F12L6.8 - Arabidopsis >gi|3355471|gb|AAC27833.1| putative phospholipase [Arabidopsis >gi|13877687|gb|AAK43921.1|AF370602_1 putative phospholipase
  misc_feature (1)..(274): Homolog of NCBI NO: 30687883 NR Description: esterase/lipase/thioesterase family [Arabidopsis >gi|19423964|gb|AAL87258.1| putative phospholipase [Arabidopsis >gi|21689759|gb|AAM67523.1| putative phospholipase [Arabidopsis
  misc_feature (1)..(249): Homolog of NCBI NO: 30687879 NR Description: hydrolase, alpha/beta fold family [Arabidopsis >gi|20197113|gb|AAC27832.2| putative phospholipase; alternative
  misc_feature (1)..(249): Homolog of NCBI NO: 7487947 NR Description: lysophospholipase homolog F12L6.7 - Arabidopsis
MECSSFMRECGIRLASAGYAVFGMDYEGHGRSKGARCYIKKFSNIVNDCFDYYTSISAQEEYKEKGRFLYGESMGGAVALLLHKKDPSFWNGALLVAPMCKISEKVKPHPVVINLLTRVEDIIPKWKIVPTKDVIDAAFKDPVKREEIRNNKLIYQDKPRLKTALEMLRTSMDLEDTLHEITLPFFVLHGEADIVTDPEISKALFEKASTRDKTIKLYPGMWHGLTSGEPDANVDLVFADIVNWLDARTGDSASLTVTPVHDFTSNVQKVVDGVSNGQGKSKRPQASLLCGLNGGGRRLVHRSSM

SEQ ID NO: 107159 - DNA, 2321 bp, Arabidopsis thaliana
  misc_feature (1)..(2321): Ceres Seq. ID no. 13621516
  misc_feature: MA Experiment ID: 108434 Result: Up-regulated in Transcription
  misc_feature: MA Experiment 108434 PARAMETER Experiment Name: At_Root_Tips_cDNA_P Parameter: Tissue Value: Root Tips
  misc_feature: MA Experiment ID: 108573 Result: Up-regulated in Transcription
  misc_feature: MA Experiment 108573 PARAMETER Experiment Name: At_Drought_cDNA_P Parameter: Timepoint (hr) Value: 6
  misc_feature: MA Experiment 108573 PARAMETER Experiment Name: At_Drought_cDNA_P Parameter: Tissue Value: Aerial
  misc_feature: MA Experiment 108573 PARAMETER Experiment Name: At_Drought_cDNA_P Parameter: Treatment Value: Drought vs. No Drought
  misc_feature: MA Experiment ID: 108577 Result: Down-regulated in Transcription
  misc_feature: MA Experiment 108577 PARAMETER Experiment Name: At_42deg_Heat_cDNA_P Parameter: Temperature (deg C) Value: 42 vs. 22
  misc_feature: MA Experiment 108577 PARAMETER Experiment Name: At_42deg_Heat_cDNA_P Parameter: Timepoint (hr) Value: 6
  misc_feature: MA Experiment 108577 PARAMETER Experiment Name: At_42deg_Heat_cDNA_P Parameter: Tissue Value: Aerial
  misc_feature: MA Experiment ID: 108579 Result: Down-regulated in Transcription
  misc_feature: MA Experiment 108579 PARAMETER Experiment Name: At_4deg_Cold_cDNA_P Parameter: Temperature (deg C) Value: 4 vs. 22
  misc_feature: MA Experiment 108579 PARAMETER Experiment Name: At_4deg_Cold_cDNA_P Parameter: Timepoint (hr) Value: 6
  misc_feature: MA Experiment 108579 PARAMETER Experiment Name: At_4deg_Cold_cDNA_P Parameter: Tissue Value: Aerial
  misc_feature: MA Experiment ID: 108585 Result: Up-regulated in Transcription
  misc_feature: MA Experiment 108585 PARAMETER Experiment Name: At_5mM_NaNP_cDNA_P Parameter: Timepoint (hr) Value: 6
  misc_feature: MA Experiment 108585 PARAMETER Experiment Name: At_5mM_NaNP_cDNA_P Parameter: Tissue Value: Aerial
  misc_feature: MA Experiment 108585 PARAMETER Experiment Name: At_5mM_NaNP_cDNA_P Parameter: Treatment Value: null
  misc_feature: MA Experiment ID: 108595 Result: Down-regulated in Transcription
  misc_feature: MA Experiment 108595 PARAMETER Experiment Name: At_Ler-pi_Ovule_cDNA_P Parameter: Plant Line Value: null
  misc_feature: MA Experiment ID: 20000087 Result: Down-regulated in Transcription
  misc_feature: MA Experiment 20000087 PARAMETER Experiment Name: At_100uM_ABA_Mutants_cDNA_P Parameter: Plant Line Value: WS
  misc_feature: MA Experiment 20000087 PARAMETER Experiment Name: At_100uM_ABA_Mutants_cDNA_P Parameter: Timepoint (hr) Value: 6
  misc_feature: MA Experiment 20000087 PARAMETER Experiment Name: At_100uM_ABA_Mutants_cDNA_P Parameter: Tissue Value: Aerial
  misc_feature: MA Experiment 20000087 PARAMETER Experiment Name: At_100uM_ABA_Mutants_cDNA_P Parameter: Treatment Value: 100uM ABA vs. No Treatment
  misc_feature: MA Experiment ID: 20000113 Result: Down-regulated in Transcription
  misc_feature: MA Experiment 20000113 PARAMETER Experiment Name: At_42deg_Heat_cDNA_P Parameter: Temperature (deg C) Value: 42 vs. 22
  misc_feature: MA Experiment 20000113 PARAMETER Experiment Name: At_42deg_Heat_cDNA_P Parameter: Timepoint (hr) Value: 8
  misc_feature: MA Experiment 20000113 PARAMETER Experiment Name: At_42deg_Heat_cDNA_P Parameter: Tissue Value: Aerial
  misc_feature: MA Experiment ID: 20000224 Result: Down-regulated in Transcription
  misc_feature: MA Experiment ID: 20001451 Result: Up-regulated in Transcription
  misc_feature: MA Experiment 20001451 PARAMETER Experiment Name: At_Far-red-induction_P Parameter: Age (day) Value: 7
  misc_feature: MA Experiment 20001451 PARAMETER Experiment Name: At_Far-red-induction_P Parameter: Light Value: Far-red vs. White
  misc_feature: MA Experiment 20001451 PARAMETER Experiment Name: At_Far-red-induction_P Parameter: Organism Value: A. thaliana
  misc_feature: MA Experiment 20001451 PARAMETER Experiment Name: At_Far-red-induction_P Parameter: Plant Line Value: Columbia
  misc_feature: MA Experiment 20001451 PARAMETER Experiment Name: At_Far-red-induction_P Parameter: Timepoint (hr) Value: 24
  misc_feature: MA Experiment 20001451 PARAMETER Experiment Name: At_Far-red-induction_P Parameter: Tissue Value: Whole Plant
actctctctctctctctatctatcttcttcatctttgtttcagcttctcctttgaaactagattatctccgttaatggcgcctcagatctaaccttgggagttatatatatatacttgttcaactcttcttcgaacgctgtccaacttcttcctctggttcgatcatcgagatctcgaggttatttggccgcaatgcagaagcgaatagccttgtcgtttccagaagaggtactagagcatgtgttctcgtttattcagctggataaggataggaactcagtctctctggtgtgcaagtcatggtacgagatcgagcggtggtgcaggaggaaagtcttcatcgggaactgctacgccgtgagtccagcgacggtgattaggaggttcccgaaagtgagatccgtggagcttaaaggaaaacctcactttgctgactttaatttggtacctgacggatggggaggttacgtgtatccatggattgaggccatgtcttcgtcttacacgtggcttgaagagataaggctgaagaggatggtggtcaccgacgattgcttggagctcatagccaagtcttttaagaattttaaggttcttgtgctttcttcctgcgaaggcttctccaccgatggtctcgctgctatcgctgccacttgcaggaatctgaaagagcttgacttacgagagagtgatgttgacgacgttagtggccactggcttagccatttcccagatacatacacttctttggtatcactcaatatatcttgcttagcatctgaggtcagtttctctgctctggaaaggctggtgactaggtgtcccaatctcaagtctctcaagcttaaccgagctgttccacttgaaaaattggctactttacttcaaagagcacctcaattggaggaattgggcactggtgggtacactgcagaagtgcgaccagatgtttactctggtttatctgtagcgctctctgggtgcaaggaattgaggtgcttatctggattttgggatgctgttcctgcctatcttccagcagtttattcggtttgcagtcggcttacaactttgaatctgagttatgcaacagtccagagctatgatcttgtcaagcttctttgtcaatgccctaaactgcagcgcctctgggtgcttgactacatcgaggatgctggtcttgaggtgcttgcttcaacctgcaaggacctacgcgagctgagagtgtttccgtccgagccttttgtcatggaaccaaatgtggcattgacggaacaggggcttgtctccgtctccatgggctgtccaaaactcgagtcggttctctacttctgccgtcaaatgaccaatgctgcattgataaccattgctaggaaccgtcccaacatgactcgcttccgtttgtgcatcattgagccaaaagccccagactatctgactctagagccactggatattggatttggagccatagtagagcactgcaaggatctccgtcgcctctctctatctggcctcttgaccgacaaggtttttgaatacattgggacatatgccaagaagatggaaatgctctcagtggcatttgcaggagacagtgacttaggcatgcatcatgttttgtccgggtgcgatagcttgaggaaactagagataagggactgcccgtttggagacaaggcgcttttggccaatgcttcaaagctggagacaatgcgatccctttggatgtcttcttgttccgtgagttttggagcctgcaagttactaggacagaagatgccaaagctgaatgtggaagtcatcgatgaacggggtgcaccggactcgagaccagagagctgccctgttgagagagtcttcatataccgaacagtggctggtcctcgatttgacatgcctggcttcgtctggaacatggaccaagactcaacaatgaggttttccaggcaaatcattactactaacggattataagacaaagaaacgaggtacatttttcattaatccttgttcatcatcccatataatcgtgttccggtttaggaacatgagagagctcggtcgccaataatttgaatctcggctgcttcatataaccatcaagctcatgagcaatgaataagtggagagagagaaagagagatctaagagagctttgttttatttatgtaagaattattgattgttgtatgtttatttggctacttacactgagagatcctggtggggtatttttcttaagaggataagagatttttttaaaagacaatgtcaaaaatgtaactgttctacttgttttgtttggactcttttatcc

SEQ ID NO: 107160 - protein, 594 aa, Arabidopsis thaliana; identical to SEQ ID NO: 29941
  peptide (1)..(594): Ceres Seq. ID no. 13621517
  misc_feature (5)..(579): Homolog of NCBI NO: 18412177 NR Description: F-box protein GRR1-like protein 1, AtFBL18
  misc_feature (5)..(579): Homolog of NCBI NO: 12658970 NR Description: GRR1-like protein 1 [Arabidopsis thaliana]
  misc_feature (5)..(579): Homolog of NCBI NO: 15027885 NR Description: putative F-box protein GRR1 protein 1, AtFBL18
  misc_feature (8)..(573): Homolog of NCBI NO: 12083523 NR Description: similar to Arabidopsis thaliana transport
  misc_feature (9)..(573): Homolog of NCBI NO: 21740736 NR Description: OSJNBa0072K14.1 [Oryza sativa (japonica
  misc_feature (9)..(574): Homolog of NCBI NO: 18405102 NR Description: transport inhibitor response 1 (TIR1), putative
  misc_feature (9)..(573): Homolog of NCBI NO: 18391439 NR Description: transport inhibitor response 1 (TIR1), putative
  misc_feature (11)..(573): Homolog of NCBI NO: 13249030 NR Description: F-box containing protein TIR1 [Populus tremula x
  misc_feature (11)..(573): Homolog of NCBI NO: 18423092 NR Description: transport inhibitor response 1 (TIR1), putative thaliana] >gi|8777429|dbj|BAA97019.1| transport inhibitor
  misc_feature (11)..(573): Homolog of NCBI NO: 34902412 NR Description: Putative F-box containing protein TIR1 [Oryza

SEQ ID NO: 107161 - protein, 495 aa, Arabidopsis thaliana; identical to SEQ ID NO: 29942
  peptide (1)..(495): Ceres Seq. ID no. 13621518
  misc_feature (1)..(480): Homolog of NCBI NO: 18412177 NR Description: F-box protein GRR1-like protein 1, AtFBL18
  misc_feature (1)..(480): Homolog of NCBI NO: 12658970 NR Description: GRR1-like protein 1 [Arabidopsis thaliana]
  misc_feature (1)..(480): Homolog of NCBI NO: 15027885 NR Description: putative F-box protein GRR1 protein 1, AtFBL18
  misc_feature (1)..(474): Homolog of NCBI NO: 12083523 NR Description: similar to Arabidopsis thaliana transport
  misc_feature (1)..(474): Homolog of NCBI NO: 21740736 NR Description: OSJNBa0072K14.1 [Oryza sativa (japonica
  misc_feature (1)..(475): Homolog of NCBI NO: 18405102 NR Description: transport inhibitor response 1 (TIR1), putative
  misc_feature (1)..(474): Homolog of NCBI NO: 18391439 NR Description: transport inhibitor response 1 (TIR1), putative
  misc_feature (1)..(474): Homolog of NCBI NO: 13249030 NR Description: F-box containing protein TIR1 [Populus tremula x
  misc_feature (1)..(474): Homolog of NCBI NO: 18423092 NR Description: transport inhibitor response 1 (TIR1), putative thaliana] >gi|8777429|dbj|BAA97019.1| transport inhibitor
  misc_feature (1)..(474): Homolog of NCBI NO: 34902412 NR Description: Putative F-box containing protein TIR1 [Oryza

SEQ ID NO: 107162 - protein, 480 aa, Arabidopsis thaliana; identical to SEQ ID NO: 29943
  peptide (1)..(480): Ceres Seq. ID no. 13621519
  misc_feature (1)..(465): Homolog of NCBI NO: 18412177 NR Description: F-box protein GRR1-like protein 1, AtFBL18
  misc_feature (1)..(465): Homolog of NCBI NO: 12658970 NR Description: GRR1-like protein 1 [Arabidopsis thaliana]
  misc_feature (1)..(465): Homolog of NCBI NO: 15027885 NR Description: putative F-box protein GRR1 protein 1, AtFBL18
  misc_feature (1)..(459): Homolog of NCBI NO: 12083523 NR Description: similar to Arabidopsis thaliana transport
  misc_feature (1)..(459): Homolog of NCBI NO: 21740736 NR Description: OSJNBa0072K14.1 [Oryza sativa (japonica
  misc_feature (1)..(460): Homolog of NCBI NO: 18405102 NR Description: transport inhibitor response 1 (TIR1), putative
  misc_feature (1)..(459): Homolog of NCBI NO: 18391439 NR Description: transport inhibitor response 1 (TIR1), putative
  misc_feature (1)..(459): Homolog of NCBI NO: 13249030 NR Description: F-box containing protein TIR1 [Populus tremula x
  misc_feature (1)..(459): Homolog of NCBI NO: 18423092 NR Description: transport inhibitor response 1 (TIR1), putative thaliana] >gi|8777429|dbj|BAA97019.1| transport inhibitor
  misc_feature (1)..(459): Homolog of NCBI NO: 34902412 NR Description: Putative F-box containing protein TIR1 [Oryza

SEQ ID NO: 107163 - DNA, 1756 bp, Arabidopsis thaliana
  misc_feature (1)..(1756): Ceres Seq. ID no. 13621524
cccaaaattttacgaaaactctcgattttaatctaaatctccttccttatcacctcacaaatttctcgtgtttttttgtaatcaatttttgatggaaaattattcccaaaactcgaatctctgttgatcgtgtgtttcttggggttcgtctgattccttcaaagttttcatctttttgataacaaaaccgttagttctttgtcctcgtgtgtgatcatctcttgagccctattgataaaccatatagagagtgtatgtgtgtgtatatctttgtttattgagtgacaccaacaacaaaaagattattttccttgagattgattaaaagaaaacatggttagttgcttgtgttttcgtcccagtcggaaaacgaagctcaaagacaaatctcataagagatccatacgtaaccagacatcctcctcttctgcccaaccagctggaacagcaaaagaagtagattcgtcaagttcacaaaccgtagtgcaagattcttctagatacagatgtcagattttctcatacagagaactcgccatcgcgactaacagcttcaggaatgaatctttgatcggaagaggtggatttggaactgtgtataaaggaaggctaagcactggacagaacatagctgttaaaatgcttgatcagtctggtattcaaggagacaaagagtttcttgtggaagtcctaatgctctcgctcttgcaccaccgaaacctagtgcatttgttcggttattgtgctgaaggcgatcaaagactcgttgtctatgaatacatgcctcttggatctgtagaagatcatctctacgatcttagcgagggtcaagaggctttagattggaagacaaggatgaagatagctctaggagcggctaaagggttagcgtttcttcacaacgaagcacaacctcctgtgatatacagagatttgaaaacttcaaacatattgttggatcatgactataaacctaagctctcagattttggacttgcaaagtttggtccaagtgatgatatgtctcatgtctctactagagttatgggaactcatgggtattgtgcaccagagtacgcgaacaccgggaagttgacgctgaaatctgatatttatagctttggagttgtgctgctggagcttatcagtggacgcaaagctcttatgccctcatccgaatgcgttggtaatcaaagtcgctatcttgtgcattgggcacgaccgttgttcttgaatggcagaataaggcagattgtagatccaaggttagcaagaaaaggcggtttttcgaatatacttctttatagaggtattgaagtggcctttctgtgcctagcagaagaagcaaacgctagaccatcgatcagccaagtcgtggagtgtcttaagtatatcattgatcacacaattaggaaggaaaggagaactaggcgtagactactaggaggaaataaggatggggcggggacatcgaggtcaccggatgagacaatgatgaggatgttagaagaagaagaagaatacgtaactagtgaagaagctattgagagaaggagggtaatcgtggatgatgctcgtacttgggccggtatgaataggagaggggctacgccaccaactccgactccatgaaagtgaagtaaatttttattaacttgtttttcaagttatatttggttaagtttgtttggtgagactattgttagaaaccaaattttgttaaaacatttaaacatggcaatttagttaatactag

SEQ ID NO: 107164 - protein, 432 aa, Arabidopsis thaliana
  peptide (1)..(432): Ceres Seq. ID no. 13621525
  misc_feature (1)..(432): Homolog of NCBI NO: 15231654 NR Description: protein kinase family [Arabidopsis thaliana] contains similarity to receptor kinase~gene_id:MOJ10.2
  misc_feature (1)..(432): Homolog of NCBI NO: 29467647 NR Description: protein kinase CDG1 [Arabidopsis thaliana]
  misc_feature (8)..(354): Homolog of NCBI NO: 10445209 NR Description: protein serine/threonine kinase BNK1 [Brassica
  misc_feature (12)..(354): Homolog of NCBI NO: 11259782 NR Description: protein kinase-like - Arabidopsis thaliana
  misc_feature (12)..(354): Homolog of NCBI NO: 30679773 NR Description: protein kinase family [Arabidopsis thaliana]
  misc_feature (2)..(417): Homolog of NCBI NO: 15240038 NR Description: protein kinase family [Arabidopsis thaliana]
  misc_feature (12)..(358): Homolog of NCBI NO: 34907210 NR Description: putative serine/threonine kinase PBS1 protein
  misc_feature (1)..(358): Homolog of NCBI NO: 15238886 NR Description: protein kinase family [Arabidopsis thaliana]
  misc_feature (30)..(354): Homolog of NCBI NO: 34395193 NR Description: putative protein serine/threonine kinase [Oryza
  misc_feature (53)..(362): Homolog of NCBI NO: 34394036 NR Description: putative protein serine/threonine kinase BNK1
MVSCLCFRPSRKTKLKDKSHKRSIRNQTSSSSAQPAGTAKEVDSSSSQTVVQDSSRYRCQIFSYRELAIATNSFRNESLIGRGGFGTVYKGRLSTGQNIAVKMLDQSGIQGDKEFLVEVLMLSLLHHRNLVHLFGYCAEGDQRLVVYEYMPLGSVEDHLYDLSEGQEALDWKTRMKIALGAAKGLAFLHNEAQPPVIYRDLKTSNILLDHDYKPKLSDFGLAKFGPSDDMSHVSTRVMGTHGYCAPEYANTGKLTLKSDIYSFGVVLLELISGRKALMPSSECVGNQSRYLVHWARPLFLNGRIRQIVDPRLARKGGFSNILLYRGIEVAFLCLAEEANARPSISQVVECLKYIIDHTIRKERRTRRRLLGGNKDGAGTSRSPDETMMRMLEEEEEYVTSEEAIERRRVIVDDARTWAGMNRRGATPPTPTP

SEQ ID NO: 107165 - protein, 330 aa, Arabidopsis thaliana
  peptide (1)..(330): Ceres Seq. ID no. 13621526
  misc_feature (1)..(330): Homolog of NCBI NO: 15231654 NR Description: protein kinase family [Arabidopsis thaliana] contains similarity to receptor kinase~gene_id:MOJ10.2
  misc_feature (1)..(330): Homolog of NCBI NO: 29467647 NR Description: protein kinase CDG1 [Arabidopsis thaliana]
  misc_feature (1)..(252): Homolog of NCBI NO: 10445209 NR Description: protein serine/threonine kinase BNK1 [Brassica
  misc_feature (1)..(252): Homolog of NCBI NO: 11259782 NR Description: protein kinase-like - Arabidopsis thaliana
  misc_feature (1)..(252): Homolog of NCBI NO: 30679773 NR Description: protein kinase family [Arabidopsis thaliana]
  misc_feature (1)..(315): Homolog of NCBI NO: 15240038 NR Description: protein kinase family [Arabidopsis thaliana]
  misc_feature (1)..(256): Homolog of NCBI NO: 34907210 NR Description: putative serine/threonine kinase PBS1 protein
  misc_feature (1)..(256): Homolog of NCBI NO: 15238886 NR Description: protein kinase family [Arabidopsis thaliana]
  misc_feature (1)..(252): Homolog of NCBI NO: 34395193 NR Description: putative protein serine/threonine kinase [Oryza
  misc_feature (1)..(260): Homolog of NCBI NO: 34394036 NR Description: putative protein serine/threonine kinase BNK1
MLDQSGIQGDKEFLVEVLMLSLLHHRNLVHLFGYCAEGDQRLVVYEYMPLGSVEDHLYDLSEGQEALDWKTRMKIALGAAKGLAFLHNEAQPPVIYRDLKTSNILLDHDYKPKLSDFGLAKFGPSDDMSHVSTRVMGTHGYCAPEYANTGKLTLKSDIYSFGVVLLELISGRKALMPSSECVGNQSRYLVHWARPLFLNGRIRQIVDPRLARKGGFSNILLYRGIEVAFLCLAEEANARPSISQVVECLKYIIDHTIRKERRTRRRLLGGNKDGAGTSRSPDETMMRMLEEEEEYVTSEEAIERRRVIVDDARTWAGMNRRGATPPTPTP

SEQ ID NO: 107166 - protein, 312 aa, Arabidopsis thaliana
  peptide (1)..(312): Ceres Seq. ID no. 13621527
  misc_feature (1)..(312): Homolog of NCBI NO: 15231654 NR Description: protein kinase family [Arabidopsis thaliana] contains similarity to receptor kinase~gene_id:MOJ10.2
  misc_feature (1)..(312): Homolog of NCBI NO: 29467647 NR Description: protein kinase CDG1 [Arabidopsis thaliana]
  misc_feature (1)..(234): Homolog of NCBI NO: 10445209 NR Description: protein serine/threonine kinase BNK1 [Brassica
  misc_feature (1)..(234): Homolog of NCBI NO: 11259782 NR Description: protein kinase-like - Arabidopsis thaliana
  misc_feature (1)..(234): Homolog of NCBI NO: 30679773 NR Description: protein kinase family [Arabidopsis thaliana]
  misc_feature (1)..(297): Homolog of NCBI NO: 15240038 NR Description: protein kinase family [Arabidopsis thaliana]
  misc_feature (1)..(238): Homolog of NCBI NO: 34907210 NR Description: putative serine/threonine kinase PBS1 protein
  misc_feature (1)..(238): Homolog of NCBI NO: 15238886 NR Description: protein kinase family [Arabidopsis thaliana]
  misc_feature (1)..(234): Homolog of NCBI NO: 34395193 NR Description: putative protein serine/threonine kinase [Oryza
  misc_feature (1)..(242): Homolog of NCBI NO: 34394036 NR Description: putative protein serine/threonine kinase BNK1
MLSLLHHRNLVHLFGYCAEGDQRLVVYEYMPLGSVEDHLYDLSEGQEALDWKTRMKIALGAAKGLAFLHNEAQPPVIYRDLKTSNILLDHDYKPKLSDFGLAKFGPSDDMSHVSTRVMGTHGYCAPEYANTGKLTLKSDIYSFGVVLLELISGRKALMPSSECVGNQSRYLVHWARPLFLNGRIRQIVDPRLARKGGFSNILLYRGIEVAFLCLAEEANARPSISQVVECLKYIIDHTIRKERRTRRRLLGGNKDGAGTSRSPDETMMRMLEEEEEYVTSEEAIERRRVIVDDARTWAGMNRRGATPPTPTP

SEQ ID NO: 107167 - DNA, 1183 bp, Arabidopsis thaliana
  misc_feature (1)..(1183): Ceres Seq. ID no. 13621528
  misc_feature: MA Experiment ID: 20000264 Result: Down-regulated in Transcription
  misc_feature: MA Experiment 20000264 PARAMETER Experiment Name: At_Open_Flower_P Parameter: Age (day) Value: 21
  misc_feature: MA Experiment 20000264 PARAMETER Experiment Name: At_Open_Flower_P Parameter: Plant Line Value: WS
  misc_feature: MA Experiment 20000264 PARAMETER Experiment Name: At_Open_Flower_P Parameter: Tissue Value: Open Flower vs. Whole Plant
  misc_feature: MA Experiment ID: 20000286 Result: Down-regulated in Transcription
  misc_feature: MA Experiment 20000286 PARAMETER Experiment Name: At_Open_Flower_P Parameter: Age (day) Value: 21
  misc_feature: MA Experiment 20000286 PARAMETER Experiment Name: At_Open_Flower_P Parameter: Plant Line Value: WS
  misc_feature: MA Experiment 20000286 PARAMETER Experiment Name: At_Open_Flower_P Parameter: Tissue Value: Half Open vs. Whole Plant
gtaaattcccaaagaaaaaaaaaaaaaactcgataccttttgttttacaaagtcgtcacaattctgaaacccttaattgaatccaagagaatttttgattaaattaagtctctggaccctgaagtccccacacaagcaagcttcgatggatcccaagaacctaaatcgtcaccaagtaccaaatttcttgaacccaccaccaccaccgcgaaatcagggtttggtagatgatgatgctgcttctgctgttgtttccgacgagaatcgcaaaccaacaactgagattaaagatttccagatcgtggtctctgcttccgacaaagaaccaaacaagaagagtcagaatcagaaccagcttggtcctaagagaagctctaacaaagacagacacactaaagtcgaaggtagaggtcgacgaattcggatgcctgctctttgtgctgctaggatttttcaattgactagagaattgggtcataaatctgatggtgaaactatccagtggctgcttcaacaagctgagccatcgattattgcagctactggttcaggaactataccggcctctgctttagcttcttcagctgcaacctctaaccatcatcaaggtgggtctcttactgctggtttaatgatcagtcatgacttagatggtgggtctagtagtagtggtagaccattaaattgggggattggtggcggtgaaggagtttctaggtcaagtttaccaactgggttatggccaaatgtagctgggtttggttctggtgtgccaaccactggtttaatgagtgaaggagctggttatagaattgggtttcctggttttgattttcctggtgttggtcatatgagttttgcatctattttgggtgggaatcataatcagatgcctggacttgagttaggcttgtctcaagaagggaatgttggtgttttgaatcctcagtcttttactcagatttatcaacagatgggtcaggctcaggctcaagctcaaggtagggttcttcaccatatgcatcataaccatgaagaacatcagcaagagagtggtgagaaagatgattctcaaggctcaggtcgttaaaaggattgggtttttttttgtatcttctggatttgaaaaagcttttggcttttgttttgtgataatattgttgtaatttgtaccaccatggag

SEQ ID NO: 107168 - protein, 314 aa, Arabidopsis thaliana
  peptide (1)..(314): Ceres Seq. ID no. 13621529
  misc_feature (62)..(246): Pfam Name: TCP family transcription factor Pfam Description: TCP family transcription factor
  misc_feature (1)..(314): Homolog of NCBI NO: 15232059 NR Description: TCP family transcription factor, putative thaliana] >gi|9279624|dbj|BAB01082.1| gene_id:MOJ10.8~unknown [Arabidopsis thaliana] >gi|11595501|emb|CAC18326.1| putative
  misc_feature (44)..(141): Homolog of NCBI NO: 18409345 NR Description: TCP family transcription factor, putative
  misc_feature (1)..(213): Homolog of NCBI NO: 15237545 NR Description: putative protein; protein id: At5g41030.1 thaliana] >gi|9759149|dbj|BAB09705.1|
  misc_feature (73)..(224): Homolog of NCBI NO: 5731257 NR Description: auxin-induced basic helix-loop-helix
  misc_feature (74)..(159): Homolog of NCBI NO: 11357581 NR Description: hypothetical protein F1P2.170 - Arabidopsis >gi|6522545|emb|CAB61988.1| putative protein [Arabidopsis
  misc_feature (74)..(159): Homolog of NCBI NO: 22331641 NR Description: TCP family transcription factor, putative thaliana] >gi|16604511|gb|AAL24261.1| AT3g47620/F1P2_170 thaliana] >gi|21655289|gb|AAM65356.1| AT3g47620/F1P2_170
  misc_feature (78)..(245): Homolog of NCBI NO: 7489534 NR Description: probable DNA binding protein PCF2 - rice
  misc_feature (74)..(193): Homolog of NCBI NO: 15217857 NR Description: TCP family transcription factor, putative
  misc_feature (72)..(160): Homolog of NCBI NO: 20975251 NR Description: transcription factor PCF3 [Oryza sativa (japonica
  misc_feature (72)..(144): Homolog of NCBI NO: 15225538 NR Description: TCP family transcription factor, putative
MDPKNLNRHQVPNFLNPPPPPRNQGLVDDDAASAVVSDENRKPTTEIKDFQIVVSASDKEPNKKSQNQNQLGPKRSSNKDRHTKVEGRGRRIRMPALCAARIFQLTRELGHKSDGETIQWLLQQAEPSIIAATGSGTIPASALASSAATSNHHQGGSLTAGLMISHDLDGGSSSSGRPLNWGIGGGEGVSRSSLPTGLWPNVAGFGSGVPTTGLMSEGAGYRIGFPGFDFPGVGHMSFASILGGNHNQMPGLELGLSQEGNVGVLNPQSFTQIYQQMGQAQAQAQGRVLHHMHHNHEEHQQESGEKDDSQGSGR

SEQ ID NO: 107169 - protein, 221 aa, Arabidopsis thaliana
  peptide (1)..(221): Ceres Seq. ID no. 13621530
  misc_feature (1)..(153): Pfam Name: TCP family transcription factor Pfam Description: TCP family transcription factor
  misc_feature (1)..(221): Homolog of NCBI NO: 15232059 NR Description: TCP family transcription factor, putative thaliana] >gi|9279624|dbj|BAB01082.1| gene_id:MOJ10.8~unknown [Arabidopsis thaliana] >gi|11595501|emb|CAC18326.1| putative
  misc_feature (1)..(48): Homolog of NCBI NO: 18409345 NR Description: TCP family transcription factor, putative
  misc_feature (1)..(120): Homolog of NCBI NO: 15237545 NR Description: putative protein; protein id: At5g41030.1 thaliana] >gi|9759149|dbj|BAB09705.1|
  misc_feature (1)..(131): Homolog of NCBI NO: 5731257 NR Description: auxin-induced basic helix-loop-helix
  misc_feature (1)..(66): Homolog of NCBI NO: 11357581 NR Description: hypothetical protein F1P2.170 - Arabidopsis >gi|6522545|emb|CAB61988.1| putative protein [Arabidopsis
  misc_feature (1)..(66): Homolog of NCBI NO: 22331641 NR Description: TCP family transcription factor, putative thaliana] >gi|16604511|gb|AAL24261.1| AT3g47620/F1P2_170 thaliana] >gi|21655289|gb|AAM65356.1| AT3g47620/F1P2_170
  misc_feature (1)..(152): Homolog of NCBI NO: 7489534 NR Description: probable DNA binding protein PCF2 - rice
  misc_feature (1)..(100): Homolog of NCBI NO: 15217857 NR Description: TCP family transcription factor, putative
  misc_feature (1)..(67): Homolog of NCBI NO: 20975251 NR Description: transcription factor PCF3 [Oryza sativa (japonica
  misc_feature (1)..(51): Homolog of NCBI NO: 15225538 NR Description: TCP family transcription factor, putative
MPALCAARIFQLTRELGHKSDGETIQWLLQQAEPSIIAATGSGTIPASALASSAATSNHHQGGSLTAGLMISHDLDGGSSSSGRPLNWGIGGGEGVSRSSLPTGLWPNVAGFGSGVPTTGLMSEGAGYRIGFPGFDFPGVGHMSFASILGGNHNQMPGLELGLSQEGNVGVLNPQSFTQIYQQMGQAQAQAQGRVLHHMHHNHEEHQQESGEKDDSQGSGR

SEQ ID NO: 107170 - DNA, 1322 bp, Arabidopsis thaliana
  misc_feature (1)..(1322): Ceres Seq. ID no. 13621535
  misc_feature: MA Experiment ID: 20000437 Result: Up-regulated in Transcription
  misc_feature: MA Experiment 20000437 PARAMETER Experiment Name: At_Drought_P Parameter: Age (day) Value: 8
  misc_feature: MA Experiment 20000437 PARAMETER Experiment Name: At_Drought_P Parameter: Organism Value: A. thaliana
  misc_feature: MA Experiment 20000437 PARAMETER Experiment Name: At_Drought_P Parameter: Plant Line Value: WS
  misc_feature: MA Experiment 20000437 PARAMETER Experiment Name: At_Drought_P Parameter: Timepoint (hr) Value: 24
  misc_feature: MA Experiment 20000437 PARAMETER Experiment Name: At_Drought_P Parameter: Tissue Value: Whole Plant
  misc_feature: MA Experiment 20000437 PARAMETER Experiment Name: At_Drought_P Parameter: Treatment Value: Drought vs. No Drought
  misc_feature: MA Experiment ID: 20001557 Result: Down-regulated in Transcription
  misc_feature: MA Experiment 20001557 PARAMETER Experiment Name: At_Drought_Soil_Dry_P Parameter: Age (day) Value: 27
  misc_feature: MA Experiment 20001557 PARAMETER Experiment Name: At_Drought_Soil_Dry_P Parameter: Organism Value: A. thaliana
  misc_feature: MA Experiment 20001557 PARAMETER Experiment Name: At_Drought_Soil_Dry_P Parameter: Plant Line Value: WS
  misc_feature: MA Experiment 20001557 PARAMETER Experiment Name: At_Drought_Soil_Dry_P Parameter: Post Timepoint (hr) Value: 3
  misc_feature: MA Experiment 20001557 PARAMETER Experiment Name: At_Drought_Soil_Dry_P Parameter: Post-Treatment Value: Re-Water vs. No Drought
  misc_feature: MA Experiment 20001557 PARAMETER Experiment Name: At_Drought_Soil_Dry_P Parameter: Timepoint (day) Value: 13
  misc_feature: MA Experiment 20001557 PARAMETER Experiment Name: At_Drought_Soil_Dry_P Parameter: Treatment Value: Drought vs. No Drought
gatctgccaatcacaaattaacagaaaacacaactaaattgcgatttgaatttattaaatcgtaaaactgagatcttctctgagatttttctcctcctaaagtttgaaactttgaacataaaaattgtatttttttttttgaagtttccagcaaaaaaaaaattgaaactttcagtgattggaattttaatttgtgttttagtttggtgggtttctttatcgggatcgttgtcgtggatttttgtttgtagcagcttgaaagacgatgtcgtcgtcgccggacattgccggaatcttagataatacgaaggagcttgatcggttaagaaaagaacaagaggaagttcttgtggagattaataagatgcataagaagcttcaagctacgccggagatagttgagaagcctggtgatatttcattgtcaaagcttaaaaatttgtacattcaagcaaaagagctttcagaaagtgaagtaaccgtttcaaatattctgcttactcagttggattctctgcttccatctggaccaactgggcaacaacgcagaaaattagaaggcaacgaacagaagagaaagagaatgaaagtagatacagatgtaacaagagtttctccttccatgagaaatcaaatcgaggcatatgctagtctaaagggtgaacaggttgctgcaagagtcacagctgaagatgccgagaaggatgaatggtttgtggtgaaagttattcacttcgacagagaaacaaaagaagttgaagtacttgatgaagaaccaggagatgatgaagaaggaggtggccagaggacgtataaactatcaatgtcatgtattttaccgtttccaaaacggaatgatccttcaagcacacaagagtttataccagggaaacacgtcttagctgtatatccaggaaccacagccctctacaaggcaactgttataagtaccccacgaaagaggaaatctgacgagtacttgctagaatttgatgatgatgaagaagacggagcattacctcaaagaacagtgccattccacaaagtggtagctttaccagaaggccatcgccagtaattttagatggatacaatgaaataagagacgatttctttgggccagagtgtaagttaagagttgttgcctttgtttgtgatgatgactttgaagaataaaaaggtatgttttaactttttattatttcaatttgtggcaaaactactctagcaacatttgtaacatttaaatgtgtatatatgaatggaaccatgggtatgtatatcatattgagacacaatttaaaaaaaaattacatttttct

SEQ ID NO: 107171 - protein, 270 aa, Arabidopsis thaliana
  peptide (1)..(270): Ceres Seq. ID no. 13621536
  misc_feature (1)..(270): Homolog of NCBI NO: 22331369 NR Description: expressed protein [Arabidopsis thaliana] unknown protein [Arabidopsis thaliana]
  misc_feature (1)..(270): Homolog of NCBI NO: 7939518 NR Description: gene_id:K1G2.17~unknown protein [Arabidopsis
  misc_feature (3)..(270): Homolog of NCBI NO: 30693623 NR Description: expressed protein [Arabidopsis thaliana]
  misc_feature (3)..(232): Homolog of NCBI NO: 9758081 NR Description: dbj|BAA95721.1~gene_id:MNF13.7~strong similarity
  misc_feature (238)..(270): Homolog of NCBI NO: 9758081 NR Description: dbj|BAA95721.1~gene_id:MNF13.7~strong similarity
  misc_feature (132)..(267): Homolog of NCBI NO: 28828907 NR Description: similar to Plasmodium falciparum. Hypothetical
  misc_feature (127)..(266): Homolog of NCBI NO: 12839307 NR Description: unnamed protein product [Mus musculus]
  misc_feature (127)..(266): Homolog of NCBI NO: 31981320 NR Description: RIKEN cDNA 1700023O11 [Mus musculus]
  misc_feature (127)..(266): Homolog of NCBI NO: 34859208 NR Description: similar to hypothetical protein BC011981 [Rattus
  misc_feature (127)..(266): Homolog of NCBI NO: 19923935 NR Description: hypothetical protein BC011981 [Homo sapiens]
MSSSPDIAGILDNTKELDRLRKEQEEVLVEINKMHKKLQATPEIVEKPGDISLSKLKNLYIQAKELSESEVTVSNILLTQLDSLLPSGPTGQQRRKLEGNEQKRKRMKVDTDVTRVSPSMRNQIEAYASLKGEQVAARVTAEDAEKDEWFVVKVIHFDRETKEVEVLDEEPGDDEEGGGQRTYKLSMSCILPFPKRNDPSSTQEFIPGKHVLAVYPGTTALYKATVISTPRKRKSDEYLLEFDDDEEDGALPQRTVPFHKVVALPEGHRQ

SEQ ID NO: 107172 - protein, 237 aa, Arabidopsis thaliana
  peptide (1)..(237): Ceres Seq. ID no. 13621537
  misc_feature (1)..(237): Homolog of NCBI NO: 22331369 NR Description: expressed protein [Arabidopsis thaliana] unknown protein [Arabidopsis thaliana]
  misc_feature (1)..(237): Homolog of NCBI NO: 7939518 NR Description: gene_id:K1G2.17~unknown protein [Arabidopsis
  misc_feature (1)..(237): Homolog of NCBI NO: 30693623 NR Description: expressed protein [Arabidopsis thaliana]
  misc_feature (1)..(199): Homolog of NCBI NO: 9758081 NR Description: dbj|BAA95721.1~gene_id:MNF13.7~strong similarity
  misc_feature (205)..(237): Homolog of NCBI NO: 9758081 NR Description: dbj|BAA95721.1~gene_id:MNF13.7~strong similarity
  misc_feature (99)..(234): Homolog of NCBI NO: 28828907 NR Description: similar to Plasmodium falciparum. Hypothetical
  misc_feature (94)..(233): Homolog of NCBI NO: 12839307 NR Description: unnamed protein product [Mus musculus]
  misc_feature (94)..(233): Homolog of NCBI NO: 31981320 NR Description: RIKEN cDNA 1700023O11 [Mus musculus]
  misc_feature (94)..(233): Homolog of NCBI NO: 34859208 NR Description: similar to hypothetical protein BC011981 [Rattus
  misc_feature (94)..(233): Homolog of NCBI NO: 19923935 NR Description: hypothetical protein BC011981 [Homo sapiens]
MHKKLQATPEIVEKPGDISLSKLKNLYIQAKELSESEVTVSNILLTQLDSLLPSGPTGQQRRKLEGNEQKRKRMKVDTDVTRVSPSMRNQIEAYASLKGEQVAARVTAEDAEKDEWFVVKVIHFDRETKEVEVLDEEPGDDEEGGGQRTYKLSMSCILPFPKRNDPSSTQEFIPGKHVLAVYPGTTALYKATVISTPRKRKSDEYLLEFDDDEEDGALPQRTVPFHKVVALPEGHRQ

SEQ ID NO: 107173 - protein, 164 aa, Arabidopsis thaliana; identical to SEQ ID NO: 36863
  peptide (1)..(164): Ceres Seq. ID no. 13621538
  misc_feature (1)..(164): Homolog of NCBI NO: 22331369 NR Description: expressed protein [Arabidopsis thaliana] unknown protein [Arabidopsis thaliana]
  misc_feature (1)..(164): Homolog of NCBI NO: 7939518 NR Description: gene_id:K1G2.17~unknown protein [Arabidopsis
  misc_feature (1)..(164): Homolog of NCBI NO: 30693623 NR Description: expressed protein [Arabidopsis thaliana]
  misc_feature (1)..(126): Homolog of NCBI NO: 9758081 NR Description: dbj|BAA95721.1~gene_id:MNF13.7~strong similarity
  misc_feature (132)..(164): Homolog of NCBI NO: 9758081 NR Description: dbj|BAA95721.1~gene_id:MNF13.7~strong similarity
  misc_feature (26)..(161): Homolog of NCBI NO: 28828907 NR Description: similar to Plasmodium falciparum. Hypothetical
  misc_feature (21)..(160): Homolog of NCBI NO: 12839307 NR Description: unnamed protein product [Mus musculus]
  misc_feature (21)..(160): Homolog of NCBI NO: 31981320 NR Description: RIKEN cDNA 1700023O11 [Mus musculus]
  misc_feature (21)..(160): Homolog of NCBI NO: 34859208 NR Description: similar to hypothetical protein BC011981 [Rattus
  misc_feature (21)..(160): Homolog of NCBI NO: 19923935 NR Description: hypothetical protein BC011981 [Homo sapiens]

SEQ ID NO: 107174 - DNA, 1027 bp, Arabidopsis thaliana
  misc_feature (1)..(1027): Ceres Seq. ID no. 13621550
  misc_feature: MA Experiment ID: 20000234 Result: Down-regulated in Transcription
  misc_feature: MA Experiment 20000234 PARAMETER Experiment Name: At_Siliques_P Parameter: Age (day) Value: 21
  misc_feature: MA Experiment 20000234 PARAMETER Experiment Name: At_Siliques_P Parameter: Organism Value: A. thaliana
  misc_feature: MA Experiment 20000234 PARAMETER Experiment Name: At_Siliques_P Parameter: Plant Line Value: WS
  misc_feature: MA Experiment 20000234 PARAMETER Experiment Name: At_Siliques_P Parameter: Tissue Value: Less Than 5mm Siliques vs. Whole Plant
  misc_feature: MA Experiment ID: 20000235 Result: Down-regulated in Transcription
  misc_feature: MA Experiment 20000235 PARAMETER Experiment Name: At_Siliques_P Parameter: Age (day) Value: 21
  misc_feature: MA Experiment 20000235 PARAMETER Experiment Name: At_Siliques_P Parameter: Organism Value: A. thaliana
  misc_feature: MA Experiment 20000235 PARAMETER Experiment Name: At_Siliques_P Parameter: Plant Line Value: WS
  misc_feature: MA Experiment 20000235 PARAMETER Experiment Name: At_Siliques_P Parameter: Tissue Value: 5-10mm Siliques vs. Whole Plant
  misc_feature: MA Experiment ID: 20000264 Result: Up-regulated in Transcription
  misc_feature: MA Experiment 20000264 PARAMETER Experiment Name: At_Open_Flower_P Parameter: Age (day) Value: 21
  misc_feature: MA Experiment 20000264 PARAMETER Experiment Name: At_Open_Flower_P Parameter: Plant Line Value: WS
  misc_feature: MA Experiment 20000264 PARAMETER Experiment Name: At_Open_Flower_P Parameter: Tissue Value: Open Flower vs. Whole Plant
  misc_feature: MA Experiment ID: 20000265 Result: Up-regulated in Transcription
  misc_feature: MA Experiment 20000265 PARAMETER Experiment Name: At_Open_Flower_P Parameter: Age (day) Value: 21
  misc_feature: MA Experiment 20000265 PARAMETER Experiment Name: At_Open_Flower_P Parameter: Plant Line Value: WS
  misc_feature: MA Experiment 20000265 PARAMETER Experiment Name: At_Open_Flower_P Parameter: Tissue Value: Closed Flower vs. Whole Plant
  misc_feature: MA Experiment ID: 20000286 Result: Up-regulated in Transcription
  misc_feature: MA Experiment 20000286 PARAMETER Experiment Name: At_Open_Flower_P Parameter: Age (day) Value: 21
  misc_feature: MA Experiment 20000286 PARAMETER Experiment Name: At_Open_Flower_P Parameter: Plant Line Value: WS
  misc_feature: MA Experiment 20000286 PARAMETER Experiment Name: At_Open_Flower_P Parameter: Tissue Value: Half Open vs. Whole Plant
  misc_feature: MA Experiment ID: 20000794 Result: Up-regulated in Transcription
  misc_feature: MA Experiment 20000794 PARAMETER Experiment Name: At_Petals_P Parameter: Age (day) Value: 23-25 days
  misc_feature: MA Experiment 20000794 PARAMETER Experiment Name: At_Petals_P Parameter: Plant Line Value: WS
  misc_feature: MA Experiment 20000794 PARAMETER Experiment Name: At_Petals_P Parameter: Tissue Value: Petals vs. Whole plant
  misc_feature: MA Experiment ID: 20001761 Result: Up-regulated in Transcription
  misc_feature: MA Experiment 20001761 PARAMETER Experiment Name: At_50mM_NH4NO3_L-to-H_P Parameter: Timepoint (hr) Value: 4
  misc_feature: MA Experiment 20001761 PARAMETER Experiment Name: At_50mM_NH4NO3_L-to-H_P Parameter: Tissue Value: Siliques
  misc_feature: MA Experiment 20001761 PARAMETER Experiment Name: At_50mM_NH4NO3_L-to-H_P Parameter: Treatment Value: 50mM NH4NO3 vs 100mM Mannitol
  misc_feature: MA Experiment ID: 20001773 Result: Up-regulated in Transcription
  misc_feature: MA Experiment 20001773 PARAMETER Experiment Name: At_Far-red-enriched-adult_P Parameter: Age (day) Value: 30
  misc_feature: MA Experiment 20001773 PARAMETER Experiment Name: At_Far-red-enriched-adult_P Parameter: Light Value: Far-red enriched vs. White
  misc_feature: MA Experiment 20001773 PARAMETER Experiment Name: At_Far-red-enriched-adult_P Parameter: Organism Value: A. thaliana
  misc_feature: MA Experiment 20001773 PARAMETER Experiment Name: At_Far-red-enriched-adult_P Parameter: Plant Line Value: Columbia
  misc_feature: MA Experiment 20001773 PARAMETER Experiment Name: At_Far-red-enriched-adult_P Parameter: Timepoint (hr) Value: 48
  misc_feature: MA Experiment 20001773 PARAMETER Experiment Name: At_Far-red-enriched-adult_P Parameter: Tissue Value: Aerial
  misc_feature: MA Experiment ID: 20001911 Result: Down-regulated in Transcription
  misc_feature: MA Experiment 20001911 PARAMETER Experiment Name: At_Drought_Reproduction_P Parameter: Age (day) Value: 40
  misc_feature: MA Experiment 20001911 PARAMETER Experiment Name: At_Drought_Reproduction_P Parameter: Organism Value: A. thaliana
  misc_feature: MA Experiment 20001911 PARAMETER Experiment Name: At_Drought_Reproduction_P Parameter: Plant Line Value: WS
  misc_feature: MA Experiment 20001911 PARAMETER Experiment Name: At_Drought_Reproduction_P Parameter: Timepoint (day) Value: 10
  misc_feature: MA Experiment 20001911 PARAMETER Experiment Name: At_Drought_Reproduction_P Parameter: Tissue Value: Flowers
  misc_feature: MA Experiment 20001911 PARAMETER Experiment Name: At_Drought_Reproduction_P Parameter: Treatment Value: Drought vs. No Drought
atcaactcacccacatctttctctcttattctctcactcttttttttttatattcctctctctctaaatctataaaatatatttaaaaacttgatcgtatataataaagtaaataaagaataataacaaaaaaaatggagaaaagaggaggaggaagtagtggaggttcgggatcatcagcagaagcagaagtgagaaaaggaccatggacgatggaagaagatcttattcttatcaactatatcgccaaccacggcgatggtgtttggaattctctcgccaaatctgcaggtctaaaacgaaccgggaaaagttgccggctccggtggctgaactatctccgccccgacgtacgacggggaaacatcactccagaagagcaacttatcatcatggaacttcatgctaagtggggaaacaggtggtcgaaaatcgccaaacatcttccaggaagaacggacaacgagatcaaaaatttctggaggacaagaattcaaaaatacatcaagcaatcggatgtaacaacaacatcgtccgttggatctcatcatagctcagagatcaacgatcaagctgcaagcacgtcgagccataatgtcttttgtacacaagatcaagcgatggagacttattctcctacaccgacatcatatcaacataccaatatggaattcaactatggtaactattcggccgcggcagtgacggcaaccgtggattatccagtaccgatgaccgttgatgatcaaaccggtgaaaactattggggcatggatgatatttggtcatcaatgcatttattgaatggtaattgattgatcggtggacaaaacatggaatattaattgagtattatatatgatttttaggagtactattattagtacgtgacatgtatatgtttttgcctcgttgtagaggtttggggttataattaatatataatgttatctaatatgcaaccttgatacatatttggatctttattgaacccatgttatacataaataaaattgttgaaggggtc

SEQ ID NO: 107175 - protein, 226 aa, Arabidopsis thaliana; identical to SEQ ID NO: 106225
  peptide (1)..(226): Ceres Seq. ID no. 13621551
  misc_feature (22)..(69): Pfam Name: Myb-like DNA-binding domain Pfam Description: Myb-like DNA-binding domain
  misc_feature (1)..(226): Homolog of NCBI NO: 30688935 NR Description: myb family transcription factor (ATMYB3) thaliana] >gi|26451911|dbj|BAC43048.1| putative myb family
  misc_feature (1)..(226): Homolog of NCBI NO: 2280528 NR Description: ATMYB3 [Arabidopsis thaliana]
  misc_feature (1)..(226): Homolog of NCBI NO: 21554734 NR Description: putative transcription factor MYB24 [Arabidopsis
  misc_feature (1)..(226): Homolog of NCBI NO: 15242669 NR Description: myb family transcription factor [Arabidopsis >gi|5823307|gb|AAD53092.1|AF175987_1 putative transcription [Arabidopsis thaliana] >gi|10178145|dbj|BAB11590.1| transcription
  misc_feature (86)..(226): Homolog of NCBI NO: 11358682 NR Description: probable transcription factor MYB21 [imported] - thaliana (fragment) >gi|3941432|gb|AAC83592.1| putative
  misc_feature (14)..(226): Homolog of NCBI NO: 7438338 NR Description: Myb26 protein - garden pea
  misc_feature (14)..(226): Homolog of NCBI NO: 82306 NR Description: myb-related protein 305 - garden snapdragon
  misc_feature (12)..(180): Homolog of NCBI NO: 40643882 NR Description: MYB8 protein [Gerbera hybrid cv. 'Terra Regina']
  misc_feature (14)..(180): Homolog of NCBI NO: 82311 NR Description: myb-related protein 340 - garden snapdragon
  misc_feature (13)..(184): Homolog of NCBI NO: 13537530 NR Description: LhMyb [Lilium hybrid division I]

SEQ ID NO: 107176 - protein, 200 aa, Arabidopsis thaliana; identical to SEQ ID NO: 106226
  peptide (1)..(200): Ceres Seq. ID no. 13621552
  misc_feature (1)..(43): Pfam Name: Myb-like DNA-binding domain Pfam Description: Myb-like DNA-binding domain
  misc_feature (1)..(200): Homolog of NCBI NO: 30688935 NR Description: myb family transcription factor (ATMYB3) thaliana] >gi|26451911|dbj|BAC43048.1| putative myb family
  misc_feature (1)..(200): Homolog of NCBI NO: 2280528 NR Description: ATMYB3 [Arabidopsis thaliana]
  misc_feature (1)..(200): Homolog of NCBI NO: 21554734 NR Description: putative transcription factor MYB24 [Arabidopsis
  misc_feature (1)..(200): Homolog of NCBI NO: 15242669 NR Description: myb family transcription factor [Arabidopsis >gi|5823307|gb|AAD53092.1|AF175987_1 putative transcription [Arabidopsis thaliana] >gi|10178145|dbj|BAB11590.1| transcription
  misc_feature (60)..(200): Homolog of NCBI NO: 11358682 NR Description: probable transcription factor MYB21 [imported] - thaliana (fragment) >gi|3941432|gb|AAC83592.1| putative
  misc_feature (1)..(200): Homolog of NCBI NO: 7438338 NR Description: Myb26 protein - garden pea
  misc_feature (1)..(200): Homolog of NCBI NO: 82306 NR Description: myb-related protein 305 - garden snapdragon
  misc_feature (1)..(154): Homolog of NCBI NO: 40643882 NR Description: MYB8 protein [Gerbera hybrid cv. 'Terra Regina']
  misc_feature (1)..(154): Homolog of NCBI NO: 82311 NR Description: myb-related protein 340 - garden snapdragon
  misc_feature (1)..(158): Homolog of NCBI NO: 13537530 NR Description: LhMyb [Lilium hybrid division I]

SEQ ID NO: 107177 - protein, 140 aa, Arabidopsis thaliana; identical to SEQ ID NO: 106227
  peptide (1)..(140): Ceres Seq. ID no. 13621553
  misc_feature (1)..(140): Homolog of NCBI NO: 30688935 NR Description: myb family transcription factor (ATMYB3) thaliana] >gi|26451911|dbj|BAC43048.1| putative myb family
  misc_feature (1)..(140): Homolog of NCBI NO: 2280528 NR Description: ATMYB3 [Arabidopsis thaliana]
  misc_feature (1)..(140): Homolog of NCBI NO: 21554734 NR Description: putative transcription factor MYB24 [Arabidopsis
  misc_feature (1)..(140): Homolog of NCBI NO: 15242669 NR Description: myb family transcription factor [Arabidopsis >gi|5823307|gb|AAD53092.1|AF175987_1 putative transcription [Arabidopsis thaliana] >gi|10178145|dbj|BAB11590.1| transcription
  misc_feature (1)..(140): Homolog of NCBI NO: 11358682 NR Description: probable transcription factor MYB21 [imported] - thaliana (fragment) >gi|3941432|gb|AAC83592.1| putative
  misc_feature (1)..(140): Homolog of NCBI NO: 7438338 NR Description: Myb26 protein - garden pea
  misc_feature (1)..(140): Homolog of NCBI NO: 82306 NR Description: myb-related protein 305 - garden snapdragon
  misc_feature (1)..(94): Homolog of NCBI NO: 40643882 NR Description: MYB8 protein [Gerbera hybrid cv. 'Terra Regina']
  misc_feature (1)..(94): Homolog of NCBI NO: 82311 NR Description: myb-related protein 340 - garden snapdragon
  misc_feature (1)..(98): Homolog of NCBI NO: 13537530 NR Description: LhMyb [Lilium hybrid division I]

SEQ ID NO: 107178 - DNA, 1060 bp, Arabidopsis thaliana
  misc_feature (1)..(1060): Ceres Seq. ID no. 13621598
  misc_feature: MA Experiment ID: 20000495 Result: Up-regulated in Transcription
  misc_feature: MA Experiment 20000495 PARAMETER Experiment Name: At_Guard_Cells_P Parameter: Harvest Date Value: 8/2/2002
  misc_feature: MA Experiment 20000495 PARAMETER Experiment Name: At_Guard_Cells_P Parameter: Organism Value: A. thaliana
  misc_feature: MA Experiment 20000495 PARAMETER Experiment Name: At_Guard_Cells_P Parameter: Tissue Value: Guard Cells vs. Leaves
aacattgttacactaaaccatggcgacgccttcgccgacctcctctcctccctctgattcaaaccctaattctgccgctactccgccgcatcagaaacaaccaccctctcctcctcaacccacgaatccatcctctccaccaccgcacaccaccgtcgtagctttagccgcatcaacctccgccgtcgccagaaaaacccaacctgttctctggactcaagacgagaccctcctcttaatcgaatcatacaaagagaaatggttcgcaattggtcgtggtcctctaaaatcaactcactgggaagagatcgccgttgctgcctcatctcgttccggcgttgaacggacatctacacagtgtaggcataagatcgagaagatgcgtaaaagattccgatctgagagacagagtatgggacctatctcaatttggcctttctataatcaaatggaggaattggattcttcaaatcctgctccgatctcagctcgtcctctcactcgtcttcctcctaattcgaataatcgctacgtagacgacgaagaagaagatgaagaagaggataacaataactacgaagaagaggaagaagaagatgagagacagagcaaatcgaggagtattaattacatattgagaagacctggaactgttaacagatttgctggagttggtggaggattgttgtcatggggacaaaaagagagatcatcgaagaggaagaggaacgatggagacggtggtgagaggcggaggaaaggaatgcgagccgttgcagcggagattagggcgtttgctgagagagtaatggtaatggagaagaagaagattgagtttgctaaagagactgtgagacttcgtaaggaaatggagattcgtagaatcaatttgattcagagttctcaaactcagcttcttcaatttatcaacaatgcttttgattctttctaacgtagagatttagtcattgttgcttttagatttgtaacataggtaacggatttgaagaaatgcactatgtaagctaatgtttatgggagtgaagtgaacttttttttt

SEQ ID NO: 107179 - protein, 310 aa, Arabidopsis thaliana
  peptide (1)..(310): Ceres Seq. ID no. 13621599
  misc_feature (95)..(196): Pfam Name: Myc amino-terminal region Pfam Description: Myc amino-terminal region
  misc_feature (1)..(310): Homolog of NCBI NO: 15230214 NR Description: proline-rich protein family [Arabidopsis >gi|11994668|dbj|BAB02896.1| to unknown protein [Arabidopsis thaliana]
  misc_feature (28)..(296): Homolog of NCBI NO: 37536908 NR Description: hypothetical protein [Oryza sativa (japonica group)] >gi|12597883|gb|AAG60191.1| hypothetical protein [Oryza >gi|31433545|gb|AAP55043.1| hypothetical protein [Oryza sativa
  misc_feature (1)..(226): Homolog of NCBI NO: 15224948 NR Description: expressed protein [Arabidopsis thaliana]
  misc_feature (11)..(165): Homolog of NCBI NO: 18149189 NR Description: 6b-interacting protein 1 [Nicotiana tabacum]
  misc_feature (44)..(269): Homolog of NCBI NO: 26451533 NR Description: unknown protein [Arabidopsis thaliana]
  misc_feature (12)..(147): Homolog of NCBI NO: 38344545 NR Description: OSJNBa0027P08.13 [Oryza sativa (japonica
  misc_feature (226)..(301): Homolog of NCBI NO: 38344545 NR Description: OSJNBa0027P08.13 [Oryza sativa (japonica
  misc_feature (52)..(185): Homolog of NCBI NO: 21741318 NR Description: OSJNBb0103I08.19 [Oryza sativa (japonica
  misc_feature (65)..(282): Homolog of NCBI NO: 18399118 NR Description: expressed protein [Arabidopsis thaliana]
  misc_feature (65)..(282): Homolog of NCBI NO: 21537288 NR Description: unknown [Arabidopsis thaliana]
MATPSPTSSPPSDSNPNSAATPPHQKQPPSPPQPTNPSSPPPHTTVVALAASTSAVARKTQPVLWTQDETLLLIESYKEKWFAIGRGPLKSTHWEEIAVAASSRSGVERTSTQCRHKIEKMRKRFRSERQSMGPISIWPFYNQMEELDSSNPAPISARPLTRLPPNSNNRYVDDEEEDEEEDNNNYEEEEEEDERQSKSRSINYILRRPGTVNRFAGVGGGLLSWGQKERSSKRKRNDGDGGERRRKGMRAVAAEIRAFAERVMVMEKKKIEFAKETVRLRKEMEIRRINLIQSSQTQLLQFINNAFDSF

SEQ ID NO: 107180 - protein, 190 aa, Arabidopsis thaliana
  peptide (1)..(190): Ceres Seq. ID no. 13621600
  misc_feature (1)..(76): Pfam Name: Myc amino-terminal region Pfam Description: Myc amino-terminal region
  misc_feature (1)..(190): Homolog of NCBI NO: 15230214 NR Description: proline-rich protein family [Arabidopsis >gi|11994668|dbj|BAB02896.1| to unknown protein [Arabidopsis thaliana]
  misc_feature (1)..(176): Homolog of NCBI NO: 37536908 NR Description: hypothetical protein [Oryza sativa (japonica group)] >gi|12597883|gb|AAG60191.1| hypothetical protein [Oryza >gi|31433545|gb|AAP55043.1| hypothetical protein [Oryza sativa
  misc_feature (1)..(106): Homolog of NCBI NO: 15224948 NR Description: expressed protein [Arabidopsis thaliana]
  misc_feature (1)..(45): Homolog of NCBI NO: 18149189 NR Description: 6b-interacting protein 1 [Nicotiana tabacum]
  misc_feature (1)..(149): Homolog of NCBI NO: 26451533 NR Description: unknown protein [Arabidopsis thaliana]
  misc_feature (1)..(27): Homolog of NCBI NO: 38344545 NR Description: OSJNBa0027P08.13 [Oryza sativa (japonica
  misc_feature (106)..(181): Homolog of NCBI NO: 38344545 NR Description: OSJNBa0027P08.13 [Oryza sativa (japonica
  misc_feature (1)..(65): Homolog of NCBI NO: 21741318 NR Description: OSJNBb0103I08.19 [Oryza sativa (japonica
  misc_feature (1)..(162): Homolog of NCBI NO: 18399118 NR Description: expressed protein [Arabidopsis thaliana]
  misc_feature (1)..(162): Homolog of NCBI NO: 21537288 NR Description: unknown [Arabidopsis thaliana]
MRKRFRSERQSMGPISIWPFYNQMEELDSSNPAPISARPLTRLPPNSNNRYVDDEEEDEEEDNNNYEEEEEEDERQSKSRSINYILRRPGTVNRFAGVGGGLLSWGQKERSSKRKRNDGDGGERRRKGMRAVAAEIRAFAERVMVMEKKKIEFAKETVRLRKEMEIRRINLIQSSQTQLLQFINNAFDSF

SEQ ID NO: 107181 - protein, 179 aa, Arabidopsis thaliana
  peptide (1)..(179): Ceres Seq. ID no. 13621601
  misc_feature (1)..(65): Pfam Name: Myc amino-terminal region Pfam Description: Myc amino-terminal region
  misc_feature (1)..(179): Homolog of NCBI NO: 15230214 NR Description: proline-rich protein family [Arabidopsis >gi|11994668|dbj|BAB02896.1| to unknown protein [Arabidopsis thaliana]
  misc_feature (1)..(165): Homolog of NCBI NO: 37536908 NR Description: hypothetical protein [Oryza sativa (japonica group)] >gi|12597883|gb|AAG60191.1| hypothetical protein [Oryza >gi|31433545|gb|AAP55043.1| hypothetical protein [Oryza sativa
  misc_feature (1)..(95): Homolog of NCBI NO: 15224948 NR Description: expressed protein [Arabidopsis thaliana]
  misc_feature (1)..(34): Homolog of NCBI NO: 18149189 NR Description: 6b-interacting protein 1 [Nicotiana tabacum]
  misc_feature (1)..(138): Homolog of NCBI NO: 26451533 NR Description: unknown protein [Arabidopsis thaliana]
  misc_feature (1)..(16): Homolog of NCBI NO: 38344545 NR Description: OSJNBa0027P08.13 [Oryza sativa (japonica
  misc_feature (95)..(170): Homolog of NCBI NO: 38344545 NR Description: OSJNBa0027P08.13 [Oryza sativa (japonica
  misc_feature (1)..(54): Homolog of NCBI NO: 21741318 NR Description: OSJNBb0103I08.19 [Oryza sativa (japonica
  misc_feature (1)..(151): Homolog of NCBI NO: 18399118 NR Description: expressed protein [Arabidopsis thaliana]
  misc_feature (1)..(151): Homolog of NCBI NO: 21537288 NR Description: unknown [Arabidopsis thaliana]
MGPISIWPFYNQMEELDSSNPAPISARPLTRLPPNSNNRYVDDEEEDEEEDNNNYEEEEEEDERQSKSRSINYILRRPGTVNRFAGVGGGLLSWGQKERSSKRKRNDGDGGERRRKGMRAVAAEIRAFAERVMVMEKKKIEFAKETVRLRKEMEIRRINLIQSSQTQLLQFINNAFDSF

SEQ ID NO: 107182 - DNA, 917 bp, Arabidopsis thaliana
  misc_feature (1)..(917): Ceres Seq. ID no. 13621642
  misc_feature: MA Experiment ID: 20000184 Result: Down-regulated in Transcription
  misc_feature: MA Experiment 20000184 PARAMETER Experiment Name: At_Shoots__P Parameter: Age (day) Value: 7
  misc_feature: MA Experiment 20000184 PARAMETER Experiment Name: At_Shoots__P Parameter: Tissue Value: Shoots vs. Whole Plant
  misc_feature: MA Experiment ID: 20001457 Result: Up-regulated in Transcription
  misc_feature: MA Experiment 20001457 PARAMETER Experiment Name: At_50mM_NH4NO3_L-to-H_P Parameter: Age (day) Value: Undefined
  misc_feature: MA Experiment 20001457 PARAMETER Experiment Name: At_50mM_NH4NO3_L-to-H_P Parameter: Organism Value: Undefined
  misc_feature: MA Experiment 20001457 PARAMETER Experiment Name: At_50mM_NH4NO3_L-to-H_P Parameter: Plant Line Value: Undefined
  misc_feature: MA Experiment 20001457 PARAMETER Experiment Name: At_50mM_NH4NO3_L-to-H_P Parameter: Timepoint (hr) Value: 0.5
  misc_feature: MA Experiment 20001457 PARAMETER Experiment Name: At_50mM_NH4NO3_L-to-H_P Parameter: Tissue Value: Siliques
  misc_feature: MA Experiment 20001457 PARAMETER Experiment Name: At_50mM_NH4NO3_L-to-H_P Parameter: Treatment Value: 50mM NH4NO3 vs. 100mM Manitol
  misc_feature: MA Experiment ID: 20001906 Result: Up-regulated in Transcription
  misc_feature: MA Experiment 20001906 PARAMETER Experiment Name: At_Drought_Reproduction_P Parameter: Age (day) Value: 35
  misc_feature: MA Experiment 20001906 PARAMETER Experiment Name: At_Drought_Reproduction_P Parameter: Organism Value: A. thaliana
  misc_feature: MA Experiment 20001906 PARAMETER Experiment Name: At_Drought_Reproduction_P Parameter: Plant Line Value: WS
  misc_feature: MA Experiment 20001906 PARAMETER Experiment Name: At_Drought_Reproduction_P Parameter: Timepoint (day) Value: 5
  misc_feature: MA Experiment 20001906 PARAMETER Experiment Name: At_Drought_Reproduction_P Parameter: Tissue Value: Siliques
  misc_feature: MA Experiment 20001906 PARAMETER Experiment Name: At_Drought_Reproduction_P Parameter: Treatment Value: Drought vs. No Drought
  misc_feature: MA Experiment ID: 20001908 Result: Up-regulated in Transcription
  misc_feature: MA Experiment 20001908 PARAMETER Experiment Name: At_Drought_Reproduction_P Parameter: Age (day) Value: 40
  misc_feature: MA Experiment 20001908 PARAMETER Experiment Name: At_Drought_Reproduction_P Parameter: Organism Value: A. thaliana
  misc_feature: MA Experiment 20001908 PARAMETER Experiment Name: At_Drought_Reproduction_P Parameter: Plant Line Value: WS
  misc_feature: MA Experiment 20001908 PARAMETER Experiment Name: At_Drought_Reproduction_P Parameter: Timepoint (day) Value: 10
  misc_feature: MA Experiment 20001908 PARAMETER Experiment Name: At_Drought_Reproduction_P Parameter: Tissue Value: Siliques
  misc_feature: MA Experiment 20001908 PARAMETER Experiment Name: At_Drought_Reproduction_P Parameter: Treatment Value: Drought vs. No Drought
atgctgagagtaagaaaggcaatggagaataagaaccagaagcggtttgtgctcatccatggggtgtgccacggggcatggacttgggacaaggtgaaaacgcagctggaggttgcaggtcactgtgtgacggcagtggatcttgctgcatcaggtataaacatgaccaaagtggaagagattcagactctgaacgattactgcaaaccattgcttgagtttctgagctcgcttggctcagatgacggtaaggtgattgttgttgctcatagcatgggaggaatatccgctgcacttgctgctgacagcttcgcttgtaagattgccgctattgtctttttgacagctttcatgcccgacacaataaacccacctgcttatgtttacgaaaagctgctcagaagcattccacaagaggaatggttggacaccacgtgtgtgaactacgggaaacctgattttcctctacagtatactcttttgggaccaaagtttatggccaagaaaatgtatcaaaactctccagttcaagatcttgaagtggtgaagacattagtgagggaaaacccgttagttacaaacaatctggcagggacaagaagctttagtgaggaagggtacggatccgttacacgtatatatattgtatgcagagaggatcttgtggaagtcgaagattaccagcgttggatgattagcaactttccaccaaaagaagtaatggagatcaaatgtgcagatcatatgccaatgttctccaagcctcaagaagtttgtgctcttctcctggagattgcaaataaatattgcaaaaattaaccaatttcagcttccaccaataaataatacgccataagagaatacatctatatgtatgagaactaagcaaatgataatgcttatataataaagtttcg

SEQ ID NO: 107183 - protein, 272 aa, Arabidopsis thaliana
  peptide (1)..(272): Ceres Seq. ID no. 13621643
  misc_feature (41)..(264): Pfam Name: alpha/beta hydrolase fold Pfam Description: alpha/beta hydrolase fold
  misc_feature (1)..(272): Homolog of NCBI NO: 15227850 NR Description: hydrolase, alpha/beta fold family [Arabidopsis
  misc_feature (5)..(272): Homolog of NCBI NO: 28393451 NR Description: putative acetone-cyanohydrin lyase [Arabidopsis
  misc_feature (80)..(272): Homolog of NCBI NO: 30682119 NR Description: hydrolase, alpha/beta fold family [Arabidopsis
  misc_feature (1)..(51): Homolog of NCBI NO: 30682119 NR Description: hydrolase, alpha/beta fold family [Arabidopsis
  misc_feature (8)..(269): Homolog of NCBI NO: 15227859 NR Description: hydrolase, alpha/beta fold family [Arabidopsis
  misc_feature (8)..(269): Homolog of NCBI NO: 15227851 NR Description: hydrolase, alpha/beta fold family [Arabidopsis
  misc_feature (9)..(269): Homolog of NCBI NO: 15227865 NR Description: esterase, putative [Arabidopsis thaliana]
  misc_feature (14)..(269): Homolog of NCBI NO: 15235445 NR Description: hydrolase, alpha/beta fold family [Arabidopsis
  misc_feature (92)..(269): Homolog of NCBI NO: 15227857 NR Description: esterase family [Arabidopsis thaliana]
  misc_feature (11)..(269): Homolog of NCBI NO: 40549303 NR Description: salicylic acid-binding protein 2 [Nicotiana
MLRVRKAMENKNQKRFVLIHGVCHGAWTWDKVKTQLEVAGHCVTAVDLAASGINMTKVEEIQTLNDYCKPLLEFLSSLGSDDGKVIVVAHSMGGISAALAADSFACKIAAIVFLTAFMPDTINPPAYVYEKLLRSIPQEEWLDTTCVNYGKPDFPLQYTLLGPKFMAKKMYQNSPVQDLEVVKTLVRENPLVTNNLAGTRSFSEEGYGSVTRIYIVCREDLVEVEDYQRWMISNFPPKEVMEIKCADHMPMFSKPQEVCALLLEIANKYCKN

SEQ ID NO: 107184 - protein, 265 aa, Arabidopsis thaliana
  peptide (1)..(265): Ceres Seq. ID no. 13621644
  misc_feature (34)..(257): Pfam Name: alpha/beta hydrolase fold Pfam Description: alpha/beta hydrolase fold
  misc_feature (1)..(265): Homolog of NCBI NO: 15227850 NR Description: hydrolase, alpha/beta fold family [Arabidopsis
  misc_feature (1)..(265): Homolog of NCBI NO: 28393451 NR Description: putative acetone-cyanohydrin lyase [Arabidopsis
  misc_feature (73)..(265): Homolog of NCBI NO: 30682119 NR Description: hydrolase, alpha/beta fold family [Arabidopsis
  misc_feature (1)..(44): Homolog of NCBI NO: 30682119 NR Description: hydrolase, alpha/beta fold family [Arabidopsis
  misc_feature (1)..(262): Homolog of NCBI NO: 15227859 NR Description: hydrolase, alpha/beta fold family [Arabidopsis
  misc_feature (1)..(262): Homolog of NCBI NO: 15227851 NR Description: hydrolase, alpha/beta fold family [Arabidopsis
  misc_feature (2)..(262): Homolog of NCBI NO: 15227865 NR Description: esterase, putative [Arabidopsis thaliana]
  misc_feature (7)..(262): Homolog of NCBI NO: 15235445 NR Description: hydrolase, alpha/beta fold family [Arabidopsis
  misc_feature (85)..(262): Homolog of NCBI NO: 15227857 NR Description: esterase family [Arabidopsis thaliana]
  misc_feature (4)..(262): Homolog of NCBI NO: 40549303 NR Description: salicylic acid-binding protein 2 [Nicotiana
MENKNQKRFVLIHGVCHGAWTWDKVKTQLEVAGHCVTAVDLAASGINMTKVEEIQTLNDYCKPLLEFLSSLGSDDGKVIVVAHSMGGISAALAADSFACKIAAIVFLTAFMPDTINPPAYVYEKLLRSIPQEEWLDTTCVNYGKPDFPLQYTLLGPKFMAKKMYQNSPVQDLEVVKTLVRENPLVTNNLAGTRSFSEEGYGSVTRIYIVCREDLVEVEDYQRWMISNFPPKEVMEIKCADHMPMFSKPQEVCALLLEIANKYCKN

SEQ ID NO: 107185 - protein, 218 aa, Arabidopsis thaliana
  peptide (1)..(218): Ceres Seq. ID no. 13621645
  misc_feature (1)..(210): Pfam Name: alpha/beta hydrolase fold Pfam Description: alpha/beta hydrolase fold
  misc_feature (1)..(218): Homolog of NCBI NO: 15227850 NR Description: hydrolase, alpha/beta fold family [Arabidopsis
  misc_feature (1)..(218): Homolog of NCBI NO: 28393451 NR Description: putative acetone-cyanohydrin lyase [Arabidopsis
  misc_feature (26)..(218): Homolog of NCBI NO: 30682119 NR Description: hydrolase, alpha/beta fold family [Arabidopsis
  misc_feature (1)..(215): Homolog of NCBI NO: 15227859 NR Description: hydrolase, alpha/beta fold family [Arabidopsis
  misc_feature (1)..(215): Homolog of NCBI NO: 15227851 NR Description: hydrolase, alpha/beta fold family [Arabidopsis
  misc_feature (1)..(215): Homolog of NCBI NO: 15227865 NR Description: esterase, putative [Arabidopsis thaliana]
  misc_feature (1)..(215): Homolog of NCBI NO: 15235445 NR Description: hydrolase, alpha/beta fold family [Arabidopsis
  misc_feature (38)..(215): Homolog of NCBI NO: 15227857 NR Description: esterase family [Arabidopsis thaliana]
  misc_feature (1)..(215): Homolog of NCBI NO: 40549303 NR Description: salicylic acid-binding protein 2 [Nicotiana
  misc_feature (1)..(215): Homolog of NCBI NO: 27754457 NR Description: putative acetone-cyanohydrin lyase [Arabidopsis
MTKVEEIQTLNDYCKPLLEFLSSLGSDDGKVIVVAHSMGGISAALAADSFACKIAAIVFLTAFMPDTINPPAYVYEKLLRSIPQEEWLDTTCVNYGKPDFPLQYTLLGPKFMAKKMYQNSPVQDLEVVKTLVRENPLVTNNLAGTRSFSEEGYGSVTRIYIVCREDLVEVEDYQRWMISNFPPKEVMEIKCADHMPMFSKPQEVCALLLEIANKYCKN

SEQ ID NO: 107186 - DNA, 2762 bp, Arabidopsis thaliana
  misc_feature (1)..(2762): Ceres Seq. ID no. 13621646
  misc_feature: MA Experiment ID: 20000185 Result: Up-regulated in Transcription
  misc_feature: MA Experiment 20000185 PARAMETER Experiment Name: At_Roots__P Parameter: Age (day) Value: 7 vs. 21
  misc_feature: MA Experiment 20000185 PARAMETER Experiment Name: At_Roots__P Parameter: Organism Value: A. thaliana
  misc_feature: MA Experiment 20000185 PARAMETER Experiment Name: At_Roots__P Parameter: Tissue Value: Roots vs. Whole Plant
  misc_feature: MA Experiment ID: 20000234 Result: Up-regulated in Transcription
  misc_feature: MA Experiment 20000234 PARAMETER Experiment Name: At_Siliques_P Parameter: Age (day) Value: 21
  misc_feature: MA Experiment 20000234 PARAMETER Experiment Name: At_Siliques_P Parameter: Organism Value: A. thaliana
  misc_feature: MA Experiment 20000234 PARAMETER Experiment Name: At_Siliques_P Parameter: Plant Line Value: WS
  misc_feature: MA Experiment 20000234 PARAMETER Experiment Name: At_Siliques_P Parameter: Tissue Value: Less Than 5mm Siliques vs. Whole Plant
  misc_feature: MA Experiment ID: 20000235 Result: Up-regulated in Transcription
  misc_feature: MA Experiment 20000235 PARAMETER Experiment Name: At_Siliques_P Parameter: Age (day) Value: 21
  misc_feature: MA Experiment 20000235 PARAMETER Experiment Name: At_Siliques_P Parameter: Organism Value: A. thaliana
  misc_feature: MA Experiment 20000235 PARAMETER Experiment Name: At_Siliques_P Parameter: Plant Line Value: WS
  misc_feature: MA Experiment 20000235 PARAMETER Experiment Name: At_Siliques_P Parameter: Tissue Value: 5-10mm Siliques vs. Whole Plant
  misc_feature: MA Experiment ID: 20000264 Result: Up-regulated in Transcription
  misc_feature: MA Experiment 20000264 PARAMETER Experiment Name: At_Open_Flower_P Parameter: Age (day) Value: 21
  misc_feature: MA Experiment 20000264 PARAMETER Experiment Name: At_Open_Flower_P Parameter: Plant Line Value: WS
  misc_feature: MA Experiment 20000264 PARAMETER Experiment Name: At_Open_Flower_P Parameter: Tissue Value: Open Flower vs. Whole Plant
  misc_feature: MA Experiment ID: 20000265 Result: Up-regulated in Transcription
  misc_feature: MA Experiment 20000265 PARAMETER Experiment Name: At_Open_Flower_P Parameter: Age (day) Value: 21
  misc_feature: MA Experiment 20000265 PARAMETER Experiment Name: At_Open_Flower_P Parameter: Plant Line Value: WS
  misc_feature: MA Experiment 20000265 PARAMETER Experiment Name: At_Open_Flower_P Parameter: Tissue Value: Closed Flower vs. Whole Plant
  misc_feature: MA Experiment ID: 20000286 Result: Up-regulated in Transcription
  misc_feature: MA Experiment 20000286 PARAMETER Experiment Name: At_Open_Flower_P Parameter: Age (day) Value: 21
  misc_feature: MA Experiment 20000286 PARAMETER Experiment Name: At_Open_Flower_P Parameter: Plant Line Value: WS
  misc_feature: MA Experiment 20000286 PARAMETER Experiment Name: At_Open_Flower_P Parameter: Tissue Value: Half Open vs. Whole Plant
  misc_feature: MA Experiment ID: 20000437 Result: Down-regulated in Transcription
  misc_feature: MA Experiment 20000437 PARAMETER Experiment Name: At_Drought_P Parameter: Age (day) Value: 8
  misc_feature: MA Experiment 20000437 PARAMETER Experiment Name: At_Drought_P Parameter: Organism Value: A. thaliana
  misc_feature: MA Experiment 20000437 PARAMETER Experiment Name: At_Drought_P Parameter: Plant Line Value: WS
  misc_feature: MA Experiment 20000437 PARAMETER Experiment Name: At_Drought_P Parameter: Timepoint (hr) Value: 24
  misc_feature: MA Experiment 20000437 PARAMETER Experiment Name: At_Drought_P Parameter: Tissue Value: Whole Plant
  misc_feature: MA Experiment 20000437 PARAMETER Experiment Name: At_Drought_P Parameter: Treatment Value: Drought vs. No Drought
  misc_feature: MA Experiment ID: 20000495 Result: Up-regulated in Transcription
  misc_feature: MA Experiment 20000495 PARAMETER Experiment Name: At_Guard_Cells_P Parameter: Harvest Date Value: 8/2/2002
  misc_feature: MA Experiment 20000495 PARAMETER Experiment Name: At_Guard_Cells_P Parameter: Organism Value: A. thaliana
  misc_feature: MA Experiment 20000495 PARAMETER Experiment Name: At_Guard_Cells_P Parameter: Tissue Value: Guard Cells vs. Leaves
atttctctgtgtactggcgcgtgagatagaacagaaaataaagacatcaaatctttgctacatgtctttggtcgtatccgtatatatgttcttcttctaattattttagcagaaagaaaaaaaactaatcgctttcataaactcagatttgtttttttttttcaatggtagaagaagacaagtgttcttggagtttagtttcttcttatgattcattcataaatccgaggaaatatatcaaatctgtttctttctttctctaagtcaaaacccaactaagagattcttcttcttctttctttgagatcagttacaaagtgagctttgtttttaagttctaattgctaatttgctacacataagttctgtttagcttcttagagatgggatttgaagacaagaaaatgctgagacagagacataagcgttctaagagctgtactgttcctgagaagaaaaagcttgaagatgagaatagcattgattcttctctggatgcttctcaacgcctcaagctcgacttacctcgttgcggcgataaatcttttgaaatgaagaaggatctatcccctgatgtaaaattcaagagctctctgaagcaagagattcaagagcttgagaaaagattacagaaccagtttgatgtccgtggtgcgttagagaaggcattaggctataaaacaccatctcgagacatcaaaggcgactctactccaaagcctccaacagaattgatcaaggaaatcgcggtgttggagttagaagtttctcatttggaacagtaccttctatctttgtatcgtaaagcgtttgatcaacaaacatcttctgtatcgccaccaacatcgaaacaacaaagctcgtgttcacctaaatctactcttagaggaaaacgtctagacttctcaagaacacctgaatctcggtgtttctcctttgacaacagactgaagagtccacgtttggtagagaaggagctagagtctcctaaccttagatgtagacaagaaagcttagccacgcaacctcgatgtttctcatttgacaatagactgaaggaacctagttctgctggtcgacaatgtaatcaagaagtctcaagaatcgattctcggagtttctcctttgacaatagagtgaaggaacccggttctgctgctcggcatttcaatcaagaagactcaagaatcgattctcagtgtgtctcctttgacaatagagtgaaggaacccgtttctggtgttcgacaattcgatcaagaaagctcaagaatcgattctcggtgtttctctttcgacaatagactgaaagatcaatgttttatcgagaaggaggacatcgattcatgtgttcgtcgttgccagtcctctcttaatcaacgttccaccttcaataaccgaatatctccaccagaagactcggtattcgcgtgccactcccaaccattgtccatacatgaatacatacaaaatggatcaaatgatgcaagccttgcagaacacatgggaactcggatatctgatcacatattcatgactccaaacaagttatcagaggaaatgatcaagtgtgcatcagctatatattccaagctcgctgatccaccatcgataaaccacggtttctcatccccgagttcgtctccatcatcaacaagcgagttttcaccacaagaccagtatgatatgtggagtccaagcttcagaaaaaactcgtctttcgatgaccagtttgaattcagcggaccttatagctcaatgatcgaagtgtcacacattcatcgaaaccgtaaaagacgcgaccttgacctgatgaatcgaaacttcagcttacttcttaagcaactggaaagtgttgatccgagaaaactgactcatcaagagaaactggcgttctggattaacgtacataacgctcttgtgatgcatacatttctggcaaatgggattccacagaacaatgggaagcgatttttactactctccaagccagcttacaagataggaggtcgcatggtaagcttagaagcaatacaaagttatattcttcgtatcaagatgcctcgtcctggccagtggctgaagttattactcatacctaaaaaattcagaaccggagatgaacatcaagaatattccctcgagcattccgagcctctcttatactttgcactttgttcaggcaaccattctgaccctgcgattcgtgtttttacgcccaagggaatataccaagagctagaaaccgcaaaggaagagtacatccgcgcaacgtttggagtaaagaaagaccagaaactagtcttaccaaagatcattgagtcttttagcaaagactcaggtttaggtcaagcagcattgatggagatgattcaagaatgtctcccggaaacaatgaaaaaaaccataaagaaacttaactcagggagatcccgaaagagcattgtcgaatggacgcctcataatttcgtgtttcggtatttgatagccagagaacttgttagatgaaattttcttatgtgattgtcttgggaagggtttttatttgcaaggactctgtttctttgtaatgtattattggtttagtgtataggtggatgtcttgtgtggtgagtgtagagtagaaatagaaatagaggaaaaattgcatgccgttttttggttaccaatccgcgatgatgtttgtacatacaaaatcgattctcttattttttaaaatttatttgttatagtaacgatatatattactaagcaaaatttcct

SEQ ID NO: 107187 - protein, 707 aa, Arabidopsis thaliana
  peptide (1)..(707): Ceres Seq. ID no. 13621647
  misc_feature (482)..(627): Pfam Name: Protein of unknown function, DUF547 Pfam Description: Protein of unknown function, DUF547
  misc_feature (314)..(707): Homolog of NCBI NO: 15240016 NR Description: hypothetical protein [Arabidopsis thaliana] gene_id:K1F13.28~pir||T02421~strong similarity to unknown protein
  misc_feature (11)..(180): Homolog of NCBI NO: 15240016 NR Description: hypothetical protein [Arabidopsis thaliana] gene_id:K1F13.28~pir||T02421~strong similarity to unknown protein
  misc_feature (369)..(705): Homolog of NCBI NO: 40539066 NR Description: hypothetical protein [Oryza sativa (japonica
  misc_feature (11)..(239): Homolog of NCBI NO: 40539066 NR Description: hypothetical protein [Oryza sativa (japonica
  misc_feature (247)..(706): Homolog of NCBI NO: 20330763 NR Description: Hypothetical protein [Oryza sativa (japonica
  misc_feature (59)..(178): Homolog of NCBI NO: 20330763 NR Description: Hypothetical protein [Oryza sativa (japonica
  misc_feature (195)..(707): Homolog of NCBI NO: 28916180 NR Description: putative ternary complex factor MIP1 [Antirrhinum
  misc_feature (453)..(701): Homolog of NCBI NO: 9294699 NR Description: gb|AAC17092.1~gene_id:MCB22.7~similar to unknown
  misc_feature (276)..(421): Homolog of NCBI NO: 9294699 NR Description: gb|AAC17092.1~gene_id:MCB22.7~similar to unknown
  misc_feature (66)..(159): Homolog of NCBI NO: 9294699 NR Description: gb|AAC17092.1~gene_id:MCB22.7~similar to unknown
MGFEDKKMLRQRHKRSKSCTVPEKKKLEDENSIDSSLDASQRLKLDLPRCGDKSFEMKKDLSPDVKFKSSLKQEIQELEKRLQNQFDVRGALEKALGYKTPSRDIKGDSTPKPPTELIKEIAVLELEVSHLEQYLLSLYRKAFDQQTSSVSPPTSKQQSSCSPKSTLRGKRLDFSRTPESRCFSFDNRLKSPRLVEKELESPNLRCRQESLATQPRCFSFDNRLKEPSSAGRQCNQEVSRIDSRSFSFDNRVKEPGSAARHFNQEDSRIDSQCVSFDNRVKEPVSGVRQFDQESSRIDSRCFSFDNRLKDQCFIEKEDIDSCVRRCQSSLNQRSTFNNRISPPEDSVFACHSQPLSIHEYIQNGSNDASLAEHMGTRISDHIFMTPNKLSEEMIKCASAIYSKLADPPSINHGFSSPSSSPSSTSEFSPQDQYDMWSPSFRKNSSFDDQFEFSGPYSSMIEVSHIHRNRKRRDLDLMNRNFSLLLKQLESVDPRKLTHQEKLAFWINVHNALVMHTFLANGIPQNNGKRFLLLSKPAYKIGGRMVSLEAIQSYILRIKMPRPGQWLKLLLIPKKFRTGDEHQEYSLEHSEPLLYFALCSGNHSDPAIRVFTPKGIYQELETAKEEYIRATFGVKKDQKLVLPKIIESFSKDSGLGQAALMEMIQECLPETMKKTIKKLNSGRSRKSIVEWTPHNFVFRYLIARELVR

SEQ ID NO: 107188 - protein, 700 aa, Arabidopsis thaliana
  peptide (1)..(700): Ceres Seq. ID no. 13621648
  misc_feature (475)..(620): Pfam Name: Protein of unknown function, DUF547 Pfam Description: Protein of unknown function, DUF547
  misc_feature (307)..(700): Homolog of NCBI NO: 15240016 NR Description: hypothetical protein [Arabidopsis thaliana] gene_id:K1F13.28~pir||T02421~strong similarity to unknown protein
  misc_feature (4)..(173): Homolog of NCBI NO: 15240016 NR Description: hypothetical protein [Arabidopsis thaliana] gene_id:K1F13.28~pir||T02421~strong similarity to unknown protein
  misc_feature (362)..(698): Homolog of NCBI NO: 40539066 NR Description: hypothetical protein [Oryza sativa (japonica
  misc_feature (4)..(232): Homolog of NCBI NO: 40539066 NR Description: hypothetical protein [Oryza sativa (japonica
  misc_feature (240)..(699): Homolog of NCBI NO: 20330763 NR Description: Hypothetical protein [Oryza sativa (japonica
  misc_feature (52)..(171): Homolog of NCBI NO: 20330763 NR Description: Hypothetical protein [Oryza sativa (japonica
  misc_feature (188)..(700): Homolog of NCBI NO: 28916180 NR Description: putative ternary complex factor MIP1 [Antirrhinum
  misc_feature (446)..(694): Homolog of NCBI NO: 9294699 NR Description: gb|AAC17092.1~gene_id:MCB22.7~similar to unknown
  misc_feature (269)..(414): Homolog of NCBI NO: 9294699 NR Description: gb|AAC17092.1~gene_id:MCB22.7~similar to unknown
  misc_feature (59)..(152): Homolog of NCBI NO: 9294699 NR Description: gb|AAC17092.1~gene_id:MCB22.7~similar to unknown
MLRQRHKRSKSCTVPEKKKLEDENSIDSSLDASQRLKLDLPRCGDKSFEMKKDLSPDVKFKSSLKQEIQELEKRLQNQFDVRGALEKALGYKTPSRDIKGDSTPKPPTELIKEIAVLELEVSHLEQYLLSLYRKAFDQQTSSVSPPTSKQQSSCSPKSTLRGKRLDFSRTPESRCFSFDNRLKSPRLVEKELESPNLRCRQESLATQPRCFSFDNRLKEPSSAGRQCNQEVSRIDSRSFSFDNRVKEPGSAARHFNQEDSRIDSQCVSFDNRVKEPVSGVRQFDQESSRIDSRCFSFDNRLKDQCFIEKEDIDSCVRRCQSSLNQRSTFNNRISPPEDSVFACHSQPLSIHEYIQNGSNDASLAEHMGTRISDHIFMTPNKLSEEMIKCASAIYSKLADPPSINHGFSSPSSSPSSTSEFSPQDQYDMWSPSFRKNSSFDDQFEFSGPYSSMIEVSHIHRNRKRRDLDLMNRNFSLLLKQLESVDPRKLTHQEKLAFWINVHNALVMHTFLANGIPQNNGKRFLLLSKPAYKIGGRMVSLEAIQSYILRIKMPRPGQWLKLLLIPKKFRTGDEHQEYSLEHSEPLLYFALCSGNHSDPAIRVFTPKGIYQELETAKEEYIRATFGVKKDQKLVLPKIIESFSKDSGLGQAALMEMIQECLPETMKKTIKKLNSGRSRKSIVEWTPHNFVFRYLIARELVR

SEQ ID NO: 107189 - protein, 651 aa, Arabidopsis thaliana
  peptide (1)..(651): Ceres Seq. ID no. 13621649
  misc_feature (426)..(571): Pfam Name: Protein of unknown function, DUF547 Pfam Description: Protein of unknown function, DUF547
  misc_feature (258)..(651): Homolog of NCBI NO: 15240016 NR Description: hypothetical protein [Arabidopsis thaliana] gene_id:K1F13.28~pir||T02421~strong similarity to unknown protein
  misc_feature (1)..(124): Homolog of NCBI NO: 15240016 NR Description: hypothetical protein [Arabidopsis thaliana] gene_id:K1F13.28~pir||T02421~strong similarity to unknown protein
  misc_feature (313)..(649): Homolog of NCBI NO: 40539066 NR Description: hypothetical protein [Oryza sativa (japonica
  misc_feature (1)..(183): Homolog of NCBI NO: 40539066 NR Description: hypothetical protein [Oryza sativa (japonica
  misc_feature (191)..(650): Homolog of NCBI NO: 20330763 NR Description: Hypothetical protein [Oryza sativa (japonica
  misc_feature (3)..(122): Homolog of NCBI NO: 20330763 NR Description: Hypothetical protein [Oryza sativa (japonica
  misc_feature (139)..(651): Homolog of NCBI NO: 28916180 NR Description: putative ternary complex factor MIP1 [Antirrhinum
  misc_feature (397)..(645): Homolog of NCBI NO: 9294699 NR Description: gb|AAC17092.1~gene_id:MCB22.7~similar to unknown
  misc_feature (220)..(365): Homolog of NCBI NO: 9294699 NR Description: gb|AAC17092.1~gene_id:MCB22.7~similar to unknown
  misc_feature (10)..(103): Homolog of NCBI NO: 9294699 NR Description: gb|AAC17092.1~gene_id:MCB22.7~similar to unknown
MKKDLSPDVKFKSSLKQEIQELEKRLQNQFDVRGALEKALGYKTPSRDIKGDSTPKPPTELIKEIAVLELEVSHLEQYLLSLYRKAFDQQTSSVSPPTSKQQSSCSPKSTLRGKRLDFSRTPESRCFSFDNRLKSPRLVEKELESPNLRCRQESLATQPRCFSFDNRLKEPSSAGRQCNQEVSRIDSRSFSFDNRVKEPGSAARHFNQEDSRIDSQCVSFDNRVKEPVSGVRQFDQESSRIDSRCFSFDNRLKDQCFIEKEDIDSCVRRCQSSLNQRSTFNNRISPPEDSVFACHSQPLSIHEYIQNGSNDASLAEHMGTRISDHIFMTPNKLSEEMIKCASAIYSKLADPPSINHGFSSPSSSPSSTSEFSPQDQYDMWSPSFRKNSSFDDQFEFSGPYSSMIEVSHIHRNRKRRDLDLMNRNFSLLLKQLESVDPRKLTHQEKLAFWINVHNALVMHTFLANGIPQNNGKRFLLLSKPAYKIGGRMVSLEAIQSYILRIKMPRPGQWLKLLLIPKKFRTGDEHQEYSLEHSEPLLYFALCSGNHSDPAIRVFTPKGIYQELETAKEEYIRATFGVKKDQKLVLPKIIESFSKDSGLGQAALMEMIQECLPETMKKTIKKLNSGRSRKSIVEWTPHNFVFRYLIARELVR

SEQ ID NO: 107190 - DNA, 1388 bp, Arabidopsis thaliana
  misc_feature (1)..(1388): Ceres Seq. ID no. 13621654
  misc_feature: MA Experiment ID: 20000173 Result: Down-regulated in Transcription
  misc_feature: MA Experiment 20000173 PARAMETER Experiment Name: At_42deg_Heat_P Parameter: Age (day) Value: 14
  misc_feature: MA Experiment 20000173 PARAMETER Experiment Name: At_42deg_Heat_P Parameter: Organism Value: A. thaliana
  misc_feature: MA Experiment 20000173 PARAMETER Experiment Name: At_42deg_Heat_P Parameter: Plant Line Value: WS
  misc_feature: MA Experiment 20000173 PARAMETER Experiment Name: At_42deg_Heat_P Parameter: Temperature (deg C) Value: 42 vs. 22
  misc_feature: MA Experiment 20000173 PARAMETER Experiment Name: At_42deg_Heat_P Parameter: Timepoint (hr) Value: 6
  misc_feature: MA Experiment 20000173 PARAMETER Experiment Name: At_42deg_Heat_P Parameter: Tissue Value: Aerial
  misc_feature: MA Experiment ID: 20000179 Result: Up-regulated in Transcription
  misc_feature: MA Experiment 20000179 PARAMETER Experiment Name: At_Germinating_Seeds_P Parameter: Age (hr) Value: 6 vs. 0
  misc_feature: MA Experiment 20000179 PARAMETER Experiment Name: At_Germinating_Seeds_P Parameter: Tissue Value: Germinating Seeds
  misc_feature: MA Experiment ID: 20000184 Result: Down-regulated in Transcription
  misc_feature: MA Experiment 20000184 PARAMETER Experiment Name: At_Shoots__P Parameter: Age (day) Value: 7
  misc_feature: MA Experiment 20000184 PARAMETER Experiment Name: At_Shoots__P Parameter: Tissue Value: Shoots vs. Whole Plant
  misc_feature: MA Experiment ID: 20000214 Result: Down-regulated in Transcription
  misc_feature: MA Experiment 20000214 PARAMETER Experiment Name: At_4deg_Cold_P Parameter: Timepoint (hr) Value: 6
  misc_feature: MA Experiment ID: 20000264 Result: Up-regulated in Transcription
  misc_feature: MA Experiment 20000264 PARAMETER Experiment Name: At_Open_Flower_P Parameter: Age (day) Value: 21
  misc_feature: MA Experiment 20000264 PARAMETER Experiment Name: At_Open_Flower_P Parameter: Plant Line Value: WS
  misc_feature: MA Experiment 20000264 PARAMETER Experiment Name: At_Open_Flower_P Parameter: Tissue Value: Open Flower vs. Whole Plant
  misc_feature: MA Experiment ID: 20000265 Result: Up-regulated in Transcription
  misc_feature: MA Experiment 20000265 PARAMETER Experiment Name: At_Open_Flower_P Parameter: Age (day) Value: 21
  misc_feature: MA Experiment 20000265 PARAMETER Experiment Name: At_Open_Flower_P Parameter: Plant Line Value: WS
  misc_feature: MA Experiment 20000265 PARAMETER Experiment Name: At_Open_Flower_P Parameter: Tissue Value: Closed Flower vs. Whole Plant
  misc_feature: MA Experiment ID: 20000286 Result: Up-regulated in Transcription
  misc_feature: MA Experiment 20000286 PARAMETER Experiment Name: At_Open_Flower_P Parameter: Age (day) Value: 21
  misc_feature: MA Experiment 20000286 PARAMETER Experiment Name: At_Open_Flower_P Parameter: Plant Line Value: WS
  misc_feature: MA Experiment 20000286 PARAMETER Experiment Name: At_Open_Flower_P Parameter: Tissue Value: Half Open vs. Whole Plant
  misc_feature: MA Experiment ID: 20000437 Result: Up-regulated in Transcription
  misc_feature: MA Experiment 20000437 PARAMETER Experiment Name: At_Drought_P Parameter: Age (day) Value: 8
  misc_feature: MA Experiment 20000437 PARAMETER Experiment Name: At_Drought_P Parameter: Organism Value: A. thaliana
  misc_feature: MA Experiment 20000437 PARAMETER Experiment Name: At_Drought_P Parameter: Plant Line Value: WS
  misc_feature: MA Experiment 20000437 PARAMETER Experiment Name: At_Drought_P Parameter: Timepoint (hr) Value: 24
  misc_feature: MA Experiment 20000437 PARAMETER Experiment Name: At_Drought_P Parameter: Tissue Value: Whole Plant
  misc_feature: MA Experiment 20000437 PARAMETER Experiment Name: At_Drought_P Parameter: Treatment Value: Drought vs. No Drought
  misc_feature: MA Experiment ID: 20000527 Result: Down-regulated in Transcription
  misc_feature: MA Experiment 20000527 PARAMETER Experiment Name: At_10percent_PEG_P Parameter: Age (day) Value: 20
  misc_feature: MA Experiment 20000527 PARAMETER Experiment Name: At_10percent_PEG_P Parameter: Organism Value: A. thaliana
  misc_feature: MA Experiment 20000527 PARAMETER Experiment Name: At_10percent_PEG_P Parameter: Plant Line Value: WS
  misc_feature: MA Experiment 20000527 PARAMETER Experiment Name: At_10percent_PEG_P Parameter: Timepoint (day) Value: 20
  misc_feature: MA Experiment 20000527 PARAMETER Experiment Name: At_10percent_PEG_P Parameter: Tissue Value: Whole Plant
  misc_feature: MA Experiment 20000527 PARAMETER Experiment Name: At_10percent_PEG_P Parameter: Treatment Value: 10percent PEG vs. No Treatment
  misc_feature: MA Experiment ID: 20000794 Result: Up-regulated in Transcription
  misc_feature: MA Experiment 20000794 PARAMETER Experiment Name: At_Petals_P Parameter: Age (day) Value: 23-25 days
  misc_feature: MA Experiment 20000794 PARAMETER Experiment Name: At_Petals_P Parameter: Plant Line Value: WS
  misc_feature: MA Experiment 20000794 PARAMETER Experiment Name: At_Petals_P Parameter: Tissue Value: Petals vs. Whole plant
  misc_feature: MA Experiment ID: 20001247 Result: Up-regulated in Transcription
  misc_feature: MA Experiment 20001247 PARAMETER Experiment Name: At_Far-red-induction_P Parameter: Age (day) Value: 7
  misc_feature: MA Experiment 20001247 PARAMETER Experiment Name: At_Far-red-induction_P Parameter: Light Value: Far-red vs. White
  misc_feature: MA Experiment 20001247 PARAMETER Experiment Name: At_Far-red-induction_P Parameter: Organism Value: A. thaliana
  misc_feature: MA Experiment 20001247 PARAMETER Experiment Name: At_Far-red-induction_P Parameter: Plant Line Value: Columbia
  misc_feature: MA Experiment 20001247 PARAMETER Experiment Name: At_Far-red-induction_P Parameter: Timepoint (hr) Value: 1
  misc_feature: MA Experiment 20001247 PARAMETER Experiment Name: At_Far-red-induction_P Parameter: Tissue Value: Whole Plant
  misc_feature: MA Experiment ID: 20001450 Result: Up-regulated in Transcription
  misc_feature: MA Experiment 20001450 PARAMETER Experiment Name: At_Far-red-induction_P Parameter: Age (day) Value: 7
  misc_feature: MA Experiment 20001450 PARAMETER Experiment Name: At_Far-red-induction_P Parameter: Light Value: Far-red vs. White
  misc_feature: MA Experiment 20001450 PARAMETER Experiment Name: At_Far-red-induction_P Parameter: Organism Value: A. thaliana
  misc_feature: MA Experiment 20001450 PARAMETER Experiment Name: At_Far-red-induction_P Parameter: Plant Line Value: Columbia
  misc_feature: MA Experiment 20001450 PARAMETER Experiment Name: At_Far-red-induction_P Parameter: Timepoint (hr) Value: 8
  misc_feature: MA Experiment 20001450 PARAMETER Experiment Name: At_Far-red-induction_P Parameter: Tissue Value: Whole Plant
  misc_feature: MA Experiment ID: 20001904 Result: Up-regulated in Transcription
  misc_feature: MA Experiment 20001904 PARAMETER Experiment Name: At_Drought_Reproduction_P Parameter: Age (day) Value: 37
  misc_feature: MA Experiment 20001904 PARAMETER Experiment Name: At_Drought_Reproduction_P Parameter: Organism Value: A. thaliana
  misc_feature: MA Experiment 20001904 PARAMETER Experiment Name: At_Drought_Reproduction_P Parameter: Plant Line Value: WS
  misc_feature: MA Experiment 20001904 PARAMETER Experiment Name: At_Drought_Reproduction_P Parameter: Timepoint (day) Value: 7
  misc_feature: MA Experiment 20001904 PARAMETER Experiment Name: At_Drought_Reproduction_P Parameter: Tissue Value: Rosettes
  misc_feature: MA Experiment 20001904 PARAMETER Experiment Name: At_Drought_Reproduction_P Parameter: Treatment Value: Drought vs. No Drought
  misc_feature: MA Experiment ID: 20001905 Result: Up-regulated in Transcription
  misc_feature: MA Experiment 20001905 PARAMETER Experiment Name: At_Drought_Reproduction_P Parameter: Age (day) Value: 40
  misc_feature: MA Experiment 20001905 PARAMETER Experiment Name: At_Drought_Reproduction_P Parameter: Organism Value: A. thaliana
  misc_feature: MA Experiment 20001905 PARAMETER Experiment Name: At_Drought_Reproduction_P Parameter: Plant Line Value: WS
  misc_feature: MA Experiment 20001905 PARAMETER Experiment Name: At_Drought_Reproduction_P Parameter: Timepoint (day) Value: 10
  misc_feature: MA Experiment 20001905 PARAMETER Experiment Name: At_Drought_Reproduction_P Parameter: Tissue Value: Rosettes
  misc_feature: MA Experiment 20001905 PARAMETER Experiment Name: At_Drought_Reproduction_P Parameter: Treatment Value: Drought vs. No Drought
accgaatttgatttttatttttctctctcaaagtttttcttgggagagcaacaatggcgatgaggaagcttttatcgaagaaactcttcaatatcacgaatgttgcttcacagagtcttatgaattgtcgcatttcgtcttcttcgttagccgtacgaaccagagttccgaatgattcaacagatacaaccaaaatcgcaccggagcctggagatttggcgatgtcgcgaaggttcatgcataacagtgctatgattaggccggcggagattatgcagatgccggtgggagagagtttgattgagaaactccgtgagattgatggaagcaaggatcggattcgattagacggactttctccgccggagagggagacgagtttgacggtggcggatacgaagaagctgcttagagcggcgcagatcgagattgtgaaatcgaagctaagagaaacgggaagaagctggatgccgtataaggagtttgttagcgtttgtggtgaagcttcttcagatccagatctcggatctaaaatcgcgaagatgcttgatgattcagcaaacgtcatcgttttgggagattccgtttgtattagacctgatcaggttaccaaatccattgaaggactgcttcctttgccaaagatccataacccaaatgaccctcggagaatcgagtttaaagagcttgaagctgaaaaggcagtgatcgatgtgaaagctcacactttggtgcggaaagagctttgggctggtctcggttacttgatcctacagactgcggggttcatgaggctaacgttttgggaactctcgtgggacgtgatggagccaatctgtttctatgtcacgtccgtgtactttatggctggttacgcgtttttcctcaggacatcgaaagagccttcttttgaagggttttaccaaagcaggttcgaggcgaaacagagaaagttgatgaatgagtatgagtttgatctggagaggtataatgaactgaagaagctgttttgctctaagccttcggatcatgtttccaagattcttggagctatcaagagttaaaattttgattaggggaaaaattgcttagattcaatgttgttgtcacaaatggtgtctgattttccctaactagagaattttcccccaaaaaaaagtaagaaaaaaacgaatgggtactactctcaaatttttcagttttcgaaaaaaagacaaagaggttgtttttattattgcggcttatgtaacatcagggaagagttaggtttttgttttcgatttttattttttattttttttatttttttattttaggcccgatttaaaatttaccattgtgtaaataaatgtttgaaggtgtaatataatccagaattaattttttgc

SEQ ID NO: 107191 - protein, 336 aa, Arabidopsis thaliana
  peptide (1)..(336): Ceres Seq. ID no. 13621655
  misc_feature (147)..(328): Pfam Name: Protein of unknown function, DUF607 Pfam Description: Protein of unknown function, DUF607
  misc_feature (1)..(336): Homolog of NCBI NO: 15224063 NR Description: expressed protein [Arabidopsis thaliana]
  misc_feature (1)..(336): Homolog of NCBI NO: 24496456 NR Description: hypothetical protein [Arabidopsis thaliana]
  misc_feature (3)..(336): Homolog of NCBI NO: 15234535 NR Description: hypothetical protein [Arabidopsis thaliana]
  misc_feature (20)..(318): Homolog of NCBI NO: 14596231 NR Description: Unknown protein [Arabidopsis thaliana]
  misc_feature (20)..(318): Homolog of NCBI NO: 15240047 NR Description: expressed protein [Arabidopsis thaliana] contains similarity to unknown
  misc_feature (110)..(323): Homolog of NCBI NO: 37535778 NR Description: unknown protein [Oryza sativa (japonica
  misc_feature (96)..(323): Homolog of NCBI NO: 15239011 NR Description: hypothetical protein [Arabidopsis thaliana]
  misc_feature (1)..(317): Homolog of NCBI NO: 20330769 NR Description: Hypothetical protein [Oryza sativa (japonica
  misc_feature (105)..(328): Homolog of NCBI NO: 18391039 NR Description: expressed protein [Arabidopsis thaliana]
  misc_feature (107)..(336): Homolog of NCBI NO: 34909244 NR Description: B1148D12.10 [Oryza sativa (japonica
MAMRKLLSKKLFNITNVASQSLMNCRISSSSLAVRTRVPNDSTDTTKIAPEPGDLAMSRRFMHNSAMIRPAEIMQMPVGESLIEKLREIDGSKDRIRLDGLSPPERETSLTVADTKKLLRAAQIEIVKSKLRETGRSWMPYKEFVSVCGEASSDPDLGSKIAKMLDDSANVIVLGDSVCIRPDQVTKSIEGLLPLPKIHNPNDPRRIEFKELEAEKAVIDVKAHTLVRKELWAGLGYLILQTAGFMRLTFWELSWDVMEPICFYVTSVYFMAGYAFFLRTSKEPSFEGFYQSRFEAKQRKLMNEYEFDLERYNELKKLFCSKPSDHVSKILGAIKS

SEQ ID NO: 107192 - protein, 334 aa, Arabidopsis thaliana
  peptide (1)..(334): Ceres Seq. ID no. 13621656
  misc_feature (145)..(326): Pfam Name: Protein of unknown function, DUF607 Pfam Description: Protein of unknown function, DUF607
  misc_feature (1)..(334): Homolog of NCBI NO: 15224063 NR Description: expressed protein [Arabidopsis thaliana]
  misc_feature (1)..(334): Homolog of NCBI NO: 24496456 NR Description: hypothetical protein [Arabidopsis thaliana]
  misc_feature (1)..(334): Homolog of NCBI NO: 15234535 NR Description: hypothetical protein [Arabidopsis thaliana]
  misc_feature (18)..(316): Homolog of NCBI NO: 14596231 NR Description: Unknown protein [Arabidopsis thaliana]
  misc_feature (18)..(316): Homolog of NCBI NO: 15240047 NR Description: expressed protein [Arabidopsis thaliana] contains similarity to unknown
  misc_feature (108)..(321): Homolog of NCBI NO: 37535778 NR Description: unknown protein [Oryza sativa (japonica
  misc_feature (94)..(321): Homolog of NCBI NO: 15239011 NR Description: hypothetical protein [Arabidopsis thaliana]
  misc_feature (1)..(315): Homolog of NCBI NO: 20330769 NR Description: Hypothetical protein [Oryza sativa (japonica
  misc_feature (103)..(326): Homolog of NCBI NO: 18391039 NR Description: expressed protein [Arabidopsis thaliana]
  misc_feature (105)..(334): Homolog of NCBI NO: 34909244 NR Description: B1148D12.10 [Oryza sativa (japonica
MRKLLSKKLFNITNVASQSLMNCRISSSSLAVRTRVPNDSTDTTKIAPEPGDLAMSRRFMHNSAMIRPAEIMQMPVGESLIEKLREIDGSKDRIRLDGLSPPERETSLTVADTKKLLRAAQIEIVKSKLRETGRSWMPYKEFVSVCGEASSDPDLGSKIAKMLDDSANVIVLGDSVCIRPDQVTKSIEGLLPLPKIHNPNDPRRIEFKELEAEKAVIDVKAHTLVRKELWAGLGYLILQTAGFMRLTFWELSWDVMEPICFYVTSVYFMAGYAFFLRTSKEPSFEGFYQSRFEAKQRKLMNEYEFDLERYNELKKLFCSKPSDHVSKILGAIKS

SEQ ID NO: 107193 - protein, 314 aa, Arabidopsis thaliana
  peptide (1)..(314): Ceres Seq. ID no. 13621657
  misc_feature (125)..(306): Pfam Name: Protein of unknown function, DUF607 Pfam Description: Protein of unknown function, DUF607
  misc_feature (1)..(314): Homolog of NCBI NO: 15224063 NR Description: expressed protein [Arabidopsis thaliana]
  misc_feature (1)..(314): Homolog of NCBI NO: 24496456 NR Description: hypothetical protein [Arabidopsis thaliana]
  misc_feature (1)..(314): Homolog of NCBI NO: 15234535 NR Description: hypothetical protein [Arabidopsis thaliana]
  misc_feature (1)..(296): Homolog of NCBI NO: 14596231 NR Description: Unknown protein [Arabidopsis thaliana]
  misc_feature (1)..(296): Homolog of NCBI NO: 15240047 NR Description: expressed protein [Arabidopsis thaliana] contains similarity to unknown
  misc_feature (88)..(301): Homolog of NCBI NO: 37535778 NR Description: unknown protein [Oryza sativa (japonica
  misc_feature (74)..(301): Homolog of NCBI NO: 15239011 NR Description: hypothetical protein [Arabidopsis thaliana]
  misc_feature (1)..(295): Homolog of NCBI NO: 20330769 NR Description: Hypothetical protein [Oryza sativa (japonica
  misc_feature (83)..(306): Homolog of NCBI NO: 18391039 NR Description: expressed protein [Arabidopsis thaliana]
  misc_feature (85)..(314): Homolog of NCBI NO: 34909244 NR Description: B1148D12.10 [Oryza sativa (japonica
MNCRISSSSLAVRTRVPNDSTDTTKIAPEPGDLAMSRRFMHNSAMIRPAEIMQMPVGESLIEKLREIDGSKDRIRLDGLSPPERETSLTVADTKKLLRAAQIEIVKSKLRETGRSWMPYKEFVSVCGEASSDPDLGSKIAKMLDDSANVIVLGDSVCIRPDQVTKSIEGLLPLPKIHNPNDPRRIEFKELEAEKAVIDVKAHTLVRKELWAGLGYLILQTAGFMRLTFWELSWDVMEPICFYVTSVYFMAGYAFFLRTSKEPSFEGFYQSRFEAKQRKLMNEYEFDLERYNELKKLFCSKPSDHVSKILGAIKS

SEQ ID NO: 107194 - DNA, 1703 bp, Arabidopsis thaliana
  misc_feature (1)..(1703): Ceres Seq. ID no. 13621668
  misc_feature: MA Experiment ID: 20000307 Result: Up-regulated in Transcription
  misc_feature: MA Experiment 20000307 PARAMETER Experiment Name: At_Germinating_Seeds_Sub_P Parameter: Age (hr) Value: 24 vs. 0
  misc_feature: MA Experiment 20000307 PARAMETER Experiment Name: At_Germinating_Seeds_Sub_P Parameter: Organism Value: A. thaliana
  misc_feature: MA Experiment 20000307 PARAMETER Experiment Name: At_Germinating_Seeds_Sub_P Parameter: Plant Line Value: WS
  misc_feature: MA Experiment 20000307 PARAMETER Experiment Name: At_Germinating_Seeds_Sub_P Parameter: Tissue Value: Germinating Seeds
  misc_feature: MA Experiment ID: 20000328 Result: Down-regulated in Transcription
  misc_feature: MA Experiment 20000328 PARAMETER Experiment Name: At_42deg_Heat_Sub_P Parameter: Age (day) Value: 14
  misc_feature: MA Experiment 20000328 PARAMETER Experiment Name: At_42deg_Heat_Sub_P Parameter: Organism Value: A. thaliana
  misc_feature: MA Experiment 20000328 PARAMETER Experiment Name: At_42deg_Heat_Sub_P Parameter: Plant Line Value: WS
  misc_feature: MA Experiment 20000328 PARAMETER Experiment Name: At_42deg_Heat_Sub_P Parameter: Temperature (deg C) Value: 42 vs. 22
  misc_feature: MA Experiment 20000328 PARAMETER Experiment Name: At_42deg_Heat_Sub_P Parameter: Timepoint (hr) Value: 6
  misc_feature: MA Experiment 20000328 PARAMETER Experiment Name: At_42deg_Heat_Sub_P Parameter: Tissue Value: Aerial
  misc_feature: MA Experiment ID: 20000348 Result: Down-regulated in Transcription
  misc_feature: MA Experiment 20000348 PARAMETER Experiment Name: At_100uM_ABA_Sub_P Parameter: Age (day) Value: 14
  misc_feature: MA Experiment 20000348 PARAMETER Experiment Name: At_100uM_ABA_Sub_P Parameter: Organism Value: A. thaliana
  misc_feature: MA Experiment 20000348 PARAMETER Experiment Name: At_100uM_ABA_Sub_P Parameter: Plant Line Value: WS
  misc_feature: MA Experiment 20000348 PARAMETER Experiment Name: At_100uM_ABA_Sub_P Parameter: Timepoint (hr) Value: 1
  misc_feature: MA Experiment 20000348 PARAMETER Experiment Name: At_100uM_ABA_Sub_P Parameter: Tissue Value: Aerial
  misc_feature: MA Experiment 20000348 PARAMETER Experiment Name: At_100uM_ABA_Sub_P Parameter: Treatment Value: 100uM ABA vs. No Treatment
gacattttagagagcctcgacagagaattatttttttcttttttattttcgtttacaagtttcaattcttctctatatattaaaaaaacaaacagatgcaaccttggagaagaaaatttccattgttcgaaacaggagttacaatgaaacagaggaagaacagtaatctctcaatcttcgtcgtagtcttctctgttttcctcttcgggatcttcatgtacaatgaagacgtcaagtccatcgcagagtttcctttctccacctcaaaacctcacgacgtccacgacgaagcgacaccgatcacagagatcacaacactaccggttcaagagtcgatcaagaactcagacccaattcaggaatcgatcaaaaacgcagactcagttcaagattcagttaaagacgtagcagaaccagttcaagaggaggtatcgaaaacagaggaagttaaaaagattgagcttttcgctgcgacggaggatgaagaagacgtggaattgccgccggaggaatgcgatttgttcaccggagaatgggtttttgataacgagacgcatccattgtataaagaggatcaatgtgagttcttgacggcgcaagtcacttgcatgagaaatggaagaagagattctctgtatcagaactggagatggcaacctagagattgttctttaccaaagttcaaagcgaaattgctgttggagaagctaaggaacaagagaatgatgttcgttggagattccctaaaccggaaccaatgggaatcaatggtttgtttggttcaatcagtggttcctcccggtcgaaaaagcttgaacaaaaccggttctctctccgtcttccgagtcgaggattataatgcgacggtggagttttattgggcaccatttttggtggaatcgaattcagatgatccaaatatgcatagtatacttaaccgtataataatgcctgagtccattgaaaagcatggagtcaactggaaaggcgttgactttcttgttttcaacacttacatttggtggatgaacacattcgctatgaaagtcctacgaggatcgttcgataaaggagacaccgagtatgaggagatcgaacggccagtagcgtataggagagtgatgaggacttggggagattgggtggaacgaaatattgatcctctacgtaccactgtcttctttgctagcatgtctcctcttcacatcaagagcttggattgggagaatccagatgggatcaagtgtgcattagagacgacaccaatcctaaacatgtcaatgccattcagcgtaggaacagactacagactgttttcagtagcggaaaacgtcacgcattctcttaatgttccggtttactttctcaacattaccaaactctccgaataccggaaagatgctcacacttcggttcacacaatccgacaaggcaaaatgctgacgccggagcaacaagccgatcccaacacttacgccgattgtatccattggtgtcttcccggtttacctgacacgtggaatgagttcctttacacacgtatcatttcccgttcgtgacctacaaaatatttgaaatatctctttttcaatattttttcccactttgctccatccaatggaagagccttgaaattttattattttgatgtcctaatgttcataatttttcttgaattgtaattgtgaaatgtttctttcttc

SEQ ID NO: 107195 - protein, 487 aa, Arabidopsis thaliana
  peptide (1)..(487): Ceres Seq. ID no. 13621669
  misc_feature (310)..(483): Pfam Name: Arabidopsis proteins of unknown function Pfam Description: Arabidopsis proteins of unknown function
  misc_feature (1)..(487): Homolog of NCBI NO: 15228789 NR Description: expressed protein [Arabidopsis thaliana]
  misc_feature (1)..(487): Homolog of NCBI NO: 26452343 NR Description: unknown protein [Arabidopsis thaliana]
  misc_feature (133)..(486): Homolog of NCBI NO: 18405283 NR Description: expressed protein [Arabidopsis thaliana] Unknown protein [Arabidopsis thaliana]
  misc_feature (1)..(57): Homolog of NCBI NO: 18405283 NR Description: expressed protein [Arabidopsis thaliana] Unknown protein [Arabidopsis thaliana]
  misc_feature (133)..(486): Homolog of NCBI NO: 25366731 NR Description: hypothetical protein At2g40150 [imported] -
  misc_feature (17)..(57): Homolog of NCBI NO: 25366731 NR Description: hypothetical protein At2g40150 [imported] -
  misc_feature (75)..(486): Homolog of NCBI NO: 34907966 NR Description: P0446G04.14 [Oryza sativa (japonica
  misc_feature (116)..(484): Homolog of NCBI NO: 18405285 NR Description: expressed protein [Arabidopsis thaliana]
  misc_feature (1)..(487): Homolog of NCBI NO: 34898234 NR Description: P0034A04.28 [Oryza sativa (japonica
  misc_feature (102)..(483): Homolog of NCBI NO: 18412850 NR Description: expressed protein [Arabidopsis thaliana]
MQPWRRKFPLFETGVTMKQRKNSNLSIFVVVFSVFLFGIFMYNEDVKSIAEFPFSTSKPHDVHDEATPITEITTLPVQESIKNSDPIQESIKNADSVQDSVKDVAEPVQEEVSKTEEVKKIELFAATEDEEDVELPPEECDLFTGEWVFDNETHPLYKEDQCEFLTAQVTCMRNGRRDSLYQNWRWQPRDCSLPKFKAKLLLEKLRNKRMMFVGDSLNRNQWESMVCLVQSVVPPGRKSLNKTGSLSVFRVEDYNATVEFYWAPFLVESNSDDPNMHSILNRIIMPESIEKHGVNWKGVDFLVFNTYIWWMNTFAMKVLRGSFDKGDTEYEEIERPVAYRRVMRTWGDWVERNIDPLRTTVFFASMSPLHIKSLDWENPDGIKCALETTPILNMSMPFSVGTDYRLFSVAENVTHSLNVPVYFLNITKLSEYRKDAHTSVHTIRQGKMLTPEQQADPNTYADCIHWCLPGLPDTWNEFLYTRIISRS

SEQ ID NO: 107196 - protein, 471 aa, Arabidopsis thaliana; identical to SEQ ID NO: 74247
  peptide (1)..(471): Ceres Seq. ID no. 13621670
  misc_feature (294)..(467): Pfam Name: Arabidopsis proteins of unknown function Pfam Description: Arabidopsis proteins of unknown function
  misc_feature (1)..(471): Homolog of NCBI NO: 15228789 NR Description: expressed protein [Arabidopsis thaliana]
  misc_feature (1)..(471): Homolog of NCBI NO: 26452343 NR Description: unknown protein [Arabidopsis thaliana]
  misc_feature (117)..(470): Homolog of NCBI NO: 18405283 NR Description: expressed protein [Arabidopsis thaliana] Unknown protein [Arabidopsis thaliana]
  misc_feature (1)..(41): Homolog of NCBI NO: 18405283 NR Description: expressed protein [Arabidopsis thaliana] Unknown protein [Arabidopsis thaliana]
  misc_feature (117)..(470): Homolog of NCBI NO: 25366731 NR Description: hypothetical protein At2g40150 [imported] -
  misc_feature (1)..(41): Homolog of NCBI NO: 25366731 NR Description: hypothetical protein At2g40150 [imported] -
  misc_feature (59)..(470): Homolog of NCBI NO: 34907966 NR Description: P0446G04.14 [Oryza sativa (japonica
  misc_feature (100)..(468): Homolog of NCBI NO: 18405285 NR Description: expressed protein [Arabidopsis thaliana]
  misc_feature (1)..(471): Homolog of NCBI NO: 34898234 NR Description: P0034A04.28 [Oryza sativa (japonica
  misc_feature (86)..(467): Homolog of NCBI NO: 18412850 NR Description: expressed protein [Arabidopsis thaliana]

SEQ ID NO: 107197 - protein, 447 aa, Arabidopsis thaliana; identical to SEQ ID NO: 74248
  peptide (1)..(447): Ceres Seq. ID no. 13621671
  misc_feature (270)..(443): Pfam Name: Arabidopsis proteins of unknown function Pfam Description: Arabidopsis proteins of unknown function
  misc_feature (1)..(447): Homolog of NCBI NO: 15228789 NR Description: expressed protein [Arabidopsis thaliana]
  misc_feature (1)..(447): Homolog of NCBI NO: 26452343 NR Description: unknown protein [Arabidopsis thaliana]
  misc_feature (93)..(446): Homolog of NCBI NO: 18405283 NR Description: expressed protein [Arabidopsis thaliana] Unknown protein [Arabidopsis thaliana]
  misc_feature (1)..(17): Homolog of NCBI NO: 18405283 NR Description: expressed protein [Arabidopsis thaliana] Unknown protein [Arabidopsis thaliana]
  misc_feature (93)..(446): Homolog of NCBI NO: 25366731 NR Description: hypothetical protein At2g40150 [imported] -
  misc_feature (1)..(17): Homolog of NCBI NO: 25366731 NR Description: hypothetical protein At2g40150 [imported] -
  misc_feature (35)..(446): Homolog of NCBI NO: 34907966 NR Description: P0446G04.14 [Oryza sativa (japonica
  misc_feature (76)..(444): Homolog of NCBI NO: 18405285 NR Description: expressed protein [Arabidopsis thaliana]
  misc_feature (1)..(447): Homolog of NCBI NO: 34898234 NR Description: P0034A04.28 [Oryza sativa (japonica
  misc_feature (62)..(443): Homolog of NCBI NO: 18412850 NR Description: expressed protein [Arabidopsis thaliana]

SEQ ID NO: 107198 - DNA, 863 bp, Arabidopsis thaliana
  misc_feature (1)..(863): Ceres Seq. ID no. 13621680
  misc_feature: MA Experiment ID: 20000171 Result: Up-regulated in Transcription
  misc_feature: MA Experiment 20000171 PARAMETER Experiment Name: At_42deg_Heat_P Parameter: Age (day) Value: 14
  misc_feature: MA Experiment 20000171 PARAMETER Experiment Name: At_42deg_Heat_P Parameter: Organism Value: A. thaliana
  misc_feature: MA Experiment 20000171 PARAMETER Experiment Name: At_42deg_Heat_P Parameter: Plant Line Value: WS
  misc_feature: MA Experiment 20000171 PARAMETER Experiment Name: At_42deg_Heat_P Parameter: Temperature (deg C) Value: 42 vs. 22
  misc_feature: MA Experiment 20000171 PARAMETER Experiment Name: At_42deg_Heat_P Parameter: Timepoint (hr) Value: 1
  misc_feature: MA Experiment 20000171 PARAMETER Experiment Name: At_42deg_Heat_P Parameter: Tissue Value: Aerial
  misc_feature: MA Experiment ID: 20000173 Result: Up-regulated in Transcription
  misc_feature: MA Experiment 20000173 PARAMETER Experiment Name: At_42deg_Heat_P Parameter: Age (day) Value: 14
  misc_feature: MA Experiment 20000173 PARAMETER Experiment Name: At_42deg_Heat_P Parameter: Organism Value: A. thaliana
  misc_feature: MA Experiment 20000173 PARAMETER Experiment Name: At_42deg_Heat_P Parameter: Plant Line Value: WS
  misc_feature: MA Experiment 20000173 PARAMETER Experiment Name: At_42deg_Heat_P Parameter: Temperature (deg C) Value: 42 vs. 22
  misc_feature: MA Experiment 20000173 PARAMETER Experiment Name: At_42deg_Heat_P Parameter: Timepoint (hr) Value: 6
  misc_feature: MA Experiment 20000173 PARAMETER Experiment Name: At_42deg_Heat_P Parameter: Tissue Value: Aerial
  misc_feature: MA Experiment ID: 20000179 Result: Down-regulated in Transcription
  misc_feature: MA Experiment 20000179 PARAMETER Experiment Name: At_Germinating_Seeds_P Parameter: Age (hr) Value: 6 vs. 0
  misc_feature: MA Experiment 20000179 PARAMETER Experiment Name: At_Germinating_Seeds_P Parameter: Tissue Value: Germinating Seeds
  misc_feature: MA Experiment ID: 20000180 Result: Down-regulated in Transcription
  misc_feature: MA Experiment 20000180 PARAMETER Experiment Name: At_Germinating_Seeds_P Parameter: Age (hr) Value: 24 vs. 0
  misc_feature: MA Experiment 20000180 PARAMETER Experiment Name: At_Germinating_Seeds_P Parameter: Tissue Value: Germinating Seeds
  misc_feature: MA Experiment ID: 20000451 Result: Up-regulated in Transcription
  misc_feature: MA Experiment 20000451 PARAMETER Experiment Name: At_CS6879_Shoots-Roots_P Parameter: Age (day) Value: 14
  misc_feature: MA Experiment 20000451 PARAMETER Experiment Name: At_CS6879_Shoots-Roots_P Parameter: Organism Value: A. thaliana
  misc_feature: MA Experiment 20000451 PARAMETER Experiment Name: At_CS6879_Shoots-Roots_P Parameter: Plant Line Value: CS6879 vs. WS
  misc_feature: MA Experiment 20000451 PARAMETER Experiment Name: At_CS6879_Shoots-Roots_P Parameter: Tissue Value: Roots
  misc_feature: MA Experiment ID: 20001459 Result: Down-regulated in Transcription
  misc_feature: MA Experiment 20001459 PARAMETER Experiment Name: At_50mM_NH4NO3_L-to-H_P Parameter: Age (day) Value: Undefined
  misc_feature: MA Experiment 20001459 PARAMETER Experiment Name: At_50mM_NH4NO3_L-to-H_P Parameter: Organism Value: Undefined
  misc_feature: MA Experiment 20001459 PARAMETER Experiment Name: At_50mM_NH4NO3_L-to-H_P Parameter: Plant Line Value: Undefined
  misc_feature: MA Experiment 20001459 PARAMETER Experiment Name: At_50mM_NH4NO3_L-to-H_P Parameter: Timepoint (hr) Value: 4
  misc_feature: MA Experiment 20001459 PARAMETER Experiment Name: At_50mM_NH4NO3_L-to-H_P Parameter: Tissue Value: Siliques
  misc_feature: MA Experiment 20001459 PARAMETER Experiment Name: At_50mM_NH4NO3_L-to-H_P Parameter: Treatment Value: 50mM NH4NO3 vs. 100mM Manitol
  misc_feature: MA Experiment ID: 20001904 Result: Up-regulated in Transcription
  misc_feature: MA Experiment 20001904 PARAMETER Experiment Name: At_Drought_Reproduction_P Parameter: Age (day) Value: 37
  misc_feature: MA Experiment 20001904 PARAMETER Experiment Name: At_Drought_Reproduction_P Parameter: Organism Value: A. thaliana
  misc_feature: MA Experiment 20001904 PARAMETER Experiment Name: At_Drought_Reproduction_P Parameter: Plant Line Value: WS
  misc_feature: MA Experiment 20001904 PARAMETER Experiment Name: At_Drought_Reproduction_P Parameter: Timepoint (day) Value: 7
  misc_feature: MA Experiment 20001904 PARAMETER Experiment Name: At_Drought_Reproduction_P Parameter: Tissue Value: Rosettes
  misc_feature: MA Experiment 20001904 PARAMETER Experiment Name: At_Drought_Reproduction_P Parameter: Treatment Value: Drought vs. No Drought
  misc_feature: MA Experiment ID: 20001906 Result: Up-regulated in Transcription
  misc_feature: MA Experiment 20001906 PARAMETER Experiment Name: At_Drought_Reproduction_P Parameter: Age (day) Value: 35
  misc_feature: MA Experiment 20001906 PARAMETER Experiment Name: At_Drought_Reproduction_P Parameter: Organism Value: A. thaliana
  misc_feature: MA Experiment 20001906 PARAMETER Experiment Name: At_Drought_Reproduction_P Parameter: Plant Line Value: WS
  misc_feature: MA Experiment 20001906 PARAMETER Experiment Name: At_Drought_Reproduction_P Parameter: Timepoint (day) Value: 5
  misc_feature: MA Experiment 20001906 PARAMETER Experiment Name: At_Drought_Reproduction_P Parameter: Tissue Value: Siliques
  misc_feature: MA Experiment 20001906 PARAMETER Experiment Name: At_Drought_Reproduction_P Parameter: Treatment Value: Drought vs. No Drought
  misc_feature: MA Experiment ID: 20001910 Result: Up-regulated in Transcription
  misc_feature: MA Experiment 20001910 PARAMETER Experiment Name: At_Drought_Reproduction_P Parameter: Age (day) Value: 37
  misc_feature: MA Experiment 20001910 PARAMETER Experiment Name: At_Drought_Reproduction_P Parameter: Organism Value: A. thaliana
  misc_feature: MA Experiment 20001910 PARAMETER Experiment Name: At_Drought_Reproduction_P Parameter: Plant Line Value: WS
  misc_feature: MA Experiment 20001910 PARAMETER Experiment Name: At_Drought_Reproduction_P Parameter: Timepoint (day) Value: 7
  misc_feature: MA Experiment 20001910 PARAMETER Experiment Name: At_Drought_Reproduction_P Parameter: Tissue Value: Flowers
  misc_feature: MA Experiment 20001910 PARAMETER Experiment Name: At_Drought_Reproduction_P Parameter: Treatment Value: Drought vs. No Drought
atgacgaccaccgttattatcattatcttcgttgccatcttcgctacgactcttcacgacgccagaggagcaaccatggaaccgtgtctcgaatcaatgaagactgcttcgcttcctgatcttccgtatgcttatgatgcgctagagccagcaatcagtgaggagatcatgcggctacaccatcagaaacaccaccagacttatgtcactcagtacaacaaagccctcaacagccttcgttctgccatggctgacggtgatcactcctccgtcgtcaaactccaaagcctcatcaagttcaacggcggagggcacgttaaccatgcaatcttctggaaaaacctagccccggttcatgaaggaggtggcaaaccaccgcatgatcctttggcttcggcgatcgatgctcatttcggatcactagaaggattgatccaaaaaatgaacgcggaaggcgctgctgtacagggatctggatgggtgtggtttggattagacagagagcttaagagacttgtcgttgaaaccacagccaaccaggatccattggtgactaagggatcacacctagttcctctaattgggattgacgtgtgggagcatgcctactatccacagtacaagaatgcaagagcggagtacttgaagaacatatggactgtaatcaactggaaatatgcagcggacgtcttcgagaagcacactcgtgatcttgatattaactgagttttatatgtctgtagtagcttttgttttttgggtttcttgtcttgttgataaatacggcagtaccgaagatgcaatattaagtttaagatgctatgtatgtaccttggaaaataacgtttgttaagctttttttt

SEQ ID NO: 107199 - protein, 241 aa, Arabidopsis thaliana
  peptide (1)..(241): Ceres Seq. ID no. 13621681
  misc_feature (1)..(241): Homolog of NCBI NO: 15228896 NR Description: manganese superoxide dismutase, putative thaliana] >gi|11256332|pir||T47752 superoxide dismutase (EC
  misc_feature (8)..(241): Homolog of NCBI NO: 28393535 NR Description: putative manganese superoxide dismutase
  misc_feature (30)..(235): Homolog of NCBI NO: 21553457 NR Description: putative (Mn) superoxide dismutase [Arabidopsis
  misc_feature (30)..(233): Homolog of NCBI NO: 15228407 NR Description: manganese superoxide dismutase (MSD1) thaliana] >gi|21542455|sp|O81235|SODM_ARATH Superoxide dismutase mitochondrial precursor >gi|6016702|gb|AAF01529.1|AC009991_25
  misc_feature (30)..(233): Homolog of NCBI NO: 11256334 NR Description: superoxide dismutase (EC 1.15.1.1) (Mn) - Arabidopsis thaliana >gi|3273751|gb|AAC24832.1| manganese
  misc_feature (32)..(236): Homolog of NCBI NO: 7433350 NR Description: superoxide dismutase (EC 1.15.1.1) (Mn) - radish
  misc_feature (33)..(236): Homolog of NCBI NO: 15778185 NR Description: superoxide dismutase [Raphanus sativus]
  misc_feature (21)..(233): Homolog of NCBI NO: 134672 NR Description: Superoxide dismutase [Mn], mitochondrial precursor
  misc_feature (30)..(233): Homolog of NCBI NO: 464775 NR Description: Superoxide dismutase [Mn], mitochondrial precursor
  misc_feature (36)..(232): Homolog of NCBI NO: 32418882 NR Description: hypothetical protein [Neurospora crassa]
MTTTVIIIIFVAIFATTLHDARGATMEPCLESMKTASLPDLPYAYDALEPAISEEIMRLHHQKHHQTYVTQYNKALNSLRSAMADGDHSSVVKLQSLIKFNGGGHVNHAIFWKNLAPVHEGGGKPPHDPLASAIDAHFGSLEGLIQKMNAEGAAVQGSGWVWFGLDRELKRLVVETTANQDPLVTKGSHLVPLIGIDVWEHAYYPQYKNARAEYLKNIWTVINWKYAADVFEKHTRDLDIN

SEQ ID NO: 107200 - protein, 216 aa, Arabidopsis thaliana
  peptide (1)..(216): Ceres Seq. ID no. 13621682
  misc_feature (1)..(216): Homolog of NCBI NO: 15228896 NR Description: manganese superoxide dismutase, putative thaliana] >gi|11256332|pir||T47752 superoxide dismutase (EC
  misc_feature (1)..(216): Homolog of NCBI NO: 28393535 NR Description: putative manganese superoxide dismutase
  misc_feature (5)..(210): Homolog of NCBI NO: 21553457 NR Description: putative (Mn) superoxide dismutase [Arabidopsis
  misc_feature (5)..(208): Homolog of NCBI NO: 15228407 NR Description: manganese superoxide dismutase (MSD1) thaliana] >gi|21542455|sp|O81235|SODM_ARATH Superoxide dismutase mitochondrial precursor >gi|6016702|gb|AAF01529.1|AC009991_25
  misc_feature (5)..(208): Homolog of NCBI NO: 11256334 NR Description: superoxide dismutase (EC 1.15.1.1) (Mn) - Arabidopsis thaliana >gi|3273751|gb|AAC24832.1| manganese
  misc_feature (7)..(211): Homolog of NCBI NO: 7433350 NR Description: superoxide dismutase (EC 1.15.1.1) (Mn) - radish
  misc_feature (8)..(211): Homolog of NCBI NO: 15778185 NR Description: superoxide dismutase [Raphanus sativus]
  misc_feature (1)..(208): Homolog of NCBI NO: 134672 NR Description: Superoxide dismutase [Mn], mitochondrial precursor
  misc_feature (5)..(208): Homolog of NCBI NO: 464775 NR Description: Superoxide dismutase [Mn], mitochondrial precursor
  misc_feature (11)..(207): Homolog of NCBI NO: 32418882 NR Description: hypothetical protein [Neurospora crassa]
MEPCLESMKTASLPDLPYAYDALEPAISEEIMRLHHQKHHQTYVTQYNKALNSLRSAMADGDHSSVVKLQSLIKFNGGGHVNHAIFWKNLAPVHEGGGKPPHDPLASAIDAHFGSLEGLIQKMNAEGAAVQGSGWVWFGLDRELKRLVVETTANQDPLVTKGSHLVPLIGIDVWEHAYYPQYKNARAEYLKNIWTVINWKYAADVFEKHTRDLDIN

SEQ ID NO: 107201 - protein, 209 aa, Arabidopsis thaliana
  peptide (1)..(209): Ceres Seq. ID no. 13621683
  misc_feature (1)..(209): Homolog of NCBI NO: 15228896 NR Description: manganese superoxide dismutase, putative thaliana] >gi|11256332|pir||T47752 superoxide dismutase (EC
  misc_feature (1)..(209): Homolog of NCBI NO: 28393535 NR Description: putative manganese superoxide dismutase
  misc_feature (1)..(203): Homolog of NCBI NO: 21553457 NR Description: putative (Mn) superoxide dismutase [Arabidopsis
  misc_feature (1)..(201): Homolog of NCBI NO: 15228407 NR Description: manganese superoxide dismutase (MSD1) thaliana] >gi|21542455|sp|O81235|SODM_ARATH Superoxide dismutase mitochondrial precursor >gi|6016702|gb|AAF01529.1|AC009991_25
  misc_feature (1)..(201): Homolog of NCBI NO: 11256334 NR Description: superoxide dismutase (EC 1.15.1.1) (Mn) - Arabidopsis thaliana >gi|3273751|gb|AAC24832.1| manganese
  misc_feature (1)..(204): Homolog of NCBI NO: 7433350 NR Description: superoxide dismutase (EC 1.15.1.1) (Mn) - radish
  misc_feature (1)..(204): Homolog of NCBI NO: 15778185 NR Description: superoxide dismutase [Raphanus sativus]
  misc_feature (1)..(201): Homolog of NCBI NO: 134672 NR Description: Superoxide dismutase [Mn], mitochondrial precursor
  misc_feature (1)..(201): Homolog of NCBI NO: 464775 NR Description: Superoxide dismutase [Mn], mitochondrial precursor
  misc_feature (4)..(200): Homolog of NCBI NO: 32418882 NR Description: hypothetical protein [Neurospora crassa]
MKTASLPDLPYAYDALEPAISEEIMRLHHQKHHQTYVTQYNKALNSLRSAMADGDHSSVVKLQSLIKFNGGGHVNHAIFWKNLAPVHEGGGKPPHDPLASAIDAHFGSLEGLIQKMNAEGAAVQGSGWVWFGLDRELKRLVVETTANQDPLVTKGSHLVPLIGIDVWEHAYYPQYKNARAEYLKNIWTVINWKYAADVFEKHTRDLDIN

SEQ ID NO: 107202 - DNA, 1070 bp, Arabidopsis thaliana
  misc_feature (1)..(1070): Ceres Seq. ID no. 13621692
  misc_feature: MA Experiment ID: 20000173 Result: Down-regulated in Transcription
  misc_feature: MA Experiment 20000173 PARAMETER Experiment Name: At_42deg_Heat_P Parameter: Age (day) Value: 14
  misc_feature: MA Experiment 20000173 PARAMETER Experiment Name: At_42deg_Heat_P Parameter: Organism Value: A. thaliana
  misc_feature: MA Experiment 20000173 PARAMETER Experiment Name: At_42deg_Heat_P Parameter: Plant Line Value: WS
  misc_feature: MA Experiment 20000173 PARAMETER Experiment Name: At_42deg_Heat_P Parameter: Temperature (deg C) Value: 42 vs. 22
  misc_feature: MA Experiment 20000173 PARAMETER Experiment Name: At_42deg_Heat_P Parameter: Timepoint (hr) Value: 6
  misc_feature: MA Experiment 20000173 PARAMETER Experiment Name: At_42deg_Heat_P Parameter: Tissue Value: Aerial
  misc_feature: MA Experiment ID: 20000179 Result: Up-regulated in Transcription
  misc_feature: MA Experiment 20000179 PARAMETER Experiment Name: At_Germinating_Seeds_P Parameter: Age (hr) Value: 6 vs. 0
  misc_feature: MA Experiment 20000179 PARAMETER Experiment Name: At_Germinating_Seeds_P Parameter: Tissue Value: Germinating Seeds
  misc_feature: MA Experiment ID: 20000182 Result: Up-regulated in Transcription
  misc_feature: MA Experiment 20000182 PARAMETER Experiment Name: At_2mM_SA_P Parameter: Age (day) Value: 14
  misc_feature: MA Experiment 20000182 PARAMETER Experiment Name: At_2mM_SA_P Parameter: Organism Value: A. thaliana
  misc_feature: MA Experiment 20000182 PARAMETER Experiment Name: At_2mM_SA_P Parameter: Plant Line Value: WS
  misc_feature: MA Experiment 20000182 PARAMETER Experiment Name: At_2mM_SA_P Parameter: Timepoint (hr) Value: 6
  misc_feature: MA Experiment 20000182 PARAMETER Experiment Name: At_2mM_SA_P Parameter: Tissue Value: Aerial
  misc_feature: MA Experiment 20000182 PARAMETER Experiment Name: At_2mM_SA_P Parameter: Treatment Value: 2mM SA vs. No Treatment
  misc_feature: MA Experiment ID: 20000184 Result: Down-regulated in Transcription
  misc_feature: MA Experiment 20000184 PARAMETER Experiment Name: At_Shoots__P Parameter: Age (day) Value: 7
  misc_feature: MA Experiment 20000184 PARAMETER Experiment Name: At_Shoots__P Parameter: Tissue Value: Shoots vs. Whole Plant
  misc_feature: MA Experiment ID: 20000234 Result: Down-regulated in Transcription
  misc_feature: MA Experiment 20000234 PARAMETER Experiment Name: At_Siliques_P Parameter: Age (day) Value: 21
  misc_feature: MA Experiment 20000234 PARAMETER Experiment Name: At_Siliques_P Parameter: Organism Value: A. thaliana
  misc_feature: MA Experiment 20000234 PARAMETER Experiment Name: At_Siliques_P Parameter: Plant Line Value: WS
  misc_feature: MA Experiment 20000234 PARAMETER Experiment Name: At_Siliques_P Parameter: Tissue Value: Less Than 5mm Siliques vs. Whole Plant
  misc_feature: MA Experiment ID: 20000235 Result: Down-regulated in Transcription
  misc_feature: MA Experiment 20000235 PARAMETER Experiment Name: At_Siliques_P Parameter: Age (day) Value: 21
  misc_feature: MA Experiment 20000235 PARAMETER Experiment Name: At_Siliques_P Parameter: Organism Value: A. thaliana
  misc_feature: MA Experiment 20000235 PARAMETER Experiment Name: At_Siliques_P Parameter: Plant Line Value: WS
  misc_feature: MA Experiment 20000235 PARAMETER Experiment Name: At_Siliques_P Parameter: Tissue Value: 5-10mm Siliques vs. Whole Plant
  misc_feature: MA Experiment ID: 20000265 Result: Down-regulated in Transcription
  misc_feature: MA Experiment 20000265 PARAMETER Experiment Name: At_Open_Flower_P Parameter: Age (day) Value: 21
  misc_feature: MA Experiment 20000265 PARAMETER Experiment Name: At_Open_Flower_P Parameter: Plant Line Value: WS
  misc_feature: MA Experiment 20000265 PARAMETER Experiment Name: At_Open_Flower_P Parameter: Tissue Value: Closed Flower vs. Whole Plant
  misc_feature: MA Experiment ID: 20000438 Result: Down-regulated in Transcription
  misc_feature: MA Experiment 20000438 PARAMETER Experiment Name: At_Shoots__P Parameter: Age (day) Value: 14
  misc_feature: MA Experiment 20000438 PARAMETER Experiment Name: At_Shoots__P Parameter: Tissue Value: Shoots vs. Whole Plant
  misc_feature: MA Experiment ID: 20000573 Result: Up-regulated in Transcription
  misc_feature: MA Experiment 20000573 PARAMETER Experiment Name: At_100uM_ABA_Mutants__P Parameter: Organism Value: A. thaliana
  misc_feature: MA Experiment 20000573 PARAMETER Experiment Name: At_100uM_ABA_Mutants__P Parameter: Plant Line Value: CS22 vs. Ler wt
  misc_feature: MA Experiment 20000573 PARAMETER Experiment Name: At_100uM_ABA_Mutants__P Parameter: Timepoint (hr) Value: N/A
  misc_feature: MA Experiment 20000573 PARAMETER Experiment Name: At_100uM_ABA_Mutants__P Parameter: Tissue Value: Whole Plant
  misc_feature: MA Experiment 20000573 PARAMETER Experiment Name: At_100uM_ABA_Mutants__P Parameter: Treatment Value: None
  misc_feature: MA Experiment ID: 20001247 Result: Up-regulated in Transcription
  misc_feature: MA Experiment 20001247 PARAMETER Experiment Name: At_Far-red-induction_P Parameter: Age (day) Value: 7
  misc_feature: MA Experiment 20001247 PARAMETER Experiment Name: At_Far-red-induction_P Parameter: Light Value: Far-red vs. White
  misc_feature: MA Experiment 20001247 PARAMETER Experiment Name: At_Far-red-induction_P Parameter: Organism Value: A. thaliana
  misc_feature: MA Experiment 20001247 PARAMETER Experiment Name: At_Far-red-induction_P Parameter: Plant Line Value: Columbia
  misc_feature: MA Experiment 20001247 PARAMETER Experiment Name: At_Far-red-induction_P Parameter: Timepoint (hr) Value: 1
  misc_feature: MA Experiment 20001247 PARAMETER Experiment Name: At_Far-red-induction_P Parameter: Tissue Value: Whole Plant
  misc_feature: MA Experiment ID: 20001451 Result: Up-regulated in Transcription
  misc_feature: MA Experiment 20001451 PARAMETER Experiment Name: At_Far-red-induction_P Parameter: Age (day) Value: 7
  misc_feature: MA Experiment 20001451 PARAMETER Experiment Name: At_Far-red-induction_P Parameter: Light Value: Far-red vs. White
  misc_feature: MA Experiment 20001451 PARAMETER Experiment Name: At_Far-red-induction_P Parameter: Organism Value: A. thaliana
  misc_feature: MA Experiment 20001451 PARAMETER Experiment Name: At_Far-red-induction_P Parameter: Plant Line Value: Columbia
  misc_feature: MA Experiment 20001451 PARAMETER Experiment Name: At_Far-red-induction_P Parameter: Timepoint (hr) Value: 24
  misc_feature: MA Experiment 20001451 PARAMETER Experiment Name: At_Far-red-induction_P Parameter: Tissue Value: Whole Plant
  misc_feature: MA Experiment ID: 20001905 Result: Up-regulated in Transcription
  misc_feature: MA Experiment 20001905 PARAMETER Experiment Name: At_Drought_Reproduction_P Parameter: Age (day) Value: 40
  misc_feature: MA Experiment 20001905 PARAMETER Experiment Name: At_Drought_Reproduction_P Parameter: Organism Value: A. thaliana
  misc_feature: MA Experiment 20001905 PARAMETER Experiment Name: At_Drought_Reproduction_P Parameter: Plant Line Value: WS
  misc_feature: MA Experiment 20001905 PARAMETER Experiment Name: At_Drought_Reproduction_P Parameter: Timepoint (day) Value: 10
  misc_feature: MA Experiment 20001905 PARAMETER Experiment Name: At_Drought_Reproduction_P Parameter: Tissue Value: Rosettes
  misc_feature: MA Experiment 20001905 PARAMETER Experiment Name: At_Drought_Reproduction_P Parameter: Treatment Value: Drought vs. No Drought
  misc_feature: MA Experiment ID: 20001910 Result: Up-regulated in Transcription
  misc_feature: MA Experiment 20001910 PARAMETER Experiment Name: At_Drought_Reproduction_P Parameter: Age (day) Value: 37
  misc_feature: MA Experiment 20001910 PARAMETER Experiment Name: At_Drought_Reproduction_P Parameter: Organism Value: A. thaliana
  misc_feature: MA Experiment 20001910 PARAMETER Experiment Name: At_Drought_Reproduction_P Parameter: Plant Line Value: WS
  misc_feature: MA Experiment 20001910 PARAMETER Experiment Name: At_Drought_Reproduction_P Parameter: Timepoint (day) Value: 7
  misc_feature: MA Experiment 20001910 PARAMETER Experiment Name: At_Drought_Reproduction_P Parameter: Tissue Value: Flowers
  misc_feature: MA Experiment 20001910 PARAMETER Experiment Name: At_Drought_Reproduction_P Parameter: Treatment Value: Drought vs. No Drought
gggaatgacgttgactttcctttacaaatttcttcttcttcttccttgcccgagtttttctgttgatctaaattctcggaatctggggattttcttttcccggtgtgtctatctcgccgggaaactctaataaaccatcttttcttacttctctatactatcctacgattgcttttcgatttttttttgtcggaattgttgtttgtgtaatattctcgaaagctcggtctcaacaatgggaactccagaatttccagatctgggtaaacactgctccgtcgattattgcaaacagatcgatttcttgcccttcacatgcgatcgctgccttcaggtgtattgtctggatcatcgtagctatatgaaacacgattgtccaaaaggaaacagaggagatgtcactgtggttatttgtccattatgtgctaaaggagttagattaaaccctgacgaagatcccaacatcacctgggagaaacatgttaatacagactgtgatccatctaactacgaaaaagctgtcaagaagaagaaatgtcctgttcctagatgcagagaactcttgacattctccaatactattaaatgtcgagattgtagcatcgatcattgtttgaaacatcggtttggacctgatcatagttgttctggacccaagaagcctgaatcgagtttctcattcatgggtttcttgagtacaaacacaaaagaagctcctgcatcatcatcatcttcttcgagatggtctagtcttttcgcttctgcggaagcaagtattagtagactcggtaacgatataagccagaagttacagtttgcgagtggcaatgatggcaattcagagaaaacgcaagagaggaatggaaaacagaattgtggcaaagttacggttgatgtttgtcccaaatgtagtagagggtttcgtgatccggtggatctattgaagcatatcgataaggatcatcgtggcacttctaaagcctagaagaaaggaagtggttttatatttgtgtgatttgtatcattctttgtaacacagccaggaagaaagaaatttccatattcttttg

SEQ ID NO: 107203 - protein, 249 aa, Arabidopsis thaliana
  peptide (1)..(249): Ceres Seq. ID no. 13621693
  misc_feature (101)..(145): Pfam Name: AN1-like Zinc finger Pfam Description: AN1-like Zinc finger
  misc_feature (1)..(249): Homolog of NCBI NO: 15230311 NR Description: expressed protein [Arabidopsis thaliana]
  misc_feature (1)..(248): Homolog of NCBI NO: 30688811 NR Description: zinc finger protein (PMZ) -related [Arabidopsis >gi|17529076|gb|AAL38748.1| unknown protein [Arabidopsis >gi|20465575|gb|AAM20270.1| unknown protein [Arabidopsis
  misc_feature (1)..(249): Homolog of NCBI NO: 33146779 NR Description: putative arsenite inducible RNA associated
  misc_feature (2)..(171): Homolog of NCBI NO: 15232930 NR Description: zinc finger protein (PMZ) -related [Arabidopsis
  misc_feature (5)..(172): Homolog of NCBI NO: 33416395 NR Description: Unknown (protein for MGC:66295) [Danio rerio]
  misc_feature (3)..(189): Homolog of NCBI NO: 31207325 NR Description: ENSANGP00000015397 [Anopheles gambiae]
  misc_feature (5)..(190): Homolog of NCBI NO: 21312112 NR Description: RIKEN cDNA 1110060O18 [Mus musculus]
  misc_feature (5)..(190): Homolog of NCBI NO: 15079311 NR Description: RIKEN cDNA 1110060O18 [Mus musculus]
  misc_feature (5)..(166): Homolog of NCBI NO: 20270357 NR Description: hypothetical protein BC018415 [Homo sapiens]
  misc_feature (5)..(166): Homolog of NCBI NO: 21749694 NR Description: unnamed protein product [Homo sapiens]
MGTPEFPDLGKHCSVDYCKQIDFLPFTCDRCLQVYCLDHRSYMKHDCPKGNRGDVTVVICPLCAKGVRLNPDEDPNITWEKHVNTDCDPSNYEKAVKKKKCPVPRCRELLTFSNTIKCRDCSIDHCLKHRFGPDHSCSGPKKPESSFSFMGFLSTNTKEAPASSSSSSRWSSLFASAEASISRLGNDISQKLQFASGNDGNSEKTQERNGKQNCGKVTVDVCPKCSRGFRDPVDLLKHIDKDHRGTSKA

SEQ ID NO: 107204 - protein, 207 aa, Arabidopsis thaliana
  peptide (1)..(207): Ceres Seq. ID no. 13621694
  misc_feature (59)..(103): Pfam Name: AN1-like Zinc finger Pfam Description: AN1-like Zinc finger
  misc_feature (1)..(207): Homolog of NCBI NO: 15230311 NR Description: expressed protein [Arabidopsis thaliana]
  misc_feature (1)..(206): Homolog of NCBI NO: 30688811 NR Description: zinc finger protein (PMZ) -related [Arabidopsis >gi|17529076|gb|AAL38748.1| unknown protein [Arabidopsis >gi|20465575|gb|AAM20270.1| unknown protein [Arabidopsis
  misc_feature (1)..(207): Homolog of NCBI NO: 33146779 NR Description: putative arsenite inducible RNA associated
  misc_feature (1)..(129): Homolog of NCBI NO: 15232930 NR Description: zinc finger protein (PMZ) -related [Arabidopsis
  misc_feature (1)..(130): Homolog of NCBI NO: 33416395 NR Description: Unknown (protein for MGC:66295) [Danio rerio]
  misc_feature (1)..(147): Homolog of NCBI NO: 31207325 NR Description: ENSANGP00000015397 [Anopheles gambiae]
  misc_feature (1)..(148): Homolog of NCBI NO: 21312112 NR Description: RIKEN cDNA 1110060O18 [Mus musculus]
  misc_feature (1)..(148): Homolog of NCBI NO: 15079311 NR Description: RIKEN cDNA 1110060O18 [Mus musculus]
  misc_feature (1)..(124): Homolog of NCBI NO: 20270357 NR Description: hypothetical protein BC018415 [Homo sapiens]
  misc_feature (1)..(124): Homolog of NCBI NO: 21749694 NR Description: unnamed protein product [Homo sapiens]
MKHDCPKGNRGDVTVVICPLCAKGVRLNPDEDPNITWEKHVNTDCDPSNYEKAVKKKKCPVPRCRELLTFSNTIKCRDCSIDHCLKHRFGPDHSCSGPKKPESSFSFMGFLSTNTKEAPASSSSSSRWSSLFASAEASISRLGNDISQKLQFASGNDGNSEKTQERNGKQNCGKVTVDVCPKCSRGFRDPVDLLKHIDKDHRGTSKA

SEQ ID NO: 107205 - DNA, 1561 bp, Arabidopsis thaliana
  misc_feature (1)..(1561): Ceres Seq. ID no. 13621695
  misc_feature: MA Experiment ID: 20000437 Result: Up-regulated in Transcription
  misc_feature: MA Experiment 20000437 PARAMETER Experiment Name: At_Drought_P Parameter: Age (day) Value: 8
  misc_feature: MA Experiment 20000437 PARAMETER Experiment Name: At_Drought_P Parameter: Organism Value: A. thaliana
  misc_feature: MA Experiment 20000437 PARAMETER Experiment Name: At_Drought_P Parameter: Plant Line Value: WS
  misc_feature: MA Experiment 20000437 PARAMETER Experiment Name: At_Drought_P Parameter: Timepoint (hr) Value: 24
  misc_feature: MA Experiment 20000437 PARAMETER Experiment Name: At_Drought_P Parameter: Tissue Value: Whole Plant
  misc_feature: MA Experiment 20000437 PARAMETER Experiment Name: At_Drought_P Parameter: Treatment Value: Drought vs. No Drought
aaattttctctttcttccttttttccctcaaaaatatcaaaaatccccaaattcaacctgccgttagggttttcaatttctccacttcttcttcttcgtttcgcttcttcaacgtctctccttgttcgacagttctaaattcaccatgaggaagacggtgaagcgagaatcggaagccaccggcgggaaaagagaagccgacgacgagccggagaagttgaggtctgtgaagaaagagaaacagagaaaaaccgaagctgactccgtacgacccgacgagcctcctccgcctcaggaggaagaacaaggaatatctgatcggagaattctcagatccaagtatctctctcttcaaaacgaaatcaacgattgtaaagatgatttgatgaagattgattctgacaaattctccagaattattaatgcagttgaaaacttgcaccaacaagttcggaagcctagggaacaaattgcagacgcagaggcacttctggatatagcaaacactttaatgtcatcggtgaagtctcagtctgctcatggggtttcaccggctgagtttgttaatgctttgatcagtgggtttggtcaaggttctttggggattgatactgatgaaactgctcaagtatctttaaagtggaaggatcttgggtttgctgtttgttctactgttttagtatcatgtggttgttctacaatgttgggacctatggatactgaactgaagcaaaggaaaagggcacccaacagaaaacgtacaaagcctggtgaaggtgttcgtccagatgaggtagatgattcacaatcagaagaaaaaactgatacagacaagaatatgacaataatgtttaacatcttggggaaaaagaagcgcgtgcagcttgagaatttggtgctcaacaggcggtcatttgcacagactgtagagaatttgtttgctctatctttcttggccaaagatggacgagttgagatcattgtcgacaaaagtggttctcatttcgccatgccgagaaatgcacctgatgcaaacgtggtgatgtcgggtgaagtcatttataaccattttgtgtttagattagatttcaaagattggaagttgatgtctgaaatggtgccactgggcgaggagctaatgccacacagacaaactgcagttgcttcatcttcttgtcccgctgcatcagcccctgcatcagcagacttcacacaagatactcagacaacaccaataagaaaactatcgagaaaccgagggttggttgtacaagaagaaactgttgtagaagatactcctgacaaagagggcgatgggactcgaaggagatgtaagcggagactcacctcttcttaaggagtgtatagagagagaagtgagttgtatctatttcattttgtgacattaactaaatgtctttgttaggattgtttagttcgttgtagtttgtagcagttaagtggcttttgtcttaactcttaaaagaagaagaatttaaagcctcttttggtttttcttcttctttttttttttgatctactcaagagagacaatttatct

SEQ ID NO: 107206 - protein, 403 aa, Arabidopsis thaliana
  peptide (1)..(403): Ceres Seq. ID no. 13621696
  misc_feature (1)..(403): Homolog of NCBI NO: 15223745 NR Description: expressed protein [Arabidopsis thaliana]
  misc_feature (2)..(343): Homolog of NCBI NO: 9294403 NR Description: gene_id:MOE17.7~unknown protein [Arabidopsis
  misc_feature (366)..(390): Homolog of NCBI NO: 9294403 NR Description: gene_id:MOE17.7~unknown protein [Arabidopsis
  misc_feature (1)..(343): Homolog of NCBI NO: 15232359 NR Description: hypothetical protein [Arabidopsis thaliana]
  misc_feature (366)..(390): Homolog of NCBI NO: 15232359 NR Description: hypothetical protein [Arabidopsis thaliana]
  misc_feature (101)..(352): Homolog of NCBI NO: 28411875 NR Description: OSJNBa0016N23.27 [Oryza sativa (japonica
  misc_feature (248)..(395): Homolog of NCBI NO: 5441894 NR Description: EST AU030111(E50640) corresponds to a region of
  misc_feature (209)..(305): Homolog of NCBI NO: 38344630 NR Description: OSJNBb0003A12.16 [Oryza sativa (japonica
  misc_feature (50)..(100): Homolog of NCBI NO: 5441894 NR Description: EST AU030111(E50640) corresponds to a region of
MRKTVKRESEATGGKREADDEPEKLRSVKKEKQRKTEADSVRPDEPPPPQEEEQGISDRRILRSKYLSLQNEINDCKDDLMKIDSDKFSRIINAVENLHQQVRKPREQIADAEALLDIANTLMSSVKSQSAHGVSPAEFVNALISGFGQGSLGIDTDETAQVSLKWKDLGFAVCSTVLVSCGCSTMLGPMDTELKQRKRAPNRKRTKPGEGVRPDEVDDSQSEEKTDTDKNMTIMFNILGKKKRVQLENLVLNRRSFAQTVENLFALSFLAKDGRVEIIVDKSGSHFAMPRNAPDANVVMSGEVIYNHFVFRLDFKDWKLMSEMVPLGEELMPHRQTAVASSSCPAASAPASADFTQDTQTTPIRKLSRNRGLVVQEETVVEDTPDKEGDGTRRRCKRRLTSS

SEQ ID NO: 107207 - protein, 323 aa, Arabidopsis thaliana
  peptide (1)..(323): Ceres Seq. ID no. 13621697
  misc_feature (1)..(323): Homolog of NCBI NO: 15223745 NR Description: expressed protein [Arabidopsis thaliana]
  misc_feature (1)..(263): Homolog of NCBI NO: 9294403 NR Description: gene_id:MOE17.7~unknown protein [Arabidopsis
  misc_feature (286)..(310): Homolog of NCBI NO: 9294403 NR Description: gene_id:MOE17.7~unknown protein [Arabidopsis
  misc_feature (1)..(263): Homolog of NCBI NO: 15232359 NR Description: hypothetical protein [Arabidopsis thaliana]
  misc_feature (286)..(310): Homolog of NCBI NO: 15232359 NR Description: hypothetical protein [Arabidopsis thaliana]
  misc_feature (21)..(272): Homolog of NCBI NO: 28411875 NR Description: OSJNBa0016N23.27 [Oryza sativa (japonica
  misc_feature (168)..(315): Homolog of NCBI NO: 5441894 NR Description: EST AU030111(E50640) corresponds to a region of
  misc_feature (129)..(225): Homolog of NCBI NO: 38344630 NR Description: OSJNBb0003A12.16 [Oryza sativa (japonica
  misc_feature (1)..(20): Homolog of NCBI NO: 5441894 NR Description: EST AU030111(E50640) corresponds to a region of
MKIDSDKFSRIINAVENLHQQVRKPREQIADAEALLDIANTLMSSVKSQSAHGVSPAEFVNALISGFGQGSLGIDTDETAQVSLKWKDLGFAVCSTVLVSCGCSTMLGPMDTELKQRKRAPNRKRTKPGEGVRPDEVDDSQSEEKTDTDKNMTIMFNILGKKKRVQLENLVLNRRSFAQTVENLFALSFLAKDGRVEIIVDKSGSHFAMPRNAPDANVVMSGEVIYNHFVFRLDFKDWKLMSEMVPLGEELMPHRQTAVASSSCPAASAPASADFTQDTQTTPIRKLSRNRGLVVQEETVVEDTPDKEGDGTRRRCKRRLTSS

SEQ ID NO: 107208 - protein, 281 aa, Arabidopsis thaliana
  peptide (1)..(281): Ceres Seq. ID no. 13621698
  misc_feature (1)..(281): Homolog of NCBI NO: 15223745 NR Description: expressed protein [Arabidopsis thaliana]
  misc_feature (1)..(221): Homolog of NCBI NO: 9294403 NR Description: gene_id:MOE17.7~unknown protein [Arabidopsis
  misc_feature (244)..(268): Homolog of NCBI NO: 9294403 NR Description: gene_id:MOE17.7~unknown protein [Arabidopsis
  misc_feature (1)..(221): Homolog of NCBI NO: 15232359 NR Description: hypothetical protein [Arabidopsis thaliana]
  misc_feature (244)..(268): Homolog of NCBI NO: 15232359 NR Description: hypothetical protein [Arabidopsis thaliana]
  misc_feature (1)..(230): Homolog of NCBI NO: 28411875 NR Description: OSJNBa0016N23.27 [Oryza sativa (japonica
  misc_feature (126)..(273): Homolog of NCBI NO: 5441894 NR Description: EST AU030111(E50640) corresponds to a region of
  misc_feature (87)..(183): Homolog of NCBI NO: 38344630 NR Description: OSJNBb0003A12.16 [Oryza sativa (japonica
MSSVKSQSAHGVSPAEFVNALISGFGQGSLGIDTDETAQVSLKWKDLGFAVCSTVLVSCGCSTMLGPMDTELKQRKRAPNRKRTKPGEGVRPDEVDDSQSEEKTDTDKNMTIMFNILGKKKRVQLENLVLNRRSFAQTVENLFALSFLAKDGRVEIIVDKSGSHFAMPRNAPDANVVMSGEVIYNHFVFRLDFKDWKLMSEMVPLGEELMPHRQTAVASSSCPAASAPASADFTQDTQTTPIRKLSRNRGLVVQEETVVEDTPDKEGDGTRRRCKRRLTSS

SEQ ID NO: 107209 - DNA, 1803 bp, Arabidopsis thaliana
  misc_feature (1)..(1803): Ceres Seq. ID no. 13621714
  misc_feature: MA Experiment ID: 20000227 Result: Down-regulated in Transcription
  misc_feature: MA Experiment 20000227 PARAMETER Experiment Name: At_Root-Tips-vs-Tops_P Parameter: Tissue Value: Root Tips vs. Root Tops
atggctacaaagttagagtcttttaaggtggtggagaaattgggtgttgagaaaggtgaaaaagggaagatgatgagtaaaaaaaagaatgttaagaaagatggagatgagagtgaaagtgggttttggtttagattcaagtttatctttagttgtatctcttctagatcaaaagttgatagttccatgaatgctactgctgttattgcagaacctaagaaagttattgagaagcttgaaggtcatccagctccgactaaagacactggctgtgcggagagcggttcctcaacacctctaatgagcggggaattgaagtattcttctaagctacggattttcatgtttaacgaccttaagttagccactaggaatttcagaccagagtctcttctcggtgagggtgggtttggatgtgtttttaaaggatggatagaggagaatggaactgcacctgtcaagcctggtactggtctaactgtagctgtcaaaacactgaacccagatggccttcaaggtcacaaggagtggctggctgaaattaacttccttggaaaccttgttcaccccagtctggttaaattagttggctactgcatggaagaagaccaaaggctgcttgtttacgagtttatgccacgaggaagtttggagaaccatcttttcagaaggaccttacctctcccttggtctgttcgaatgaaaattgcacttggtgcagctaaaggtctcgcctttcttcacgaagaagctgagaagccagtcatatatcgagatttcaaaacatctaatattttactggatggggaatataatgcaaagctctctgattttgggcttgcaaaagatgctccagacgagaaaaaatcccacgtatcaacccgagtcatgggaacttatggttatgctgcccctgaatatgtaatgactggacatctgacaacgaagagcgatgtatacagttttggagtagttttacttgaaatattaactggacgaagatctgtggataaaagtcggccgaacggggaacagaacttggtagaatgggtgagacctcatctcttagacaagaaaaggttttaccggctattagatcctcggttagagggtcactactcgatcaaaggtgctcagaaagccacacaagtagcggcgcaatgccttaaccgagactccaaagccagaccgaaaatgagtgaagttgtggaagccttaaagccattaccaaatcttaaagactttgctagctcttcttcttctttccaaacaatgcagcctgttgctaagaacggagtcagaacacaaggaggagggtttgtgtcgagaaatggaccgccaatgaggagtttgtctagcttaaacttgcctcaagcatccccttatcgttatgcccgtcaatcaccaaagcctaaaggaaaagagccatgactccaaaatagatattaatttagttcttcatgtctgaccaaggtttactgatttgagctgtatgttcagctttctgtttcatcgatcctttccgactcaagacgggggctgcagccttttactcagatcaaaaagatggtctgtgggaaactgaagcctggcaagtttggaacgtttcggatcctggtttgtgttctttgagttgaaaaaatatctttggtcctgaaggtcttatgattttgatcttatgatgattttaatgtgtagaagatgtaaagtttgagagtgtaaagtttccataaatgataaaaaccagttgtctgtaaaaccttatgtaatatatgttctgatatgtattgatttttcatcttt

SEQ ID NO: 107210 - protein, 476 aa, Arabidopsis thaliana
  peptide (1)..(476): Ceres Seq. ID no. 13621715
  misc_feature (1)..(476): Homolog of NCBI NO: 15233058 NR Description: protein kinase -related [Arabidopsis thaliana]
  misc_feature (1)..(476): Homolog of NCBI NO: 9294282 NR Description: protein kinase [Arabidopsis thaliana]
  misc_feature (18)..(473): Homolog of NCBI NO: 15242204 NR Description: serine/threonine specific protein kinase -related
  misc_feature (17)..(473): Homolog of NCBI NO: 15232085 NR Description: protein kinase -related [Arabidopsis thaliana] putative protein kinase [Arabidopsis thaliana]
  misc_feature (17)..(473): Homolog of NCBI NO: 21592646 NR Description: putative protein kinase [Arabidopsis thaliana]
  misc_feature (51)..(475): Homolog of NCBI NO: 28804505 NR Description: serine/threonine protein kinase [Aster tripolium]
  misc_feature (18)..(474): Homolog of NCBI NO: 34912198 NR Description: putative protein kinase [Oryza sativa (japonica group)] >gi|20160990|dbj|BAB89924.1| putative protein kinase
  misc_feature (110)..(419): Homolog of NCBI NO: 34898434 NR Description: ESTs C98382(C2985),D22444(C11129) correspond to a of the predicted gene.~Similar to Arabidopsis thaliana APK1 gene
  misc_feature (87)..(457): Homolog of NCBI NO: 34906046 NR Description: putative serine/threonine-specific protein kinase
  misc_feature (92)..(414): Homolog of NCBI NO: 14719339 NR Description: putative protein kinase [Oryza sativa]
MATKLESFKVVEKLGVEKGEKGKMMSKKKNVKKDGDESESGFWFRFKFIFSCISSRSKVDSSMNATAVIAEPKKVIEKLEGHPAPTKDTGCAESGSSTPLMSGELKYSSKLRIFMFNDLKLATRNFRPESLLGEGGFGCVFKGWIEENGTAPVKPGTGLTVAVKTLNPDGLQGHKEWLAEINFLGNLVHPSLVKLVGYCMEEDQRLLVYEFMPRGSLENHLFRRTLPLPWSVRMKIALGAAKGLAFLHEEAEKPVIYRDFKTSNILLDGEYNAKLSDFGLAKDAPDEKKSHVSTRVMGTYGYAAPEYVMTGHLTTKSDVYSFGVVLLEILTGRRSVDKSRPNGEQNLVEWVRPHLLDKKRFYRLLDPRLEGHYSIKGAQKATQVAAQCLNRDSKARPKMSEVVEALKPLPNLKDFASSSSSFQTMQPVAKNGVRTQGGGFVSRNGPPMRSLSSLNLPQASPYRYARQSPKPKGKEP

SEQ ID NO: 107211 - protein, 453 aa, Arabidopsis thaliana
  peptide (1)..(453): Ceres Seq. ID no. 13621716
  misc_feature (1)..(453): Homolog of NCBI NO: 15233058 NR Description: protein kinase -related [Arabidopsis thaliana]
  misc_feature (1)..(453): Homolog of NCBI NO: 9294282 NR Description: protein kinase [Arabidopsis thaliana]
  misc_feature (1)..(450): Homolog of NCBI NO: 15242204 NR Description: serine/threonine specific protein kinase -related
  misc_feature (1)..(450): Homolog of NCBI NO: 15232085 NR Description: protein kinase -related [Arabidopsis thaliana] putative protein kinase [Arabidopsis thaliana]
  misc_feature (1)..(450): Homolog of NCBI NO: 21592646 NR Description: putative protein kinase [Arabidopsis thaliana]
  misc_feature (28)..(452): Homolog of NCBI NO: 28804505 NR Description: serine/threonine protein kinase [Aster tripolium]
  misc_feature (1)..(451): Homolog of NCBI NO: 34912198 NR Description: putative protein kinase [Oryza sativa (japonica group)] >gi|20160990|dbj|BAB89924.1| putative protein kinase
  misc_feature (87)..(396): Homolog of NCBI NO: 34898434 NR Description: ESTs C98382(C2985),D22444(C11129) correspond to a of the predicted gene.~Similar to Arabidopsis thaliana APK1 gene
  misc_feature (64)..(434): Homolog of NCBI NO: 34906046 NR Description: putative serine/threonine-specific protein kinase
  misc_feature (69)..(391): Homolog of NCBI NO: 14719339 NR Description: putative protein kinase [Oryza sativa]
MMSKKKNVKKDGDESESGFWFRFKFIFSCISSRSKVDSSMNATAVIAEPKKVIEKLEGHPAPTKDTGCAESGSSTPLMSGELKYSSKLRIFMFNDLKLATRNFRPESLLGEGGFGCVFKGWIEENGTAPVKPGTGLTVAVKTLNPDGLQGHKEWLAEINFLGNLVHPSLVKLVGYCMEEDQRLLVYEFMPRGSLENHLFRRTLPLPWSVRMKIALGAAKGLAFLHEEAEKPVIYRDFKTSNILLDGEYNAKLSDFGLAKDAPDEKKSHVSTRVMGTYGYAAPEYVMTGHLTTKSDVYSFGVVLLEILTGRRSVDKSRPNGEQNLVEWVRPHLLDKKRFYRLLDPRLEGHYSIKGAQKATQVAAQCLNRDSKARPKMSEVVEALKPLPNLKDFASSSSSFQTMQPVAKNGVRTQGGGFVSRNGPPMRSLSSLNLPQASPYRYARQSPKPKGKEP

SEQ ID NO: 107212 - protein, 452 aa, Arabidopsis thaliana
  peptide (1)..(452): Ceres Seq. ID no. 13621717
  misc_feature (1)..(452): Homolog of NCBI NO: 15233058 NR Description: protein kinase -related [Arabidopsis thaliana]
  misc_feature (1)..(452): Homolog of NCBI NO: 9294282 NR Description: protein kinase [Arabidopsis thaliana]
  misc_feature (1)..(449): Homolog of NCBI NO: 15242204 NR Description: serine/threonine specific protein kinase -related
  misc_feature (1)..(449): Homolog of NCBI NO: 15232085 NR Description: protein kinase -related [Arabidopsis thaliana] putative protein kinase [Arabidopsis thaliana]
  misc_feature (1)..(449): Homolog of NCBI NO: 21592646 NR Description: putative protein kinase [Arabidopsis thaliana]
  misc_feature (27)..(451): Homolog of NCBI NO: 28804505 NR Description: serine/threonine protein kinase [Aster tripolium]
  misc_feature (1)..(450): Homolog of NCBI NO: 34912198 NR Description: putative protein kinase [Oryza sativa (japonica group)] >gi|20160990|dbj|BAB89924.1| putative protein kinase
  misc_feature (86)..(395): Homolog of NCBI NO: 34898434 NR Description: ESTs C98382(C2985),D22444(C11129) correspond to a of the predicted gene.~Similar to Arabidopsis thaliana APK1 gene
  misc_feature (63)..(433): Homolog of NCBI NO: 34906046 NR Description: putative serine/threonine-specific protein kinase
  misc_feature (68)..(390): Homolog of NCBI NO: 14719339 NR Description: putative protein kinase [Oryza sativa]
MSKKKNVKKDGDESESGFWFRFKFIFSCISSRSKVDSSMNATAVIAEPKKVIEKLEGHPAPTKDTGCAESGSSTPLMSGELKYSSKLRIFMFNDLKLATRNFRPESLLGEGGFGCVFKGWIEENGTAPVKPGTGLTVAVKTLNPDGLQGHKEWLAEINFLGNLVHPSLVKLVGYCMEEDQRLLVYEFMPRGSLENHLFRRTLPLPWSVRMKIALGAAKGLAFLHEEAEKPVIYRDFKTSNILLDGEYNAKLSDFGLAKDAPDEKKSHVSTRVMGTYGYAAPEYVMTGHLTTKSDVYSFGVVLLEILTGRRSVDKSRPNGEQNLVEWVRPHLLDKKRFYRLLDPRLEGHYSIKGAQKATQVAAQCLNRDSKARPKMSEVVEALKPLPNLKDFASSSSSFQTMQPVAKNGVRTQGGGFVSRNGPPMRSLSSLNLPQASPYRYARQSPKPKGKEP

SEQ ID NO: 107213 - DNA, 2339 bp, Arabidopsis thaliana
  misc_feature (1)..(2339): Ceres Seq. ID no. 13621726
  misc_feature: MA Experiment ID: 20000327 Result: Down-regulated in Transcription
  misc_feature: MA Experiment 20000327 PARAMETER Experiment Name: At_42deg_Heat_Sub_P Parameter: Age (day) Value: 14
  misc_feature: MA Experiment 20000327 PARAMETER Experiment Name: At_42deg_Heat_Sub_P Parameter: Organism Value: A. thaliana
  misc_feature: MA Experiment 20000327 PARAMETER Experiment Name: At_42deg_Heat_Sub_P Parameter: Plant Line Value: WS
  misc_feature: MA Experiment 20000327 PARAMETER Experiment Name: At_42deg_Heat_Sub_P Parameter: Temperature (deg C) Value: 42 vs. 22
  misc_feature: MA Experiment 20000327 PARAMETER Experiment Name: At_42deg_Heat_Sub_P Parameter: Timepoint (hr) Value: 1
  misc_feature: MA Experiment 20000327 PARAMETER Experiment Name: At_42deg_Heat_Sub_P Parameter: Tissue Value: Aerial
  misc_feature: MA Experiment ID: 20000347 Result: Up-regulated in Transcription
  misc_feature: MA Experiment 20000347 PARAMETER Experiment Name: At_2mM_SA_Sub_P Parameter: Age (day) Value: 14
  misc_feature: MA Experiment 20000347 PARAMETER Experiment Name: At_2mM_SA_Sub_P Parameter: Organism Value: A. thaliana
  misc_feature: MA Experiment 20000347 PARAMETER Experiment Name: At_2mM_SA_Sub_P Parameter: Plant Line Value: WS
  misc_feature: MA Experiment 20000347 PARAMETER Experiment Name: At_2mM_SA_Sub_P Parameter: Timepoint (hr) Value: 6
  misc_feature: MA Experiment 20000347 PARAMETER Experiment Name: At_2mM_SA_Sub_P Parameter: Tissue Value: Aerial
  misc_feature: MA Experiment 20000347 PARAMETER Experiment Name: At_2mM_SA_Sub_P Parameter: Treatment Value: 2mM SA vs. No Treatment
aaaaccaaatccaaaaaaaatcattttgaagagagaaagagagatttgcatttttcaatctttaaagaaattgattcttcaatccatacgtttcttcttcttcaccaatctcactttcaaaaagatcttcttttgctaagttctgaatccaaagtctcaaactttcatgtaaagttgaagtcttttgtgattctttcttctgggtttttgaatgggttcaaagttttgagaattagggtttagagatttaagtttgttttggggttttaagtttttggataagcttgtttagtgatttgtgtggagatgggagagtttgaggtagatggagaagagaaactgattgttgctgctaagtatcttgttaaggaacttagatctggtaagagtcttactaaaaatgctaagaatgttttaggcaatctcttattagagctttctcgtgtggtgatagctgaggatactcaggatagagatgaggaagatgaaataggtgagattgaggaaaggcttaatgttgttagtgagaagattatgactagagaagtcgatgaatcaatgatttgggatttaggttcagatgaaggtaatctgtatttggatgctgtgaatgagttgagaagtttgattgatcggttagacggaagtgaggagctttctttaagaaaagctcatgatgttcttcaaatagctatggcacggcttgaggatgagtttaagcatcttcttgtggagaatagattgccttttgagcttgaacattcgtcgtttcggtctattgaagcggatcatggtgtggaggaagagtccatggcttcttttggtgctgcttctactgaggatttgattcttggaagtaataatgatagtaggagaaactcaggggacgttgtggttgatttggtgaatcctgatgttatattagatctcaagaacattgcgaatactatgattgcttcagggtatgaccgtgagtgtattcaggtgtgtacaatggttagaaaagatgctttggatgagtttttgtataaccatgaggttgagaagttgagtattgaagatgttttgaggatggattgggcgacgttgaatacgaatatcaagaaatgggttcgggttatgagagatatcgtccaggtatatctcttgagtgagaagtctctggataatcagatctttggagacttgaatgagatcggtctaacatgtttcgtcgatactgtgaaggctccgatgatgcagttgcttaattttggtgaagctgtgtctcttggtccacgacaacctgagaaattgcttaggattcttgaaatgtatgagctagcatctgagcttttaccagagatcgatgctttgttcttggatcatcccggttcgtccgtaagaaccgaatacagggaagtgatgaggagacttggggattgtgcaagaacaacgtttcttgaattcaaaagtgcgattgcagcggatgtctcatcgcatcctttccctggaggcgcggttcacccgcttacaaactacgtgatgaattacctcatggctctaacagatttcaaacacacgctcgactctcttctaatggaacatgatgatgcagaagatctcacaataccaccatcgccggatattatcaatcccgtgatggtcgaagaagagtctacctacgaaaactcctcttcaccggagaaatttctggcaatgacccgacatttctactccataacctctgtcctcgaagccaaccttcaagagaaatcaaaactatacaaagatgtctctctacaacacatttttctcctcaacaacatacactacatgacccggaaagtgctaaagtccgagctgagacacatcttcggcgacaaatggaaccgaaaacatacatggaagtttcagcagcaagcaacagagtacgaacgcgcaacctggctccctgtcctatcgttcctcaaggacgatggttcaggttctggtcccggttctggctcaggttctggttcaaagaatctacgcccgagggagcggttccaaggattcaacactgcgttcgaggaagtgtacaaagcgcaaaccggatggctaatttcggacgaggggctaagagaagatgtaaggacaaaggcgtccatgtgggtgattcaagcgtattggacattttacagtagacacaagaacagtgtcagtgaaaggtatataaagtacactactgatgatattgagagactcttgttggatctctttgctggttcttctaaatccttgaacaattcttatagaagatgatgataaattgtgttatgatgataattttttactgttacaagtatagaaatatatgt

SEQ ID NO: 107214 - protein, 658 aa, Arabidopsis thaliana
  peptide (1)..(658): Ceres Seq. ID no. 13621727
  misc_feature (8)..(658): Homolog of NCBI NO: 38346639 NR Description: OSJNBa0072D21.9 [Oryza sativa (japonica
  misc_feature (168)..(649): Homolog of NCBI NO: 15218495 NR Description: exocyst subunit EXO70 family [Arabidopsis
  misc_feature (67)..(193): Homolog of NCBI NO: 15218495 NR Description: exocyst subunit EXO70 family [Arabidopsis
  misc_feature (121)..(647): Homolog of NCBI NO: 30682979 NR Description: exocyst subunit EXO70 family [Arabidopsis >gi|9294634|dbj|BAB02973.1| gb|AAD25781.1~gene_id:MAG2.5~strong
  misc_feature (58)..(652): Homolog of NCBI NO: 34909792 NR Description: P0403C05.2 [Oryza sativa (japonica
  misc_feature (165)..(647): Homolog of NCBI NO: 23270388 NR Description: unknown protein [Arabidopsis thaliana]
  misc_feature (1)..(551): Homolog of NCBI NO: 15239497 NR Description: expressed protein [Arabidopsis thaliana]
  misc_feature (106)..(647): Homolog of NCBI NO: 15221040 NR Description: exocyst subunit EXO70 family [Arabidopsis
  misc_feature (7)..(480): Homolog of NCBI NO: 15237198 NR Description: leucine zipper-containing protein [Arabidopsis >gi|10177020|dbj|BAB10258.1| leucine zipper protein [Arabidopsis >gi|20453216|gb|AAM19847.1| AT5g58430/mqj2_20 [Arabidopsis
  misc_feature (450)..(649): Homolog of NCBI NO: 15237198 NR Description: leucine zipper-containing protein [Arabidopsis >gi|10177020|dbj|BAB10258.1| leucine zipper protein [Arabidopsis >gi|20453216|gb|AAM19847.1| AT5g58430/mqj2_20 [Arabidopsis
MGEFEVDGEEKLIVAAKYLVKELRSGKSLTKNAKNVLGNLLLELSRVVIAEDTQDRDEEDEIGEIEERLNVVSEKIMTREVDESMIWDLGSDEGNLYLDAVNELRSLIDRLDGSEELSLRKAHDVLQIAMARLEDEFKHLLVENRLPFELEHSSFRSIEADHGVEEESMASFGAASTEDLILGSNNDSRRNSGDVVVDLVNPDVILDLKNIANTMIASGYDRECIQVCTMVRKDALDEFLYNHEVEKLSIEDVLRMDWATLNTNIKKWVRVMRDIVQVYLLSEKSLDNQIFGDLNEIGLTCFVDTVKAPMMQLLNFGEAVSLGPRQPEKLLRILEMYELASELLPEIDALFLDHPGSSVRTEYREVMRRLGDCARTTFLEFKSAIAADVSSHPFPGGAVHPLTNYVMNYLMALTDFKHTLDSLLMEHDDAEDLTIPPSPDIINPVMVEEESTYENSSSPEKFLAMTRHFYSITSVLEANLQEKSKLYKDVSLQHIFLLNNIHYMTRKVLKSELRHIFGDKWNRKHTWKFQQQATEYERATWLPVLSFLKDDGSGSGPGSGSGSGSKNLRPRERFQGFNTAFEEVYKAQTGWLISDEGLREDVRTKASMWVIQAYWTFYSRHKNSVSERYIKYTTDDIERLLLDLFAGSSKSLNNSYRR

SEQ ID NO: 107215 - protein, 582 aa, Arabidopsis thaliana
  peptide (1)..(582): Ceres Seq. ID no. 13621728
  misc_feature (1)..(582): Homolog of NCBI NO: 38346639 NR Description: OSJNBa0072D21.9 [Oryza sativa (japonica
  misc_feature (92)..(573): Homolog of NCBI NO: 15218495 NR Description: exocyst subunit EXO70 family [Arabidopsis
  misc_feature (1)..(117): Homolog of NCBI NO: 15218495 NR Description: exocyst subunit EXO70 family [Arabidopsis
  misc_feature (45)..(571): Homolog of NCBI NO: 30682979 NR Description: exocyst subunit EXO70 family [Arabidopsis >gi|9294634|dbj|BAB02973.1| gb|AAD25781.1~gene_id:MAG2.5~strong
  misc_feature (1)..(576): Homolog of NCBI NO: 34909792 NR Description: P0403C05.2 [Oryza sativa (japonica
  misc_feature (89)..(571): Homolog of NCBI NO: 23270388 NR Description: unknown protein [Arabidopsis thaliana]
  misc_feature (1)..(475): Homolog of NCBI NO: 15239497 NR Description: expressed protein [Arabidopsis thaliana]
  misc_feature (30)..(571): Homolog of NCBI NO: 15221040 NR Description: exocyst subunit EXO70 family [Arabidopsis
  misc_feature (1)..(404): Homolog of NCBI NO: 15237198 NR Description: leucine zipper-containing protein [Arabidopsis >gi|10177020|dbj|BAB10258.1| leucine zipper protein [Arabidopsis >gi|20453216|gb|AAM19847.1| AT5g58430/mqj2_20 [Arabidopsis
  misc_feature (374)..(573): Homolog of NCBI NO: 15237198 NR Description: leucine zipper-containing protein [Arabidopsis >gi|10177020|dbj|BAB10258.1| leucine zipper protein [Arabidopsis >gi|20453216|gb|AAM19847.1| AT5g58430/mqj2_20 [Arabidopsis
MTREVDESMIWDLGSDEGNLYLDAVNELRSLIDRLDGSEELSLRKAHDVLQIAMARLEDEFKHLLVENRLPFELEHSSFRSIEADHGVEEESMASFGAASTEDLILGSNNDSRRNSGDVVVDLVNPDVILDLKNIANTMIASGYDRECIQVCTMVRKDALDEFLYNHEVEKLSIEDVLRMDWATLNTNIKKWVRVMRDIVQVYLLSEKSLDNQIFGDLNEIGLTCFVDTVKAPMMQLLNFGEAVSLGPRQPEKLLRILEMYELASELLPEIDALFLDHPGSSVRTEYREVMRRLGDCARTTFLEFKSAIAADVSSHPFPGGAVHPLTNYVMNYLMALTDFKHTLDSLLMEHDDAEDLTIPPSPDIINPVMVEEESTYENSSSPEKFLAMTRHFYSITSVLEANLQEKSKLYKDVSLQHIFLLNNIHYMTRKVLKSELRHIFGDKWNRKHTWKFQQQATEYERATWLPVLSFLKDDGSGSGPGSGSGSGSKNLRPRERFQGFNTAFEEVYKAQTGWLISDEGLREDVRTKASMWVIQAYWTFYSRHKNSVSERYIKYTTDDIERLLLDLFAGSSKSLNNSYRR

SEQ ID NO: 107216 - protein, 574 aa, Arabidopsis thaliana
  peptide (1)..(574): Ceres Seq. ID no. 13621729
  misc_feature (1)..(574): Homolog of NCBI NO: 38346639 NR Description: OSJNBa0072D21.9 [Oryza sativa (japonica
  misc_feature (84)..(565): Homolog of NCBI NO: 15218495 NR Description: exocyst subunit EXO70 family [Arabidopsis
  misc_feature (1)..(109): Homolog of NCBI NO: 15218495 NR Description: exocyst subunit EXO70 family [Arabidopsis
  misc_feature (37)..(563): Homolog of NCBI NO: 30682979 NR Description: exocyst subunit EXO70 family [Arabidopsis >gi|9294634|dbj|BAB02973.1| gb|AAD25781.1~gene_id:MAG2.5~strong
  misc_feature (1)..(568): Homolog of NCBI NO: 34909792 NR Description: P0403C05.2 [Oryza sativa (japonica
  misc_feature (81)..(563): Homolog of NCBI NO: 23270388 NR Description: unknown protein [Arabidopsis thaliana]
  misc_feature (1)..(467): Homolog of NCBI NO: 15239497 NR Description: expressed protein [Arabidopsis thaliana]
  misc_feature (22)..(563): Homolog of NCBI NO: 15221040 NR Description: exocyst subunit EXO70 family [Arabidopsis
  misc_feature (1)..(396): Homolog of NCBI NO: 15237198 NR Description: leucine zipper-containing protein [Arabidopsis >gi|10177020|dbj|BAB10258.1| leucine zipper protein [Arabidopsis >gi|20453216|gb|AAM19847.1| AT5g58430/mqj2_20 [Arabidopsis
  misc_feature (366)..(565): Homolog of NCBI NO: 15237198 NR Description: leucine zipper-containing protein [Arabidopsis >gi|10177020|dbj|BAB10258.1| leucine zipper protein [Arabidopsis >gi|20453216|gb|AAM19847.1| AT5g58430/mqj2_20 [Arabidopsis
MIWDLGSDEGNLYLDAVNELRSLIDRLDGSEELSLRKAHDVLQIAMARLEDEFKHLLVENRLPFELEHSSFRSIEADHGVEEESMASFGAASTEDLILGSNNDSRRNSGDVVVDLVNPDVILDLKNIANTMIASGYDRECIQVCTMVRKDALDEFLYNHEVEKLSIEDVLRMDWATLNTNIKKWVRVMRDIVQVYLLSEKSLDNQIFGDLNEIGLTCFVDTVKAPMMQLLNFGEAVSLGPRQPEKLLRILEMYELASELLPEIDALFLDHPGSSVRTEYREVMRRLGDCARTTFLEFKSAIAADVSSHPFPGGAVHPLTNYVMNYLMALTDFKHTLDSLLMEHDDAEDLTIPPSPDIINPVMVEEESTYENSSSPEKFLAMTRHFYSITSVLEANLQEKSKLYKDVSLQHIFLLNNIHYMTRKVLKSELRHIFGDKWNRKHTWKFQQQATEYERATWLPVLSFLKDDGSGSGPGSGSGSGSKNLRPRERFQGFNTAFEEVYKAQTGWLISDEGLREDVRTKASMWVIQAYWTFYSRHKNSVSERYIKYTTDDIERLLLDLFAGSSKSLNNSYRR

SEQ ID NO: 107217 - DNA, 1510 bp, Arabidopsis thaliana
  misc_feature (1)..(1510): Ceres Seq. ID no. 13621751
  misc_feature: MA Experiment ID: 20000182 Result: Up-regulated in Transcription
  misc_feature: MA Experiment 20000182 PARAMETER Experiment Name: At_2mM_SA_P Parameter: Age (day) Value: 14
  misc_feature: MA Experiment 20000182 PARAMETER Experiment Name: At_2mM_SA_P Parameter: Organism Value: A. thaliana
  misc_feature: MA Experiment 20000182 PARAMETER Experiment Name: At_2mM_SA_P Parameter: Plant Line Value: WS
  misc_feature: MA Experiment 20000182 PARAMETER Experiment Name: At_2mM_SA_P Parameter: Timepoint (hr) Value: 6
  misc_feature: MA Experiment 20000182 PARAMETER Experiment Name: At_2mM_SA_P Parameter: Tissue Value: Aerial
  misc_feature: MA Experiment 20000182 PARAMETER Experiment Name: At_2mM_SA_P Parameter: Treatment Value: 2mM SA vs. No Treatment
  misc_feature: MA Experiment ID: 20000184 Result: Down-regulated in Transcription
  misc_feature: MA Experiment 20000184 PARAMETER Experiment Name: At_Shoots__P Parameter: Age (day) Value: 7
  misc_feature: MA Experiment 20000184 PARAMETER Experiment Name: At_Shoots__P Parameter: Tissue Value: Shoots vs. Whole Plant
  misc_feature: MA Experiment ID: 20000234 Result: Down-regulated in Transcription
  misc_feature: MA Experiment 20000234 PARAMETER Experiment Name: At_Siliques_P Parameter: Age (day) Value: 21
  misc_feature: MA Experiment 20000234 PARAMETER Experiment Name: At_Siliques_P Parameter: Organism Value: A. thaliana
  misc_feature: MA Experiment 20000234 PARAMETER Experiment Name: At_Siliques_P Parameter: Plant Line Value: WS
  misc_feature: MA Experiment 20000234 PARAMETER Experiment Name: At_Siliques_P Parameter: Tissue Value: Less Than 5mm Siliques vs. Whole Plant
  misc_feature: MA Experiment ID: 20000264 Result: Down-regulated in Transcription
  misc_feature: MA Experiment 20000264 PARAMETER Experiment Name: At_Open_Flower_P Parameter: Age (day) Value: 21
  misc_feature: MA Experiment 20000264 PARAMETER Experiment Name: At_Open_Flower_P Parameter: Plant Line Value: WS
  misc_feature: MA Experiment 20000264 PARAMETER Experiment Name: At_Open_Flower_P Parameter: Tissue Value: Open Flower vs. Whole Plant
  misc_feature: MA Experiment ID: 20000265 Result: Down-regulated in Transcription
  misc_feature: MA Experiment 20000265 PARAMETER Experiment Name: At_Open_Flower_P Parameter: Age (day) Value: 21
  misc_feature: MA Experiment 20000265 PARAMETER Experiment Name: At_Open_Flower_P Parameter: Plant Line Value: WS
  misc_feature: MA Experiment 20000265 PARAMETER Experiment Name: At_Open_Flower_P Parameter: Tissue Value: Closed Flower vs. Whole Plant
  misc_feature: MA Experiment ID: 20000267 Result: Up-regulated in Transcription
  misc_feature: MA Experiment 20000267 PARAMETER Experiment Name: At_Drought_P Parameter: Age (day) Value: 7
  misc_feature: MA Experiment 20000267 PARAMETER Experiment Name: At_Drought_P Parameter: Organism Value: A. thaliana
  misc_feature: MA Experiment 20000267 PARAMETER Experiment Name: At_Drought_P Parameter: Plant Line Value: WS
  misc_feature: MA Experiment 20000267 PARAMETER Experiment Name: At_Drought_P Parameter: Timepoint (hr) Value: 6
  misc_feature: MA Experiment 20000267 PARAMETER Experiment Name: At_Drought_P Parameter: Tissue Value: Whole Plant
  misc_feature: MA Experiment 20000267 PARAMETER Experiment Name: At_Drought_P Parameter: Treatment Value: Drought vs. No Drought
  misc_feature: MA Experiment ID: 20000286 Result: Down-regulated in Transcription
  misc_feature: MA Experiment 20000286 PARAMETER Experiment Name: At_Open_Flower_P Parameter: Age (day) Value: 21
  misc_feature: MA Experiment 20000286 PARAMETER Experiment Name: At_Open_Flower_P Parameter: Plant Line Value: WS
  misc_feature: MA Experiment 20000286 PARAMETER Experiment Name: At_Open_Flower_P Parameter: Tissue Value: Half Open vs. Whole Plant
  misc_feature: MA Experiment ID: 20000436 Result: Up-regulated in Transcription
  misc_feature: MA Experiment 20000436 PARAMETER Experiment Name: At_Drought_P Parameter: Age (day) Value: 7
  misc_feature: MA Experiment 20000436 PARAMETER Experiment Name: At_Drought_P Parameter: Organism Value: A. thaliana
  misc_feature: MA Experiment 20000436 PARAMETER Experiment Name: At_Drought_P Parameter: Plant Line Value: WS
  misc_feature: MA Experiment 20000436 PARAMETER Experiment Name: At_Drought_P Parameter: Timepoint (hr) Value: 12
  misc_feature: MA Experiment 20000436 PARAMETER Experiment Name: At_Drought_P Parameter: Tissue Value: Whole Plant
  misc_feature: MA Experiment 20000436 PARAMETER Experiment Name: At_Drought_P Parameter: Treatment Value: Drought vs. No Drought
  misc_feature: MA Experiment ID: 20000437 Result: Up-regulated in Transcription
  misc_feature: MA Experiment 20000437 PARAMETER Experiment Name: At_Drought_P Parameter: Age (day) Value: 8
  misc_feature: MA Experiment 20000437 PARAMETER Experiment Name: At_Drought_P Parameter: Organism Value: A. thaliana
  misc_feature: MA Experiment 20000437 PARAMETER Experiment Name: At_Drought_P Parameter: Plant Line Value: WS
  misc_feature: MA Experiment 20000437 PARAMETER Experiment Name: At_Drought_P Parameter: Timepoint (hr) Value: 24
  misc_feature: MA Experiment 20000437 PARAMETER Experiment Name: At_Drought_P Parameter: Tissue Value: Whole Plant
  misc_feature: MA Experiment 20000437 PARAMETER Experiment Name: At_Drought_P Parameter: Treatment Value: Drought vs. No Drought
  misc_feature: MA Experiment ID: 20000438 Result: Down-regulated in Transcription
  misc_feature: MA Experiment 20000438 PARAMETER Experiment Name: At_Shoots__P Parameter: Age (day) Value: 14
  misc_feature: MA Experiment 20000438 PARAMETER Experiment Name: At_Shoots__P Parameter: Tissue Value: Shoots vs. Whole Plant
  misc_feature: MA Experiment ID: 20000445 Result: Up-regulated in Transcription
  misc_feature: MA Experiment 20000445 PARAMETER Experiment Name: At_100uM_NAA__P Parameter: Age (day) Value: 14
  misc_feature: MA Experiment 20000445 PARAMETER Experiment Name: At_100uM_NAA__P Parameter: Organism Value: A. thaliana
  misc_feature: MA Experiment 20000445 PARAMETER Experiment Name: At_100uM_NAA__P Parameter: Plant Line Value: WS
  misc_feature: MA Experiment 20000445 PARAMETER Experiment Name: At_100uM_NAA__P Parameter: Timepoint (hr) Value: 6
  misc_feature: MA Experiment 20000445 PARAMETER Experiment Name: At_100uM_NAA__P Parameter: Tissue Value: Aerial
  misc_feature: MA Experiment 20000445 PARAMETER Experiment Name: At_100uM_NAA__P Parameter: Treatment Value: 100uM NAA vs. No Treatment
  misc_feature: MA Experiment ID: 20000453 Result: Up-regulated in Transcription
  misc_feature: MA Experiment 20000453 PARAMETER Experiment Name: At_100uM_ABA_P Parameter: Age (day) Value: 15
  misc_feature: MA Experiment 20000453 PARAMETER Experiment Name: At_100uM_ABA_P Parameter: Organism Value: A. thaliana
  misc_feature: MA Experiment 20000453 PARAMETER Experiment Name: At_100uM_ABA_P Parameter: Plant Line Value: WS
  misc_feature: MA Experiment 20000453 PARAMETER Experiment Name: At_100uM_ABA_P Parameter: Timepoint (hr) Value: 24
  misc_feature: MA Experiment 20000453 PARAMETER Experiment Name: At_100uM_ABA_P Parameter: Tissue Value: Aerial
  misc_feature: MA Experiment 20000453 PARAMETER Experiment Name: At_100uM_ABA_P Parameter: Treatment Value: 100uM ABA vs. No Treatment
  misc_feature: MA Experiment ID: 20000460 Result: Up-regulated in Transcription
  misc_feature: MA Experiment 20000460 PARAMETER Experiment Name: At_10percent_PEG_P Parameter: Age (day) Value: 12
  misc_feature: MA Experiment 20000460 PARAMETER Experiment Name: At_10percent_PEG_P Parameter: Organism Value: A. thaliana
  misc_feature: MA Experiment 20000460 PARAMETER Experiment Name: At_10percent_PEG_P Parameter: Plant Line Value: WS
  misc_feature: MA Experiment 20000460 PARAMETER Experiment Name: At_10percent_PEG_P Parameter: Timepoint (day) Value: 12
  misc_feature: MA Experiment 20000460 PARAMETER Experiment Name: At_10percent_PEG_P Parameter: Tissue Value: Whole Plant
  misc_feature: MA Experiment 20000460 PARAMETER Experiment Name: At_10percent_PEG_P Parameter: Treatment Value: 10percent PEG vs. No Treatment
  misc_feature: MA Experiment ID: 20000573 Result: Down-regulated in Transcription
  misc_feature: MA Experiment 20000573 PARAMETER Experiment Name: At_100uM_ABA_Mutants__P Parameter: Organism Value: A. thaliana
  misc_feature: MA Experiment 20000573 PARAMETER Experiment Name: At_100uM_ABA_Mutants__P Parameter: Plant Line Value: CS22 vs. Ler wt
  misc_feature: MA Experiment 20000573 PARAMETER Experiment Name: At_100uM_ABA_Mutants__P Parameter: Timepoint (hr) Value: N/A
  misc_feature: MA Experiment 20000573 PARAMETER Experiment Name: At_100uM_ABA_Mutants__P Parameter: Tissue Value: Whole Plant
  misc_feature: MA Experiment 20000573 PARAMETER Experiment Name: At_100uM_ABA_Mutants__P Parameter: Treatment Value: None
  misc_feature: MA Experiment ID: 20000574 Result: Down-regulated in Transcription
  misc_feature: MA Experiment 20000574 PARAMETER Experiment Name: At_100uM_ABA_Mutants__P Parameter: Organism Value: A. thaliana
  misc_feature: MA Experiment 20000574 PARAMETER Experiment Name: At_100uM_ABA_Mutants__P Parameter: Plant Line Value: CS23 vs. Ler wt
  misc_feature: MA Experiment 20000574 PARAMETER Experiment Name: At_100uM_ABA_Mutants__P Parameter: Timepoint (hr) Value: N/A
  misc_feature: MA Experiment 20000574 PARAMETER Experiment Name: At_100uM_ABA_Mutants__P Parameter: Tissue Value: Whole Plant
  misc_feature: MA Experiment 20000574 PARAMETER Experiment Name: At_100uM_ABA_Mutants__P Parameter: Treatment Value: None
  misc_feature: MA Experiment ID: 20001554 Result: Up-regulated in Transcription
  misc_feature: MA Experiment 20001554 PARAMETER Experiment Name: At_Drought_Soil_Dry_P Parameter: Age (day) Value: 21
  misc_feature: MA Experiment 20001554 PARAMETER Experiment Name: At_Drought_Soil_Dry_P Parameter: Organism Value: A. thaliana
  misc_feature: MA Experiment 20001554 PARAMETER Experiment Name: At_Drought_Soil_Dry_P Parameter: Plant Line Value: WS
  misc_feature: MA Experiment 20001554 PARAMETER Experiment Name: At_Drought_Soil_Dry_P Parameter: Post Timepoint (hr) Value: None
  misc_feature: MA Experiment 20001554 PARAMETER Experiment Name: At_Drought_Soil_Dry_P Parameter: Post-Treatment Value: None
  misc_feature: MA Experiment 20001554 PARAMETER Experiment Name: At_Drought_Soil_Dry_P Parameter: Timepoint (day) Value: 7
  misc_feature: MA Experiment 20001554 PARAMETER Experiment Name: At_Drought_Soil_Dry_P Parameter: Treatment Value: Drought vs. No Drought
  misc_feature: MA Experiment ID: 20001555 Result: Up-regulated in Transcription
  misc_feature: MA Experiment 20001555 PARAMETER Experiment Name: At_Drought_Soil_Dry_P Parameter: Age (day) Value: 24
  misc_feature: MA Experiment 20001555 PARAMETER Experiment Name: At_Drought_Soil_Dry_P Parameter: Organism Value: A. thaliana
  misc_feature: MA Experiment 20001555 PARAMETER Experiment Name: At_Drought_Soil_Dry_P Parameter: Plant Line Value: WS
  misc_feature: MA Experiment 20001555 PARAMETER Experiment Name: At_Drought_Soil_Dry_P Parameter: Post Timepoint (hr) Value: None
  misc_feature: MA Experiment 20001555 PARAMETER Experiment Name: At_Drought_Soil_Dry_P Parameter: Post-Treatment Value: None
  misc_feature: MA Experiment 20001555 PARAMETER Experiment Name: At_Drought_Soil_Dry_P Parameter: Timepoint (day) Value: 10
  misc_feature: MA Experiment 20001555 PARAMETER Experiment Name: At_Drought_Soil_Dry_P Parameter: Treatment Value: Drought vs. No Drought
  misc_feature: MA Experiment ID: 20001560 Result: Down-regulated in Transcription
  misc_feature: MA Experiment 20001560 PARAMETER Experiment Name: At_Drought_Soil_Dry_P Parameter: Age (day) Value: 28
  misc_feature: MA Experiment 20001560 PARAMETER Experiment Name: At_Drought_Soil_Dry_P Parameter: Organism Value: A. thaliana
  misc_feature: MA Experiment 20001560 PARAMETER Experiment Name: At_Drought_Soil_Dry_P Parameter: Plant Line Value: WS
  misc_feature: MA Experiment 20001560 PARAMETER Experiment Name: At_Drought_Soil_Dry_P Parameter: Post Timepoint (hr) Value: None
  misc_feature: MA Experiment 20001560 PARAMETER Experiment Name: At_Drought_Soil_Dry_P Parameter: Post-Treatment Value: None
  misc_feature: MA Experiment 20001560 PARAMETER Experiment Name: At_Drought_Soil_Dry_P Parameter: Timepoint (day) Value: 14
  misc_feature: MA Experiment 20001560 PARAMETER Experiment Name: At_Drought_Soil_Dry_P Parameter: Treatment Value: Drought vs. No Drought
  misc_feature: MA Experiment ID: 20001905 Result: Up-regulated in Transcription
  misc_feature: MA Experiment 20001905 PARAMETER Experiment Name: At_Drought_Reproduction_P Parameter: Age (day) Value: 40
  misc_feature: MA Experiment 20001905 PARAMETER Experiment Name: At_Drought_Reproduction_P Parameter: Organism Value: A. thaliana
  misc_feature: MA Experiment 20001905 PARAMETER Experiment Name: At_Drought_Reproduction_P Parameter: Plant Line Value: WS
  misc_feature: MA Experiment 20001905 PARAMETER Experiment Name: At_Drought_Reproduction_P Parameter: Timepoint (day) Value: 10
  misc_feature: MA Experiment 20001905 PARAMETER Experiment Name: At_Drought_Reproduction_P Parameter: Tissue Value: Rosettes
  misc_feature: MA Experiment 20001905 PARAMETER Experiment Name: At_Drought_Reproduction_P Parameter: Treatment Value: Drought vs. No Drought
  misc_feature: MA Experiment ID: 20001911 Result: Up-regulated in Transcription
  misc_feature: MA Experiment 20001911 PARAMETER Experiment Name: At_Drought_Reproduction_P Parameter: Age (day) Value: 40
  misc_feature: MA Experiment 20001911 PARAMETER Experiment Name: At_Drought_Reproduction_P Parameter: Organism Value: A. thaliana
  misc_feature: MA Experiment 20001911 PARAMETER Experiment Name: At_Drought_Reproduction_P Parameter: Plant Line Value: WS
  misc_feature: MA Experiment 20001911 PARAMETER Experiment Name: At_Drought_Reproduction_P Parameter: Timepoint (day) Value: 10
  misc_feature: MA Experiment 20001911 PARAMETER Experiment Name: At_Drought_Reproduction_P Parameter: Tissue Value: Flowers
  misc_feature: MA Experiment 20001911 PARAMETER Experiment Name: At_Drought_Reproduction_P Parameter: Treatment Value: Drought vs. No Drought
atatttctcacccatttttcaccaatttctctccacttaaaaccaaccccaattctcaccaaaaatcgcaaaaaagatttcaactttcgataaacccagatcgaaaaatcagatttttccagatcaatcagagagttagagatggagtataataacaacaatcagcaatctttttggcagttcagcgaccagctgagagttcagacaccgaatctagcgaatctgtctctcaacgactcgatctggagcacaaactctgtcttcaaagagcgtcgaaacttagacatagccgccaccaccgacaagaacaacaaccagatcgactattatcagaagaagacaacttccgacaacatcaattccaactggaactggaagtcttctggttcaaacaacgacatgggtttaggattcggacctgtgggttcaaaatccaccgtcgatttaaacccaatcgacaaattcaactcaccgttcaacgacacgtggaaattcaactcagtcaacgttaacgttaacggttactcaccgtcaagcgccgttaacggagatttcaacaaaggggtttacacgtcgatgaagaagtatgggtacaacgtcaatctaaagaacaacaacaagaacaaaggaatcgatgaagatcatcagattcagaaaggtgggaagaagaacagaaagaatcagcagaacaataataaccagaggaacgaagacgacaagaacaatggtttggacaagaggtttaagactcttcctccagcagaagctttgccaagaaacgaaaccattggtggttacatctttgtctgcaacaacgataccatggaagagaatctcaaacgccagcttttcggattgccaccaagatacagggactcggttagagcgataactccaggacttcctctgtttctttacaactactccactcaccaacttcatggaatctacgaggcagctagcttcggaggaacaaacattgagttgaatgcttttgaagacaagaaatgtcctggcgaatctcgtttccctgctcaggtgagggccataacgaggaaagtatgtttgccactggaagaagattctttccgacccattttgcaccactacgacggtcctaagttccgactcgaactcagtgtccctgaggtgctttctctattggacatttttgctgaccaaaacccttgaattgggtaataccaatgaagaacacaaaacagtggtttgttacttcaaatccagaaagagagagataccccattatacatatatgattataaggaggagtattaataataattgtctgaagaaatggtattttactagtttatacagtttctttcttaagtatattcccaggagatatgggataaatagaagatgtgctatttttgtgtgggtggatgaagaatagatctcatctccgcgcttttttctttttgtaaattatataaaataacatatgtacaaccccaaaaatagggagaaatgagatgatgaactctta

SEQ ID NO: 107218 - protein, 349 aa, Arabidopsis thaliana; identical to SEQ ID NO: 27656
  peptide (1)..(349): Ceres Seq. ID no. 13621752
  misc_feature (1)..(349): Homolog of NCBI NO: 18422167 NR Description: expressed protein [Arabidopsis thaliana] unknown protein [Arabidopsis thaliana] unknown protein [Arabidopsis thaliana]
  misc_feature (146)..(349): Homolog of NCBI NO: 9757950 NR Description: gene_id:MJC20.15~similar to unknown
  misc_feature (9)..(336): Homolog of NCBI NO: 34913876 NR Description: B1156H12.22 [Oryza sativa (japonica
  misc_feature (157)..(346): Homolog of NCBI NO: 584825 NR Description: B2 PROTEIN >gi|322726|pir||S32124 B2 protein -
  misc_feature (96)..(343): Homolog of NCBI NO: 2369766 NR Description: hypothetical protein [Citrus x paradisi]
  misc_feature (96)..(343): Homolog of NCBI NO: 15232081 NR Description: gda-1 -related [Arabidopsis thaliana] contains similarity to unknown [Arabidopsis thaliana] >gi|16604450|gb|AAL24231.1|
  misc_feature (96)..(343): Homolog of NCBI NO: 21592623 NR Description: gda-1, putative [Arabidopsis thaliana]
  misc_feature (145)..(343): Homolog of NCBI NO: 21665866 NR Description: GDA2 protein [Pisum sativum]
  misc_feature (228)..(312): Homolog of NCBI NO: 7488804 NR Description: gda-1 protein - garden pea
  misc_feature (289)..(348): Homolog of NCBI NO: 13161401 NR Description: CPRD48 [Vigna unguiculata]

SEQ ID NO: 107219 - protein, 263 aa, Arabidopsis thaliana; identical to SEQ ID NO: 27657
  peptide (1)..(263): Ceres Seq. ID no. 13621753
  misc_feature (1)..(263): Homolog of NCBI NO: 18422167 NR Description: expressed protein [Arabidopsis thaliana] unknown protein [Arabidopsis thaliana] unknown protein [Arabidopsis thaliana]
  misc_feature (60)..(263): Homolog of NCBI NO: 9757950 NR Description: gene_id:MJC20.15~similar to unknown
  misc_feature (1)..(250): Homolog of NCBI NO: 34913876 NR Description: B1156H12.22 [Oryza sativa (japonica
  misc_feature (71)..(260): Homolog of NCBI NO: 584825 NR Description: B2 PROTEIN >gi|322726|pir||S32124 B2 protein -
  misc_feature (10)..(257): Homolog of NCBI NO: 2369766 NR Description: hypothetical protein [Citrus x paradisi]
  misc_feature (10)..(257): Homolog of NCBI NO: 15232081 NR Description: gda-1 -related [Arabidopsis thaliana] contains similarity to unknown [Arabidopsis thaliana] >gi|16604450|gb|AAL24231.1|
  misc_feature (10)..(257): Homolog of NCBI NO: 21592623 NR Description: gda-1, putative [Arabidopsis thaliana]
  misc_feature (59)..(257): Homolog of NCBI NO: 21665866 NR Description: GDA2 protein [Pisum sativum]
  misc_feature (142)..(226): Homolog of NCBI NO: 7488804 NR Description: gda-1 protein - garden pea
  misc_feature (203)..(262): Homolog of NCBI NO: 13161401 NR Description: CPRD48 [Vigna unguiculata]

SEQ ID NO: 107220 - protein, 204 aa, Arabidopsis thaliana; identical to SEQ ID NO: 27658
  peptide (1)..(204): Ceres Seq. ID no. 13621754
  misc_feature (1)..(204): Homolog of NCBI NO: 18422167 NR Description: expressed protein [Arabidopsis thaliana] unknown protein [Arabidopsis thaliana] unknown protein [Arabidopsis thaliana]
  misc_feature (1)..(204): Homolog of NCBI NO: 9757950 NR Description: gene_id:MJC20.15~similar to unknown
  misc_feature (1)..(191): Homolog of NCBI NO: 34913876 NR Description: B1156H12.22 [Oryza sativa (japonica
  misc_feature (12)..(201): Homolog of NCBI NO: 584825 NR Description: B2 PROTEIN >gi|322726|pir||S32124 B2 protein -
  misc_feature (1)..(198): Homolog of NCBI NO: 2369766 NR Description: hypothetical protein [Citrus x paradisi]
  misc_feature (1)..(198): Homolog of NCBI NO: 15232081 NR Description: gda-1 -related [Arabidopsis thaliana] contains similarity to unknown [Arabidopsis thaliana] >gi|16604450|gb|AAL24231.1|
  misc_feature (1)..(198): Homolog of NCBI NO: 21592623 NR Description: gda-1, putative [Arabidopsis thaliana]
  misc_feature (1)..(198): Homolog of NCBI NO: 21665866 NR Description: GDA2 protein [Pisum sativum]
  misc_feature (83)..(167): Homolog of NCBI NO: 7488804 NR Description: gda-1 protein - garden pea
  misc_feature (144)..(203): Homolog of NCBI NO: 13161401 NR Description: CPRD48 [Vigna unguiculata]

SEQ ID NO: 107221 - DNA, 1725 bp, Arabidopsis thaliana
  misc_feature (1)..(1725): Ceres Seq. ID no. 13621757
  misc_feature: MA Experiment ID: 108434 Result: Down-regulated in Transcription
  misc_feature: MA Experiment 108434 PARAMETER Experiment Name: At_Root_Tips_cDNA_P Parameter: Tissue Value: Root Tips
  misc_feature: MA Experiment ID: 108463 Result: Up-regulated in Transcription
  misc_feature: MA Experiment 108463 PARAMETER Experiment Name: At_Germinating_Seeds_cDNA_P Parameter: Age (day) Value: 3 vs. 0
  misc_feature: MA Experiment 108463 PARAMETER Experiment Name: At_Germinating_Seeds_cDNA_P Parameter: Tissue Value: Germinating Seeds
  misc_feature: MA Experiment ID: 108464 Result: Up-regulated in Transcription
  misc_feature: MA Experiment 108464 PARAMETER Experiment Name: At_Germinating_Seeds_cDNA_P Parameter: Age (day) Value: 4 vs. 0
  misc_feature: MA Experiment 108464 PARAMETER Experiment Name: At_Germinating_Seeds_cDNA_P Parameter: Tissue Value: Germinating Seeds
  misc_feature: MA Experiment ID: 108577 Result: Down-regulated in Transcription
  misc_feature: MA Experiment 108577 PARAMETER Experiment Name: At_42deg_Heat_cDNA_P Parameter: Temperature (deg C) Value: 42 vs. 22
  misc_feature: MA Experiment 108577 PARAMETER Experiment Name: At_42deg_Heat_cDNA_P Parameter: Timepoint (hr) Value: 6
  misc_feature: MA Experiment 108577 PARAMETER Experiment Name: At_42deg_Heat_cDNA_P Parameter: Tissue Value: Aerial
  misc_feature: MA Experiment ID: 20000030 Result: Up-regulated in Transcription
  misc_feature: MA Experiment 20000030 PARAMETER Experiment Name: At_CS6630_Roots_cDNA_P Parameter: Plant Line Value: CS6630 vs. WS
  misc_feature: MA Experiment 20000030 PARAMETER Experiment Name: At_CS6630_Roots_cDNA_P Parameter: Tissue Value: Roots
  misc_feature: MA Experiment ID: 20000069 Result: Up-regulated in Transcription
  misc_feature: MA Experiment 20000069 PARAMETER Experiment Name: At_100uM_ABA_Mutants_cDNA_P Parameter: Plant Line Value: CS23
  misc_feature: MA Experiment 20000069 PARAMETER Experiment Name: At_100uM_ABA_Mutants_cDNA_P Parameter: Timepoint (hr) Value: 6
  misc_feature: MA Experiment 20000069 PARAMETER Experiment Name: At_100uM_ABA_Mutants_cDNA_P Parameter: Tissue Value: Aerial
  misc_feature: MA Experiment 20000069 PARAMETER Experiment Name: At_100uM_ABA_Mutants_cDNA_P Parameter: Treatment Value: 100uM ABA vs. No Treatment
  misc_feature: MA Experiment ID: 20000071 Result: Up-regulated in Transcription
  misc_feature: MA Experiment 20000071 PARAMETER Experiment Name: At_100uM_ABA_Mutants_cDNA_P Parameter: Plant Line Value: CS8104
  misc_feature: MA Experiment 20000071 PARAMETER Experiment Name: At_100uM_ABA_Mutants_cDNA_P Parameter: Timepoint (hr) Value: 6
  misc_feature: MA Experiment 20000071 PARAMETER Experiment Name: At_100uM_ABA_Mutants_cDNA_P Parameter: Tissue Value: Aerial
  misc_feature: MA Experiment 20000071 PARAMETER Experiment Name: At_100uM_ABA_Mutants_cDNA_P Parameter: Treatment Value: 100uM ABA vs. No Treatment
  misc_feature: MA Experiment ID: 20000072 Result: Up-regulated in Transcription
  misc_feature: MA Experiment 20000072 PARAMETER Experiment Name: At_100uM_ABA_Mutants_cDNA_P Parameter: Plant Line Value: CS8105
  misc_feature: MA Experiment 20000072 PARAMETER Experiment Name: At_100uM_ABA_Mutants_cDNA_P Parameter: Timepoint (hr) Value: 6
  misc_feature: MA Experiment 20000072 PARAMETER Experiment Name: At_100uM_ABA_Mutants_cDNA_P Parameter: Tissue Value: Aerial
  misc_feature: MA Experiment 20000072 PARAMETER Experiment Name: At_100uM_ABA_Mutants_cDNA_P Parameter: Treatment Value: 100uM ABA vs. No Treatment
  misc_feature: MA Experiment ID: 20000111 Result: Down-regulated in Transcription
  misc_feature: MA Experiment 20000111 PARAMETER Experiment Name: At_42deg_Heat_cDNA_P Parameter: Temperature (deg C) Value: 42 vs. 22
  misc_feature: MA Experiment 20000111 PARAMETER Experiment Name: At_42deg_Heat_cDNA_P Parameter: Timepoint (hr) Value: 6
  misc_feature: MA Experiment 20000111 PARAMETER Experiment Name: At_42deg_Heat_cDNA_P Parameter: Tissue Value: Aerial
  misc_feature: MA Experiment ID: 20000171 Result: Down-regulated in Transcription
  misc_feature: MA Experiment 20000171 PARAMETER Experiment Name: At_42deg_Heat_P Parameter: Age (day) Value: 14
  misc_feature: MA Experiment 20000171 PARAMETER Experiment Name: At_42deg_Heat_P Parameter: Organism Value: A. thaliana
  misc_feature: MA Experiment 20000171 PARAMETER Experiment Name: At_42deg_Heat_P Parameter: Plant Line Value: WS
  misc_feature: MA Experiment 20000171 PARAMETER Experiment Name: At_42deg_Heat_P Parameter: Temperature (deg C) Value: 42 vs. 22
  misc_feature: MA Experiment 20000171 PARAMETER Experiment Name: At_42deg_Heat_P Parameter: Timepoint (hr) Value: 1
  misc_feature: MA Experiment 20000171 PARAMETER Experiment Name: At_42deg_Heat_P Parameter: Tissue Value: Aerial
  misc_feature: MA Experiment ID: 20000173 Result: Down-regulated in Transcription
  misc_feature: MA Experiment 20000173 PARAMETER Experiment Name: At_42deg_Heat_P Parameter: Age (day) Value: 14
  misc_feature: MA Experiment 20000173 PARAMETER Experiment Name: At_42deg_Heat_P Parameter: Organism Value: A. thaliana
  misc_feature: MA Experiment 20000173 PARAMETER Experiment Name: At_42deg_Heat_P Parameter: Plant Line Value: WS
  misc_feature: MA Experiment 20000173 PARAMETER Experiment Name: At_42deg_Heat_P Parameter: Temperature (deg C) Value: 42 vs. 22
  misc_feature: MA Experiment 20000173 PARAMETER Experiment Name: At_42deg_Heat_P Parameter: Timepoint (hr) Value: 6
  misc_feature: MA Experiment 20000173 PARAMETER Experiment Name: At_42deg_Heat_P Parameter: Tissue Value: Aerial
  misc_feature: MA Experiment ID: 20000184 Result: Down-regulated in Transcription
  misc_feature: MA Experiment 20000184 PARAMETER Experiment Name: At_Shoots__P Parameter: Age (day) Value: 7
  misc_feature: MA Experiment 20000184 PARAMETER Experiment Name: At_Shoots__P Parameter: Tissue Value: Shoots vs. Whole Plant
  misc_feature: MA Experiment ID: 20000185 Result: Down-regulated in Transcription
  misc_feature: MA Experiment 20000185 PARAMETER Experiment Name: At_Roots__P Parameter: Age (day) Value: 7 vs. 21
  misc_feature: MA Experiment 20000185 PARAMETER Experiment Name: At_Roots__P Parameter: Organism Value: A. thaliana
  misc_feature: MA Experiment 20000185 PARAMETER Experiment Name: At_Roots__P Parameter: Tissue Value: Roots vs. Whole Plant
  misc_feature: MA Experiment ID: 20000439 Result: Down-regulated in Transcription
  misc_feature: MA Experiment 20000439 PARAMETER Experiment Name: At_Roots__P Parameter: Age (day) Value: 14 vs. 21
  misc_feature: MA Experiment 20000439 PARAMETER Experiment Name: At_Roots__P Parameter: Organism Value: A. thaliana
  misc_feature: MA Experiment 20000439 PARAMETER Experiment Name: At_Roots__P Parameter: Tissue Value: Roots vs. Whole Plant
  misc_feature: MA Experiment ID: 20000573 Result: Down-regulated in Transcription
  misc_feature: MA Experiment 20000573 PARAMETER Experiment Name: At_100uM_ABA_Mutants__P Parameter: Organism Value: A. thaliana
  misc_feature: MA Experiment 20000573 PARAMETER Experiment Name: At_100uM_ABA_Mutants__P Parameter: Plant Line Value: CS22 vs. Ler wt
  misc_feature: MA Experiment 20000573 PARAMETER Experiment Name: At_100uM_ABA_Mutants__P Parameter: Timepoint (hr) Value: N/A
  misc_feature: MA Experiment 20000573 PARAMETER Experiment Name: At_100uM_ABA_Mutants__P Parameter: Tissue Value: Whole Plant
  misc_feature: MA Experiment 20000573 PARAMETER Experiment Name: At_100uM_ABA_Mutants__P Parameter: Treatment Value: None
  misc_feature: MA Experiment ID: 20000574 Result: Down-regulated in Transcription
  misc_feature: MA Experiment 20000574 PARAMETER Experiment Name: At_100uM_ABA_Mutants__P Parameter: Organism Value: A. thaliana
  misc_feature: MA Experiment 20000574 PARAMETER Experiment Name: At_100uM_ABA_Mutants__P Parameter: Plant Line Value: CS23 vs. Ler wt
  misc_feature: MA Experiment 20000574 PARAMETER Experiment Name: At_100uM_ABA_Mutants__P Parameter: Timepoint (hr) Value: N/A
  misc_feature: MA Experiment 20000574 PARAMETER Experiment Name: At_100uM_ABA_Mutants__P Parameter: Tissue Value: Whole Plant
  misc_feature: MA Experiment 20000574 PARAMETER Experiment Name: At_100uM_ABA_Mutants__P Parameter: Treatment Value: None
  misc_feature: MA Experiment ID: 20001248 Result: Down-regulated in Transcription
  misc_feature: MA Experiment 20001248 PARAMETER Experiment Name: At_Far-red-induction_P Parameter: Age (day) Value: 7
  misc_feature: MA Experiment 20001248 PARAMETER Experiment Name: At_Far-red-induction_P Parameter: Light Value: Far-red vs. White
  misc_feature: MA Experiment 20001248 PARAMETER Experiment Name: At_Far-red-induction_P Parameter: Organism Value: A. thaliana
  misc_feature: MA Experiment 20001248 PARAMETER Experiment Name: At_Far-red-induction_P Parameter: Plant Line Value: Columbia
  misc_feature: MA Experiment 20001248 PARAMETER Experiment Name: At_Far-red-induction_P Parameter: Timepoint (hr) Value: 4
  misc_feature: MA Experiment 20001248 PARAMETER Experiment Name: At_Far-red-induction_P Parameter: Tissue Value: Whole Plant
  misc_feature: MA Experiment ID: 20001560 Result: Down-regulated in Transcription
  misc_feature: MA Experiment 20001560 PARAMETER Experiment Name: At_Drought_Soil_Dry_P Parameter: Age (day) Value: 28
  misc_feature: MA Experiment 20001560 PARAMETER Experiment Name: At_Drought_Soil_Dry_P Parameter: Organism Value: A. thaliana
  misc_feature: MA Experiment 20001560 PARAMETER Experiment Name: At_Drought_Soil_Dry_P Parameter: Plant Line Value: WS
  misc_feature: MA Experiment 20001560 PARAMETER Experiment Name: At_Drought_Soil_Dry_P Parameter: Post Timepoint (hr) Value: None
  misc_feature: MA Experiment 20001560 PARAMETER Experiment Name: At_Drought_Soil_Dry_P Parameter: Post-Treatment Value: None
  misc_feature: MA Experiment 20001560 PARAMETER Experiment Name: At_Drought_Soil_Dry_P Parameter: Timepoint (day) Value: 14
  misc_feature: MA Experiment 20001560 PARAMETER Experiment Name: At_Drought_Soil_Dry_P Parameter: Treatment Value: Drought vs. No Drought
atcgatcgataaccaaacgaaaaaaaacatggccatctctttcctctgtttttgcctcattaccctcgcttcgttaatctttttcgccaagaagattaaacacttgaaatggaatcttcctccaagccctccaaagtttccggtcatcggaaatttacaccagattggagaattgcctcacaggtcacttcaacatctcgccgaaagatacggacctgtgatgcttcttcactttgggtttgtccctgtaactgtggtctcatcaagagaagcagctgaagaagtgctcagaactcatgacctagactgttgcagcaggcctaaacttgtcgggacaaggttactctcgcggaattttaaagatgtctgttttacgccatacggtaacgagtggaaggcgcggcgtaagtttgccctgcgtgagcttttctgtttgaaaaaggttcagtcctttaggcatatccgagaggaagaatgtaactttctggtcaagcaactgtcggaatccgcggttaatcgctctccggtcgatttgagcaaatcacttttctggctaaccgctagtatctttttcagagttgccttaggacagaattttcatgagagcaattttatcgataaagaaaagatcgaagagctcgtgttcgaagctgagactgccctagcaagtttcacttgttctgatttcttccctgttgccggacttggatggcttgttgattggttttccggacaacacaagagactcaacgatgttttttacaagctcgatgctctgtttcaacatgtcatagatgatcatttaaatccaggaagatcaaaagagcacgaagacatcatcgattcaatgttggatgcgattcataaagaaggaaaagatagttccttagagctcataatagatcatattaaggggtttctcgcgaatatatttcttgcagggatagacacaggggccctcaccatgatatgggcaatgacggagctcgttaaaaacccgaaacttataaagaaagttcaaggcgagatccgagaacaacttggcagcaataaggcgagaatcaccgaggaagatatcgataaagttccttacttgaagatggtaatcaaagaaacattcaggttacacccggcagctcctcttatacttccaagagaaacaatggctcacatcaaagttcaagggtatgatattcctcccaagaggcggatcttggtcaatgtttcggctatcggaagagatcccaaactctggacaaacccggaagagtttgaccctgagaggtttatggatagctctgttgattataggggacaacattacgagctcttaccatttgggtccggtcgaaggatatgtcccgggatgccaatggggattgctgccgtcgaattgggactcttgaacttactttacttcttcgattggaagttgcctgatgggatgacacataaagatattgatactgaagaagctggtactcttacaatcgtcaagaaagtacctctccagctcgttccagttcgagttcagtgatcagaccaaactccaaacggtttggaccaaaccttttgaataaatatatcatgcaaatcatgtaagcttctctgatgatgtatgaagtatatttttcagtaaaatactaaattgaacgttcatttgcgtttgaggaatgtaattaacgtttacgaaccttacatgttccggttctgattcatcaaaat

SEQ ID NO: 107222 - protein, 511 aa, Arabidopsis thaliana
  peptide (1)..(511): Ceres Seq. ID no. 13621758
  misc_feature (40)..(505): Pfam Name: Cytochrome P450 Pfam Description: Cytochrome P450
  misc_feature (10)..(511): Homolog of NCBI NO: 15231522 NR Description: cytochrome P450 71B20 [Arabidopsis thaliana] Cytochrome P450 71B20 >gi|11994437|dbj|BAB02439.1| cytochrome [Arabidopsis thaliana] >gi|15810463|gb|AAL07119.1| putative
  misc_feature (10)..(511): Homolog of NCBI NO: 16226474 NR Description: AT3g26180/MTC11_8 [Arabidopsis thaliana]
  misc_feature (10)..(511): Homolog of NCBI NO: 15231520 NR Description: cytochrome P450 71B19 [Arabidopsis thaliana] Cytochrome P450 71B19 >gi|11994436|dbj|BAB02438.1| cytochrome [Arabidopsis thaliana] >gi|26451925|dbj|BAC43055.1| putative
  misc_feature (10)..(511): Homolog of NCBI NO: 21554748 NR Description: cytochrome P450, putative [Arabidopsis thaliana]
  misc_feature (10)..(511): Homolog of NCBI NO: 15231516 NR Description: cytochrome P450 71B16 [Arabidopsis thaliana] Cytochrome P450 71B16 >gi|11994433|dbj|BAB02435.1| cytochrome
  misc_feature (10)..(510): Homolog of NCBI NO: 15231517 NR Description: cytochrome p450 family [Arabidopsis thaliana] Cytochrome P450 71B17 >gi|11994434|dbj|BAB02436.1| cytochrome
  misc_feature (43)..(261): Homolog of NCBI NO: 11994435 NR Description: cytochrome P450 [Arabidopsis thaliana]
  misc_feature (309)..(511): Homolog of NCBI NO: 11994435 NR Description: cytochrome P450 [Arabidopsis thaliana]
  misc_feature (10)..(507): Homolog of NCBI NO: 15231525 NR Description: cytochrome P450 71B22 [Arabidopsis thaliana] Cytochrome P450 71B22 >gi|11994439|dbj|BAB02441.1| cytochrome [Arabidopsis thaliana] >gi|13430718|gb|AAK25981.1|AF360271_1
  misc_feature (15)..(509): Homolog of NCBI NO: 15222174 NR Description: cytochrome P450 family [Arabidopsis thaliana]
SIDNQTKKNMAISFLCFCLITLASLIFFAKKIKHLKWNLPPSPPKFPVIGNLHQIGELPHRSLQHLAERYGPVMLLHFGFVPVTVVSSREAAEEVLRTHDLDCCSRPKLVGTRLLSRNFKDVCFTPYGNEWKARRKFALRELFCLKKVQSFRHIREEECNFLVKQLSESAVNRSPVDLSKSLFWLTASIFFRVALGQNFHESNFIDKEKIEELVFEAETALASFTCSDFFPVAGLGWLVDWFSGQHKRLNDVFYKLDALFQHVIDDHLNPGRSKEHEDIIDSMLDAIHKEGKDSSLELIIDHIKGFLANIFLAGIDTGALTMIWAMTELVKNPKLIKKVQGEIREQLGSNKARITEEDIDKVPYLKMVIKETFRLHPAAPLILPRETMAHIKVQGYDIPPKRRILVNVSAIGRDPKLWTNPEEFDPERFMDSSVDYRGQHYELLPFGSGRRICPGMPMGIAAVELGLLNLLYFFDWKLPDGMTHKDIDTEEAGTLTIVKKVPLQLVPVRVQ

SEQ ID NO: 107223 - protein, 502 aa, Arabidopsis thaliana
  peptide (1)..(502): Ceres Seq. ID no. 13621759
  misc_feature (31)..(496): Pfam Name: Cytochrome P450 Pfam Description: Cytochrome P450
  misc_feature (1)..(502): Homolog of NCBI NO: 15231522 NR Description: cytochrome P450 71B20 [Arabidopsis thaliana] Cytochrome P450 71B20 >gi|11994437|dbj|BAB02439.1| cytochrome [Arabidopsis thaliana] >gi|15810463|gb|AAL07119.1| putative
  misc_feature (1)..(502): Homolog of NCBI NO: 16226474 NR Description: AT3g26180/MTC11_8 [Arabidopsis thaliana]
  misc_feature (1)..(502): Homolog of NCBI NO: 15231520 NR Description: cytochrome P450 71B19 [Arabidopsis thaliana] Cytochrome P450 71B19 >gi|11994436|dbj|BAB02438.1| cytochrome [Arabidopsis thaliana] >gi|26451925|dbj|BAC43055.1| putative
  misc_feature (1)..(502): Homolog of NCBI NO: 21554748 NR Description: cytochrome P450, putative [Arabidopsis thaliana]
  misc_feature (1)..(502): Homolog of NCBI NO: 15231516 NR Description: cytochrome P450 71B16 [Arabidopsis thaliana] Cytochrome P450 71B16 >gi|11994433|dbj|BAB02435.1| cytochrome
  misc_feature (1)..(501): Homolog of NCBI NO: 15231517 NR Description: cytochrome p450 family [Arabidopsis thaliana] Cytochrome P450 71B17 >gi|11994434|dbj|BAB02436.1| cytochrome
  misc_feature (34)..(252): Homolog of NCBI NO: 11994435 NR Description: cytochrome P450 [Arabidopsis thaliana]
  misc_feature (300)..(502): Homolog of NCBI NO: 11994435 NR Description: cytochrome P450 [Arabidopsis thaliana]
  misc_feature (1)..(498): Homolog of NCBI NO: 15231525 NR Description: cytochrome P450 71B22 [Arabidopsis thaliana] Cytochrome P450 71B22 >gi|11994439|dbj|BAB02441.1| cytochrome [Arabidopsis thaliana] >gi|13430718|gb|AAK25981.1|AF360271_1
  misc_feature (6)..(500): Homolog of NCBI NO: 15222174 NR Description: cytochrome P450 family [Arabidopsis thaliana]
MAISFLCFCLITLASLIFFAKKIKHLKWNLPPSPPKFPVIGNLHQIGELPHRSLQHLAERYGPVMLLHFGFVPVTVVSSREAAEEVLRTHDLDCCSRPKLVGTRLLSRNFKDVCFTPYGNEWKARRKFALRELFCLKKVQSFRHIREEECNFLVKQLSESAVNRSPVDLSKSLFWLTASIFFRVALGQNFHESNFIDKEKIEELVFEAETALASFTCSDFFPVAGLGWLVDWFSGQHKRLNDVFYKLDALFQHVIDDHLNPGRSKEHEDIIDSMLDAIHKEGKDSSLELIIDHIKGFLANIFLAGIDTGALTMIWAMTELVKNPKLIKKVQGEIREQLGSNKARITEEDIDKVPYLKMVIKETFRLHPAAPLILPRETMAHIKVQGYDIPPKRRILVNVSAIGRDPKLWTNPEEFDPERFMDSSVDYRGQHYELLPFGSGRRICPGMPMGIAAVELGLLNLLYFFDWKLPDGMTHKDIDTEEAGTLTIVKKVPLQLVPVRVQ

SEQ ID NO: 107224 - protein, 438 aa, Arabidopsis thaliana
  peptide (1)..(438): Ceres Seq. ID no. 13621760
  misc_feature (1)..(432): Pfam Name: Cytochrome P450 Pfam Description: Cytochrome P450
  misc_feature (1)..(438): Homolog of NCBI NO: 15231522 NR Description: cytochrome P450 71B20 [Arabidopsis thaliana] Cytochrome P450 71B20 >gi|11994437|dbj|BAB02439.1| cytochrome [Arabidopsis thaliana] >gi|15810463|gb|AAL07119.1| putative
  misc_feature (1)..(438): Homolog of NCBI NO: 16226474 NR Description: AT3g26180/MTC11_8 [Arabidopsis thaliana]
  misc_feature (1)..(438): Homolog of NCBI NO: 15231520 NR Description: cytochrome P450 71B19 [Arabidopsis thaliana] Cytochrome P450 71B19 >gi|11994436|dbj|BAB02438.1| cytochrome [Arabidopsis thaliana] >gi|26451925|dbj|BAC43055.1| putative
  misc_feature (1)..(438): Homolog of NCBI NO: 21554748 NR Description: cytochrome P450, putative [Arabidopsis thaliana]
  misc_feature (1)..(438): Homolog of NCBI NO: 15231516 NR Description: cytochrome P450 71B16 [Arabidopsis thaliana] Cytochrome P450 71B16 >gi|11994433|dbj|BAB02435.1| cytochrome
  misc_feature (1)..(437): Homolog of NCBI NO: 15231517 NR Description: cytochrome p450 family [Arabidopsis thaliana] Cytochrome P450 71B17 >gi|11994434|dbj|BAB02436.1| cytochrome
  misc_feature (1)..(188): Homolog of NCBI NO: 11994435 NR Description: cytochrome P450 [Arabidopsis thaliana]
  misc_feature (236)..(438): Homolog of NCBI NO: 11994435 NR Description: cytochrome P450 [Arabidopsis thaliana]
  misc_feature (1)..(434): Homolog of NCBI NO: 15231525 NR Description: cytochrome P450 71B22 [Arabidopsis thaliana] Cytochrome P450 71B22 >gi|11994439|dbj|BAB02441.1| cytochrome [Arabidopsis thaliana] >gi|13430718|gb|AAK25981.1|AF360271_1
  misc_feature (1)..(436): Homolog of NCBI NO: 15222174 NR Description: cytochrome P450 family [Arabidopsis thaliana]
MLLHFGFVPVTVVSSREAAEEVLRTHDLDCCSRPKLVGTRLLSRNFKDVCFTPYGNEWKARRKFALRELFCLKKVQSFRHIREEECNFLVKQLSESAVNRSPVDLSKSLFWLTASIFFRVALGQNFHESNFIDKEKIEELVFEAETALASFTCSDFFPVAGLGWLVDWFSGQHKRLNDVFYKLDALFQHVIDDHLNPGRSKEHEDIIDSMLDAIHKEGKDSSLELIIDHIKGFLANIFLAGIDTGALTMIWAMTELVKNPKLIKKVQGEIREQLGSNKARITEEDIDKVPYLKMVIKETFRLHPAAPLILPRETMAHIKVQGYDIPPKRRILVNVSAIGRDPKLWTNPEEFDPERFMDSSVDYRGQHYELLPFGSGRRICPGMPMGIAAVELGLLNLLYFFDWKLPDGMTHKDIDTEEAGTLTIVKKVPLQLVPVRVQ

SEQ ID NO: 107225 - DNA, 1509 bp, Arabidopsis thaliana
  misc_feature (1)..(1509): Ceres Seq. ID no. 13621765
  misc_feature: MA Experiment ID: 20000185 Result: Up-regulated in Transcription
  misc_feature: MA Experiment 20000185 PARAMETER Experiment Name: At_Roots__P Parameter: Age (day) Value: 7 vs. 21
  misc_feature: MA Experiment 20000185 PARAMETER Experiment Name: At_Roots__P Parameter: Organism Value: A. thaliana
  misc_feature: MA Experiment 20000185 PARAMETER Experiment Name: At_Roots__P Parameter: Tissue Value: Roots vs. Whole Plant
  misc_feature: MA Experiment ID: 20000265 Result: Down-regulated in Transcription
  misc_feature: MA Experiment 20000265 PARAMETER Experiment Name: At_Open_Flower_P Parameter: Age (day) Value: 21
  misc_feature: MA Experiment 20000265 PARAMETER Experiment Name: At_Open_Flower_P Parameter: Plant Line Value: WS
  misc_feature: MA Experiment 20000265 PARAMETER Experiment Name: At_Open_Flower_P Parameter: Tissue Value: Closed Flower vs. Whole Plant
  misc_feature: MA Experiment ID: 20000439 Result: Up-regulated in Transcription
  misc_feature: MA Experiment 20000439 PARAMETER Experiment Name: At_Roots__P Parameter: Age (day) Value: 14 vs. 21
  misc_feature: MA Experiment 20000439 PARAMETER Experiment Name: At_Roots__P Parameter: Organism Value: A. thaliana
  misc_feature: MA Experiment 20000439 PARAMETER Experiment Name: At_Roots__P Parameter: Tissue Value: Roots vs. Whole Plant
  misc_feature: MA Experiment ID: 20000441 Result: Up-regulated in Transcription
  misc_feature: MA Experiment 20000441 PARAMETER Experiment Name: At_1uM_BR-BRZ__P Parameter: Tissue Value: Shoot Apices
  misc_feature: MA Experiment 20000441 PARAMETER Experiment Name: At_1uM_BR-BRZ__P Parameter: Treatment Value: 1uM BR vs. No Treatment
  misc_feature: MA Experiment ID: 20000453 Result: Up-regulated in Transcription
  misc_feature: MA Experiment 20000453 PARAMETER Experiment Name: At_100uM_ABA_P Parameter: Age (day) Value: 15
  misc_feature: MA Experiment 20000453 PARAMETER Experiment Name: At_100uM_ABA_P Parameter: Organism Value: A. thaliana
  misc_feature: MA Experiment 20000453 PARAMETER Experiment Name: At_100uM_ABA_P Parameter: Plant Line Value: WS
  misc_feature: MA Experiment 20000453 PARAMETER Experiment Name: At_100uM_ABA_P Parameter: Timepoint (hr) Value: 24
  misc_feature: MA Experiment 20000453 PARAMETER Experiment Name: At_100uM_ABA_P Parameter: Tissue Value: Aerial
  misc_feature: MA Experiment 20000453 PARAMETER Experiment Name: At_100uM_ABA_P Parameter: Treatment Value: 100uM ABA vs. No Treatment
  misc_feature: MA Experiment ID: 20000527 Result: Up-regulated in Transcription
  misc_feature: MA Experiment 20000527 PARAMETER Experiment Name: At_10percent_PEG_P Parameter: Age (day) Value: 20
  misc_feature: MA Experiment 20000527 PARAMETER Experiment Name: At_10percent_PEG_P Parameter: Organism Value: A. thaliana
  misc_feature: MA Experiment 20000527 PARAMETER Experiment Name: At_10percent_PEG_P Parameter: Plant Line Value: WS
  misc_feature: MA Experiment 20000527 PARAMETER Experiment Name: At_10percent_PEG_P Parameter: Timepoint (day) Value: 20
  misc_feature: MA Experiment 20000527 PARAMETER Experiment Name: At_10percent_PEG_P Parameter: Tissue Value: Whole Plant
  misc_feature: MA Experiment 20000527 PARAMETER Experiment Name: At_10percent_PEG_P Parameter: Treatment Value: 10percent PEG vs. No Treatment
  misc_feature: MA Experiment ID: 20001451 Result: Up-regulated in Transcription
  misc_feature: MA Experiment 20001451 PARAMETER Experiment Name: At_Far-red-induction_P Parameter: Age (day) Value: 7
  misc_feature: MA Experiment 20001451 PARAMETER Experiment Name: At_Far-red-induction_P Parameter: Light Value: Far-red vs. White
  misc_feature: MA Experiment 20001451 PARAMETER Experiment Name: At_Far-red-induction_P Parameter: Organism Value: A. thaliana
  misc_feature: MA Experiment 20001451 PARAMETER Experiment Name: At_Far-red-induction_P Parameter: Plant Line Value: Columbia
  misc_feature: MA Experiment 20001451 PARAMETER Experiment Name: At_Far-red-induction_P Parameter: Timepoint (hr) Value: 24
  misc_feature: MA Experiment 20001451 PARAMETER Experiment Name: At_Far-red-induction_P Parameter: Tissue Value: Whole Plant
  misc_feature: MA Experiment ID: 20001904 Result: Up-regulated in Transcription
  misc_feature: MA Experiment 20001904 PARAMETER Experiment Name: At_Drought_Reproduction_P Parameter: Age (day) Value: 37
  misc_feature: MA Experiment 20001904 PARAMETER Experiment Name: At_Drought_Reproduction_P Parameter: Organism Value: A. thaliana
  misc_feature: MA Experiment 20001904 PARAMETER Experiment Name: At_Drought_Reproduction_P Parameter: Plant Line Value: WS
  misc_feature: MA Experiment 20001904 PARAMETER Experiment Name: At_Drought_Reproduction_P Parameter: Timepoint (day) Value: 7
  misc_feature: MA Experiment 20001904 PARAMETER Experiment Name: At_Drought_Reproduction_P Parameter: Tissue Value: Rosettes
  misc_feature: MA Experiment 20001904 PARAMETER Experiment Name: At_Drought_Reproduction_P Parameter: Treatment Value: Drought vs. No Drought
  misc_feature: MA Experiment ID: 20001905 Result: Up-regulated in Transcription
  misc_feature: MA Experiment 20001905 PARAMETER Experiment Name: At_Drought_Reproduction_P Parameter: Age (day) Value: 40
  misc_feature: MA Experiment 20001905 PARAMETER Experiment Name: At_Drought_Reproduction_P Parameter: Organism Value: A. thaliana
  misc_feature: MA Experiment 20001905 PARAMETER Experiment Name: At_Drought_Reproduction_P Parameter: Plant Line Value: WS
  misc_feature: MA Experiment 20001905 PARAMETER Experiment Name: At_Drought_Reproduction_P Parameter: Timepoint (day) Value: 10
  misc_feature: MA Experiment 20001905 PARAMETER Experiment Name: At_Drought_Reproduction_P Parameter: Tissue Value: Rosettes
  misc_feature: MA Experiment 20001905 PARAMETER Experiment Name: At_Drought_Reproduction_P Parameter: Treatment Value: Drought vs. No Drought
ataattagtctcacatatacttgtaactagtcagacaaagacaatggaagaatcaaaccgtagtagtactgtcttgttcgacaaatacaacatcggaagacttctcggaaccggtaacttcgccaaagtgtatcacggaacagagatctccaccggcgatgacgtggcaatcaaagtcatcaaaaaagaccacgttttcaaacgtcgtggcatgatggagcaaatcgaacgagagatcgccgtcatgcgtctcctccgtcatccaaacgtggtcgagctccgcgaagtaatggctacaaagaagaagattttcttcgtcatggagtacgtcaacggcggagagcttttcgaaatgatcgatagagatgggaagctcccggaggatctagccagaaagtatttccaacaattgatatccgcggtggatttttgccacagccgcggtgttttccaccgcgatattaaacccgagaatctgttgcttgacggagaaggtgatcttaaggtaacggatttcggactttccgcattgatgatgccagaagggctaggtggcaggcgtggtagcagcgatgatcttttacatacgcggtgcgggacaccggcttacgtggcgccggaggttttacggaataaaggatacgacggagctatggctgatatttggtcgtgcgggattgttttgtatgcactccttgctggcttcttgccgtttatcgacgaaaacgtcatgacattgtacacgaagatcttcaaggcggaatgcgagttcccaccgtggttttccttagaatccaaggaactactctcaagattgcttgtgccggatcctgaacaaagaatttcaatgtcagagatcaaaatgattccatggttccgaaagaactttacaccatcagtagccttttcgatagacgaaacgatcccatctccaccggagccaccaacaaagaaaaagaagaaagacctaaacgagaaagaagacgacggagcttcaccaagatccttcaacgccttccaattcatcacatcaatgtcttcaggtttcgatctctctaacctattcgagataaaacgaaagccaaagcggatgttcacatcgaagttcccggcgaaatctgttaaagagaggctggagacggcggcgcgtgagatggatatgagagtgaaacatgtaaaagactgcaagatgaagctgcaaagaagaacagaaggtcgtaaaggaaggctctcggtgacggcggaagtattcgaagtcgctcctgaagtctctgtcgtggagttctgcaaaacctcgggggatacgttggagtattacctcttctgtgaggatgacgtcagaccagctcttaaagacattgtatggtcatggcaaggtgatgatgatgaagacgatgttaccactaatgataatgttgacacaaatgataacaaaataaataatgtttcatgagctgtaataattcactttttggaattggatgtgcgaggcgagactgtcttattgcg

SEQ ID NO: 107226 - protein, 469 aa, Arabidopsis thaliana
  peptide (1)..(469): Ceres Seq. ID no. 13621766
  misc_feature (15)..(278): Pfam Name: Protein kinase domain Pfam Description: Protein kinase domain
  misc_feature (1)..(469): Homolog of NCBI NO: 15224679 NR Description: CBL-interacting protein kinase 16 [Arabidopsis
  misc_feature (1)..(448): Homolog of NCBI NO: 30683398 NR Description: CBL-interacting protein kinase 5 [Arabidopsis
  misc_feature (1)..(463): Homolog of NCBI NO: 18420882 NR Description: CBL-interacting protein kinase 25 [Arabidopsis
  misc_feature (1)..(442): Homolog of NCBI NO: 24899813 NR Description: serine/threonine protein kinase-like protein
  misc_feature (1)..(463): Homolog of NCBI NO: 15215664 NR Description: AT5g25110/T11H3_120 [Arabidopsis thaliana]
  misc_feature (5)..(451): Homolog of NCBI NO: 15242509 NR Description: CBL-interacting protein kinase 20 [Arabidopsis >gi|9758929|dbj|BAB09310.1| serine/threonine protein kinase
  misc_feature (6)..(446): Homolog of NCBI NO: 34903780 NR Description: unnamed protein product [Oryza sativa (japonica group)] >gi|7340882|dbj|BAA92972.1| unnamed protein product
  misc_feature (10)..(449): Homolog of NCBI NO: 23428550 NR Description: Serine/threonine Kinase [Persea americana]
  misc_feature (5)..(449): Homolog of NCBI NO: 8777339 NR Description: serine/threonine protein kinase [Arabidopsis
MEESNRSSTVLFDKYNIGRLLGTGNFAKVYHGTEISTGDDVAIKVIKKDHVFKRRGMMEQIEREIAVMRLLRHPNVVELREVMATKKKIFFVMEYVNGGELFEMIDRDGKLPEDLARKYFQQLISAVDFCHSRGVFHRDIKPENLLLDGEGDLKVTDFGLSALMMPEGLGGRRGSSDDLLHTRCGTPAYVAPEVLRNKGYDGAMADIWSCGIVLYALLAGFLPFIDENVMTLYTKIFKAECEFPPWFSLESKELLSRLLVPDPEQRISMSEIKMIPWFRKNFTPSVAFSIDETIPSPPEPPTKKKKKDLNEKEDDGASPRSFNAFQFITSMSSGFDLSNLFEIKRKPKRMFTSKFPAKSVKERLETAAREMDMRVKHVKDCKMKLQRRTEGRKGRLSVTAEVFEVAPEVSVVEFCKTSGDTLEYYLFCEDDVRPALKDIVWSWQGDDDEDDVTTNDNVDTNDNKINNVS

SEQ ID NO: 107227 - protein, 413 aa, Arabidopsis thaliana
  peptide (1)..(413): Ceres Seq. ID no. 13621767
  misc_feature (1)..(222): Pfam Name: Protein kinase domain Pfam Description: Protein kinase domain
  misc_feature (1)..(413): Homolog of NCBI NO: 15224679 NR Description: CBL-interacting protein kinase 16 [Arabidopsis
  misc_feature (1)..(392): Homolog of NCBI NO: 30683398 NR Description: CBL-interacting protein kinase 5 [Arabidopsis
  misc_feature (1)..(407): Homolog of NCBI NO: 18420882 NR Description: CBL-interacting protein kinase 25 [Arabidopsis
  misc_feature (1)..(386): Homolog of NCBI NO: 24899813 NR Description: serine/threonine protein kinase-like protein
  misc_feature (1)..(407): Homolog of NCBI NO: 15215664 NR Description: AT5g25110/T11H3_120 [Arabidopsis thaliana]
  misc_feature (1)..(395): Homolog of NCBI NO: 15242509 NR Description: CBL-interacting protein kinase 20 [Arabidopsis >gi|9758929|dbj|BAB09310.1| serine/threonine protein kinase
  misc_feature (1)..(390): Homolog of NCBI NO: 34903780 NR Description: unnamed protein product [Oryza sativa (japonica group)] >gi|7340882|dbj|BAA92972.1| unnamed protein product
  misc_feature (1)..(393): Homolog of NCBI NO: 23428550 NR Description: Serine/threonine Kinase [Persea americana]
  misc_feature (1)..(393): Homolog of NCBI NO: 8777339 NR Description: serine/threonine protein kinase [Arabidopsis
MMEQIEREIAVMRLLRHPNVVELREVMATKKKIFFVMEYVNGGELFEMIDRDGKLPEDLARKYFQQLISAVDFCHSRGVFHRDIKPENLLLDGEGDLKVTDFGLSALMMPEGLGGRRGSSDDLLHTRCGTPAYVAPEVLRNKGYDGAMADIWSCGIVLYALLAGFLPFIDENVMTLYTKIFKAECEFPPWFSLESKELLSRLLVPDPEQRISMSEIKMIPWFRKNFTPSVAFSIDETIPSPPEPPTKKKKKDLNEKEDDGASPRSFNAFQFITSMSSGFDLSNLFEIKRKPKRMFTSKFPAKSVKERLETAAREMDMRVKHVKDCKMKLQRRTEGRKGRLSVTAEVFEVAPEVSVVEFCKTSGDTLEYYLFCEDDVRPALKDIVWSWQGDDDEDDVTTNDNVDTNDNKINNVS

SEQ ID NO: 107228 - protein, 412 aa, Arabidopsis thaliana
  peptide (1)..(412): Ceres Seq. ID no. 13621768
  misc_feature (1)..(221): Pfam Name: Protein kinase domain Pfam Description: Protein kinase domain
  misc_feature (1)..(412): Homolog of NCBI NO: 15224679 NR Description: CBL-interacting protein kinase 16 [Arabidopsis
  misc_feature (1)..(391): Homolog of NCBI NO: 30683398 NR Description: CBL-interacting protein kinase 5 [Arabidopsis
  misc_feature (1)..(406): Homolog of NCBI NO: 18420882 NR Description: CBL-interacting protein kinase 25 [Arabidopsis
  misc_feature (1)..(385): Homolog of NCBI NO: 24899813 NR Description: serine/threonine protein kinase-like protein
  misc_feature (1)..(406): Homolog of NCBI NO: 15215664 NR Description: AT5g25110/T11H3_120 [Arabidopsis thaliana]
  misc_feature (1)..(394): Homolog of NCBI NO: 15242509 NR Description: CBL-interacting protein kinase 20 [Arabidopsis >gi|9758929|dbj|BAB09310.1| serine/threonine protein kinase
  misc_feature (1)..(389): Homolog of NCBI NO: 34903780 NR Description: unnamed protein product [Oryza sativa (japonica group)] >gi|7340882|dbj|BAA92972.1| unnamed protein product
  misc_feature (1)..(392): Homolog of NCBI NO: 23428550 NR Description: Serine/threonine Kinase [Persea americana]
  misc_feature (1)..(392): Homolog of NCBI NO: 8777339 NR Description: serine/threonine protein kinase [Arabidopsis
MEQIEREIAVMRLLRHPNVVELREVMATKKKIFFVMEYVNGGELFEMIDRDGKLPEDLARKYFQQLISAVDFCHSRGVFHRDIKPENLLLDGEGDLKVTDFGLSALMMPEGLGGRRGSSDDLLHTRCGTPAYVAPEVLRNKGYDGAMADIWSCGIVLYALLAGFLPFIDENVMTLYTKIFKAECEFPPWFSLESKELLSRLLVPDPEQRISMSEIKMIPWFRKNFTPSVAFSIDETIPSPPEPPTKKKKKDLNEKEDDGASPRSFNAFQFITSMSSGFDLSNLFEIKRKPKRMFTSKFPAKSVKERLETAAREMDMRVKHVKDCKMKLQRRTEGRKGRLSVTAEVFEVAPEVSVVEFCKTSGDTLEYYLFCEDDVRPALKDIVWSWQGDDDEDDVTTNDNVDTNDNKINNVS

SEQ ID NO: 107229 - DNA, 1741 bp, Arabidopsis thaliana
  misc_feature (1)..(1741): Ceres Seq. ID no. 13621777
  misc_feature: MA Experiment ID: 20000227 Result: Up-regulated in Transcription
  misc_feature: MA Experiment 20000227 PARAMETER Experiment Name: At_Root-Tips-vs-Tops_P Parameter: Tissue Value: Root Tips vs. Root Tops
  misc_feature: MA Experiment ID: 20000439 Result: Up-regulated in Transcription
  misc_feature: MA Experiment 20000439 PARAMETER Experiment Name: At_Roots__P Parameter: Age (day) Value: 14 vs. 21
  misc_feature: MA Experiment 20000439 PARAMETER Experiment Name: At_Roots__P Parameter: Organism Value: A. thaliana
  misc_feature: MA Experiment 20000439 PARAMETER Experiment Name: At_Roots__P Parameter: Tissue Value: Roots vs. Whole Plant
  misc_feature: MA Experiment ID: 20000451 Result: Up-regulated in Transcription
  misc_feature: MA Experiment 20000451 PARAMETER Experiment Name: At_CS6879_Shoots-Roots_P Parameter: Age (day) Value: 14
  misc_feature: MA Experiment 20000451 PARAMETER Experiment Name: At_CS6879_Shoots-Roots_P Parameter: Organism Value: A. thaliana
  misc_feature: MA Experiment 20000451 PARAMETER Experiment Name: At_CS6879_Shoots-Roots_P Parameter: Plant Line Value: CS6879 vs. WS
  misc_feature: MA Experiment 20000451 PARAMETER Experiment Name: At_CS6879_Shoots-Roots_P Parameter: Tissue Value: Roots
agatcaaacacaaatcaaatcagccatacatggatctaatcatgctttttcttctctctgctctcttcatcttccctgttttaatcttaattaagtctcggcttcgtcccaagaacaagaagagtacagcacctatggtccccggagcatggccattgctcggtcatttacatttatttgacaccgtaaacccgactcacgttacgtttggggcaatggctgacgtgtatggaccggtgttcatggcaaagcttggctctatcaaagtcatgatcataaacagcaaagaagtggccaaagagatttacacggtccacgacaagctcctagaacgaccagaacttactgcgtctaagcttctaggctacaacgactcgttcttgacgtttagtccttacggtctttactggagagagatacggaagattgcagtatccgagcttttctcgacatccggggttgatatgcacatggttagtagagcacgtgaggctgacttggcatttagagccttatacgttagatgggagaaaagaggtaagcctaaagaaggagtcttggtggacatgaagcaagagttcatagatctaactgcgaacatctcattgatgatggtctcggggaagagatactttggtgaaaacccgaactgcgaagtgaaagaagctaggagatgcgggaagctgattcgggagtttttggattacttcgcactatttttgttgtccgatgtggcaccagttctaggttttcttgattggaagaccaagagaggaatgaagagaacggctaaagggttggataaagttgctgaaggttggattgaagaacacaagaacaagaggagtgatcacggtaggagtgaaaatgactacttggatatactcattaagatattgggacaagacaagattcctggtttgagtgatactcacacgaaaattaaagccctctgcctcaacttggtattggcagggagcgagacggccattgtggttctggtttgggcggtatccttgctcttgaacaacccgcatgtcttgaggaaagctcaggaggagctggacagcaaaattggaaaggagagagttgtggaagagttagacatcaaagatttggtttacctccaagccattgtcaaggagacatttcgtctatacccaccagtccctctcgttgcttacagagctgtggtggaagatttcgacattgcattttgcaaatgtcatgtacctgcagggacacaattgatggtgagtgcatggaagattcacagggatccaaatgtttggtcgaaccccgaacagttcgagccagagagattcttgacatctaatagagaattggatgttggcgggcagagttacaagttttttccatttgggttgggacgaaggtcatgccccgcaatccccctaggtatgaggatggtgcactatctcctagtcaggtttttgcacagctttgacttggcaagaccatcgagtcaagatgtggacatgaccgagagcaatggattggtcaatcacaaagccacccctcttgaagtcaatatcattcctaggcttcataaatctctatatgaagtggatcatatagggactgataattagtacattgttcgtggccactgagttaaacaaaacaatgccgggtctgttccatgattttaaatttgttatgctatttgtggaagattaatttcatgaaaataagtattttggaatatggtggttatcgt

SEQ ID NO: 107230 - protein, 536 aa, Arabidopsis thaliana
  peptide (1)..(536): Ceres Seq. ID no. 13621778
  misc_feature (44)..(520): Pfam Name: Cytochrome P450 Pfam Description: Cytochrome P450
  misc_feature (10)..(536): Homolog of NCBI NO: 15224686 NR Description: cytochrome P450, putative [Arabidopsis thaliana]
IKHKSNQPYMDLIMLFLLSALFIFPVLILIKSRLRPKNKKSTAPMVPGAWPLLGHLHLFDTVNPTHVTFGAMADVYGPVFMAKLGSIKVMIINSKEVAKEIYTVHDKLLERPELTASKLLGYNDSFLTFSPYGLYWREIRKIAVSELFSTSGVDMHMVSRAREADLAFRALYVRWEKRGKPKEGVLVDMKQEFIDLTANISLMMVSGKRYFGENPNCEVKEARRCGKLIREFLDYFALFLLSDVAPVLGFLDWKTKRGMKRTAKGLDKVAEGWIEEHKNKRSDHGRSENDYLDILIKILGQDKIPGLSDTHTKIKALCLNLVLAGSETAIVVLVWAVSLLLNNPHVLRKAQEELDSKIGKERVVEELDIKDLVYLQAIVKETFRLYPPVPLVAYRAVVEDFDIAFCKCHVPAGTQLMVSAWKIHRDPNVWSNPEQFEPERFLTSNRELDVGGQSYKFFPFGLGRRSCPAIPLGMRMVHYLLVRFLHSFDLARPSSQDVDMTESNGLVNHKATPLEVNIIPRLHKSLYEVDHIGTDN

SEQ ID NO: 107231 - protein, 527 aa, Arabidopsis thaliana
  peptide (1)..(527): Ceres Seq. ID no. 13621779
  misc_feature (35)..(511): Pfam Name: Cytochrome P450 Pfam Description: Cytochrome P450
  misc_feature (1)..(527): Homolog of NCBI NO: 15224686 NR Description: cytochrome P450, putative [Arabidopsis thaliana]
MDLIMLFLLSALFIFPVLILIKSRLRPKNKKSTAPMVPGAWPLLGHLHLFDTVNPTHVTFGAMADVYGPVFMAKLGSIKVMIINSKEVAKEIYTVHDKLLERPELTASKLLGYNDSFLTFSPYGLYWREIRKIAVSELFSTSGVDMHMVSRAREADLAFRALYVRWEKRGKPKEGVLVDMKQEFIDLTANISLMMVSGKRYFGENPNCEVKEARRCGKLIREFLDYFALFLLSDVAPVLGFLDWKTKRGMKRTAKGLDKVAEGWIEEHKNKRSDHGRSENDYLDILIKILGQDKIPGLSDTHTKIKALCLNLVLAGSETAIVVLVWAVSLLLNNPHVLRKAQEELDSKIGKERVVEELDIKDLVYLQAIVKETFRLYPPVPLVAYRAVVEDFDIAFCKCHVPAGTQLMVSAWKIHRDPNVWSNPEQFEPERFLTSNRELDVGGQSYKFFPFGLGRRSCPAIPLGMRMVHYLLVRFLHSFDLARPSSQDVDMTESNGLVNHKATPLEVNIIPRLHKSLYEVDHIGTDN

SEQ ID NO: 107232 - protein, 523 aa, Arabidopsis thaliana
  peptide (1)..(523): Ceres Seq. ID no. 13621780
  misc_feature (31)..(507): Pfam Name: Cytochrome P450 Pfam Description: Cytochrome P450
  misc_feature (1)..(523): Homolog of NCBI NO: 15224686 NR Description: cytochrome P450, putative [Arabidopsis thaliana]
MLFLLSALFIFPVLILIKSRLRPKNKKSTAPMVPGAWPLLGHLHLFDTVNPTHVTFGAMADVYGPVFMAKLGSIKVMIINSKEVAKEIYTVHDKLLERPELTASKLLGYNDSFLTFSPYGLYWREIRKIAVSELFSTSGVDMHMVSRAREADLAFRALYVRWEKRGKPKEGVLVDMKQEFIDLTANISLMMVSGKRYFGENPNCEVKEARRCGKLIREFLDYFALFLLSDVAPVLGFLDWKTKRGMKRTAKGLDKVAEGWIEEHKNKRSDHGRSENDYLDILIKILGQDKIPGLSDTHTKIKALCLNLVLAGSETAIVVLVWAVSLLLNNPHVLRKAQEELDSKIGKERVVEELDIKDLVYLQAIVKETFRLYPPVPLVAYRAVVEDFDIAFCKCHVPAGTQLMVSAWKIHRDPNVWSNPEQFEPERFLTSNRELDVGGQSYKFFPFGLGRRSCPAIPLGMRMVHYLLVRFLHSFDLARPSSQDVDMTESNGLVNHKATPLEVNIIPRLHKSLYEVDHIGTDN

SEQ ID NO: 107233 - DNA, 1890 bp, Arabidopsis thaliana
  misc_feature (1)..(1890): Ceres Seq. ID no. 13621789
  misc_feature: MA Experiment ID: 20000182 Result: Up-regulated in Transcription
  misc_feature: MA Experiment 20000182 PARAMETER Experiment Name: At_2mM_SA_P Parameter: Age (day) Value: 14
  misc_feature: MA Experiment 20000182 PARAMETER Experiment Name: At_2mM_SA_P Parameter: Organism Value: A. thaliana
  misc_feature: MA Experiment 20000182 PARAMETER Experiment Name: At_2mM_SA_P Parameter: Plant Line Value: WS
  misc_feature: MA Experiment 20000182 PARAMETER Experiment Name: At_2mM_SA_P Parameter: Timepoint (hr) Value: 6
  misc_feature: MA Experiment 20000182 PARAMETER Experiment Name: At_2mM_SA_P Parameter: Tissue Value: Aerial
  misc_feature: MA Experiment 20000182 PARAMETER Experiment Name: At_2mM_SA_P Parameter: Treatment Value: 2mM SA vs. No Treatment
  misc_feature: MA Experiment ID: 20000227 Result: Down-regulated in Transcription
  misc_feature: MA Experiment 20000227 PARAMETER Experiment Name: At_Root-Tips-vs-Tops_P Parameter: Tissue Value: Root Tips vs. Root Tops
  misc_feature: MA Experiment ID: 20000265 Result: Up-regulated in Transcription
  misc_feature: MA Experiment 20000265 PARAMETER Experiment Name: At_Open_Flower_P Parameter: Age (day) Value: 21
  misc_feature: MA Experiment 20000265 PARAMETER Experiment Name: At_Open_Flower_P Parameter: Plant Line Value: WS
  misc_feature: MA Experiment 20000265 PARAMETER Experiment Name: At_Open_Flower_P Parameter: Tissue Value: Closed Flower vs. Whole Plant
  misc_feature: MA Experiment ID: 20001911 Result: Down-regulated in Transcription
  misc_feature: MA Experiment 20001911 PARAMETER Experiment Name: At_Drought_Reproduction_P Parameter: Age (day) Value: 40
  misc_feature: MA Experiment 20001911 PARAMETER Experiment Name: At_Drought_Reproduction_P Parameter: Organism Value: A. thaliana
  misc_feature: MA Experiment 20001911 PARAMETER Experiment Name: At_Drought_Reproduction_P Parameter: Plant Line Value: WS
  misc_feature: MA Experiment 20001911 PARAMETER Experiment Name: At_Drought_Reproduction_P Parameter: Timepoint (day) Value: 10
  misc_feature: MA Experiment 20001911 PARAMETER Experiment Name: At_Drought_Reproduction_P Parameter: Tissue Value: Flowers
  misc_feature: MA Experiment 20001911 PARAMETER Experiment Name: At_Drought_Reproduction_P Parameter: Treatment Value: Drought vs. No Drought
atttctcataaaacaaaaattcgagacctcctctccacttcgaaatttcattttttttttctcaacagagtaaatttggctcttatgcacctgtcgtgtgaatcctgatctcgctttagattgtggaagccttcgacacatttcccattttgaatttgtcttcttcttcttcttcctttagtttttggggatatttcaccatcctcgttgaaatcagtgtgattcttcttcgtatacaatgacgaaattgagatcgaaatggttaggtttaagatctgtaaccatcttcttaatcaatttctctctagcttttgctttcgtttccgctgagagaagaggaaaatctctgaggttaagtacagacgaaacgcgggaaaatgaatcaagtttcttccttaaagctatcaattttctatgggaatctgatcaaataggttatcgtcatgtttggcctgaatttgagtttaattggcaaattgtattgggaacacttgttggattctttggagctgcgtttggtagtgtaggtggtgttggtggtggtgggattttcgtacctatgcttagtttgattattgggtttgatcctaaatcagctacagctatttcaaaatgtatgattatgggtgcttctgtgtccactgtgtattacaatcttagattgaggcatccaacacttgacatgcctatcattgattatgatctcgctttactgatccagcctatgcttatgcttgggattagtattggtgttgcttttaatgtgatttttccagattggttggttacagttctactcatcgtcctctttcttggcacgtcaacaaaggcgttcttgaagggttctgagacttggaacaaggagactatagagaaaaaggaggctgctaaacgtttagagtcaaatggtgtatctggcacagaagtggaatacgtgcctcttcccgcagccccgagcacgaaccctggaaacaaaaagaaagaagaagtaagtattattgaaaatgtatactggaaggaactgggacttctcgtgtttgtctggattgtgttcctggcgctgcagatatccaagcaaaatctggctaattgttcagtagcatattgggtcataaatctgttacagattccggttgcagttggtgtatcaggctatgaagcagtagctttgtaccagggtagaagaatcattgcgtctaagggacaaggagactcgaatttcaccgttggtcagcttgttatgtattgtacatttggcataatagcaggcatagtcggtggtttacttggtttaggcggaggtttcatcatgggtccattgttcttggagctcggtgtcccaccacaggtctcaagtgccacagccacttttgcaatgactttctcatcatccatgtctgttgtagaatactatcttctcaaacgattccctgttccatatgctttgtaccttgtgggagtggcaacaattgcagcttgggttggacagcatgtagtcagaaggctaatcgcagccatcggccgcgcatctctcatcatcttcatcctcgcgtccatgatctttatcagtgcgatatcgcttggtggcgtgggaatagtgaatatgatcggcaaaatccaacggcatgagtacatgggtttcgagaacctttgcaagtacggtggctgacgttgtacttagcatgtagcttgttaagtgttaaacttataaagcttcattcttgatggcaagacttatggtcttttgattgtgtcttgtgtcattttttaaatttgaaaatcgaattgtataattactacttacttagtagtagtggtactaatttttttcttttcttttttggctgaattatggttggaaatctaatctatgtcaatataagtgattga

SEQ ID NO: 107234 - protein, 476 aa, Arabidopsis thaliana
  peptide (1)..(476): Ceres Seq. ID no. 13621790
  misc_feature (1)..(476): Homolog of NCBI NO: 30682879 NR Description: expressed protein [Arabidopsis thaliana] unknown protein [Arabidopsis thaliana] unknown protein [Arabidopsis thaliana]
  misc_feature (287)..(476): Homolog of NCBI NO: 25412342 NR Description: hypothetical protein At2g25740 [imported] - thaliana >gi|3643608|gb|AAC42255.1| hypothetical protein thaliana] >gi|20197510|gb|AAM15102.1| hypothetical protein
  misc_feature (129)..(296): Homolog of NCBI NO: 25412342 NR Description: hypothetical protein At2g25740 [imported] - thaliana >gi|3643608|gb|AAC42255.1| hypothetical protein thaliana] >gi|20197510|gb|AAM15102.1| hypothetical protein
  misc_feature (7)..(474): Homolog of NCBI NO: 40253412 NR Description: membrane protein-like [Oryza sativa (japonica
  misc_feature (7)..(474): Homolog of NCBI NO: 40253486 NR Description: unknown protein [Oryza sativa (japonica
  misc_feature (70)..(472): Homolog of NCBI NO: 30686851 NR Description: expressed protein [Arabidopsis thaliana] At2g36630/F1O11.26 [Arabidopsis thaliana]
  misc_feature (272)..(467): Homolog of NCBI NO: 16660290 NR Description: hypothetical protein [Musa acuminata]
  misc_feature (81)..(472): Homolog of NCBI NO: 6554197 NR Description: T23J18.20 [Arabidopsis thaliana]
  misc_feature (81)..(472): Homolog of NCBI NO: 15220419 NR Description: expressed protein [Arabidopsis thaliana]
  misc_feature (81)..(472): Homolog of NCBI NO: 34908754 NR Description: P0415A04.10 [Oryza sativa (japonica
MTKLRSKWLGLRSVTIFLINFSLAFAFVSAERRGKSLRLSTDETRENESSFFLKAINFLWESDQIGYRHVWPEFEFNWQIVLGTLVGFFGAAFGSVGGVGGGGIFVPMLSLIIGFDPKSATAISKCMIMGASVSTVYYNLRLRHPTLDMPIIDYDLALLIQPMLMLGISIGVAFNVIFPDWLVTVLLIVLFLGTSTKAFLKGSETWNKETIEKKEAAKRLESNGVSGTEVEYVPLPAAPSTNPGNKKKEEVSIIENVYWKELGLLVFVWIVFLALQISKQNLANCSVAYWVINLLQIPVAVGVSGYEAVALYQGRRIIASKGQGDSNFTVGQLVMYCTFGIIAGIVGGLLGLGGGFIMGPLFLELGVPPQVSSATATFAMTFSSSMSVVEYYLLKRFPVPYALYLVGVATIAAWVGQHVVRRLIAAIGRASLIIFILASMIFISAISLGGVGIVNMIGKIQRHEYMGFENLCKYGG

SEQ ID NO: 107235 - protein, 369 aa, Arabidopsis thaliana
  peptide (1)..(369): Ceres Seq. ID no. 13621791
  misc_feature (1)..(369): Homolog of NCBI NO: 30682879 NR Description: expressed protein [Arabidopsis thaliana] unknown protein [Arabidopsis thaliana] unknown protein [Arabidopsis thaliana]
  misc_feature (180)..(369): Homolog of NCBI NO: 25412342 NR Description: hypothetical protein At2g25740 [imported] - thaliana >gi|3643608|gb|AAC42255.1| hypothetical protein thaliana] >gi|20197510|gb|AAM15102.1| hypothetical protein
  misc_feature (22)..(189): Homolog of NCBI NO: 25412342 NR Description: hypothetical protein At2g25740 [imported] - thaliana >gi|3643608|gb|AAC42255.1| hypothetical protein thaliana] >gi|20197510|gb|AAM15102.1| hypothetical protein
  misc_feature (1)..(367): Homolog of NCBI NO: 40253412 NR Description: membrane protein-like [Oryza sativa (japonica
  misc_feature (1)..(367): Homolog of NCBI NO: 40253486 NR Description: unknown protein [Oryza sativa (japonica
  misc_feature (1)..(365): Homolog of NCBI NO: 30686851 NR Description: expressed protein [Arabidopsis thaliana] At2g36630/F1O11.26 [Arabidopsis thaliana]
  misc_feature (165)..(360): Homolog of NCBI NO: 16660290 NR Description: hypothetical protein [Musa acuminata]
  misc_feature (1)..(365): Homolog of NCBI NO: 6554197 NR Description: T23J18.20 [Arabidopsis thaliana]
  misc_feature (1)..(365): Homolog of NCBI NO: 15220419 NR Description: expressed protein [Arabidopsis thaliana]
  misc_feature (1)..(365): Homolog of NCBI NO: 34908754 NR Description: P0415A04.10 [Oryza sativa (japonica
MLSLIIGFDPKSATAISKCMIMGASVSTVYYNLRLRHPTLDMPIIDYDLALLIQPMLMLGISIGVAFNVIFPDWLVTVLLIVLFLGTSTKAFLKGSETWNKETIEKKEAAKRLESNGVSGTEVEYVPLPAAPSTNPGNKKKEEVSIIENVYWKELGLLVFVWIVFLALQISKQNLANCSVAYWVINLLQIPVAVGVSGYEAVALYQGRRIIASKGQGDSNFTVGQLVMYCTFGIIAGIVGGLLGLGGGFIMGPLFLELGVPPQVSSATATFAMTFSSSMSVVEYYLLKRFPVPYALYLVGVATIAAWVGQHVVRRLIAAIGRASLIIFILASMIFISAISLGGVGIVNMIGKIQRHEYMGFENLCKYGG

SEQ ID NO: 107236 - protein, 350 aa, Arabidopsis thaliana
  peptide (1)..(350): Ceres Seq. ID no. 13621792
  misc_feature (1)..(350): Homolog of NCBI NO: 30682879 NR Description: expressed protein [Arabidopsis thaliana] unknown protein [Arabidopsis thaliana] unknown protein [Arabidopsis thaliana]
  misc_feature (161)..(350): Homolog of NCBI NO: 25412342 NR Description: hypothetical protein At2g25740 [imported] - thaliana >gi|3643608|gb|AAC42255.1| hypothetical protein thaliana] >gi|20197510|gb|AAM15102.1| hypothetical protein
  misc_feature (3)..(170): Homolog of NCBI NO: 25412342 NR Description: hypothetical protein At2g25740 [imported] - thaliana >gi|3643608|gb|AAC42255.1| hypothetical protein thaliana] >gi|20197510|gb|AAM15102.1| hypothetical protein
  misc_feature (1)..(348): Homolog of NCBI NO: 40253412 NR Description: membrane protein-like [Oryza sativa (japonica
  misc_feature (1)..(348): Homolog of NCBI NO: 40253486 NR Description: unknown protein [Oryza sativa (japonica
  misc_feature (1)..(346): Homolog of NCBI NO: 30686851 NR Description: expressed protein [Arabidopsis thaliana] At2g36630/F1O11.26 [Arabidopsis thaliana]
  misc_feature (146)..(341): Homolog of NCBI NO: 16660290 NR Description: hypothetical protein [Musa acuminata]
  misc_feature (1)..(346): Homolog of NCBI NO: 6554197 NR Description: T23J18.20 [Arabidopsis thaliana]
  misc_feature (1)..(346): Homolog of NCBI NO: 15220419 NR Description: expressed protein [Arabidopsis thaliana]
  misc_feature (1)..(346): Homolog of NCBI NO: 34908754 NR Description: P0415A04.10 [Oryza sativa (japonica
MIMGASVSTVYYNLRLRHPTLDMPIIDYDLALLIQPMLMLGISIGVAFNVIFPDWLVTVLLIVLFLGTSTKAFLKGSETWNKETIEKKEAAKRLESNGVSGTEVEYVPLPAAPSTNPGNKKKEEVSIIENVYWKELGLLVFVWIVFLALQISKQNLANCSVAYWVINLLQIPVAVGVSGYEAVALYQGRRIIASKGQGDSNFTVGQLVMYCTFGIIAGIVGGLLGLGGGFIMGPLFLELGVPPQVSSATATFAMTFSSSMSVVEYYLLKRFPVPYALYLVGVATIAAWVGQHVVRRLIAAIGRASLIIFILASMIFISAISLGGVGIVNMIGKIQRHEYMGFENLCKYGG

SEQ ID NO: 107237 - DNA, 1391 bp, Arabidopsis thaliana
  misc_feature (1)..(1391): Ceres Seq. ID no. 13621797
  misc_feature: MA Experiment ID: 20000171 Result: Up-regulated in Transcription
  misc_feature: MA Experiment 20000171 PARAMETER Experiment Name: At_42deg_Heat_P Parameter: Age (day) Value: 14
  misc_feature: MA Experiment 20000171 PARAMETER Experiment Name: At_42deg_Heat_P Parameter: Organism Value: A. thaliana
  misc_feature: MA Experiment 20000171 PARAMETER Experiment Name: At_42deg_Heat_P Parameter: Plant Line Value: WS
  misc_feature: MA Experiment 20000171 PARAMETER Experiment Name: At_42deg_Heat_P Parameter: Temperature (deg C) Value: 42 vs. 22
  misc_feature: MA Experiment 20000171 PARAMETER Experiment Name: At_42deg_Heat_P Parameter: Timepoint (hr) Value: 1
  misc_feature: MA Experiment 20000171 PARAMETER Experiment Name: At_42deg_Heat_P Parameter: Tissue Value: Aerial
  misc_feature: MA Experiment ID: 20000173 Result: Up-regulated in Transcription
  misc_feature: MA Experiment 20000173 PARAMETER Experiment Name: At_42deg_Heat_P Parameter: Age (day) Value: 14
  misc_feature: MA Experiment 20000173 PARAMETER Experiment Name: At_42deg_Heat_P Parameter: Organism Value: A. thaliana
  misc_feature: MA Experiment 20000173 PARAMETER Experiment Name: At_42deg_Heat_P Parameter: Plant Line Value: WS
  misc_feature: MA Experiment 20000173 PARAMETER Experiment Name: At_42deg_Heat_P Parameter: Temperature (deg C) Value: 42 vs. 22
  misc_feature: MA Experiment 20000173 PARAMETER Experiment Name: At_42deg_Heat_P Parameter: Timepoint (hr) Value: 6
  misc_feature: MA Experiment 20000173 PARAMETER Experiment Name: At_42deg_Heat_P Parameter: Tissue Value: Aerial
  misc_feature: MA Experiment ID: 20000179 Result: Up-regulated in Transcription
  misc_feature: MA Experiment 20000179 PARAMETER Experiment Name: At_Germinating_Seeds_P Parameter: Age (hr) Value: 6 vs. 0
  misc_feature: MA Experiment 20000179 PARAMETER Experiment Name: At_Germinating_Seeds_P Parameter: Tissue Value: Germinating Seeds
  misc_feature: MA Experiment ID: 20000180 Result: Up-regulated in Transcription
  misc_feature: MA Experiment 20000180 PARAMETER Experiment Name: At_Germinating_Seeds_P Parameter: Age (hr) Value: 24 vs. 0
  misc_feature: MA Experiment 20000180 PARAMETER Experiment Name: At_Germinating_Seeds_P Parameter: Tissue Value: Germinating Seeds
  misc_feature: MA Experiment ID: 20000182 Result: Up-regulated in Transcription
  misc_feature: MA Experiment 20000182 PARAMETER Experiment Name: At_2mM_SA_P Parameter: Age (day) Value: 14
  misc_feature: MA Experiment 20000182 PARAMETER Experiment Name: At_2mM_SA_P Parameter: Organism Value: A. thaliana
  misc_feature: MA Experiment 20000182 PARAMETER Experiment Name: At_2mM_SA_P Parameter: Plant Line Value: WS
  misc_feature: MA Experiment 20000182 PARAMETER Experiment Name: At_2mM_SA_P Parameter: Timepoint (hr) Value: 6
  misc_feature: MA Experiment 20000182 PARAMETER Experiment Name: At_2mM_SA_P Parameter: Tissue Value: Aerial
  misc_feature: MA Experiment 20000182 PARAMETER Experiment Name: At_2mM_SA_P Parameter: Treatment Value: 2mM SA vs. No Treatment
  misc_feature: MA Experiment ID: 20000437 Result: Up-regulated in Transcription
  misc_feature: MA Experiment 20000437 PARAMETER Experiment Name: At_Drought_P Parameter: Age (day) Value: 8
  misc_feature: MA Experiment 20000437 PARAMETER Experiment Name: At_Drought_P Parameter: Organism Value: A. thaliana
  misc_feature: MA Experiment 20000437 PARAMETER Experiment Name: At_Drought_P Parameter: Plant Line Value: WS
  misc_feature: MA Experiment 20000437 PARAMETER Experiment Name: At_Drought_P Parameter: Timepoint (hr) Value: 24
  misc_feature: MA Experiment 20000437 PARAMETER Experiment Name: At_Drought_P Parameter: Tissue Value: Whole Plant
  misc_feature: MA Experiment 20000437 PARAMETER Experiment Name: At_Drought_P Parameter: Treatment Value: Drought vs. No Drought
  misc_feature: MA Experiment ID: 20000441 Result: Up-regulated in Transcription
  misc_feature: MA Experiment 20000441 PARAMETER Experiment Name: At_1uM_BR-BRZ__P Parameter: Tissue Value: Shoot Apices
  misc_feature: MA Experiment 20000441 PARAMETER Experiment Name: At_1uM_BR-BRZ__P Parameter: Treatment Value: 1uM BR vs. No Treatment
  misc_feature: MA Experiment ID: 20000443 Result: Up-regulated in Transcription
  misc_feature: MA Experiment 20000443 PARAMETER Experiment Name: At_1uM_BR-BRZ__P Parameter: Tissue Value: Shoot Apices
  misc_feature: MA Experiment 20000443 PARAMETER Experiment Name: At_1uM_BR-BRZ__P Parameter: Treatment Value: 1uM BRZ vs. No Treatment
  misc_feature: MA Experiment ID: 20000453 Result: Up-regulated in Transcription
  misc_feature: MA Experiment 20000453 PARAMETER Experiment Name: At_100uM_ABA_P Parameter: Age (day) Value: 15
  misc_feature: MA Experiment 20000453 PARAMETER Experiment Name: At_100uM_ABA_P Parameter: Organism Value: A. thaliana
  misc_feature: MA Experiment 20000453 PARAMETER Experiment Name: At_100uM_ABA_P Parameter: Plant Line Value: WS
  misc_feature: MA Experiment 20000453 PARAMETER Experiment Name: At_100uM_ABA_P Parameter: Timepoint (hr) Value: 24
  misc_feature: MA Experiment 20000453 PARAMETER Experiment Name: At_100uM_ABA_P Parameter: Tissue Value: Aerial
  misc_feature: MA Experiment 20000453 PARAMETER Experiment Name: At_100uM_ABA_P Parameter: Treatment Value: 100uM ABA vs. No Treatment
  misc_feature: MA Experiment ID: 20000456 Result: Up-regulated in Transcription
  misc_feature: MA Experiment 20000456 PARAMETER Experiment Name: At_100uM_BA_P Parameter: Age (day) Value: 14
  misc_feature: MA Experiment 20000456 PARAMETER Experiment Name: At_100uM_BA_P Parameter: Organism Value: A. thaliana
  misc_feature: MA Experiment 20000456 PARAMETER Experiment Name: At_100uM_BA_P Parameter: Plant Line Value: WS
  misc_feature: MA Experiment 20000456 PARAMETER Experiment Name: At_100uM_BA_P Parameter: Timepoint (hr) Value: 6
  misc_feature: MA Experiment 20000456 PARAMETER Experiment Name: At_100uM_BA_P Parameter: Tissue Value: Aerial
  misc_feature: MA Experiment 20000456 PARAMETER Experiment Name: At_100uM_BA_P Parameter: Treatment Value: 100uM BA vs. No Treatment
  misc_feature: MA Experiment ID: 20000709 Result: Up-regulated in Transcription
  misc_feature: MA Experiment 20000709 PARAMETER Experiment Name: At_15mM_NH4NO3_L-to-H_P Parameter: Age (hr) Value: 14
  misc_feature: MA Experiment 20000709 PARAMETER Experiment Name: At_15mM_NH4NO3_L-to-H_P Parameter: Organism Value: A. thaliana
  misc_feature: MA Experiment 20000709 PARAMETER Experiment Name: At_15mM_NH4NO3_L-to-H_P Parameter: Plant Line Value: WS
  misc_feature: MA Experiment 20000709 PARAMETER Experiment Name: At_15mM_NH4NO3_L-to-H_P Parameter: Timepoint (hr) Value: 4
  misc_feature: MA Experiment 20000709 PARAMETER Experiment Name: At_15mM_NH4NO3_L-to-H_P Parameter: Tissue Value: Aerial
  misc_feature: MA Experiment 20000709 PARAMETER Experiment Name: At_15mM_NH4NO3_L-to-H_P Parameter: Treatment Value: 15mM NH4NO3 vs. 30mM Mannitol
  misc_feature: MA Experiment ID: 20001248 Result: Down-regulated in Transcription
  misc_feature: MA Experiment 20001248 PARAMETER Experiment Name: At_Far-red-induction_P Parameter: Age (day) Value: 7
  misc_feature: MA Experiment 20001248 PARAMETER Experiment Name: At_Far-red-induction_P Parameter: Light Value: Far-red vs. White
  misc_feature: MA Experiment 20001248 PARAMETER Experiment Name: At_Far-red-induction_P Parameter: Organism Value: A. thaliana
  misc_feature: MA Experiment 20001248 PARAMETER Experiment Name: At_Far-red-induction_P Parameter: Plant Line Value: Columbia
  misc_feature: MA Experiment 20001248 PARAMETER Experiment Name: At_Far-red-induction_P Parameter: Timepoint (hr) Value: 4
  misc_feature: MA Experiment 20001248 PARAMETER Experiment Name: At_Far-red-induction_P Parameter: Tissue Value: Whole Plant
  misc_feature: MA Experiment ID: 20001450 Result: Down-regulated in Transcription
  misc_feature: MA Experiment 20001450 PARAMETER Experiment Name: At_Far-red-induction_P Parameter: Age (day) Value: 7
  misc_feature: MA Experiment 20001450 PARAMETER Experiment Name: At_Far-red-induction_P Parameter: Light Value: Far-red vs. White
  misc_feature: MA Experiment 20001450 PARAMETER Experiment Name: At_Far-red-induction_P Parameter: Organism Value: A. thaliana
  misc_feature: MA Experiment 20001450 PARAMETER Experiment Name: At_Far-red-induction_P Parameter: Plant Line Value: Columbia
  misc_feature: MA Experiment 20001450 PARAMETER Experiment Name: At_Far-red-induction_P Parameter: Timepoint (hr) Value: 8
  misc_feature: MA Experiment 20001450 PARAMETER Experiment Name: At_Far-red-induction_P Parameter: Tissue Value: Whole Plant
  misc_feature: MA Experiment ID: 20001556 Result: Up-regulated in Transcription
  misc_feature: MA Experiment 20001556 PARAMETER Experiment Name: At_Drought_Soil_Dry_P Parameter: Age (day) Value: 26
  misc_feature: MA Experiment 20001556 PARAMETER Experiment Name: At_Drought_Soil_Dry_P Parameter: Organism Value: A. thaliana
  misc_feature: MA Experiment 20001556 PARAMETER Experiment Name: At_Drought_Soil_Dry_P Parameter: Plant Line Value: WS
  misc_feature: MA Experiment 20001556 PARAMETER Experiment Name: At_Drought_Soil_Dry_P Parameter: Post Timepoint (hr) Value: None
  misc_feature: MA Experiment 20001556 PARAMETER Experiment Name: At_Drought_Soil_Dry_P Parameter: Post-Treatment Value: None
  misc_feature: MA Experiment 20001556 PARAMETER Experiment Name: At_Drought_Soil_Dry_P Parameter: Timepoint (day) Value: 12
  misc_feature: MA Experiment 20001556 PARAMETER Experiment Name: At_Drought_Soil_Dry_P Parameter: Treatment Value: Drought vs. No Drought
  misc_feature: MA Experiment ID: 20001557 Result: Up-regulated in Transcription
  misc_feature: MA Experiment 20001557 PARAMETER Experiment Name: At_Drought_Soil_Dry_P Parameter: Age (day) Value: 27
  misc_feature: MA Experiment 20001557 PARAMETER Experiment Name: At_Drought_Soil_Dry_P Parameter: Organism Value: A. thaliana
  misc_feature: MA Experiment 20001557 PARAMETER Experiment Name: At_Drought_Soil_Dry_P Parameter: Plant Line Value: WS
  misc_feature: MA Experiment 20001557 PARAMETER Experiment Name: At_Drought_Soil_Dry_P Parameter: Post Timepoint (hr) Value: 3
  misc_feature: MA Experiment 20001557 PARAMETER Experiment Name: At_Drought_Soil_Dry_P Parameter: Post-Treatment Value: Re-Water vs. No Drought
  misc_feature: MA Experiment 20001557 PARAMETER Experiment Name: At_Drought_Soil_Dry_P Parameter: Timepoint (day) Value: 13
  misc_feature: MA Experiment 20001557 PARAMETER Experiment Name: At_Drought_Soil_Dry_P Parameter: Treatment Value: Drought vs. No Drought
  misc_feature: MA Experiment ID: 20001558 Result: Up-regulated in Transcription
  misc_feature: MA Experiment 20001558 PARAMETER Experiment Name: At_Drought_Soil_Dry_P Parameter: Age (day) Value: 27
  misc_feature: MA Experiment 20001558 PARAMETER Experiment Name: At_Drought_Soil_Dry_P Parameter: Organism Value: A. thaliana
  misc_feature: MA Experiment 20001558 PARAMETER Experiment Name: At_Drought_Soil_Dry_P Parameter: Plant Line Value: WS
  misc_feature: MA Experiment 20001558 PARAMETER Experiment Name: At_Drought_Soil_Dry_P Parameter: Post Timepoint (hr) Value: 6
  misc_feature: MA Experiment 20001558 PARAMETER Experiment Name: At_Drought_Soil_Dry_P Parameter: Post-Treatment Value: Re-Water vs. No Drought
  misc_feature: MA Experiment 20001558 PARAMETER Experiment Name: At_Drought_Soil_Dry_P Parameter: Timepoint (day) Value: 13
  misc_feature: MA Experiment 20001558 PARAMETER Experiment Name: At_Drought_Soil_Dry_P Parameter: Treatment Value: Drought vs. No Drought
  misc_feature: MA Experiment ID: 20001560 Result: Up-regulated in Transcription
  misc_feature: MA Experiment 20001560 PARAMETER Experiment Name: At_Drought_Soil_Dry_P Parameter: Age (day) Value: 28
  misc_feature: MA Experiment 20001560 PARAMETER Experiment Name: At_Drought_Soil_Dry_P Parameter: Organism Value: A. thaliana
  misc_feature: MA Experiment 20001560 PARAMETER Experiment Name: At_Drought_Soil_Dry_P Parameter: Plant Line Value: WS
  misc_feature: MA Experiment 20001560 PARAMETER Experiment Name: At_Drought_Soil_Dry_P Parameter: Post Timepoint (hr) Value: None
  misc_feature: MA Experiment 20001560 PARAMETER Experiment Name: At_Drought_Soil_Dry_P Parameter: Post-Treatment Value: None
  misc_feature: MA Experiment 20001560 PARAMETER Experiment Name: At_Drought_Soil_Dry_P Parameter: Timepoint (day) Value: 14
  misc_feature: MA Experiment 20001560 PARAMETER Experiment Name: At_Drought_Soil_Dry_P Parameter: Treatment Value: Drought vs. No Drought
  misc_feature: MA Experiment ID: 20001757 Result: Down-regulated in Transcription
  misc_feature: MA Experiment 20001757 PARAMETER Experiment Name: At_50mM_NH4NO3_L-to-H_P Parameter: Timepoint (hr) Value: 6
  misc_feature: MA Experiment 20001757 PARAMETER Experiment Name: At_50mM_NH4NO3_L-to-H_P Parameter: Tissue Value: Leaf
  misc_feature: MA Experiment 20001757 PARAMETER Experiment Name: At_50mM_NH4NO3_L-to-H_P Parameter: Treatment Value: 50mM NH4NO3 vs 100mM Mannitol
  misc_feature: MA Experiment ID: 20001768 Result: Up-regulated in Transcription
  misc_feature: MA Experiment 20001768 PARAMETER Experiment Name: At_Far-red-enriched-adult_P Parameter: Age (day) Value: 28
  misc_feature: MA Experiment 20001768 PARAMETER Experiment Name: At_Far-red-enriched-adult_P Parameter: Light Value: Far-red enriched vs. White
  misc_feature: MA Experiment 20001768 PARAMETER Experiment Name: At_Far-red-enriched-adult_P Parameter: Organism Value: A. thaliana
  misc_feature: MA Experiment 20001768 PARAMETER Experiment Name: At_Far-red-enriched-adult_P Parameter: Plant Line Value: Columbia
  misc_feature: MA Experiment 20001768 PARAMETER Experiment Name: At_Far-red-enriched-adult_P Parameter: Timepoint (hr) Value: 1
  misc_feature: MA Experiment 20001768 PARAMETER Experiment Name: At_Far-red-enriched-adult_P Parameter: Tissue Value: Aerial
  misc_feature: MA Experiment ID: 20001772 Result: Down-regulated in Transcription
  misc_feature: MA Experiment 20001772 PARAMETER Experiment Name: At_Far-red-enriched-adult_P Parameter: Age (day) Value: 29
  misc_feature: MA Experiment 20001772 PARAMETER Experiment Name: At_Far-red-enriched-adult_P Parameter: Light Value: Far-red enriched vs. White
  misc_feature: MA Experiment 20001772 PARAMETER Experiment Name: At_Far-red-enriched-adult_P Parameter: Organism Value: A. thaliana
  misc_feature: MA Experiment 20001772 PARAMETER Experiment Name: At_Far-red-enriched-adult_P Parameter: Plant Line Value: Columbia
  misc_feature: MA Experiment 20001772 PARAMETER Experiment Name: At_Far-red-enriched-adult_P Parameter: Timepoint (hr) Value: 24
  misc_feature: MA Experiment 20001772 PARAMETER Experiment Name: At_Far-red-enriched-adult_P Parameter: Tissue Value: Aerial
  misc_feature: MA Experiment ID: 20001904 Result: Up-regulated in Transcription
  misc_feature: MA Experiment 20001904 PARAMETER Experiment Name: At_Drought_Reproduction_P Parameter: Age (day) Value: 37
  misc_feature: MA Experiment 20001904 PARAMETER Experiment Name: At_Drought_Reproduction_P Parameter: Organism Value: A. thaliana
  misc_feature: MA Experiment 20001904 PARAMETER Experiment Name: At_Drought_Reproduction_P Parameter: Plant Line Value: WS
  misc_feature: MA Experiment 20001904 PARAMETER Experiment Name: At_Drought_Reproduction_P Parameter: Timepoint (day) Value: 7
  misc_feature: MA Experiment 20001904 PARAMETER Experiment Name: At_Drought_Reproduction_P Parameter: Tissue Value: Rosettes
  misc_feature: MA Experiment 20001904 PARAMETER Experiment Name: At_Drought_Reproduction_P Parameter: Treatment Value: Drought vs. No Drought
  misc_feature: MA Experiment ID: 20001905 Result: Up-regulated in Transcription
  misc_feature: MA Experiment 20001905 PARAMETER Experiment Name: At_Drought_Reproduction_P Parameter: Age (day) Value: 40
  misc_feature: MA Experiment 20001905 PARAMETER Experiment Name: At_Drought_Reproduction_P Parameter: Organism Value: A. thaliana
  misc_feature: MA Experiment 20001905 PARAMETER Experiment Name: At_Drought_Reproduction_P Parameter: Plant Line Value: WS
  misc_feature: MA Experiment 20001905 PARAMETER Experiment Name: At_Drought_Reproduction_P Parameter: Timepoint (day) Value: 10
  misc_feature: MA Experiment 20001905 PARAMETER Experiment Name: At_Drought_Reproduction_P Parameter: Tissue Value: Rosettes
  misc_feature: MA Experiment 20001905 PARAMETER Experiment Name: At_Drought_Reproduction_P Parameter: Treatment Value: Drought vs. No Drought
  misc_feature: MA Experiment ID: 20001911 Result: Up-regulated in Transcription
  misc_feature: MA Experiment 20001911 PARAMETER Experiment Name: At_Drought_Reproduction_P Parameter: Age (day) Value: 40
  misc_feature: MA Experiment 20001911 PARAMETER Experiment Name: At_Drought_Reproduction_P Parameter: Organism Value: A. thaliana
  misc_feature: MA Experiment 20001911 PARAMETER Experiment Name: At_Drought_Reproduction_P Parameter: Plant Line Value: WS
  misc_feature: MA Experiment 20001911 PARAMETER Experiment Name: At_Drought_Reproduction_P Parameter: Timepoint (day) Value: 10
  misc_feature: MA Experiment 20001911 PARAMETER Experiment Name: At_Drought_Reproduction_P Parameter: Tissue Value: Flowers
  misc_feature: MA Experiment 20001911 PARAMETER Experiment Name: At_Drought_Reproduction_P Parameter: Treatment Value: Drought vs. No Drought
aatctctcaactcaaaactcaacattttctgaagaaagtcgcaaactttacccaaaacccagtttctaattttagcaacaaaatcaaaaatatctacttttgtttctcgaaagttacgaaattcatacaatctagcttatctctgagcttatggatttgagataaacaacgaaaatggaagaactgaaagtggaaatggaggaagaaacggtgacgtttactggttctgtagcggcttcttcatctgtaggatcctcttcctctcctagaccaatggaagggcttaacgaaacagggccaccaccgtttctgactaagacttacgaaatggtggaagatccggcgacggacacggtggtttcttggagtaatggtcgtaacagctttgtggtgtgggattctcataagttctcaacaactctccttccacgttacttcaagcatagcaatttctcaagttttattcgtcagctcaatacttatggattcagaaagattgatccagatagatgggaatttgcaaatgaagggtttttagcaggacaaaagcatctcttgaagaacatcaaaagaaggaggaacatgggtttgcagaatgtgaatcagcaaggatctgggatgtcatgtgttgaggttgggcaatacggtttcgacggggaggttgagaggttgaagagggatcatggtgtgcttgtagctgaggtagttaggttgaggcaacagcaacacagctccaagagtcaagttgcagctatggagcaacggttgcttgttactgagaagagacagcagcagatgatgacgttccttgccaaggcgttgaacaatccgaactttgttcagcagtttgcggttatgagtaaagagaagaagagtttgtttggtttggatgtggggaggaaacggaggcttacttctactccaagcttggggactatggaggagaatttgttacatgatcaagagtttgatagaatgaaggatgatatggaaatgttgttcgctgcagcaatcgatgatgaggcgaataattcgatgcctactaaggaggaacaatgtttggaggctatgaatgtgatgatgagagatggtaatttggaagcagcgttggatgtgaaagtggaagatttggttggttcgcctttggattgggacagccaagatctacatgacatggttgatcaaatgggttttcttggttcggaaccttaactatacggtattaacacatctacttgttgcggtctaagttatggtaatgctaccacttttatttactagttgaattgtttgtttgtttgttttgactcaaggaagagtcattgagtgtggtttgttgtacatttgtgttttcttgttctgatgaataaaaaactctgatttcgtttgac

SEQ ID NO: 107238 - protein, 345 aa, Arabidopsis thaliana
  peptide (1)..(345): Ceres Seq. ID no. 13621798
  misc_feature (43)..(212): Pfam Name: HSF-type DNA-binding Pfam Description: HSF-type DNA-binding
  misc_feature (1)..(345): Homolog of NCBI NO: 15225255 NR Description: heat shock transcription factor family thaliana] >gi|7485001|pir||T02609 probable heat shock
  misc_feature (26)..(288): Homolog of NCBI NO: 729774 NR Description: HEAT SHOCK FACTOR PROTEIN HSF30 (HEAT SHOCK FACTOR 30) (HSTF 30) (HEAT STRESS TRANSCRIPTION FACTOR)
  misc_feature (29)..(343): Homolog of NCBI NO: 37534406 NR Description: putative auxin-induced protein [Oryza sativa
  misc_feature (22)..(288): Homolog of NCBI NO: 28971956 NR Description: putative heat shock transcription factor [Oryza
  misc_feature (22)..(288): Homolog of NCBI NO: 33087081 NR Description: heat stress protein [Oryza sativa (japonica
MEELKVEMEEETVTFTGSVAASSSVGSSSSPRPMEGLNETGPPPFLTKTYEMVEDPATDTVVSWSNGRNSFVVWDSHKFSTTLLPRYFKHSNFSSFIRQLNTYGFRKIDPDRWEFANEGFLAGQKHLLKNIKRRRNMGLQNVNQQGSGMSCVEVGQYGFDGEVERLKRDHGVLVAEVVRLRQQQHSSKSQVAAMEQRLLVTEKRQQQMMTFLAKALNNPNFVQQFAVMSKEKKSLFGLDVGRKRRLTSTPSLGTMEENLLHDQEFDRMKDDMEMLFAAAIDDEANNSMPTKEEQCLEAMNVMMRDGNLEAALDVKVEDLVGSPLDWDSQDLHDMVDQMGFLGSEP

SEQ ID NO: 107239 - protein, 338 aa, Arabidopsis thaliana
  peptide (1)..(338): Ceres Seq. ID no. 13621799
  misc_feature (36)..(205): Pfam Name: HSF-type DNA-binding Pfam Description: HSF-type DNA-binding
  misc_feature (1)..(338): Homolog of NCBI NO: 15225255 NR Description: heat shock transcription factor family thaliana] >gi|7485001|pir||T02609 probable heat shock
  misc_feature (19)..(281): Homolog of NCBI NO: 729774 NR Description: HEAT SHOCK FACTOR PROTEIN HSF30 (HEAT SHOCK FACTOR 30) (HSTF 30) (HEAT STRESS TRANSCRIPTION FACTOR)
  misc_feature (22)..(336): Homolog of NCBI NO: 37534406 NR Description: putative auxin-induced protein [Oryza sativa
  misc_feature (15)..(281): Homolog of NCBI NO: 28971956 NR Description: putative heat shock transcription factor [Oryza
  misc_feature (15)..(281): Homolog of NCBI NO: 33087081 NR Description: heat stress protein [Oryza sativa (japonica
MEEETVTFTGSVAASSSVGSSSSPRPMEGLNETGPPPFLTKTYEMVEDPATDTVVSWSNGRNSFVVWDSHKFSTTLLPRYFKHSNFSSFIRQLNTYGFRKIDPDRWEFANEGFLAGQKHLLKNIKRRRNMGLQNVNQQGSGMSCVEVGQYGFDGEVERLKRDHGVLVAEVVRLRQQQHSSKSQVAAMEQRLLVTEKRQQQMMTFLAKALNNPNFVQQFAVMSKEKKSLFGLDVGRKRRLTSTPSLGTMEENLLHDQEFDRMKDDMEMLFAAAIDDEANNSMPTKEEQCLEAMNVMMRDGNLEAALDVKVEDLVGSPLDWDSQDLHDMVDQMGFLGSEP

SEQ ID NO: 107240 - protein, 312 aa, Arabidopsis thaliana
  peptide (1)..(312): Ceres Seq. ID no. 13621800
  misc_feature (10)..(179): Pfam Name: HSF-type DNA-binding Pfam Description: HSF-type DNA-binding
  misc_feature (1)..(312): Homolog of NCBI NO: 15225255 NR Description: heat shock transcription factor family thaliana] >gi|7485001|pir||T02609 probable heat shock
  misc_feature (1)..(255): Homolog of NCBI NO: 729774 NR Description: HEAT SHOCK FACTOR PROTEIN HSF30 (HEAT SHOCK FACTOR 30) (HSTF 30) (HEAT STRESS TRANSCRIPTION FACTOR)
  misc_feature (1)..(310): Homolog of NCBI NO: 37534406 NR Description: putative auxin-induced protein [Oryza sativa
  misc_feature (1)..(255): Homolog of NCBI NO: 28971956 NR Description: putative heat shock transcription factor [Oryza
  misc_feature (1)..(255): Homolog of NCBI NO: 33087081 NR Description: heat stress protein [Oryza sativa (japonica
MEGLNETGPPPFLTKTYEMVEDPATDTVVSWSNGRNSFVVWDSHKFSTTLLPRYFKHSNFSSFIRQLNTYGFRKIDPDRWEFANEGFLAGQKHLLKNIKRRRNMGLQNVNQQGSGMSCVEVGQYGFDGEVERLKRDHGVLVAEVVRLRQQQHSSKSQVAAMEQRLLVTEKRQQQMMTFLAKALNNPNFVQQFAVMSKEKKSLFGLDVGRKRRLTSTPSLGTMEENLLHDQEFDRMKDDMEMLFAAAIDDEANNSMPTKEEQCLEAMNVMMRDGNLEAALDVKVEDLVGSPLDWDSQDLHDMVDQMGFLGSEP

SEQ ID NO: 107241 - DNA, 2166 bp, Arabidopsis thaliana
  misc_feature (1)..(2166): Ceres Seq. ID no. 13621801
  misc_feature: MA Experiment ID: 20000315 Result: Down-regulated in Transcription
  misc_feature: MA Experiment 20000315 PARAMETER Experiment Name: At_14day_Shoots-Roots_Sub_P Parameter: Age (day) Value: 14
  misc_feature: MA Experiment 20000315 PARAMETER Experiment Name: At_14day_Shoots-Roots_Sub_P Parameter: Organism Value: A. thaliana
  misc_feature: MA Experiment 20000315 PARAMETER Experiment Name: At_14day_Shoots-Roots_Sub_P Parameter: Plant Line Value: WS
  misc_feature: MA Experiment 20000315 PARAMETER Experiment Name: At_14day_Shoots-Roots_Sub_P Parameter: Tissue Value: Shoots vs. Whole Plant
  misc_feature: MA Experiment ID: 20000355 Result: Up-regulated in Transcription
  misc_feature: MA Experiment 20000355 PARAMETER Experiment Name: At_Siliques_Sub_P Parameter: Age (day) Value: 21
  misc_feature: MA Experiment 20000355 PARAMETER Experiment Name: At_Siliques_Sub_P Parameter: Organism Value: A. thaliana
  misc_feature: MA Experiment 20000355 PARAMETER Experiment Name: At_Siliques_Sub_P Parameter: Plant Line Value: WS
  misc_feature: MA Experiment 20000355 PARAMETER Experiment Name: At_Siliques_Sub_P Parameter: Tissue Value: Less Than 5mm Siliques vs. Whole Plant
  misc_feature: MA Experiment ID: 20000440 Result: Up-regulated in Transcription
  misc_feature: MA Experiment 20000440 PARAMETER Experiment Name: At_Closed-Flower__Sub_P Parameter: Tissue Value: Closed Flower vs. Whole Plant
gagagaagacaagaaagagccaaaaataaaacgtaaaaaggattcatctttccttttaacctctctgccttggccgccttctaaggcagaggagattcatttctttctctccccaagaaaaacaatacaaaatttcagaaaatttatagtaatttcagtatggcgtttcaggattttgacaagatccaagaacgtgtaaacgccaataggaaacgtaaattcaggaagaggatcatcgttggaacggtctctttgcttgtggttgttgctgccattgttggaggagcttttgcttatgttgcttatgagaaaagaaatgaacaacaacaacaacaacaacaagcaaagaaccacaacaaaagcggtagcggcaacaacgtcgtcaaggatagcgacaagaagagcccgagcccaccaaccccgagccaaaaagcgcccgtttccgcagcgcagtcagtgaaacccggtcagggtgataagattatccaaactctctgcagttcaacgctttacatgcaaatctgcgagaaaacgctcaaaaacagaacagacaagggttttgctttggacaatccgacgacctttttgaagtctgccattgaagctgtcaatgaagatcttgaccttgttttagagaaggtcttgagtctcaagactgaaaaccaggatgataaagatgcgatcgagcaatgtaagttgcttgtcgaagacgcaaaggaggaaaccgtcgcgtcgctgaacaaaatcaacgtcacagaagtcaacagcttcgaaaaagtagttcctgacctggaaagttggctaagcgcggtcatgtcttatcaggagacatgccttgacgggtttgaagaagggaacttaaaatctgaagtgaagacgagcgtcaattcttctcaagttctgaccagcaattccctcgcgttgatcaaaacatttaccgagaatctctctccggtaatgaaggtcgtagaacgacatcttcttgatgacatcccgtcttgggtaagcaacgatgatagaagaatgttaagggctgttgatgtgaaggctttgaagccaaacgcaactgtggccaaagatggcagtggggatttcacaaccattaatgatgcgctgagagcaatgcctgagaaatatgagggaaggtacattatctacgtcaaacaaggcatttatgacgaatatgtgaccgttgataagaagaaggcgaatctcactatggtcggagatggatcacagaagacaattgtgaccggtaacaaaagccatgcaaagaaaatccgcacttttctcacggcaacgttcgttgcacagggagaagggttcatggcacagtcaatggggttccggaacacggctgggccagagggacatcaagcagtcgcaatacgtgtccaatccgatcgatcaattttcctcaactgccgatttgaaggttaccaagacacattgtatgcttacacgcaccgtcaatactacagaagttgtgtgatagttggaacaatcgacttcatattcggagatgcagccgccatcttccagaactgtaacatcttcatcagaaaaggcttaccaggacaaaagaacacggtgaccgctcaaggtcgtgttgacaagtttcagacgactggtttcgtagtacacaattgtaaaatcgctgcaaatgaagaccttaagccagtaaaggaagagtacaagagctacctcgggcgaccgtggaagaactactctcgaacgatcataatggaatctaaaatcgagaatgtgattgaccctgttggatggttgagatggcaagagacggatttcgcgatagacacgttgtactacgcggagtacaataacaaaggatcaagtggagatacaacttcaagagttaaatggcctggatttaaggtcataaacaaggaggaggctttgaactatactgttggacccttcttacaaggagattggatcagtgcctcaggctctcccgttaagttgggtctttatgatgcttgatgacaacttgttgtttgcaaagaaagccatgtggatatagaacttcatccatggaaatttacttggaaaatcggatactagaacatagtgtgctaagagaatgtgttgtatcaaatttatatcgatttgtgctgaaaatatttttggaaggaagcatattat

SEQ ID NO: 107242 - protein, 614 aa, Arabidopsis thaliana
  peptide (1)..(614): Ceres Seq. ID no. 13621802
  misc_feature (301)..(598): Pfam Name: Pectinesterase Pfam Description: Pectinesterase
  misc_feature (119)..(614): Homolog of NCBI NO: 7447376 NR Description: probable pectinesterase (EC 3.1.1.11) At2g26450 - Arabidopsis thaliana >gi|2739370|gb|AAC14494.1| putative
  misc_feature (1)..(614): Homolog of NCBI NO: 15234112 NR Description: pectinesterase family [Arabidopsis thaliana]
  misc_feature (1)..(611): Homolog of NCBI NO: 25313441 NR Description: pectinesterase (EC 3.1.1.11) [imported] - Salix >gi|6714532|dbj|BAA89480.1| pectin methylesterase [Salix
  misc_feature (107)..(610): Homolog of NCBI NO: 21740906 NR Description: OSJNBa0036B21.20 [Oryza sativa (japonica
  misc_feature (277)..(610): Homolog of NCBI NO: 32490042 NR Description: OSJNBa0063C18.2 [Oryza sativa (japonica
  misc_feature (92)..(268): Homolog of NCBI NO: 32490042 NR Description: OSJNBa0063C18.2 [Oryza sativa (japonica
  misc_feature (107)..(612): Homolog of NCBI NO: 15241079 NR Description: pectinesterase family [Arabidopsis thaliana]
  misc_feature (109)..(606): Homolog of NCBI NO: 15239814 NR Description: pectinesterase family [Arabidopsis thaliana] pectin methylesterase [Arabidopsis thaliana] AT5g49180/K21P3_5 [Arabidopsis thaliana]
  misc_feature (270)..(612): Homolog of NCBI NO: 30017519 NR Description: putative pectin methylesterase [Oryza sativa
  misc_feature (109)..(257): Homolog of NCBI NO: 30017519 NR Description: putative pectin methylesterase [Oryza sativa
MAFQDFDKIQERVNANRKRKFRKRIIVGTVSLLVVVAAIVGGAFAYVAYEKRNEQQQQQQQAKNHNKSGSGNNVVKDSDKKSPSPPTPSQKAPVSAAQSVKPGQGDKIIQTLCSSTLYMQICEKTLKNRTDKGFALDNPTTFLKSAIEAVNEDLDLVLEKVLSLKTENQDDKDAIEQCKLLVEDAKEETVASLNKINVTEVNSFEKVVPDLESWLSAVMSYQETCLDGFEEGNLKSEVKTSVNSSQVLTSNSLALIKTFTENLSPVMKVVERHLLDDIPSWVSNDDRRMLRAVDVKALKPNATVAKDGSGDFTTINDALRAMPEKYEGRYIIYVKQGIYDEYVTVDKKKANLTMVGDGSQKTIVTGNKSHAKKIRTFLTATFVAQGEGFMAQSMGFRNTAGPEGHQAVAIRVQSDRSIFLNCRFEGYQDTLYAYTHRQYYRSCVIVGTIDFIFGDAAAIFQNCNIFIRKGLPGQKNTVTAQGRVDKFQTTGFVVHNCKIAANEDLKPVKEEYKSYLGRPWKNYSRTIIMESKIENVIDPVGWLRWQETDFAIDTLYYAEYNNKGSSGDTTSRVKWPGFKVINKEEALNYTVGPFLQGDWISASGSPVKLGLYDA

SEQ ID NO: 107243 - protein, 496 aa, Arabidopsis thaliana
  peptide (1)..(496): Ceres Seq. ID no. 13621803
  misc_feature (183)..(480): Pfam Name: Pectinesterase Pfam Description: Pectinesterase
  misc_feature (1)..(496): Homolog of NCBI NO: 7447376 NR Description: probable pectinesterase (EC 3.1.1.11) At2g26450 - Arabidopsis thaliana >gi|2739370|gb|AAC14494.1| putative
  misc_feature (1)..(496): Homolog of NCBI NO: 15234112 NR Description: pectinesterase family [Arabidopsis thaliana]
  misc_feature (1)..(493): Homolog of NCBI NO: 25313441 NR Description: pectinesterase (EC 3.1.1.11) [imported] - Salix >gi|6714532|dbj|BAA89480.1| pectin methylesterase [Salix
  misc_feature (1)..(492): Homolog of NCBI NO: 21740906 NR Description: OSJNBa0036B21.20 [Oryza sativa (japonica
  misc_feature (159)..(492): Homolog of NCBI NO: 32490042 NR Description: OSJNBa0063C18.2 [Oryza sativa (japonica
  misc_feature (1)..(150): Homolog of NCBI NO: 32490042 NR Description: OSJNBa0063C18.2 [Oryza sativa (japonica
  misc_feature (1)..(494): Homolog of NCBI NO: 15241079 NR Description: pectinesterase family [Arabidopsis thaliana]
  misc_feature (1)..(488): Homolog of NCBI NO: 15239814 NR Description: pectinesterase family [Arabidopsis thaliana] pectin methylesterase [Arabidopsis thaliana] AT5g49180/K21P3_5 [Arabidopsis thaliana]
  misc_feature (152)..(494): Homolog of NCBI NO: 30017519 NR Description: putative pectin methylesterase [Oryza sativa
  misc_feature (1)..(139): Homolog of NCBI NO: 30017519 NR Description: putative pectin methylesterase [Oryza sativa
MQICEKTLKNRTDKGFALDNPTTFLKSAIEAVNEDLDLVLEKVLSLKTENQDDKDAIEQCKLLVEDAKEETVASLNKINVTEVNSFEKVVPDLESWLSAVMSYQETCLDGFEEGNLKSEVKTSVNSSQVLTSNSLALIKTFTENLSPVMKVVERHLLDDIPSWVSNDDRRMLRAVDVKALKPNATVAKDGSGDFTTINDALRAMPEKYEGRYIIYVKQGIYDEYVTVDKKKANLTMVGDGSQKTIVTGNKSHAKKIRTFLTATFVAQGEGFMAQSMGFRNTAGPEGHQAVAIRVQSDRSIFLNCRFEGYQDTLYAYTHRQYYRSCVIVGTIDFIFGDAAAIFQNCNIFIRKGLPGQKNTVTAQGRVDKFQTTGFVVHNCKIAANEDLKPVKEEYKSYLGRPWKNYSRTIIMESKIENVIDPVGWLRWQETDFAIDTLYYAEYNNKGSSGDTTSRVKWPGFKVINKEEALNYTVGPFLQGDWISASGSPVKLGLYDA

SEQ ID NO: 107244 - protein, 396 aa, Arabidopsis thaliana
  peptide (1)..(396): Ceres Seq. ID no. 13621804
  misc_feature (83)..(380): Pfam Name: Pectinesterase Pfam Description: Pectinesterase
  misc_feature (1)..(396): Homolog of NCBI NO: 7447376 NR Description: probable pectinesterase (EC 3.1.1.11) At2g26450 - Arabidopsis thaliana >gi|2739370|gb|AAC14494.1| putative
  misc_feature (1)..(396): Homolog of NCBI NO: 15234112 NR Description: pectinesterase family [Arabidopsis thaliana]
  misc_feature (1)..(393): Homolog of NCBI NO: 25313441 NR Description: pectinesterase (EC 3.1.1.11) [imported] - Salix >gi|6714532|dbj|BAA89480.1| pectin methylesterase [Salix
  misc_feature (1)..(392): Homolog of NCBI NO: 21740906 NR Description: OSJNBa0036B21.20 [Oryza sativa (japonica
  misc_feature (59)..(392): Homolog of NCBI NO: 32490042 NR Description: OSJNBa0063C18.2 [Oryza sativa (japonica
  misc_feature (1)..(50): Homolog of NCBI NO: 32490042 NR Description: OSJNBa0063C18.2 [Oryza sativa (japonica
  misc_feature (1)..(394): Homolog of NCBI NO: 15241079 NR Description: pectinesterase family [Arabidopsis thaliana]
  misc_feature (1)..(388): Homolog of NCBI NO: 15239814 NR Description: pectinesterase family [Arabidopsis thaliana] pectin methylesterase [Arabidopsis thaliana] AT5g49180/K21P3_5 [Arabidopsis thaliana]
  misc_feature (52)..(394): Homolog of NCBI NO: 30017519 NR Description: putative pectin methylesterase [Oryza sativa
  misc_feature (1)..(39): Homolog of NCBI NO: 30017519 NR Description: putative pectin methylesterase [Oryza sativa
MSYQETCLDGFEEGNLKSEVKTSVNSSQVLTSNSLALIKTFTENLSPVMKVVERHLLDDIPSWVSNDDRRMLRAVDVKALKPNATVAKDGSGDFTTINDALRAMPEKYEGRYIIYVKQGIYDEYVTVDKKKANLTMVGDGSQKTIVTGNKSHAKKIRTFLTATFVAQGEGFMAQSMGFRNTAGPEGHQAVAIRVQSDRSIFLNCRFEGYQDTLYAYTHRQYYRSCVIVGTIDFIFGDAAAIFQNCNIFIRKGLPGQKNTVTAQGRVDKFQTTGFVVHNCKIAANEDLKPVKEEYKSYLGRPWKNYSRTIIMESKIENVIDPVGWLRWQETDFAIDTLYYAEYNNKGSSGDTTSRVKWPGFKVINKEEALNYTVGPFLQGDWISASGSPVKLGLYDA

SEQ ID NO: 107245 - DNA, 760 bp, Arabidopsis thaliana
  misc_feature (1)..(760): Ceres Seq. ID no. 13621805
  misc_feature: MA Experiment ID: 20000314 Result: Down-regulated in Transcription
  misc_feature: MA Experiment 20000314 PARAMETER Experiment Name: At_14day_Shoots-Roots_Sub_P Parameter: Age (day) Value: 14
  misc_feature: MA Experiment 20000314 PARAMETER Experiment Name: At_14day_Shoots-Roots_Sub_P Parameter: Organism Value: A. thaliana
  misc_feature: MA Experiment 20000314 PARAMETER Experiment Name: At_14day_Shoots-Roots_Sub_P Parameter: Plant Line Value: WS
  misc_feature: MA Experiment 20000314 PARAMETER Experiment Name: At_14day_Shoots-Roots_Sub_P Parameter: Tissue Value: Roots vs. Whole Plant
  misc_feature: MA Experiment ID: 20000328 Result: Down-regulated in Transcription
  misc_feature: MA Experiment 20000328 PARAMETER Experiment Name: At_42deg_Heat_Sub_P Parameter: Age (day) Value: 14
  misc_feature: MA Experiment 20000328 PARAMETER Experiment Name: At_42deg_Heat_Sub_P Parameter: Organism Value: A. thaliana
  misc_feature: MA Experiment 20000328 PARAMETER Experiment Name: At_42deg_Heat_Sub_P Parameter: Plant Line Value: WS
  misc_feature: MA Experiment 20000328 PARAMETER Experiment Name: At_42deg_Heat_Sub_P Parameter: Temperature (deg C) Value: 42 vs. 22
  misc_feature: MA Experiment 20000328 PARAMETER Experiment Name: At_42deg_Heat_Sub_P Parameter: Timepoint (hr) Value: 6
  misc_feature: MA Experiment 20000328 PARAMETER Experiment Name: At_42deg_Heat_Sub_P Parameter: Tissue Value: Aerial
  misc_feature: MA Experiment ID: 20000349 Result: Down-regulated in Transcription
  misc_feature: MA Experiment 20000349 PARAMETER Experiment Name: At_100uM_ABA_Sub_P Parameter: Age (day) Value: 14
  misc_feature: MA Experiment 20000349 PARAMETER Experiment Name: At_100uM_ABA_Sub_P Parameter: Organism Value: A. thaliana
  misc_feature: MA Experiment 20000349 PARAMETER Experiment Name: At_100uM_ABA_Sub_P Parameter: Plant Line Value: WS
  misc_feature: MA Experiment 20000349 PARAMETER Experiment Name: At_100uM_ABA_Sub_P Parameter: Timepoint (hr) Value: 6
  misc_feature: MA Experiment 20000349 PARAMETER Experiment Name: At_100uM_ABA_Sub_P Parameter: Tissue Value: Aerial
  misc_feature: MA Experiment 20000349 PARAMETER Experiment Name: At_100uM_ABA_Sub_P Parameter: Treatment Value: 100uM ABA vs. No Treatment
  misc_feature: MA Experiment ID: 20000355 Result: Down-regulated in Transcription
  misc_feature: MA Experiment 20000355 PARAMETER Experiment Name: At_Siliques_Sub_P Parameter: Age (day) Value: 21
  misc_feature: MA Experiment 20000355 PARAMETER Experiment Name: At_Siliques_Sub_P Parameter: Organism Value: A. thaliana
  misc_feature: MA Experiment 20000355 PARAMETER Experiment Name: At_Siliques_Sub_P Parameter: Plant Line Value: WS
  misc_feature: MA Experiment 20000355 PARAMETER Experiment Name: At_Siliques_Sub_P Parameter: Tissue Value: Less Than 5mm Siliques vs. Whole Plant
aacacaaacatcttgtttggtcctatttctcagatcgatcatggctaactctgtgatggcaaccgaacagctctgctacatcccttgcaacttttgcaacataattcttgcggtgaatgtcccatgcagcagcctgttcgacatcgtgaccgtccgatgcggtcactgcaccaatctgtggtctgtaaacatggcagctgctcttcagtcgctttcacgccctaatttccaggcaacaaactatgcagtaccagagtatggatcctcctcaagaagccacacaaaaatcccttcaagaatttcaactcgtaccataactgagcaacggattgtaaaccgtcctccggagaagcggcagcgagtaccttctgcgtacaatcaattcataaaagaggaaattcagaggattaaggcgaataatccagacataagccacagagaagcattcagcactgctgccaagaattgggcacactttcctcatattcactttggtctaatgctggagagtaacaagcaagctaagatagcctaataattctcgagattaatggtaatataagtgttggagacttcgaagtaacaagagctgagaaggcaactatatgtattgtatgatctttggaaccgtatgtatgtaagtgaagatgtctatctttaaaaccatctatagttataatttagtaaaagcttcttttaatttatttctatggcccttgttgtatggttcgtctcacaagatttatgagttctttcggat

SEQ ID NO: 107246 - protein, 177 aa, Arabidopsis thaliana
  peptide (1)..(177): Ceres Seq. ID no. 13621806
  misc_feature (15)..(166): Pfam Name: YABBY protein Pfam Description: YABBY protein
  misc_feature (14)..(177): Homolog of NCBI NO: 30683176 NR Description: expressed protein [Arabidopsis thaliana] expressed protein [Arabidopsis thaliana] unknown protein [Arabidopsis thaliana]
  misc_feature (15)..(173): Homolog of NCBI NO: 11280864 NR Description: hypothetical protein 2 [imported] - rice
  misc_feature (20)..(175): Homolog of NCBI NO: 4928751 NR Description: YABBY2 [Arabidopsis thaliana]
  misc_feature (111)..(167): Homolog of NCBI NO: 32330677 NR Description: yabby15 protein [Zea mays]
  misc_feature (21)..(74): Homolog of NCBI NO: 32330677 NR Description: yabby15 protein [Zea mays]
  misc_feature (64)..(167): Homolog of NCBI NO: 37535908 NR Description: hypothetical protein [Oryza sativa (japonica group)] >gi|22267600|gb|AAM94935.1| putative transcription factor
  misc_feature (22)..(68): Homolog of NCBI NO: 37535908 NR Description: hypothetical protein [Oryza sativa (japonica group)] >gi|22267600|gb|AAM94935.1| putative transcription factor
  misc_feature (13)..(84): Homolog of NCBI NO: 32330681 NR Description: yabby10 protein [Zea mays]
  misc_feature (111)..(167): Homolog of NCBI NO: 32330681 NR Description: yabby10 protein [Zea mays]
  misc_feature (112)..(176): Homolog of NCBI NO: 18411242 NR Description: YABBY3 axial regulator -related [Arabidopsis >gi|4928753|gb|AAD33717.1|AF136540_1 YABBY3 [Arabidopsis >gi|14335014|gb|AAK59771.1| AT4g00180/F6N15_22 [Arabidopsis
TQTSCLVLFLRSIMANSVMATEQLCYIPCNFCNIILAVNVPCSSLFDIVTVRCGHCTNLWSVNMAAALQSLSRPNFQATNYAVPEYGSSSRSHTKIPSRISTRTITEQRIVNRPPEKRQRVPSAYNQFIKEEIQRIKANNPDISHREAFSTAAKNWAHFPHIHFGLMLESNKQAKIA

SEQ ID NO: 107247 - protein, 164 aa, Arabidopsis thaliana; identical to SEQ ID NO: 71054
  peptide (1)..(164): Ceres Seq. ID no. 13621807
  misc_feature (2)..(153): Pfam Name: YABBY protein Pfam Description: YABBY protein
  misc_feature (1)..(164): Homolog of NCBI NO: 30683176 NR Description: expressed protein [Arabidopsis thaliana] expressed protein [Arabidopsis thaliana] unknown protein [Arabidopsis thaliana]
  misc_feature (2)..(160): Homolog of NCBI NO: 11280864 NR Description: hypothetical protein 2 [imported] - rice
  misc_feature (7)..(162): Homolog of NCBI NO: 4928751 NR Description: YABBY2 [Arabidopsis thaliana]
  misc_feature (98)..(154): Homolog of NCBI NO: 32330677 NR Description: yabby15 protein [Zea mays]
  misc_feature (8)..(61): Homolog of NCBI NO: 32330677 NR Description: yabby15 protein [Zea mays]
  misc_feature (51)..(154): Homolog of NCBI NO: 37535908 NR Description: hypothetical protein [Oryza sativa (japonica group)] >gi|22267600|gb|AAM94935.1| putative transcription factor
  misc_feature (9)..(55): Homolog of NCBI NO: 37535908 NR Description: hypothetical protein [Oryza sativa (japonica group)] >gi|22267600|gb|AAM94935.1| putative transcription factor
  misc_feature (1)..(71): Homolog of NCBI NO: 32330681 NR Description: yabby10 protein [Zea mays]
  misc_feature (98)..(154): Homolog of NCBI NO: 32330681 NR Description: yabby10 protein [Zea mays]
  misc_feature (99)..(163): Homolog of NCBI NO: 18411242 NR Description: YABBY3 axial regulator -related [Arabidopsis >gi|4928753|gb|AAD33717.1|AF136540_1 YABBY3 [Arabidopsis >gi|14335014|gb|AAK59771.1| AT4g00180/F6N15_22 [Arabidopsis

SEQ ID NO: 107248 - protein, 159 aa, Arabidopsis thaliana; identical to SEQ ID NO: 71055
  peptide (1)..(159): Ceres Seq. ID no. 13621808
  misc_feature (1)..(148): Pfam Name: YABBY protein Pfam Description: YABBY protein
  misc_feature (1)..(159): Homolog of NCBI NO: 30683176 NR Description: expressed protein [Arabidopsis thaliana] expressed protein [Arabidopsis thaliana] unknown protein [Arabidopsis thaliana]
  misc_feature (1)..(155): Homolog of NCBI NO: 11280864 NR Description: hypothetical protein 2 [imported] - rice
  misc_feature (2)..(157): Homolog of NCBI NO: 4928751 NR Description: YABBY2 [Arabidopsis thaliana]
  misc_feature (93)..(149): Homolog of NCBI NO: 32330677 NR Description: yabby15 protein [Zea mays]
  misc_feature (3)..(56): Homolog of NCBI NO: 32330677 NR Description: yabby15 protein [Zea mays]
  misc_feature (46)..(149): Homolog of NCBI NO: 37535908 NR Description: hypothetical protein [Oryza sativa (japonica group)] >gi|22267600|gb|AAM94935.1| putative transcription factor
  misc_feature (4)..(50): Homolog of NCBI NO: 37535908 NR Description: hypothetical protein [Oryza sativa (japonica group)] >gi|22267600|gb|AAM94935.1| putative transcription factor
  misc_feature (1)..(66): Homolog of NCBI NO: 32330681 NR Description: yabby10 protein [Zea mays]
  misc_feature (93)..(149): Homolog of NCBI NO: 32330681 NR Description: yabby10 protein [Zea mays]
  misc_feature (94)..(158): Homolog of NCBI NO: 18411242 NR Description: YABBY3 axial regulator -related [Arabidopsis >gi|4928753|gb|AAD33717.1|AF136540_1 YABBY3 [Arabidopsis >gi|14335014|gb|AAK59771.1| AT4g00180/F6N15_22 [Arabidopsis

SEQ ID NO: 107249 - DNA, 879 bp, Arabidopsis thaliana
  misc_feature (1)..(879): Ceres Seq. ID no. 13621809
  misc_feature: MA Experiment ID: 20000179 Result: Up-regulated in Transcription
  misc_feature: MA Experiment 20000179 PARAMETER Experiment Name: At_Germinating_Seeds_P Parameter: Age (hr) Value: 6 vs. 0
  misc_feature: MA Experiment 20000179 PARAMETER Experiment Name: At_Germinating_Seeds_P Parameter: Tissue Value: Germinating Seeds
aaagaagaagaaaagatctgagaggtggtcgaatgatccaagagaagaagaacaatctctcttagatcgtttgatctgatccaatcgaagaagaagatgggaatcttattcacgcggatgttctcttccgtctttggtaacaaagaagctcgaatcctcgtcctcggtctcgacaatgctggaaaaaccacaatcctctatcggcttcagatgggggaagttgtctctacgattccgactattggatttaacgttgagactgtgcagtacaacaatatcaagtttcaggtctgggatttaggtggacaaacaagcatcaggccatactggcgatgctatttcccgaatacacaagcagtgatctatgttgttgactcgagtgatacagatagaatcggggtggcgaaagaggagtttcatgcaattttagaggaagatgaattgaaaggtgcggtggttctgatatttgcaaacaagcaggatcttcccggtgcactcgatgatgcggctgttacagaagccttggagttgcataagataaagagtcgtcaatgggcaatcttcaaaacttgtgctgtgaaaggcgagggacttttcgagggattggactggttgagtaatacattgaagtcgggaagtggctaaaatcatcgtcatacaccaatctgtcacatttctcaagagtgtaactttgatcatttttacttattggtttgtttagtatcttttttttatcttagttcttcatcttaaagagttaatatcaatgacatgttcacttaatattctctttttgttgttttgtttcattctgaaagaaaaaacccaacacagatttttgattgagacccataaggggtaatatcatcactttttaac

SEQ ID NO: 107250 - protein, 182 aa, Arabidopsis thaliana; identical to SEQ ID NO: 26250
  peptide (1)..(182): Ceres Seq. ID no. 13621810
  misc_feature (4)..(177): Pfam Name: ADP-ribosylation factor family Pfam Description: ADP-ribosylation factor family
  misc_feature (1)..(182): Homolog of NCBI NO: 30682545 NR Description: ADP-ribosylation factor 3 (ARF3) [Arabidopsis
  misc_feature (1)..(182): Homolog of NCBI NO: 3182922 NR Description: ADP-ribosylation factor 1
  misc_feature (1)..(181): Homolog of NCBI NO: 40253742 NR Description: putative ADP-ribosylation factor 3 [Oryza sativa
  misc_feature (1)..(179): Homolog of NCBI NO: 13385340 NR Description: ADP-ribosylation-like 1 [Mus musculus]
  misc_feature (1)..(179): Homolog of NCBI NO: 11693150 NR Description: ADP-ribosylation factor-like 1 [Rattus norvegicus]
  misc_feature (1)..(179): Homolog of NCBI NO: 4502227 NR Description: ADP-ribosylation factor-like 1 [Homo sapiens]
  misc_feature (1)..(179): Homolog of NCBI NO: 29124979 NR Description: ADP-ribosylation factor 1 [Populus tremuloides]
  misc_feature (1)..(181): Homolog of NCBI NO: 31240205 NR Description: ENSANGP00000015770 [Anopheles gambiae]
  misc_feature (1)..(179): Homolog of NCBI NO: 39653273 NR Description: ADP-ribosylation factor [Medicago sativa]
  misc_feature (1)..(179): Homolog of NCBI NO: 11131023 NR Description: ADP-ribosylation factor 1

SEQ ID NO: 107251 - protein, 175 aa, Arabidopsis thaliana; identical to SEQ ID NO: 26251
  peptide (1)..(175): Ceres Seq. ID no. 13621811
  misc_feature (1)..(170): Pfam Name: ADP-ribosylation factor family Pfam Description: ADP-ribosylation factor family
  misc_feature (1)..(175): Homolog of NCBI NO: 30682545 NR Description: ADP-ribosylation factor 3 (ARF3) [Arabidopsis
  misc_feature (1)..(175): Homolog of NCBI NO: 3182922 NR Description: ADP-ribosylation factor 1
  misc_feature (1)..(174): Homolog of NCBI NO: 40253742 NR Description: putative ADP-ribosylation factor 3 [Oryza sativa
  misc_feature (1)..(172): Homolog of NCBI NO: 13385340 NR Description: ADP-ribosylation-like 1 [Mus musculus]
  misc_feature (1)..(172): Homolog of NCBI NO: 11693150 NR Description: ADP-ribosylation factor-like 1 [Rattus norvegicus]
  misc_feature (1)..(172): Homolog of NCBI NO: 4502227 NR Description: ADP-ribosylation factor-like 1 [Homo sapiens]
  misc_feature (1)..(172): Homolog of NCBI NO: 29124979 NR Description: ADP-ribosylation factor 1 [Populus tremuloides]
  misc_feature (1)..(174): Homolog of NCBI NO: 31240205 NR Description: ENSANGP00000015770 [Anopheles gambiae]
  misc_feature (1)..(172): Homolog of NCBI NO: 39653273 NR Description: ADP-ribosylation factor [Medicago sativa]
  misc_feature (1)..(172): Homolog of NCBI NO: 11131023 NR Description: ADP-ribosylation factor 1

SEQ ID NO: 107252 - protein, 144 aa, Arabidopsis thaliana; identical to SEQ ID NO: 26252
  peptide (1)..(144): Ceres Seq. ID no. 13621812
  misc_feature (1)..(139): Pfam Name: ADP-ribosylation factor family Pfam Description: ADP-ribosylation factor family
  misc_feature (1)..(144): Homolog of NCBI NO: 30682545 NR Description: ADP-ribosylation factor 3 (ARF3) [Arabidopsis
  misc_feature (1)..(144): Homolog of NCBI NO: 3182922 NR Description: ADP-ribosylation factor 1
  misc_feature (1)..(143): Homolog of NCBI NO: 40253742 NR Description: putative ADP-ribosylation factor 3 [Oryza sativa
  misc_feature (1)..(141): Homolog of NCBI NO: 13385340 NR Description: ADP-ribosylation-like 1 [Mus musculus]
  misc_feature (1)..(141): Homolog of NCBI NO: 11693150 NR Description: ADP-ribosylation factor-like 1 [Rattus norvegicus]
  misc_feature (1)..(141): Homolog of NCBI NO: 4502227 NR Description: ADP-ribosylation factor-like 1 [Homo sapiens]
  misc_feature (1)..(141): Homolog of NCBI NO: 29124979 NR Description: ADP-ribosylation factor 1 [Populus tremuloides]
  misc_feature (1)..(143): Homolog of NCBI NO: 31240205 NR Description: ENSANGP00000015770 [Anopheles gambiae]
  misc_feature (1)..(141): Homolog of NCBI NO: 39653273 NR Description: ADP-ribosylation factor [Medicago sativa]
  misc_feature (1)..(141): Homolog of NCBI NO: 11131023 NR Description: ADP-ribosylation factor 1

SEQ ID NO: 107253 - DNA, 2025 bp, Arabidopsis thaliana
  misc_feature (1)..(2025): Ceres Seq. ID no. 13621817
  misc_feature: MA Experiment ID: 20000173 Result: Down-regulated in Transcription
  misc_feature: MA Experiment 20000173 PARAMETER Experiment Name: At_42deg_Heat_P Parameter: Age (day) Value: 14
  misc_feature: MA Experiment 20000173 PARAMETER Experiment Name: At_42deg_Heat_P Parameter: Organism Value: A. thaliana
  misc_feature: MA Experiment 20000173 PARAMETER Experiment Name: At_42deg_Heat_P Parameter: Plant Line Value: WS
  misc_feature: MA Experiment 20000173 PARAMETER Experiment Name: At_42deg_Heat_P Parameter: Temperature (deg C) Value: 42 vs. 22
  misc_feature: MA Experiment 20000173 PARAMETER Experiment Name: At_42deg_Heat_P Parameter: Timepoint (hr) Value: 6
  misc_feature: MA Experiment 20000173 PARAMETER Experiment Name: At_42deg_Heat_P Parameter: Tissue Value: Aerial
  misc_feature: MA Experiment ID: 20000227 Result: Up-regulated in Transcription
  misc_feature: MA Experiment 20000227 PARAMETER Experiment Name: At_Root-Tips-vs-Tops_P Parameter: Tissue Value: Root Tips vs. Root Tops
  misc_feature: MA Experiment ID: 20000234 Result: Up-regulated in Transcription
  misc_feature: MA Experiment 20000234 PARAMETER Experiment Name: At_Siliques_P Parameter: Age (day) Value: 21
  misc_feature: MA Experiment 20000234 PARAMETER Experiment Name: At_Siliques_P Parameter: Organism Value: A. thaliana
  misc_feature: MA Experiment 20000234 PARAMETER Experiment Name: At_Siliques_P Parameter: Plant Line Value: WS
  misc_feature: MA Experiment 20000234 PARAMETER Experiment Name: At_Siliques_P Parameter: Tissue Value: Less Than 5mm Siliques vs. Whole Plant
  misc_feature: MA Experiment ID: 20000264 Result: Up-regulated in Transcription
  misc_feature: MA Experiment 20000264 PARAMETER Experiment Name: At_Open_Flower_P Parameter: Age (day) Value: 21
  misc_feature: MA Experiment 20000264 PARAMETER Experiment Name: At_Open_Flower_P Parameter: Plant Line Value: WS
  misc_feature: MA Experiment 20000264 PARAMETER Experiment Name: At_Open_Flower_P Parameter: Tissue Value: Open Flower vs. Whole Plant
  misc_feature: MA Experiment ID: 20000437 Result: Down-regulated in Transcription
  misc_feature: MA Experiment 20000437 PARAMETER Experiment Name: At_Drought_P Parameter: Age (day) Value: 8
  misc_feature: MA Experiment 20000437 PARAMETER Experiment Name: At_Drought_P Parameter: Organism Value: A. thaliana
  misc_feature: MA Experiment 20000437 PARAMETER Experiment Name: At_Drought_P Parameter: Plant Line Value: WS
  misc_feature: MA Experiment 20000437 PARAMETER Experiment Name: At_Drought_P Parameter: Timepoint (hr) Value: 24
  misc_feature: MA Experiment 20000437 PARAMETER Experiment Name: At_Drought_P Parameter: Tissue Value: Whole Plant
  misc_feature: MA Experiment 20000437 PARAMETER Experiment Name: At_Drought_P Parameter: Treatment Value: Drought vs. No Drought
  misc_feature: MA Experiment ID: 20001451 Result: Down-regulated in Transcription
  misc_feature: MA Experiment 20001451 PARAMETER Experiment Name: At_Far-red-induction_P Parameter: Age (day) Value: 7
  misc_feature: MA Experiment 20001451 PARAMETER Experiment Name: At_Far-red-induction_P Parameter: Light Value: Far-red vs. White
  misc_feature: MA Experiment 20001451 PARAMETER Experiment Name: At_Far-red-induction_P Parameter: Organism Value: A. thaliana
  misc_feature: MA Experiment 20001451 PARAMETER Experiment Name: At_Far-red-induction_P Parameter: Plant Line Value: Columbia
  misc_feature: MA Experiment 20001451 PARAMETER Experiment Name: At_Far-red-induction_P Parameter: Timepoint (hr) Value: 24
  misc_feature: MA Experiment 20001451 PARAMETER Experiment Name: At_Far-red-induction_P Parameter: Tissue Value: Whole Plant
  misc_feature: MA Experiment ID: 20001558 Result: Up-regulated in Transcription
  misc_feature: MA Experiment 20001558 PARAMETER Experiment Name: At_Drought_Soil_Dry_P Parameter: Age (day) Value: 27
  misc_feature: MA Experiment 20001558 PARAMETER Experiment Name: At_Drought_Soil_Dry_P Parameter: Organism Value: A. thaliana
  misc_feature: MA Experiment 20001558 PARAMETER Experiment Name: At_Drought_Soil_Dry_P Parameter: Plant Line Value: WS
  misc_feature: MA Experiment 20001558 PARAMETER Experiment Name: At_Drought_Soil_Dry_P Parameter: Post Timepoint (hr) Value: 6
  misc_feature: MA Experiment 20001558 PARAMETER Experiment Name: At_Drought_Soil_Dry_P Parameter: Post-Treatment Value: Re-Water vs. No Drought
  misc_feature: MA Experiment 20001558 PARAMETER Experiment Name: At_Drought_Soil_Dry_P Parameter: Timepoint (day) Value: 13
  misc_feature: MA Experiment 20001558 PARAMETER Experiment Name: At_Drought_Soil_Dry_P Parameter: Treatment Value: Drought vs. No Drought
tctatagacatcgttgataaaaatgagtacaccaggctcttctagatccattccattcaaatcgaagaaacgattggtgatggattcgccgtcttcgaaatctcaaaccgggaatccaaatccgtcttctgtagcattgcctacgccggaaaaaccacttgagaacatgcttagtagatcgagaaaccgatctgtggctttatcagtgaaagaaattcgtcaagccgctggatctcgtcgcagatctgaagatccggttgcttcatctgccaaaagcaggctctttttcgattcatcatcatcttctccttcaaaacgtaaaagctctaacaaaaatgcagagaaagagaaacttccggagaagtacgagaatctgggaaagttctttgaagcattggataattcgatgttgttatcgaaattaagaggttctaagccaacattctccaacatttctaaacaaatcgagcatttaaccgagaggaggttttgttatagtcacttggctcaaataaagcatatattgcctgaagcgattgagattaagagagtattgatacatgatgaaactacttgctgtatgaaaccggaccttcatgttacgctcaatgccgatgctgttgaatacaacgacaagtcgaaatcggaaagtaagaaaatcgctcttcggaaagtgtttcgggctagacttgcggattttgttaaagctcaccctcagggtgatgaagttccagaggaaccgcttcctgagcccttcaatagaaggaaaccagttgaaaactcaaatgttgaagtcaagcgtgttagttctctcatggaagagatggcttctattccagcatctaaattgttttcatctcccatcacatcaacgccagtcaaaacaacttcaagtctggctaaaccaacttcgtctcagattaacattgctccaactccaaccaaaccaacttcaactcctgctaaacagactttgtctgagattaatatattgccaactccagtcaaaccagtgtcaactctggctaagtttccttcaacaccggcgattattgactcaacaccagtcattactgcaactccacctgaatttgcttcaactcctgcccggctgatgagtacttctctggcagctcgtccgctgaaaagaagcaacggtcatacaaatccagatgatatttctgctgacccaccgactaagctcgtgaggcgttccttgtctctgaactttgattcttatcctgaggatgagagaactatggatttcacagatgatatacccattgatcaagtaccagaagaagatgtatccagcgatgatgaaatactcagcatacttcctgataaacttcgacatgcgataaaagaacaagagaggaaagcgattgaggatcaaaatccagcaatctctctggcaaaaagaaggcgaaagatgatcgcttgtctacctaaacttttcaatgtcatccattacttaattcaatcgataaggcgttgggttatcacaaaagaagagcttgtgcacaagatcattgccggtcactctgatattactgacagaaaggaagttgaagaacaactaatcttactgcaagaaattgtccctgaatggatgtctgagaaaaaatcatcaagtggagatgttctagtatgcataaacaagttggcatctcctctaacaatccgatcacgtcttgaagaagaaaacaagcaagagatggctccactgctttcttgagaccgtggttccatcggctgcggttactttgggttctaacttatttttggactgccaaatatgttatagtctattcatgagacagatgtgtagagactactaagttataaagttcctaagtaaagtaaaagggtgaaaacaagtagatgacaaactatttaggaaggtgttttcatctttttctgaattatgacaatgaggttatttctctatcaataaagagtaattttatgcattttgtaacagaattctttatagaacaagactataaggaccgttgttgtgtt

SEQ ID NO: 107254 - protein, 571 aa, Arabidopsis thaliana
  peptide (1)..(571): Ceres Seq. ID no. 13621818
  misc_feature (1)..(571): Homolog of NCBI NO: 15224645 NR Description: expressed protein [Arabidopsis thaliana]
  misc_feature (1)..(571): Homolog of NCBI NO: 38567811 NR Description: CDT1a protein [Arabidopsis thaliana]
  misc_feature (1)..(571): Homolog of NCBI NO: 22530894 NR Description: hypothetical protein [Arabidopsis thaliana]
  misc_feature (41)..(558): Homolog of NCBI NO: 38344618 NR Description: OSJNBb0003A12.4 [Oryza sativa (japonica
  misc_feature (1)..(560): Homolog of NCBI NO: 40539114 NR Description: expressed protein [Oryza sativa (japonica
  misc_feature (68)..(452): Homolog of NCBI NO: 15232570 NR Description: hypothetical protein [Arabidopsis thaliana]
  misc_feature (317)..(567): Homolog of NCBI NO: 15232570 NR Description: hypothetical protein [Arabidopsis thaliana]
  misc_feature (22)..(230): Homolog of NCBI NO: 14250474 NR Description: Similar to DNA replication factor [Homo sapiens]
  misc_feature (466)..(565): Homolog of NCBI NO: 14250474 NR Description: Similar to DNA replication factor [Homo sapiens]
  misc_feature (22)..(230): Homolog of NCBI NO: 14495613 NR Description: DNA replication factor [Homo sapiens]
MSTPGSSRSIPFKSKKRLVMDSPSSKSQTGNPNPSSVALPTPEKPLENMLSRSRNRSVALSVKEIRQAAGSRRRSEDPVASSAKSRLFFDSSSSSPSKRKSSNKNAEKEKLPEKYENLGKFFEALDNSMLLSKLRGSKPTFSNISKQIEHLTERRFCYSHLAQIKHILPEAIEIKRVLIHDETTCCMKPDLHVTLNADAVEYNDKSKSESKKIALRKVFRARLADFVKAHPQGDEVPEEPLPEPFNRRKPVENSNVEVKRVSSLMEEMASIPASKLFSSPITSTPVKTTSSLAKPTSSQINIAPTPTKPTSTPAKQTLSEINILPTPVKPVSTLAKFPSTPAIIDSTPVITATPPEFASTPARLMSTSLAARPLKRSNGHTNPDDISADPPTKLVRRSLSLNFDSYPEDERTMDFTDDIPIDQVPEEDVSSDDEILSILPDKLRHAIKEQERKAIEDQNPAISLAKRRRKMIACLPKLFNVIHYLIQSIRRWVITKEELVHKIIAGHSDITDRKEVEEQLILLQEIVPEWMSEKKSSSGDVLVCINKLASPLTIRSRLEEENKQEMAPLLS

SEQ ID NO: 107255 - protein, 552 aa, Arabidopsis thaliana
  peptide (1)..(552): Ceres Seq. ID no. 13621819
  misc_feature (1)..(552): Homolog of NCBI NO: 15224645 NR Description: expressed protein [Arabidopsis thaliana]
  misc_feature (1)..(552): Homolog of NCBI NO: 38567811 NR Description: CDT1a protein [Arabidopsis thaliana]
  misc_feature (1)..(552): Homolog of NCBI NO: 22530894 NR Description: hypothetical protein [Arabidopsis thaliana]
  misc_feature (22)..(539): Homolog of NCBI NO: 38344618 NR Description: OSJNBb0003A12.4 [Oryza sativa (japonica
  misc_feature (1)..(541): Homolog of NCBI NO: 40539114 NR Description: expressed protein [Oryza sativa (japonica
  misc_feature (49)..(433): Homolog of NCBI NO: 15232570 NR Description: hypothetical protein [Arabidopsis thaliana]
  misc_feature (298)..(548): Homolog of NCBI NO: 15232570 NR Description: hypothetical protein [Arabidopsis thaliana]
  misc_feature (3)..(211): Homolog of NCBI NO: 14250474 NR Description: Similar to DNA replication factor [Homo sapiens]
  misc_feature (447)..(546): Homolog of NCBI NO: 14250474 NR Description: Similar to DNA replication factor [Homo sapiens]
  misc_feature (3)..(211): Homolog of NCBI NO: 14495613 NR Description: DNA replication factor [Homo sapiens]
MDSPSSKSQTGNPNPSSVALPTPEKPLENMLSRSRNRSVALSVKEIRQAAGSRRRSEDPVASSAKSRLFFDSSSSSPSKRKSSNKNAEKEKLPEKYENLGKFFEALDNSMLLSKLRGSKPTFSNISKQIEHLTERRFCYSHLAQIKHILPEAIEIKRVLIHDETTCCMKPDLHVTLNADAVEYNDKSKSESKKIALRKVFRARLADFVKAHPQGDEVPEEPLPEPFNRRKPVENSNVEVKRVSSLMEEMASIPASKLFSSPITSTPVKTTSSLAKPTSSQINIAPTPTKPTSTPAKQTLSEINILPTPVKPVSTLAKFPSTPAIIDSTPVITATPPEFASTPARLMSTSLAARPLKRSNGHTNPDDISADPPTKLVRRSLSLNFDSYPEDERTMDFTDDIPIDQVPEEDVSSDDEILSILPDKLRHAIKEQERKAIEDQNPAISLAKRRRKMIACLPKLFNVIHYLIQSIRRWVITKEELVHKIIAGHSDITDRKEVEEQLILLQEIVPEWMSEKKSSSGDVLVCINKLASPLTIRSRLEEENKQEMAPLLS

SEQ ID NO: 107256 - protein, 523 aa, Arabidopsis thaliana
  peptide (1)..(523): Ceres Seq. ID no. 13621820
  misc_feature (1)..(523): Homolog of NCBI NO: 15224645 NR Description: expressed protein [Arabidopsis thaliana]
  misc_feature (1)..(523): Homolog of NCBI NO: 38567811 NR Description: CDT1a protein [Arabidopsis thaliana]
  misc_feature (1)..(523): Homolog of NCBI NO: 22530894 NR Description: hypothetical protein [Arabidopsis thaliana]
  misc_feature (1)..(510): Homolog of NCBI NO: 38344618 NR Description: OSJNBb0003A12.4 [Oryza sativa (japonica
  misc_feature (1)..(512): Homolog of NCBI NO: 40539114 NR Description: expressed protein [Oryza sativa (japonica
  misc_feature (20)..(404): Homolog of NCBI NO: 15232570 NR Description: hypothetical protein [Arabidopsis thaliana]
  misc_feature (269)..(519): Homolog of NCBI NO: 15232570 NR Description: hypothetical protein [Arabidopsis thaliana]
  misc_feature (1)..(182): Homolog of NCBI NO: 14250474 NR Description: Similar to DNA replication factor [Homo sapiens]
  misc_feature (418)..(517): Homolog of NCBI NO: 14250474 NR Description: Similar to DNA replication factor [Homo sapiens]
  misc_feature (1)..(182): Homolog of NCBI NO: 14495613 NR Description: DNA replication factor [Homo sapiens]
MLSRSRNRSVALSVKEIRQAAGSRRRSEDPVASSAKSRLFFDSSSSSPSKRKSSNKNAEKEKLPEKYENLGKFFEALDNSMLLSKLRGSKPTFSNISKQIEHLTERRFCYSHLAQIKHILPEAIEIKRVLIHDETTCCMKPDLHVTLNADAVEYNDKSKSESKKIALRKVFRARLADFVKAHPQGDEVPEEPLPEPFNRRKPVENSNVEVKRVSSLMEEMASIPASKLFSSPITSTPVKTTSSLAKPTSSQINIAPTPTKPTSTPAKQTLSEINILPTPVKPVSTLAKFPSTPAIIDSTPVITATPPEFASTPARLMSTSLAARPLKRSNGHTNPDDISADPPTKLVRRSLSLNFDSYPEDERTMDFTDDIPIDQVPEEDVSSDDEILSILPDKLRHAIKEQERKAIEDQNPAISLAKRRRKMIACLPKLFNVIHYLIQSIRRWVITKEELVHKIIAGHSDITDRKEVEEQLILLQEIVPEWMSEKKSSSGDVLVCINKLASPLTIRSRLEEENKQEMAPLLS

SEQ ID NO: 107257 - DNA, 1249 bp, Arabidopsis thaliana
  misc_feature (1)..(1249): Ceres Seq. ID no. 13621829
  misc_feature: MA Experiment ID: 20000180 Result: Up-regulated in Transcription
  misc_feature: MA Experiment 20000180 PARAMETER Experiment Name: At_Germinating_Seeds_P Parameter: Age (hr) Value: 24 vs. 0
  misc_feature: MA Experiment 20000180 PARAMETER Experiment Name: At_Germinating_Seeds_P Parameter: Tissue Value: Germinating Seeds
  misc_feature: MA Experiment ID: 20000184 Result: Up-regulated in Transcription
  misc_feature: MA Experiment 20000184 PARAMETER Experiment Name: At_Shoots__P Parameter: Age (day) Value: 7
  misc_feature: MA Experiment 20000184 PARAMETER Experiment Name: At_Shoots__P Parameter: Tissue Value: Shoots vs. Whole Plant
  misc_feature: MA Experiment ID: 20000185 Result: Up-regulated in Transcription
  misc_feature: MA Experiment 20000185 PARAMETER Experiment Name: At_Roots__P Parameter: Age (day) Value: 7 vs. 21
  misc_feature: MA Experiment 20000185 PARAMETER Experiment Name: At_Roots__P Parameter: Organism Value: A. thaliana
  misc_feature: MA Experiment 20000185 PARAMETER Experiment Name: At_Roots__P Parameter: Tissue Value: Roots vs. Whole Plant
  misc_feature: MA Experiment ID: 20000439 Result: Up-regulated in Transcription
  misc_feature: MA Experiment 20000439 PARAMETER Experiment Name: At_Roots__P Parameter: Age (day) Value: 14 vs. 21
  misc_feature: MA Experiment 20000439 PARAMETER Experiment Name: At_Roots__P Parameter: Organism Value: A. thaliana
  misc_feature: MA Experiment 20000439 PARAMETER Experiment Name: At_Roots__P Parameter: Tissue Value: Roots vs. Whole Plant
gtgtgagtaatttagaaaagccctaattttaaaataagatagagattatgaagactaagaacgtgaaactcttattcttcttcttctccgtctccctccttctcatcgccgtcgtcaacgccgccgaaggccattcacatggtggaccaaaatgtgaatgctcacacgaagacgaccatgaaaacaaagccggagctcggaaatacaagatcgccgcaattcctacagttctaatagccggcataatcggagttcttttccctttgttaggcaaagtcttcccttctttgcgtccagaaacatgtttcttcttcgtcacgaaagctttcgcagccggagttatcttggctaccggatttatgcatgtcttgcctgaggcttacgagatgcttaactctccatgtttgacatctgaagcatgggaatttccgttcaccggatttattgcgatgattgctgcgatcttgacgttatccgttgatacatttgccacttcgagtttctataaatcgcattgcaaagcgtctaagagggtcagtgatggagaaaccggcgagtcctccgttgactccgagaaggtccaaattctccggactagagttattgcacaggtattggagttgggaataatagtacactcagtggtaataggaatatcactaggagcttcacagagcccagatgctgcaaaagctctgtttattgccttaatgtttcatcaatgcttcgaaggtctaggccttggtggttgtattgctcagggaaaattcaagtgtttgtcagtaacaatcatgtcgacgttcttcgcaataacgacaccgataggaatcgttgtgggaatgggaatagcaaattcttacgatgagtcttcaccaacggctctgatcgttcaaggagttttgaacgctgcatccgcaggcattctcatctacatgtctttggttgaccttctcgcagcagatttcacgcaccctaaaatgcaatccaatactgggcttcaaattatggcccatattgctctccttcttggtgctggcctcatgtctctattggctaaatgggcttgatagctctttaattcaactcttctagtttttgctcatggccttttatggccaccttgaattcgaattatttgttcttattttcccccttttcaatgatatttttgagatctctattttctgaaacacttcatgtactcatgtttaacattattacaattgtgtatattgatcagtgtccaagg

SEQ ID NO: 107258 - protein, 339 aa, Arabidopsis thaliana
  peptide (1)..(339): Ceres Seq. ID no. 13621830
  misc_feature (51)..(336): Pfam Name: ZIP Zinc transporter Pfam Description: ZIP Zinc transporter
  misc_feature (1)..(339): Homolog of NCBI NO: 15225219 NR Description: zinc transporter (ZIP3) [Arabidopsis thaliana]
  misc_feature (1)..(339): Homolog of NCBI NO: 25347109 NR Description: zinc transporter ZIP3 [validated] - Arabidopsis >gi|3252870|gb|AAC24199.1| putative zinc transporter [Arabidopsis
MKTKNVKLLFFFFSVSLLLIAVVNAAEGHSHGGPKCECSHEDDHENKAGARKYKIAAIPTVLIAGIIGVLFPLLGKVFPSLRPETCFFFVTKAFAAGVILATGFMHVLPEAYEMLNSPCLTSEAWEFPFTGFIAMIAAILTLSVDTFATSSFYKSHCKASKRVSDGETGESSVDSEKVQILRTRVIAQVLELGIIVHSVVIGISLGASQSPDAAKALFIALMFHQCFEGLGLGGCIAQGKFKCLSVTIMSTFFAITTPIGIVVGMGIANSYDESSPTALIVQGVLNAASAGILIYMSLVDLLAADFTHPKMQSNTGLQIMAHIALLLGAGLMSLLAKWA

SEQ ID NO: 107259 - protein, 235 aa, Arabidopsis thaliana
  peptide (1)..(235): Ceres Seq. ID no. 13621831
  misc_feature (1)..(232): Pfam Name: ZIP Zinc transporter Pfam Description: ZIP Zinc transporter
  misc_feature (1)..(235): Homolog of NCBI NO: 15225219 NR Description: zinc transporter (ZIP3) [Arabidopsis thaliana]
  misc_feature (1)..(235): Homolog of NCBI NO: 25347109 NR Description: zinc transporter ZIP3 [validated] - Arabidopsis >gi|3252870|gb|AAC24199.1| putative zinc transporter [Arabidopsis
MHVLPEAYEMLNSPCLTSEAWEFPFTGFIAMIAAILTLSVDTFATSSFYKSHCKASKRVSDGETGESSVDSEKVQILRTRVIAQVLELGIIVHSVVIGISLGASQSPDAAKALFIALMFHQCFEGLGLGGCIAQGKFKCLSVTIMSTFFAITTPIGIVVGMGIANSYDESSPTALIVQGVLNAASAGILIYMSLVDLLAADFTHPKMQSNTGLQIMAHIALLLGAGLMSLLAKWA

SEQ ID NO: 107260 - protein, 226 aa, Arabidopsis thaliana
  peptide (1)..(226): Ceres Seq. ID no. 13621832
  misc_feature (1)..(223): Pfam Name: ZIP Zinc transporter Pfam Description: ZIP Zinc transporter
  misc_feature (1)..(226): Homolog of NCBI NO: 15225219 NR Description: zinc transporter (ZIP3) [Arabidopsis thaliana]
  misc_feature (1)..(226): Homolog of NCBI NO: 25347109 NR Description: zinc transporter ZIP3 [validated] - Arabidopsis >gi|3252870|gb|AAC24199.1| putative zinc transporter [Arabidopsis
MLNSPCLTSEAWEFPFTGFIAMIAAILTLSVDTFATSSFYKSHCKASKRVSDGETGESSVDSEKVQILRTRVIAQVLELGIIVHSVVIGISLGASQSPDAAKALFIALMFHQCFEGLGLGGCIAQGKFKCLSVTIMSTFFAITTPIGIVVGMGIANSYDESSPTALIVQGVLNAASAGILIYMSLVDLLAADFTHPKMQSNTGLQIMAHIALLLGAGLMSLLAKWA

SEQ ID NO: 107261 - DNA, 1949 bp, Arabidopsis thaliana
  misc_feature (1)..(1949): Ceres Seq. ID no. 13621833
  misc_feature: MA Experiment ID: 20000307 Result: Up-regulated in Transcription
  misc_feature: MA Experiment 20000307 PARAMETER Experiment Name: At_Germinating_Seeds_Sub_P Parameter: Age (hr) Value: 24 vs. 0
  misc_feature: MA Experiment 20000307 PARAMETER Experiment Name: At_Germinating_Seeds_Sub_P Parameter: Organism Value: A. thaliana
  misc_feature: MA Experiment 20000307 PARAMETER Experiment Name: At_Germinating_Seeds_Sub_P Parameter: Plant Line Value: WS
  misc_feature: MA Experiment 20000307 PARAMETER Experiment Name: At_Germinating_Seeds_Sub_P Parameter: Tissue Value: Germinating Seeds
  misc_feature: MA Experiment ID: 20000315 Result: Down-regulated in Transcription
  misc_feature: MA Experiment 20000315 PARAMETER Experiment Name: At_14day_Shoots-Roots_Sub_P Parameter: Age (day) Value: 14
  misc_feature: MA Experiment 20000315 PARAMETER Experiment Name: At_14day_Shoots-Roots_Sub_P Parameter: Organism Value: A. thaliana
  misc_feature: MA Experiment 20000315 PARAMETER Experiment Name: At_14day_Shoots-Roots_Sub_P Parameter: Plant Line Value: WS
  misc_feature: MA Experiment 20000315 PARAMETER Experiment Name: At_14day_Shoots-Roots_Sub_P Parameter: Tissue Value: Shoots vs. Whole Plant
  misc_feature: MA Experiment ID: 20000440 Result: Up-regulated in Transcription
  misc_feature: MA Experiment 20000440 PARAMETER Experiment Name: At_Closed-Flower__Sub_P Parameter: Tissue Value: Closed Flower vs. Whole Plant
acccctcctcttccactcttacgtcaaaaatacagagccagagaaagagaaagaaagagaccaagaatctatttaattccatctcttattatacaatacgaaactacagagcaccacttctctttcaatttctctcggactaattgaaaaatctcaactttattgttattaggaggctctgaagattgatgagctacttctttttgatgtatctgaatttaacctgatttttggttatgattaatcttatggagttgattggattaaattagctacttttactcctgaggaatctctattcttcctctggtagctgaagagaataaataatgtcgacgaagatcaaaggagagctttttccctccagaagtttagtatctaaaaaatggacatttttactctgctttgggagcttctgcttcggaatattattcaccgataggatgtggattattccggagtctaaagacatgcctcgaccatctgtaagtacagaagctgaaagattgaagctgatctctgagggctgtgatccgaaaaccctctaccagaaagaagtaaatcgtgatcctcaggcattgtttggagaagtttccaagactcataacgctatacagacattggataagactatttcaagcttagagatggagttagctgcagcaagatcggctcaggagtctttagtaaacggtgctcctatatctaatgatatggagaagaagcaattaccggggaaaagacggtatttgatggttgtagggattaatactgcttttagtagccgaaagagaagagattctgttcgaacaacttggatgccttcaggtgagaaaagaaagaagttggaagaagagaagggaattattatacggtttgtgattggtcatagtgccacggctggcggaattctagaccgatccattgaagcagaggacaagaagcatggagatttcttgagattggaccatgttgaaggataccttgagttatcaggcaaaacgaaaacatatttttctacagctgtttcgaagtgggatgcagagttctatgtcaaagtagatgatgatgttcatgtaaatatcgcaactcttggggaaactcttgttagacacaggaagaaacatcgagtctatctcggctgcatgaaatctggtccagtactatctcaaaaaggagttagataccatgagcctgagtattggaaatttggtgagaatggaaacaagtacttccgtcacgctactggacagttatacgccatttctagagacttggcttcttacatttcccttaatcagcatgttctgcacaaatatgcaaatgaggatgttacattaggtgcttggtttatcgggcttgatgtgacacatatcgatgatagaagactatgttgtggcactcctcctgattgtgaatggaaggcacaagcaggcaacatatgtgtagcttcattcgactggacgtgtagcggtatctgcagatcagctgatcggataaaagaggttcacaagcgatgtggtgaaccggaaaacgctatttggaaagccagattttgaggcccttccactacatatacatagatcatataaagaagtagttgttttcaaaccaaacgatcggtcatcaaatgaatgatcacccggaaaacaactcttctccttcttcttcatattctttatgaaccaagaagatagctacatttgttgtatatcatagtaacttgcatagtagagaggactatagagagataagtacgaaatgaaactctagcagagatagatagcgtttgcgtttgagaagcgtttccgattagtagaaggaaattacaaaccaaatgctgcagcaaacgcgattgcttctttctgattttggctgtttttgttttttgtgggagtgaagtagcttgtgggttttatttagatcaatgcaaagtaacgaatgttttt

SEQ ID NO: 107262 - protein, 409 aa, Arabidopsis thaliana
  peptide (1)..(409): Ceres Seq. ID no. 13621834
  misc_feature (154)..(352): Pfam Name: Galactosyltransferase Pfam Description: Galactosyltransferase
  misc_feature (1)..(409): Homolog of NCBI NO: 15225684 NR Description: galactosyltransferase family [Arabidopsis
  misc_feature (1)..(409): Homolog of NCBI NO: 15220440 NR Description: galactosyltransferase family [Arabidopsis
  misc_feature (8)..(409): Homolog of NCBI NO: 18416895 NR Description: galactosyltransferase family [Arabidopsis
  misc_feature (8)..(409): Homolog of NCBI NO: 7485336 NR Description: hypothetical protein F10M23.280 - Arabidopsis >gi|4455217|emb|CAB36540.1| Avr9 elicitor response like protein thaliana] >gi|7269547|emb|CAB79549.1| Avr9 elicitor response like
  misc_feature (92)..(405): Homolog of NCBI NO: 15221085 NR Description: galactosyltransferase family [Arabidopsis
  misc_feature (1)..(72): Homolog of NCBI NO: 15221085 NR Description: galactosyltransferase family [Arabidopsis
  misc_feature (16)..(409): Homolog of NCBI NO: 4138265 NR Description: Avr9 elicitor response protein [Nicotiana tabacum]
  misc_feature (16)..(409): Homolog of NCBI NO: 15223337 NR Description: galactosyltransferase family [Arabidopsis
  misc_feature (12)..(405): Homolog of NCBI NO: 12323294 NR Description: putative (Avr9) elicitor response protein;
  misc_feature (12)..(405): Homolog of NCBI NO: 30699558 NR Description: Avr9 elicitor response protein -related
MSTKIKGELFPSRSLVSKKWTFLLCFGSFCFGILFTDRMWIIPESKDMPRPSVSTEAERLKLISEGCDPKTLYQKEVNRDPQALFGEVSKTHNAIQTLDKTISSLEMELAAARSAQESLVNGAPISNDMEKKQLPGKRRYLMVVGINTAFSSRKRRDSVRTTWMPSGEKRKKLEEEKGIIIRFVIGHSATAGGILDRSIEAEDKKHGDFLRLDHVEGYLELSGKTKTYFSTAVSKWDAEFYVKVDDDVHVNIATLGETLVRHRKKHRVYLGCMKSGPVLSQKGVRYHEPEYWKFGENGNKYFRHATGQLYAISRDLASYISLNQHVLHKYANEDVTLGAWFIGLDVTHIDDRRLCCGTPPDCEWKAQAGNICVASFDWTCSGICRSADRIKEVHKRCGEPENAIWKARF

SEQ ID NO: 107263 - protein, 371 aa, Arabidopsis thaliana
  peptide (1)..(371): Ceres Seq. ID no. 13621835
  misc_feature (116)..(314): Pfam Name: Galactosyltransferase Pfam Description: Galactosyltransferase
  misc_feature (1)..(371): Homolog of NCBI NO: 15225684 NR Description: galactosyltransferase family [Arabidopsis
  misc_feature (1)..(371): Homolog of NCBI NO: 15220440 NR Description: galactosyltransferase family [Arabidopsis
  misc_feature (1)..(371): Homolog of NCBI NO: 18416895 NR Description: galactosyltransferase family [Arabidopsis
  misc_feature (1)..(371): Homolog of NCBI NO: 7485336 NR Description: hypothetical protein F10M23.280 - Arabidopsis >gi|4455217|emb|CAB36540.1| Avr9 elicitor response like protein thaliana] >gi|7269547|emb|CAB79549.1| Avr9 elicitor response like
  misc_feature (54)..(367): Homolog of NCBI NO: 15221085 NR Description: galactosyltransferase family [Arabidopsis
  misc_feature (1)..(34): Homolog of NCBI NO: 15221085 NR Description: galactosyltransferase family [Arabidopsis
  misc_feature (1)..(371): Homolog of NCBI NO: 4138265 NR Description: Avr9 elicitor response protein [Nicotiana tabacum]
  misc_feature (1)..(371): Homolog of NCBI NO: 15223337 NR Description: galactosyltransferase family [Arabidopsis
  misc_feature (1)..(367): Homolog of NCBI NO: 12323294 NR Description: putative (Avr9) elicitor response protein;
  misc_feature (1)..(367): Homolog of NCBI NO: 30699558 NR Description: Avr9 elicitor response protein -related
MWIIPESKDMPRPSVSTEAERLKLISEGCDPKTLYQKEVNRDPQALFGEVSKTHNAIQTLDKTISSLEMELAAARSAQESLVNGAPISNDMEKKQLPGKRRYLMVVGINTAFSSRKRRDSVRTTWMPSGEKRKKLEEEKGIIIRFVIGHSATAGGILDRSIEAEDKKHGDFLRLDHVEGYLELSGKTKTYFSTAVSKWDAEFYVKVDDDVHVNIATLGETLVRHRKKHRVYLGCMKSGPVLSQKGVRYHEPEYWKFGENGNKYFRHATGQLYAISRDLASYISLNQHVLHKYANEDVTLGAWFIGLDVTHIDDRRLCCGTPPDCEWKAQAGNICVASFDWTCSGICRSADRIKEVHKRCGEPENAIWKARF

SEQ ID NO: 107264 - protein, 362 aa, Arabidopsis thaliana
  peptide (1)..(362): Ceres Seq. ID no. 13621836
  misc_feature (107)..(305): Pfam Name: Galactosyltransferase Pfam Description: Galactosyltransferase
  misc_feature (1)..(362): Homolog of NCBI NO: 15225684 NR Description: galactosyltransferase family [Arabidopsis
  misc_feature (1)..(362): Homolog of NCBI NO: 15220440 NR Description: galactosyltransferase family [Arabidopsis
  misc_feature (1)..(362): Homolog of NCBI NO: 18416895 NR Description: galactosyltransferase family [Arabidopsis
  misc_feature (1)..(362): Homolog of NCBI NO: 7485336 NR Description: hypothetical protein F10M23.280 - Arabidopsis >gi|4455217|emb|CAB36540.1| Avr9 elicitor response like protein thaliana] >gi|7269547|emb|CAB79549.1| Avr9 elicitor response like
  misc_feature (45)..(358): Homolog of NCBI NO: 15221085 NR Description: galactosyltransferase family [Arabidopsis
  misc_feature (1)..(25): Homolog of NCBI NO: 15221085 NR Description: galactosyltransferase family [Arabidopsis
  misc_feature (1)..(362): Homolog of NCBI NO: 4138265 NR Description: Avr9 elicitor response protein [Nicotiana tabacum]
  misc_feature (1)..(362): Homolog of NCBI NO: 15223337 NR Description: galactosyltransferase family [Arabidopsis
  misc_feature (1)..(358): Homolog of NCBI NO: 12323294 NR Description: putative (Avr9) elicitor response protein;
  misc_feature (1)..(358): Homolog of NCBI NO: 30699558 NR Description: Avr9 elicitor response protein -related
MPRPSVSTEAERLKLISEGCDPKTLYQKEVNRDPQALFGEVSKTHNAIQTLDKTISSLEMELAAARSAQESLVNGAPISNDMEKKQLPGKRRYLMVVGINTAFSSRKRRDSVRTTWMPSGEKRKKLEEEKGIIIRFVIGHSATAGGILDRSIEAEDKKHGDFLRLDHVEGYLELSGKTKTYFSTAVSKWDAEFYVKVDDDVHVNIATLGETLVRHRKKHRVYLGCMKSGPVLSQKGVRYHEPEYWKFGENGNKYFRHATGQLYAISRDLASYISLNQHVLHKYANEDVTLGAWFIGLDVTHIDDRRLCCGTPPDCEWKAQAGNICVASFDWTCSGICRSADRIKEVHKRCGEPENAIWKARF

SEQ ID NO: 107265 - DNA, 2878 bp, Arabidopsis thaliana
  misc_feature (1)..(2878): Ceres Seq. ID no. 13621849
  misc_feature: MA Experiment ID: 20000182 Result: Up-regulated in Transcription
  misc_feature: MA Experiment 20000182 PARAMETER Experiment Name: At_2mM_SA_P Parameter: Age (day) Value: 14
  misc_feature: MA Experiment 20000182 PARAMETER Experiment Name: At_2mM_SA_P Parameter: Organism Value: A. thaliana
  misc_feature: MA Experiment 20000182 PARAMETER Experiment Name: At_2mM_SA_P Parameter: Plant Line Value: WS
  misc_feature: MA Experiment 20000182 PARAMETER Experiment Name: At_2mM_SA_P Parameter: Timepoint (hr) Value: 6
  misc_feature: MA Experiment 20000182 PARAMETER Experiment Name: At_2mM_SA_P Parameter: Tissue Value: Aerial
  misc_feature: MA Experiment 20000182 PARAMETER Experiment Name: At_2mM_SA_P Parameter: Treatment Value: 2mM SA vs. No Treatment
  misc_feature: MA Experiment ID: 20000185 Result: Up-regulated in Transcription
  misc_feature: MA Experiment 20000185 PARAMETER Experiment Name: At_Roots__P Parameter: Age (day) Value: 7 vs. 21
  misc_feature: MA Experiment 20000185 PARAMETER Experiment Name: At_Roots__P Parameter: Organism Value: A. thaliana
  misc_feature: MA Experiment 20000185 PARAMETER Experiment Name: At_Roots__P Parameter: Tissue Value: Roots vs. Whole Plant
  misc_feature: MA Experiment ID: 20000267 Result: Down-regulated in Transcription
  misc_feature: MA Experiment 20000267 PARAMETER Experiment Name: At_Drought_P Parameter: Age (day) Value: 7
  misc_feature: MA Experiment 20000267 PARAMETER Experiment Name: At_Drought_P Parameter: Organism Value: A. thaliana
  misc_feature: MA Experiment 20000267 PARAMETER Experiment Name: At_Drought_P Parameter: Plant Line Value: WS
  misc_feature: MA Experiment 20000267 PARAMETER Experiment Name: At_Drought_P Parameter: Timepoint (hr) Value: 6
  misc_feature: MA Experiment 20000267 PARAMETER Experiment Name: At_Drought_P Parameter: Tissue Value: Whole Plant
  misc_feature: MA Experiment 20000267 PARAMETER Experiment Name: At_Drought_P Parameter: Treatment Value: Drought vs. No Drought
  misc_feature: MA Experiment ID: 20000438 Result: Down-regulated in Transcription
  misc_feature: MA Experiment 20000438 PARAMETER Experiment Name: At_Shoots__P Parameter: Age (day) Value: 14
  misc_feature: MA Experiment 20000438 PARAMETER Experiment Name: At_Shoots__P Parameter: Tissue Value: Shoots vs. Whole Plant
  misc_feature: MA Experiment ID: 20000439 Result: Up-regulated in Transcription
  misc_feature: MA Experiment 20000439 PARAMETER Experiment Name: At_Roots__P Parameter: Age (day) Value: 14 vs. 21
  misc_feature: MA Experiment 20000439 PARAMETER Experiment Name: At_Roots__P Parameter: Organism Value: A. thaliana
  misc_feature: MA Experiment 20000439 PARAMETER Experiment Name: At_Roots__P Parameter: Tissue Value: Roots vs. Whole Plant
  misc_feature: MA Experiment ID: 20000456 Result: Up-regulated in Transcription
  misc_feature: MA Experiment 20000456 PARAMETER Experiment Name: At_100uM_BA_P Parameter: Age (day) Value: 14
  misc_feature: MA Experiment 20000456 PARAMETER Experiment Name: At_100uM_BA_P Parameter: Organism Value: A. thaliana
  misc_feature: MA Experiment 20000456 PARAMETER Experiment Name: At_100uM_BA_P Parameter: Plant Line Value: WS
  misc_feature: MA Experiment 20000456 PARAMETER Experiment Name: At_100uM_BA_P Parameter: Timepoint (hr) Value: 6
  misc_feature: MA Experiment 20000456 PARAMETER Experiment Name: At_100uM_BA_P Parameter: Tissue Value: Aerial
  misc_feature: MA Experiment 20000456 PARAMETER Experiment Name: At_100uM_BA_P Parameter: Treatment Value: 100uM BA vs. No Treatment
  misc_feature: MA Experiment ID: 20000527 Result: Down-regulated in Transcription
  misc_feature: MA Experiment 20000527 PARAMETER Experiment Name: At_10percent_PEG_P Parameter: Age (day) Value: 20
  misc_feature: MA Experiment 20000527 PARAMETER Experiment Name: At_10percent_PEG_P Parameter: Organism Value: A. thaliana
  misc_feature: MA Experiment 20000527 PARAMETER Experiment Name: At_10percent_PEG_P Parameter: Plant Line Value: WS
  misc_feature: MA Experiment 20000527 PARAMETER Experiment Name: At_10percent_PEG_P Parameter: Timepoint (day) Value: 20
  misc_feature: MA Experiment 20000527 PARAMETER Experiment Name: At_10percent_PEG_P Parameter: Tissue Value: Whole Plant
  misc_feature: MA Experiment 20000527 PARAMETER Experiment Name: At_10percent_PEG_P Parameter: Treatment Value: 10percent PEG vs. No Treatment
  misc_feature: MA Experiment ID: 20000573 Result: Up-regulated in Transcription
  misc_feature: MA Experiment 20000573 PARAMETER Experiment Name: At_100uM_ABA_Mutants__P Parameter: Organism Value: A. thaliana
  misc_feature: MA Experiment 20000573 PARAMETER Experiment Name: At_100uM_ABA_Mutants__P Parameter: Plant Line Value: CS22 vs. Ler wt
  misc_feature: MA Experiment 20000573 PARAMETER Experiment Name: At_100uM_ABA_Mutants__P Parameter: Timepoint (hr) Value: N/A
  misc_feature: MA Experiment 20000573 PARAMETER Experiment Name: At_100uM_ABA_Mutants__P Parameter: Tissue Value: Whole Plant
  misc_feature: MA Experiment 20000573 PARAMETER Experiment Name: At_100uM_ABA_Mutants__P Parameter: Treatment Value: None
  misc_feature: MA Experiment ID: 20000574 Result: Up-regulated in Transcription
  misc_feature: MA Experiment 20000574 PARAMETER Experiment Name: At_100uM_ABA_Mutants__P Parameter: Organism Value: A. thaliana
  misc_feature: MA Experiment 20000574 PARAMETER Experiment Name: At_100uM_ABA_Mutants__P Parameter: Plant Line Value: CS23 vs. Ler wt
  misc_feature: MA Experiment 20000574 PARAMETER Experiment Name: At_100uM_ABA_Mutants__P Parameter: Timepoint (hr) Value: N/A
  misc_feature: MA Experiment 20000574 PARAMETER Experiment Name: At_100uM_ABA_Mutants__P Parameter: Tissue Value: Whole Plant
  misc_feature: MA Experiment 20000574 PARAMETER Experiment Name: At_100uM_ABA_Mutants__P Parameter: Treatment Value: None
  misc_feature: MA Experiment ID: 20000575 Result: Down-regulated in Transcription
  misc_feature: MA Experiment 20000575 PARAMETER Experiment Name: At_100uM_ABA_Mutants__P Parameter: Organism Value: A. thaliana
  misc_feature: MA Experiment 20000575 PARAMETER Experiment Name: At_100uM_ABA_Mutants__P Parameter: Plant Line Value: CS22
  misc_feature: MA Experiment 20000575 PARAMETER Experiment Name: At_100uM_ABA_Mutants__P Parameter: Timepoint (hr) Value: 6
  misc_feature: MA Experiment 20000575 PARAMETER Experiment Name: At_100uM_ABA_Mutants__P Parameter: Tissue Value: Whole Plant
  misc_feature: MA Experiment 20000575 PARAMETER Experiment Name: At_100uM_ABA_Mutants__P Parameter: Treatment Value: 1uM ABA vs. No Treatment
  misc_feature: MA Experiment ID: 20000576 Result: Down-regulated in Transcription
  misc_feature: MA Experiment 20000576 PARAMETER Experiment Name: At_100uM_ABA_Mutants__P Parameter: Organism Value: A. thaliana
  misc_feature: MA Experiment 20000576 PARAMETER Experiment Name: At_100uM_ABA_Mutants__P Parameter: Plant Line Value: CS23
  misc_feature: MA Experiment 20000576 PARAMETER Experiment Name: At_100uM_ABA_Mutants__P Parameter: Timepoint (hr) Value: 6
  misc_feature: MA Experiment 20000576 PARAMETER Experiment Name: At_100uM_ABA_Mutants__P Parameter: Tissue Value: Whole Plant
  misc_feature: MA Experiment 20000576 PARAMETER Experiment Name: At_100uM_ABA_Mutants__P Parameter: Treatment Value: 1uM ABA vs. No Treatment
  misc_feature: MA Experiment ID: 20001451 Result: Down-regulated in Transcription
  misc_feature: MA Experiment 20001451 PARAMETER Experiment Name: At_Far-red-induction_P Parameter: Age (day) Value: 7
  misc_feature: MA Experiment 20001451 PARAMETER Experiment Name: At_Far-red-induction_P Parameter: Light Value: Far-red vs. White
  misc_feature: MA Experiment 20001451 PARAMETER Experiment Name: At_Far-red-induction_P Parameter: Organism Value: A. thaliana
  misc_feature: MA Experiment 20001451 PARAMETER Experiment Name: At_Far-red-induction_P Parameter: Plant Line Value: Columbia
  misc_feature: MA Experiment 20001451 PARAMETER Experiment Name: At_Far-red-induction_P Parameter: Timepoint (hr) Value: 24
  misc_feature: MA Experiment 20001451 PARAMETER Experiment Name: At_Far-red-induction_P Parameter: Tissue Value: Whole Plant
actttctagtctcacaaaaacaaggaaacaattaaaaccaaagtgacgaatattaatggcgttttcttcttgttttctcttagttcttctgcaaatcttctcagctttacttctttgtcttgctcaagatcagtcaggattcatcagtttggattgcggttcgcctagagaaactagctttcgtgagaaaacaacaaacattacttacatttccgatgcgaatttcatcaataccggtgttggtggaagcatcaaacaaggataccggactcagtttcagcaacaaacatggaacctacggagttttccacaaggcataagaaactgctataccttaaacctaaccataggcgacgaatatctaatcagagccaatttccttcacggcggttatgacgacaaaccctcaacgcaattcgagctctacctcggacctaatctttggtctacagttacaaccacgaacgagaccgaagcatcaatctttgagatgattcatatcttgaccactgatcgtttacaaatctgtctggtcaagacaggaaacgcaacgccttttatctccgctttagagcttcgtaaactcatgaacacaacttacttgactcgacaaggttccttgcagaccttcatcagagcagacgttggcgcgactgttaaccaaggctacaggtacggaatcgatgtgtttgatcgtgtctggactccgtataatttcggaaactggtcacagattagtaccaatcagtcagtgaatataaacaatgactatcaaccaccagagattgctatggtcacagcctctgttccaacagacccggacgcagctatgaacatttcgctagtcggggtggaacgtactgtgcagttctacgtttttatgcattttgcagagattcaagagctcaaatccaatgatacaagagagttcaacatcatgtacaataacaagcatatctatggaccttttagaccacttaatttcaccacgtcttccgtatttacacctaccgaagttgtcgccgatgcaaatgggcagtacatattttcgcttcaaagaacaggaaattcgactttacctcctctgctcaacgctatggagatttattcggttaacttgttgccgcaacaggaaactgatagaaaagaagttgatgcaatgatgaacatcaagtcggcttacggcgtgaacaagattgactgggaaggagatccttgcgtgccgctggattacaagtggtctggtgttaattgcacttatgttgacaatgagaccccaaagatcatttctttggatctgtctacaagtggcttgaccggagagatcttagaatttatatcagaccttaccagtttagaagttcttgacttgtctaacaattctttaactggttcagtcccagagtttctagctaatatggaaaccttaaaactcataaatctatctggaaatgagctaaatggctctatccctgcaactctccttgataaagaacgacgaggatctattacgttaagtatcgaaggaaataccgggctttgttcatctacatcatgcgctaccacgaaaaagaagaagaaaaacactgttattgcacctgttgcagcatcacttgtttcagtattcctcattggagctggaatcgttactttccttatcctcaagaggaagaagagaaccaagcttggtttgaatcctaattcaggaactggtacaacaccgttacattcgaggtctcaccacggttttgaacctcccgttatagcgaaaaaccggaaattgacttacattgatgttgttaagatcacaaacaactttgagagggttcttggtaggggtggttttggtgtggtttattacggcgtcttgaataatgaaccagttgcggtaaagatgctcactgagtccactgcacttggttacaaacagtttaaagccgaggttgagttgcttcttagagttcatcacaaagatctcacatgtcttgttggatattgtgaagaaggagataaaatgtctctaatctatgagttcatggcgaatggtgacttgaaagagcacttatcagggaagcgtggaccgtcgatactaacttgggaaggaaggcttcgtatagcagcggaatcagcgcaaggattggaatatttgcacaatggatgcaaaccgcaaatagttcaccgcgacattaagactactaacatcttattaaacgagaaatttcaagctaagcttgcggatttcgggctttcacggtcttttccacttggaactgaaactcacgtctcaaccatagttgctggaactcccggatatcttgatcctgaatactacagaactaattggttgaccgagaaaagtgatgtgttcagctttggtgttgttctactagagctagtaacaaaccaacccgtgatagacatgaaaagagaaaaatcacacatagctgaatgggtaggtttgatgctatcaagaggagacattaacagcattgtagatcctaagcttcaaggagactttgatccaaacacgatatggaaagttgttgagaccgcaatgacttgcctgaatccgtcttcttcacggagaccgacaatgactcaagtcgtaatggatctgaaagaatgtctgaacatggagatggcaagaaacatgggaagccgtatgacggattcaactaatgattcttcaattgagctgtccatgaatttcacaacagagcttaatccaggagctagatgaatcaaatcttatgtataatttgtttgaagctagaagtttcttcgtacacacgtttcttttgttctgtttgtgatgaacagagtgagtgttacttgtattctattccggttctttgttatataaaattttattttttac

SEQ ID NO: 107266 - protein, 894 aa, Arabidopsis thaliana
  peptide (1)..(894): Ceres Seq. ID no. 13621850
  misc_feature (7)..(482): Homolog of NCBI NO: 25405503 NR Description: probable protein kinase [imported] - Arabidopsis >gi|9802787|gb|AAF99856.1|AC015448_6 Putative protein kinase
  misc_feature (437)..(894): Homolog of NCBI NO: 25405503 NR Description: probable protein kinase [imported] - Arabidopsis >gi|9802787|gb|AAF99856.1|AC015448_6 Putative protein kinase
  misc_feature (9)..(894): Homolog of NCBI NO: 9294681 NR Description: receptor-like protein kinase [Arabidopsis
  misc_feature (7)..(894): Homolog of NCBI NO: 15218052 NR Description: leucine rich repeat protein kinase, putative
  misc_feature (9)..(540): Homolog of NCBI NO: 15232537 NR Description: leucine rich repeat protein kinase, putative
  misc_feature (566)..(894): Homolog of NCBI NO: 15232537 NR Description: leucine rich repeat protein kinase, putative
  misc_feature (10)..(894): Homolog of NCBI NO: 25387148 NR Description: probable protein kinase [imported] - Arabidopsis >gi|9802795|gb|AAF99864.1|AC015448_14 Putative protein kinase
  misc_feature (7)..(894): Homolog of NCBI NO: 25387121 NR Description: probable protein kinase [imported] - Arabidopsis >gi|9802790|gb|AAF99859.1|AC015448_9 Putative protein kinase
  misc_feature (157)..(894): Homolog of NCBI NO: 15218050 NR Description: leucine rich repeat protein kinase, putative
  misc_feature (10)..(150): Homolog of NCBI NO: 15218050 NR Description: leucine rich repeat protein kinase, putative
MAFSSCFLLVLLQIFSALLLCLAQDQSGFISLDCGSPRETSFREKTTNITYISDANFINTGVGGSIKQGYRTQFQQQTWNLRSFPQGIRNCYTLNLTIGDEYLIRANFLHGGYDDKPSTQFELYLGPNLWSTVTTTNETEASIFEMIHILTTDRLQICLVKTGNATPFISALELRKLMNTTYLTRQGSLQTFIRADVGATVNQGYRYGIDVFDRVWTPYNFGNWSQISTNQSVNINNDYQPPEIAMVTASVPTDPDAAMNISLVGVERTVQFYVFMHFAEIQELKSNDTREFNIMYNNKHIYGPFRPLNFTTSSVFTPTEVVADANGQYIFSLQRTGNSTLPPLLNAMEIYSVNLLPQQETDRKEVDAMMNIKSAYGVNKIDWEGDPCVPLDYKWSGVNCTYVDNETPKIISLDLSTSGLTGEILEFISDLTSLEVLDLSNNSLTGSVPEFLANMETLKLINLSGNELNGSIPATLLDKERRGSITLSIEGNTGLCSSTSCATTKKKKKNTVIAPVAASLVSVFLIGAGIVTFLILKRKKRTKLGLNPNSGTGTTPLHSRSHHGFEPPVIAKNRKLTYIDVVKITNNFERVLGRGGFGVVYYGVLNNEPVAVKMLTESTALGYKQFKAEVELLLRVHHKDLTCLVGYCEEGDKMSLIYEFMANGDLKEHLSGKRGPSILTWEGRLRIAAESAQGLEYLHNGCKPQIVHRDIKTTNILLNEKFQAKLADFGLSRSFPLGTETHVSTIVAGTPGYLDPEYYRTNWLTEKSDVFSFGVVLLELVTNQPVIDMKREKSHIAEWVGLMLSRGDINSIVDPKLQGDFDPNTIWKVVETAMTCLNPSSSRRPTMTQVVMDLKECLNMEMARNMGSRMTDSTNDSSIELSMNFTTELNPGAR

SEQ ID NO: 107267 - protein, 749 aa, Arabidopsis thaliana
  peptide (1)..(749): Ceres Seq. ID no. 13621851
  misc_feature (1)..(337): Homolog of NCBI NO: 25405503 NR Description: probable protein kinase [imported] - Arabidopsis >gi|9802787|gb|AAF99856.1|AC015448_6 Putative protein kinase
  misc_feature (292)..(749): Homolog of NCBI NO: 25405503 NR Description: probable protein kinase [imported] - Arabidopsis >gi|9802787|gb|AAF99856.1|AC015448_6 Putative protein kinase
  misc_feature (1)..(749): Homolog of NCBI NO: 9294681 NR Description: receptor-like protein kinase [Arabidopsis
  misc_feature (1)..(749): Homolog of NCBI NO: 15218052 NR Description: leucine rich repeat protein kinase, putative
  misc_feature (1)..(395): Homolog of NCBI NO: 15232537 NR Description: leucine rich repeat protein kinase, putative
  misc_feature (421)..(749): Homolog of NCBI NO: 15232537 NR Description: leucine rich repeat protein kinase, putative
  misc_feature (1)..(749): Homolog of NCBI NO: 25387148 NR Description: probable protein kinase [imported] - Arabidopsis >gi|9802795|gb|AAF99864.1|AC015448_14 Putative protein kinase
  misc_feature (1)..(749): Homolog of NCBI NO: 25387121 NR Description: probable protein kinase [imported] - Arabidopsis >gi|9802790|gb|AAF99859.1|AC015448_9 Putative protein kinase
  misc_feature (12)..(749): Homolog of NCBI NO: 15218050 NR Description: leucine rich repeat protein kinase, putative
  misc_feature (1)..(749): Homolog of NCBI NO: 25387123 NR Description: probable protein kinase [imported] - Arabidopsis >gi|9802784|gb|AAF99853.1|AC015448_3 Putative protein kinase
MIHILTTDRLQICLVKTGNATPFISALELRKLMNTTYLTRQGSLQTFIRADVGATVNQGYRYGIDVFDRVWTPYNFGNWSQISTNQSVNINNDYQPPEIAMVTASVPTDPDAAMNISLVGVERTVQFYVFMHFAEIQELKSNDTREFNIMYNNKHIYGPFRPLNFTTSSVFTPTEVVADANGQYIFSLQRTGNSTLPPLLNAMEIYSVNLLPQQETDRKEVDAMMNIKSAYGVNKIDWEGDPCVPLDYKWSGVNCTYVDNETPKIISLDLSTSGLTGEILEFISDLTSLEVLDLSNNSLTGSVPEFLANMETLKLINLSGNELNGSIPATLLDKERRGSITLSIEGNTGLCSSTSCATTKKKKKNTVIAPVAASLVSVFLIGAGIVTFLILKRKKRTKLGLNPNSGTGTTPLHSRSHHGFEPPVIAKNRKLTYIDVVKITNNFERVLGRGGFGVVYYGVLNNEPVAVKMLTESTALGYKQFKAEVELLLRVHHKDLTCLVGYCEEGDKMSLIYEFMANGDLKEHLSGKRGPSILTWEGRLRIAAESAQGLEYLHNGCKPQIVHRDIKTTNILLNEKFQAKLADFGLSRSFPLGTETHVSTIVAGTPGYLDPEYYRTNWLTEKSDVFSFGVVLLELVTNQPVIDMKREKSHIAEWVGLMLSRGDINSIVDPKLQGDFDPNTIWKVVETAMTCLNPSSSRRPTMTQVVMDLKECLNMEMARNMGSRMTDSTNDSSIELSMNFTTELNPGAR

SEQ ID NO: 107268 - protein, 717 aa, Arabidopsis thaliana
  peptide (1)..(717): Ceres Seq. ID no. 13621852
  misc_feature (1)..(305): Homolog of NCBI NO: 25405503 NR Description: probable protein kinase [imported] - Arabidopsis >gi|9802787|gb|AAF99856.1|AC015448_6 Putative protein kinase
  misc_feature (260)..(717): Homolog of NCBI NO: 25405503 NR Description: probable protein kinase [imported] - Arabidopsis >gi|9802787|gb|AAF99856.1|AC015448_6 Putative protein kinase
  misc_feature (1)..(717): Homolog of NCBI NO: 9294681 NR Description: receptor-like protein kinase [Arabidopsis
  misc_feature (1)..(717): Homolog of NCBI NO: 15218052 NR Description: leucine rich repeat protein kinase, putative
  misc_feature (1)..(363): Homolog of NCBI NO: 15232537 NR Description: leucine rich repeat protein kinase, putative
  misc_feature (389)..(717): Homolog of NCBI NO: 15232537 NR Description: leucine rich repeat protein kinase, putative
  misc_feature (1)..(717): Homolog of NCBI NO: 25387148 NR Description: probable protein kinase [imported] - Arabidopsis >gi|9802795|gb|AAF99864.1|AC015448_14 Putative protein kinase
  misc_feature (1)..(717): Homolog of NCBI NO: 25387121 NR Description: probable protein kinase [imported] - Arabidopsis >gi|9802790|gb|AAF99859.1|AC015448_9 Putative protein kinase
  misc_feature (1)..(717): Homolog of NCBI NO: 15218050 NR Description: leucine rich repeat protein kinase, putative
  misc_feature (1)..(717): Homolog of NCBI NO: 25387123 NR Description: probable protein kinase [imported] - Arabidopsis >gi|9802784|gb|AAF99853.1|AC015448_3 Putative protein kinase
MNTTYLTRQGSLQTFIRADVGATVNQGYRYGIDVFDRVWTPYNFGNWSQISTNQSVNINNDYQPPEIAMVTASVPTDPDAAMNISLVGVERTVQFYVFMHFAEIQELKSNDTREFNIMYNNKHIYGPFRPLNFTTSSVFTPTEVVADANGQYIFSLQRTGNSTLPPLLNAMEIYSVNLLPQQETDRKEVDAMMNIKSAYGVNKIDWEGDPCVPLDYKWSGVNCTYVDNETPKIISLDLSTSGLTGEILEFISDLTSLEVLDLSNNSLTGSVPEFLANMETLKLINLSGNELNGSIPATLLDKERRGSITLSIEGNTGLCSSTSCATTKKKKKNTVIAPVAASLVSVFLIGAGIVTFLILKRKKRTKLGLNPNSGTGTTPLHSRSHHGFEPPVIAKNRKLTYIDVVKITNNFERVLGRGGFGVVYYGVLNNEPVAVKMLTESTALGYKQFKAEVELLLRVHHKDLTCLVGYCEEGDKMSLIYEFMANGDLKEHLSGKRGPSILTWEGRLRIAAESAQGLEYLHNGCKPQIVHRDIKTTNILLNEKFQAKLADFGLSRSFPLGTETHVSTIVAGTPGYLDPEYYRTNWLTEKSDVFSFGVVLLELVTNQPVIDMKREKSHIAEWVGLMLSRGDINSIVDPKLQGDFDPNTIWKVVETAMTCLNPSSSRRPTMTQVVMDLKECLNMEMARNMGSRMTDSTNDSSIELSMNFTTELNPGAR

SEQ ID NO: 107269 - DNA, 3528 bp, Arabidopsis thaliana
  misc_feature (1)..(3528): Ceres Seq. ID no. 13621857
  misc_feature: MA Experiment ID: 20000315 Result: Down-regulated in Transcription
  misc_feature: MA Experiment 20000315 PARAMETER Experiment Name: At_14day_Shoots-Roots_Sub_P Parameter: Age (day) Value: 14
  misc_feature: MA Experiment 20000315 PARAMETER Experiment Name: At_14day_Shoots-Roots_Sub_P Parameter: Organism Value: A. thaliana
  misc_feature: MA Experiment 20000315 PARAMETER Experiment Name: At_14day_Shoots-Roots_Sub_P Parameter: Plant Line Value: WS
  misc_feature: MA Experiment 20000315 PARAMETER Experiment Name: At_14day_Shoots-Roots_Sub_P Parameter: Tissue Value: Shoots vs. Whole Plant
  misc_feature: MA Experiment ID: 20000328 Result: Down-regulated in Transcription
  misc_feature: MA Experiment 20000328 PARAMETER Experiment Name: At_42deg_Heat_Sub_P Parameter: Age (day) Value: 14
  misc_feature: MA Experiment 20000328 PARAMETER Experiment Name: At_42deg_Heat_Sub_P Parameter: Organism Value: A. thaliana
  misc_feature: MA Experiment 20000328 PARAMETER Experiment Name: At_42deg_Heat_Sub_P Parameter: Plant Line Value: WS
  misc_feature: MA Experiment 20000328 PARAMETER Experiment Name: At_42deg_Heat_Sub_P Parameter: Temperature (deg C) Value: 42 vs. 22
  misc_feature: MA Experiment 20000328 PARAMETER Experiment Name: At_42deg_Heat_Sub_P Parameter: Timepoint (hr) Value: 6
  misc_feature: MA Experiment 20000328 PARAMETER Experiment Name: At_42deg_Heat_Sub_P Parameter: Tissue Value: Aerial
aaattcgccattaaaacccttttttctctctctgtcggggactctgcaaatcgtatggaaaaaaaagttatgagctacgaaagcttcattttcatttctcttcatatagcgtaaagtctgagtctttcttcccgatgttatgacttaatcggtgtttatgaagctgtagttatggagctgaagtgggtttcttgtcggaaacaatctctgttcttgatctcttgtctggctctgctttgtctcgcgtccttggatactatatcatgtgaatcaactcagaatgctactgacttcaagaaacgatctcagacagtttcttgccctcctgattggatcattggaccgaaccaaaccaagtgctatgcttactttaaaaactctacttcatgggagaagtcagaaatgttctgtagaacttatggtggtcacttagcatcgcttgcatcgagcaaagaactcagctttgttcaaaaactatgcaatggaaatgttagcagttgttggattggaggacgaagtatgaattcttctacctcaggtttccgttggagctggtctgatcctaagactcctcaatggaaccaatccatgtttcctaaagttccaattcgcacccgctgtggcaatggcaacggcagttcatcgtgtcgtgctaatatatgtatagccgtgacaaatggttcatcatcaatattcggtgaaagatgtaatgcgtctcatgcttttgtttgcgctgttgattctgatatcaaatgtcgcaattgtcacaaatatctagttatcctcgctgttgtcagcggtttgattctcttcacgacattcgccattatattatggctccttgtctataagcgaagcaagaaacgccgaaaatcacgaaaagtatctaatccagcttcatcatcatcagtagttcctccttcatggaagatcttcactagtgaagaactgagatcaatgacgaagaacttcagtgaagcaaaccgtctagctggggacgcgaaaaccggtggaacctatagcggtggtttatcagacgggactaaagtggcggttaagagattgaaaaggtctagttttcagaggaagaaagagttctactccgagattagaagagcagctaaactttatcacccgaatgtagttgctataaaaggttgttgctatgatcatggagaacgtttcattgtttatgagttcatagctagtggacctctcgatagatggctacaccatgtgcctagaggtggtagaagcttggactggaacatgagattgaacatcgccacaactcttgctcaaggaatcgcgtttctacacgacaaggtcaagccacaagtggtgcaccgcgacatccgagctagcaacgtgctacttgatgaggagtttggagctcatttaatgggtgttggtctctcaaaattcgttccttgggaagtaatgcaagagagaaccgtaatggcgggtggaacctacggttacctcgcacccgaatacgtttacagaaacgagctaaccacgaagagcgatgtctacagtttcggagtccttttgcttgagattgtgagcggtcgtagaccaactcaggctgttaattcttcagttgggtggcagagcatattcgaatgggcaacaccattggttcaagctaaccgttggttagagattcttgatccggttattacatgcggtttaccggaagcatgtgtggttcagaaagttgttgacttggtttattcttgtactcagaatgtgccatcaatgcgtccaaggatgtcacatgtggttcatcagcttcagcaattggtccaacctttagaggttaagtagttaattaattaacataagtcttaataaaacactttttgtttgactgtataatcgaatcttaggagacttgtcacattacttttcatggagaaagtaaagaaatgttagagccaaaaccgatgtcgtattaaagaaagttcttggaagtttataaaggattcgagctaaagtccttgttaactaagtagttctggataagttcaagcttgttctctaagtttcacatgtttaatattaataaaaaaaactaagcgtcagagaacttataaagaccatatccaaagcatttcattagtcttaataaatcacttaatgtttgactgtataatagaatcttaggagacatttcattgtccaattacttatcatggaaaatgtaaagaaatgttagagcctaaaacgatgtcttattatagaaagttcttgttaactaagtagttctctataattttaaacttgttctctaagtttcacatttttagtatgtaatacgcttcagataatataaagactatatccaaagcattccaaggaaagtcttccatcttttgtatttacatatatctcttactttctcttaagaggaaacttcttggtttgttactttgcttcatagcttttgctatattctgattctgagtattacttcaactccattcactaaaccaccgttagattcttctgtgttttcatataaagctttgatctttttgtttactatcttcttgcgtctagaaatcggaaacaagatgtttcttaggtgcttcaaacccaagttctacaagaaaaggtgttagtcttttatcactctgtttttgacttttaagttttgaatgtttgtctatgagaaatttaactaatcattgttcttggtgaaatgcagcaaatctacaaccagctacatgaagattaggattgatatagttaggagaaaaaggattgcaatggttagaaattataaaacagatattgtgaatttcctcaagaatggccaagattctgaagcttatagaagagtaattaacacttcttctttctctcattatgtttctaagctttgttaagtttttttttttaaatgtgtcaatacttgttactgcaggcagaacttttactcgaagagctgaggataatatcgtgctacgatctcatcgagcgattctgcgattgtatctctgaaaatctctcactaatgctgaagaaaaggttttcacttttacttctaatctctagatttcactccagaaggtgtaacaatttactaacatttttgtttcttttacttttagggaatgtcctgaagaatgcagagaagctgtttcctctttgatatatgcaacggcatgggttcctgatgttcctgaacttaaggatcttagagccgtgtttaccaagcaataacgaagtttccacaataagagagaacgagagaatgtcgtcgtttcaaagacctaacctccttgattatgatgatgtggtggctcgtcttgcagctctgcgccggagataagaaagtagtaattataagggtttcttaatttctcgtcgtagttaagtttatattggtaaaattacttttttactaattagaattttcgtttgagaatatgtaattatctttatgactttgtaattagtccagtctgtagttgaatcttttcgcagcaaaaaggttgatagttcaatggatgaactttg

SEQ ID NO: 107270 - protein, 552 aa, Arabidopsis thaliana
  peptide (1)..(552): Ceres Seq. ID no. 13621858
  misc_feature (69)..(189): Pfam Name: Lectin C-type domain Pfam Description: Lectin C-type domain
  misc_feature (1)..(552): Homolog of NCBI NO: 15218209 NR Description: protein kinase family [Arabidopsis thaliana]
  misc_feature (179)..(545): Homolog of NCBI NO: 34894050 NR Description: putative receptor ser/thr protein kinase [Oryza
  misc_feature (200)..(538): Homolog of NCBI NO: 28812097 NR Description: P0458H05.21 [Oryza sativa (japonica
  misc_feature (220)..(551): Homolog of NCBI NO: 9294048 NR Description: protein kinase-like protein [Arabidopsis thaliana]
  misc_feature (253)..(545): Homolog of NCBI NO: 34894174 NR Description: putative protein kinase [Oryza sativa (japonica group)] >gi|13486635|dbj|BAB39873.1| putative protein kinase
  misc_feature (253)..(544): Homolog of NCBI NO: 5923666 NR Description: putative receptor ser/thr protein kinase
  misc_feature (253)..(544): Homolog of NCBI NO: 18398327 NR Description: protein kinase family [Arabidopsis thaliana]
  misc_feature (233)..(545): Homolog of NCBI NO: 34395193 NR Description: putative protein serine/threonine kinase [Oryza
  misc_feature (210)..(551): Homolog of NCBI NO: 30696629 NR Description: protein kinase, putative [Arabidopsis thaliana]
  misc_feature (252)..(543): Homolog of NCBI NO: 15234142 NR Description: protein kinase family [Arabidopsis thaliana]
MELKWVSCRKQSLFLISCLALLCLASLDTISCESTQNATDFKKRSQTVSCPPDWIIGPNQTKCYAYFKNSTSWEKSEMFCRTYGGHLASLASSKELSFVQKLCNGNVSSCWIGGRSMNSSTSGFRWSWSDPKTPQWNQSMFPKVPIRTRCGNGNGSSSCRANICIAVTNGSSSIFGERCNASHAFVCAVDSDIKCRNCHKYLVILAVVSGLILFTTFAIILWLLVYKRSKKRRKSRKVSNPASSSSVVPPSWKIFTSEELRSMTKNFSEANRLAGDAKTGGTYSGGLSDGTKVAVKRLKRSSFQRKKEFYSEIRRAAKLYHPNVVAIKGCCYDHGERFIVYEFIASGPLDRWLHHVPRGGRSLDWNMRLNIATTLAQGIAFLHDKVKPQVVHRDIRASNVLLDEEFGAHLMGVGLSKFVPWEVMQERTVMAGGTYGYLAPEYVYRNELTTKSDVYSFGVLLLEIVSGRRPTQAVNSSVGWQSIFEWATPLVQANRWLEILDPVITCGLPEACVVQKVVDLVYSCTQNVPSMRPRMSHVVHQLQQLVQPLEVK

SEQ ID NO: 107271 - protein, 475 aa, Arabidopsis thaliana
  peptide (1)..(475): Ceres Seq. ID no. 13621859
  misc_feature (1)..(112): Pfam Name: Lectin C-type domain Pfam Description: Lectin C-type domain
  misc_feature (1)..(475): Homolog of NCBI NO: 15218209 NR Description: protein kinase family [Arabidopsis thaliana]
  misc_feature (102)..(468): Homolog of NCBI NO: 34894050 NR Description: putative receptor ser/thr protein kinase [Oryza
  misc_feature (123)..(461): Homolog of NCBI NO: 28812097 NR Description: P0458H05.21 [Oryza sativa (japonica
  misc_feature (143)..(474): Homolog of NCBI NO: 9294048 NR Description: protein kinase-like protein [Arabidopsis thaliana]
  misc_feature (176)..(468): Homolog of NCBI NO: 34894174 NR Description: putative protein kinase [Oryza sativa (japonica group)] >gi|13486635|dbj|BAB39873.1| putative protein kinase
  misc_feature (176)..(467): Homolog of NCBI NO: 5923666 NR Description: putative receptor ser/thr protein kinase
  misc_feature (176)..(467): Homolog of NCBI NO: 18398327 NR Description: protein kinase family [Arabidopsis thaliana]
  misc_feature (156)..(468): Homolog of NCBI NO: 34395193 NR Description: putative protein serine/threonine kinase [Oryza
  misc_feature (133)..(474): Homolog of NCBI NO: 30696629 NR Description: protein kinase, putative [Arabidopsis thaliana]
  misc_feature (175)..(466): Homolog of NCBI NO: 15234142 NR Description: protein kinase family [Arabidopsis thaliana]
MFCRTYGGHLASLASSKELSFVQKLCNGNVSSCWIGGRSMNSSTSGFRWSWSDPKTPQWNQSMFPKVPIRTRCGNGNGSSSCRANICIAVTNGSSSIFGERCNASHAFVCAVDSDIKCRNCHKYLVILAVVSGLILFTTFAIILWLLVYKRSKKRRKSRKVSNPASSSSVVPPSWKIFTSEELRSMTKNFSEANRLAGDAKTGGTYSGGLSDGTKVAVKRLKRSSFQRKKEFYSEIRRAAKLYHPNVVAIKGCCYDHGERFIVYEFIASGPLDRWLHHVPRGGRSLDWNMRLNIATTLAQGIAFLHDKVKPQVVHRDIRASNVLLDEEFGAHLMGVGLSKFVPWEVMQERTVMAGGTYGYLAPEYVYRNELTTKSDVYSFGVLLLEIVSGRRPTQAVNSSVGWQSIFEWATPLVQANRWLEILDPVITCGLPEACVVQKVVDLVYSCTQNVPSMRPRMSHVVHQLQQLVQPLEVK

SEQ ID NO: 107272 - protein, 436 aa, Arabidopsis thaliana; identical to SEQ ID NO: 85988
  peptide (1)..(436): Ceres Seq. ID no. 13621860
  misc_feature (1)..(73): Pfam Name: Lectin C-type domain Pfam Description: Lectin C-type domain
  misc_feature (1)..(436): Homolog of NCBI NO: 15218209 NR Description: protein kinase family [Arabidopsis thaliana]
  misc_feature (63)..(429): Homolog of NCBI NO: 34894050 NR Description: putative receptor ser/thr protein kinase [Oryza
  misc_feature (84)..(422): Homolog of NCBI NO: 28812097 NR Description: P0458H05.21 [Oryza sativa (japonica
  misc_feature (104)..(435): Homolog of NCBI NO: 9294048 NR Description: protein kinase-like protein [Arabidopsis thaliana]
  misc_feature (137)..(429): Homolog of NCBI NO: 34894174 NR Description: putative protein kinase [Oryza sativa (japonica group)] >gi|13486635|dbj|BAB39873.1| putative protein kinase
  misc_feature (137)..(428): Homolog of NCBI NO: 5923666 NR Description: putative receptor ser/thr protein kinase
  misc_feature (137)..(428): Homolog of NCBI NO: 18398327 NR Description: protein kinase family [Arabidopsis thaliana]
  misc_feature (117)..(429): Homolog of NCBI NO: 34395193 NR Description: putative protein serine/threonine kinase [Oryza
  misc_feature (94)..(435): Homolog of NCBI NO: 30696629 NR Description: protein kinase, putative [Arabidopsis thaliana]
  misc_feature (136)..(427): Homolog of NCBI NO: 15234142 NR Description: protein kinase family [Arabidopsis thaliana]

SEQ ID NO: 107273 - DNA, 3224 bp, Arabidopsis thaliana
  misc_feature (1)..(3224): Ceres Seq. ID no. 13621869
  misc_feature: MA Experiment ID: 20000171 Result: Down-regulated in Transcription
  misc_feature: MA Experiment 20000171 PARAMETER Experiment Name: At_42deg_Heat_P Parameter: Age (day) Value: 14
  misc_feature: MA Experiment 20000171 PARAMETER Experiment Name: At_42deg_Heat_P Parameter: Organism Value: A. thaliana
  misc_feature: MA Experiment 20000171 PARAMETER Experiment Name: At_42deg_Heat_P Parameter: Plant Line Value: WS
  misc_feature: MA Experiment 20000171 PARAMETER Experiment Name: At_42deg_Heat_P Parameter: Temperature (deg C) Value: 42 vs. 22
  misc_feature: MA Experiment 20000171 PARAMETER Experiment Name: At_42deg_Heat_P Parameter: Timepoint (hr) Value: 1
  misc_feature: MA Experiment 20000171 PARAMETER Experiment Name: At_42deg_Heat_P Parameter: Tissue Value: Aerial
  misc_feature: MA Experiment ID: 20000173 Result: Down-regulated in Transcription
  misc_feature: MA Experiment 20000173 PARAMETER Experiment Name: At_42deg_Heat_P Parameter: Age (day) Value: 14
  misc_feature: MA Experiment 20000173 PARAMETER Experiment Name: At_42deg_Heat_P Parameter: Organism Value: A. thaliana
  misc_feature: MA Experiment 20000173 PARAMETER Experiment Name: At_42deg_Heat_P Parameter: Plant Line Value: WS
  misc_feature: MA Experiment 20000173 PARAMETER Experiment Name: At_42deg_Heat_P Parameter: Temperature (deg C) Value: 42 vs. 22
  misc_feature: MA Experiment 20000173 PARAMETER Experiment Name: At_42deg_Heat_P Parameter: Timepoint (hr) Value: 6
  misc_feature: MA Experiment 20000173 PARAMETER Experiment Name: At_42deg_Heat_P Parameter: Tissue Value: Aerial
  misc_feature: MA Experiment ID: 20000180 Result: Up-regulated in Transcription
  misc_feature: MA Experiment 20000180 PARAMETER Experiment Name: At_Germinating_Seeds_P Parameter: Age (hr) Value: 24 vs. 0
  misc_feature: MA Experiment 20000180 PARAMETER Experiment Name: At_Germinating_Seeds_P Parameter: Tissue Value: Germinating Seeds
  misc_feature: MA Experiment ID: 20000184 Result: Down-regulated in Transcription
  misc_feature: MA Experiment 20000184 PARAMETER Experiment Name: At_Shoots__P Parameter: Age (day) Value: 7
  misc_feature: MA Experiment 20000184 PARAMETER Experiment Name: At_Shoots__P Parameter: Tissue Value: Shoots vs. Whole Plant
  misc_feature: MA Experiment ID: 20000213 Result: Up-regulated in Transcription
  misc_feature: MA Experiment 20000213 PARAMETER Experiment Name: At_4deg_Cold_P Parameter: Timepoint (hr) Value: 2
  misc_feature: MA Experiment ID: 20000227 Result: Down-regulated in Transcription
  misc_feature: MA Experiment 20000227 PARAMETER Experiment Name: At_Root-Tips-vs-Tops_P Parameter: Tissue Value: Root Tips vs. Root Tops
  misc_feature: MA Experiment ID: 20000235 Result: Down-regulated in Transcription
  misc_feature: MA Experiment 20000235 PARAMETER Experiment Name: At_Siliques_P Parameter: Age (day) Value: 21
  misc_feature: MA Experiment 20000235 PARAMETER Experiment Name: At_Siliques_P Parameter: Organism Value: A. thaliana
  misc_feature: MA Experiment 20000235 PARAMETER Experiment Name: At_Siliques_P Parameter: Plant Line Value: WS
  misc_feature: MA Experiment 20000235 PARAMETER Experiment Name: At_Siliques_P Parameter: Tissue Value: 5-10mm Siliques vs. Whole Plant
  misc_feature: MA Experiment ID: 20000268 Result: Down-regulated in Transcription
  misc_feature: MA Experiment 20000268 PARAMETER Experiment Name: At_100mM_NaCl__P Parameter: Age (day) Value: 14
  misc_feature: MA Experiment 20000268 PARAMETER Experiment Name: At_100mM_NaCl__P Parameter: Organism Value: A. thaliana
  misc_feature: MA Experiment 20000268 PARAMETER Experiment Name: At_100mM_NaCl__P Parameter: Plant Line Value: WS
  misc_feature: MA Experiment 20000268 PARAMETER Experiment Name: At_100mM_NaCl__P Parameter: Timepoint (hr) Value: 6
  misc_feature: MA Experiment 20000268 PARAMETER Experiment Name: At_100mM_NaCl__P Parameter: Tissue Value: Whole Plant
  misc_feature: MA Experiment 20000268 PARAMETER Experiment Name: At_100mM_NaCl__P Parameter: Treatment Value: 100mM NaCl vs. No Treatment
  misc_feature: MA Experiment ID: 20000436 Result: Down-regulated in Transcription
  misc_feature: MA Experiment 20000436 PARAMETER Experiment Name: At_Drought_P Parameter: Age (day) Value: 7
  misc_feature: MA Experiment 20000436 PARAMETER Experiment Name: At_Drought_P Parameter: Organism Value: A. thaliana
  misc_feature: MA Experiment 20000436 PARAMETER Experiment Name: At_Drought_P Parameter: Plant Line Value: WS
  misc_feature: MA Experiment 20000436 PARAMETER Experiment Name: At_Drought_P Parameter: Timepoint (hr) Value: 12
  misc_feature: MA Experiment 20000436 PARAMETER Experiment Name: At_Drought_P Parameter: Tissue Value: Whole Plant
  misc_feature: MA Experiment 20000436 PARAMETER Experiment Name: At_Drought_P Parameter: Treatment Value: Drought vs. No Drought
  misc_feature: MA Experiment ID: 20000437 Result: Down-regulated in Transcription
  misc_feature: MA Experiment 20000437 PARAMETER Experiment Name: At_Drought_P Parameter: Age (day) Value: 8
  misc_feature: MA Experiment 20000437 PARAMETER Experiment Name: At_Drought_P Parameter: Organism Value: A. thaliana
  misc_feature: MA Experiment 20000437 PARAMETER Experiment Name: At_Drought_P Parameter: Plant Line Value: WS
  misc_feature: MA Experiment 20000437 PARAMETER Experiment Name: At_Drought_P Parameter: Timepoint (hr) Value: 24
  misc_feature: MA Experiment 20000437 PARAMETER Experiment Name: At_Drought_P Parameter: Tissue Value: Whole Plant
  misc_feature: MA Experiment 20000437 PARAMETER Experiment Name: At_Drought_P Parameter: Treatment Value: Drought vs. No Drought
  misc_feature: MA Experiment ID: 20001247 Result: Up-regulated in Transcription
  misc_feature: MA Experiment 20001247 PARAMETER Experiment Name: At_Far-red-induction_P Parameter: Age (day) Value: 7
  misc_feature: MA Experiment 20001247 PARAMETER Experiment Name: At_Far-red-induction_P Parameter: Light Value: Far-red vs. White
  misc_feature: MA Experiment 20001247 PARAMETER Experiment Name: At_Far-red-induction_P Parameter: Organism Value: A. thaliana
  misc_feature: MA Experiment 20001247 PARAMETER Experiment Name: At_Far-red-induction_P Parameter: Plant Line Value: Columbia
  misc_feature: MA Experiment 20001247 PARAMETER Experiment Name: At_Far-red-induction_P Parameter: Timepoint (hr) Value: 1
  misc_feature: MA Experiment 20001247 PARAMETER Experiment Name: At_Far-red-induction_P Parameter: Tissue Value: Whole Plant
  misc_feature: MA Experiment ID: 20001555 Result: Down-regulated in Transcription
  misc_feature: MA Experiment 20001555 PARAMETER Experiment Name: At_Drought_Soil_Dry_P Parameter: Age (day) Value: 24
  misc_feature: MA Experiment 20001555 PARAMETER Experiment Name: At_Drought_Soil_Dry_P Parameter: Organism Value: A. thaliana
  misc_feature: MA Experiment 20001555 PARAMETER Experiment Name: At_Drought_Soil_Dry_P Parameter: Plant Line Value: WS
  misc_feature: MA Experiment 20001555 PARAMETER Experiment Name: At_Drought_Soil_Dry_P Parameter: Post Timepoint (hr) Value: None
  misc_feature: MA Experiment 20001555 PARAMETER Experiment Name: At_Drought_Soil_Dry_P Parameter: Post-Treatment Value: None
  misc_feature: MA Experiment 20001555 PARAMETER Experiment Name: At_Drought_Soil_Dry_P Parameter: Timepoint (day) Value: 10
  misc_feature: MA Experiment 20001555 PARAMETER Experiment Name: At_Drought_Soil_Dry_P Parameter: Treatment Value: Drought vs. No Drought
  misc_feature: MA Experiment ID: 20001904 Result: Down-regulated in Transcription
  misc_feature: MA Experiment 20001904 PARAMETER Experiment Name: At_Drought_Reproduction_P Parameter: Age (day) Value: 37
  misc_feature: MA Experiment 20001904 PARAMETER Experiment Name: At_Drought_Reproduction_P Parameter: Organism Value: A. thaliana
  misc_feature: MA Experiment 20001904 PARAMETER Experiment Name: At_Drought_Reproduction_P Parameter: Plant Line Value: WS
  misc_feature: MA Experiment 20001904 PARAMETER Experiment Name: At_Drought_Reproduction_P Parameter: Timepoint (day) Value: 7
  misc_feature: MA Experiment 20001904 PARAMETER Experiment Name: At_Drought_Reproduction_P Parameter: Tissue Value: Rosettes
  misc_feature: MA Experiment 20001904 PARAMETER Experiment Name: At_Drought_Reproduction_P Parameter: Treatment Value: Drought vs. No Drought
  misc_feature: MA Experiment ID: 20001910 Result: Down-regulated in Transcription
  misc_feature: MA Experiment 20001910 PARAMETER Experiment Name: At_Drought_Reproduction_P Parameter: Age (day) Value: 37
  misc_feature: MA Experiment 20001910 PARAMETER Experiment Name: At_Drought_Reproduction_P Parameter: Organism Value: A. thaliana
  misc_feature: MA Experiment 20001910 PARAMETER Experiment Name: At_Drought_Reproduction_P Parameter: Plant Line Value: WS
  misc_feature: MA Experiment 20001910 PARAMETER Experiment Name: At_Drought_Reproduction_P Parameter: Timepoint (day) Value: 7
  misc_feature: MA Experiment 20001910 PARAMETER Experiment Name: At_Drought_Reproduction_P Parameter: Tissue Value: Flowers
  misc_feature: MA Experiment 20001910 PARAMETER Experiment Name: At_Drought_Reproduction_P Parameter: Treatment Value: Drought vs. No Drought
gtttctttcttcttccattttctctctcaatctctctccctctctcaatcttctggtctcgtctcgtcgtctcttggagaattgagaattgggaatctgttttggttttgcccgagaaaaaaacgagagagatgggtttcatcttctcgaccgagaaagttgtgtatgttcttcttctcatcttcgtttgcttggaaaatttcggatcaaatgctcaacttttgcctgaagatgaagttcaaacattgcgaacgatctttagaaagcttcaaaaccaaacagtgaacatcgaaagaacttcttgttcggaccaaaactggaactttgttgtcgagtcagcctccaactcaccaaccagtaacattacctgcgactgtactttcaacgccagctcagtctgtcgtgtcacaaacatacagcttaaaagtttcagcttgcccggaatattcccgcctgagttcggaaacctcacgcgtcttcgagagatagatctttcgcggaactttctcaatggaacaatacctacgacattgtctcaaattccacttgaaatcttgtctgtaatcggaaaccgtctctcaggaccatttcctcctcaacttggagatattactacacttactgatgtgaatttggaaactaatttattcacaggaccacttcctcgaaacctagggaacttaagaagcttgaaagagttacttctctctgcaaacaacttcacgggtcaaatccctgagtccttaagtaatctcaagaatttgactgaatttcggattgatggaaactctctatctgggaaaatacctgattttattggaaactggactctgctggagaggctagaccttcaaggcacatcaatggaaggtccaattccaccttcaatatcaaacttgacgaacttgactgaattgaggataaccgatttgcgtggacaagcggccttttcttttccggacctgcgaaatctaatgaaaatgaaacgattgggacctatcccggaatacattggttccatgagtgagctgaagacactagatttaagctcaaacatgctaaccggtgtaattcctgacacatttcggaatctcgatgcatttaactttatgtttttgaataataactcattgactggtccagttcctcagttcatcatcaacagtaaagaaaacctagatttatctgacaacaatttcactcagccacctactttaagctgtaatcagcttgatgtgaacttgatctccagctacccttcagtaaccgataactctgttcaatggtgcttgagagagggtcttccatgtccagaagatgctaaacagtcttccctgttcatcaactgtggaggaagcagactcaagattggaaaagacacttatacagatgacttgaacagtagaggacaatcaacattctcttctgtctctgaaagatggggatacagtagttctggagtttggttaggcaaggaggatgctggctacttagcaacagacagatttaacttgatcaatggatcaactccagagtattacaaaacagcccgtctctctccacagtcactcaagtactatggactatgcttgagaagaggaagttacaaactgcagctacattttgcagagataatgttctcaaatgaccagacttttaatagcttagggcggcgaatattcgacatttatgtccaagggaacttgttggagagggactttaacatagcagagagagcaggtggagttggtaaaccgttcataaggcaaattgatggagttcaagtgaatggaagtacgttagagattcatttgcagtggacagggaaaggcacaaacgtaataccaacaagaggtgtttacgggcctctcatatctgccataaccattacaccaaatttcaaggttgataccggaaaaccattgtccaatggagcagttgcaggcattgtaatcgcagcgtgtgcggttttcgggttgctggtacttgtaatcttgaggcttacaggttacttaggtggaaaagaagtagatgagaatgaagagcttcggggacttgatttgcagacaggatcgttcacattgaaacaaataaaacgtgctactaataactttgatccagaaaacaagattggtgaaggaggatttggaccggtttataagggtgttctcgctgatgggatgaccatagcggtgaagcagctttcatcaaaatctaagcaaggaaaccgagaatttgtgactgagatcggtatgatatctgcgctgcaacaccctaatcttgtgaaactttatggttgttgcatcgaagggaaagagctcttgcttgtgtatgagtacttagagaacaacagtctcgctcgcgcactctttggcacagagaaacagaggcttcacttggattggtcaacaaggaacaagatttgcatagggattgcgaaaggattggcctatctacacgaggaatcaaggctgaagattgttcatagagacataaaagcgacaaatgtgcttcttgatctgtctctaaacgctaagatctctgattttggtctagctaaactcaacgatgacgagaatacacatatcagcacaaggattgcaggaacaataggttacatggctcctgagtatgcaatgagaggttacttgacagacaaggcagatgtttacagctttggtgttgtctgtttagagattgttagtggaaagagcaacacaaattacagaccaaaggaagagtttgtttaccttctggattgggcatatgtcttgcaagaacaaggtagtcttctagaactcgttgatccggatctcggcacaagcttttcgaagaaagaagcgatgaggatgttgaacatagcattactctgcacgaacccatctccaacattgagaccaccaatgtcatctgttgtaagtatgttagaaggaaaaatcaaagtccaaccaccattggtgaaacgtgaagcagatccaagtggttcagcagcaatgaggtttaaggccttagagcttttgtcacaagacagtgagtcacaagtctcgacatatgcaagaaacagagagcaagacataagctcctcatcgatggacggtccttgggtagattcttccttctctgagcctgggaaagatgttagcctgcaacagcaagaagaaggacgttcatcatcttcgtcgaggaaacttttagatgatcttaccgatgtgaagattgagtaa

SEQ ID NO: 107274 - protein, 1073 aa, Arabidopsis thaliana
  peptide (1)..(1073): Ceres Seq. ID no. 13621870
  misc_feature (35)..(1032): Homolog of NCBI NO: 25403092 NR Description: Receptor-like serine/threonine kinase (RFK1)
  misc_feature (35)..(1032): Homolog of NCBI NO: 2465923 NR Description: receptor-like serine/threonine kinase
  misc_feature (35)..(1032): Homolog of NCBI NO: 30690881 NR Description: leucine-rich repeat transmembrane protein kinase,
  misc_feature (79)..(1032): Homolog of NCBI NO: 20259415 NR Description: putative receptor serine/threonine kinase thaliana] >gi|23296778|gb|AAN13167.1| putative receptor
  misc_feature (79)..(1032): Homolog of NCBI NO: 30690877 NR Description: leucine-rich repeat transmembrane protein kinase,
  misc_feature (156)..(1032): Homolog of NCBI NO: 12321408 NR Description: receptor-like serine/threonine kinase, putative,
  misc_feature (163)..(1023): Homolog of NCBI NO: 15220901 NR Description: leucine-rich repeat transmembrane protein kinase,
  misc_feature (145)..(1041): Homolog of NCBI NO: 6056376 NR Description: Similar to serine/threonine kinases [Arabidopsis
  misc_feature (153)..(1016): Homolog of NCBI NO: 9972372 NR Description: Putative receptor-like serine/threonine kinase -
  misc_feature (169)..(1001): Homolog of NCBI NO: 15220545 NR Description: receptor-related serine/threonine kinase
FFLLPFSLSISLPLSIFWSRLVVSWRIENWESVLVLPEKKTREMGFIFSTEKVVYVLLLIFVCLENFGSNAQLLPEDEVQTLRTIFRKLQNQTVNIERTSCSDQNWNFVVESASNSPTSNITCDCTFNASSVCRVTNIQLKSFSLPGIFPPEFGNLTRLREIDLSRNFLNGTIPTTLSQIPLEILSVIGNRLSGPFPPQLGDITTLTDVNLETNLFTGPLPRNLGNLRSLKELLLSANNFTGQIPESLSNLKNLTEFRIDGNSLSGKIPDFIGNWTLLERLDLQGTSMEGPIPPSISNLTNLTELRITDLRGQAAFSFPDLRNLMKMKRLGPIPEYIGSMSELKTLDLSSNMLTGVIPDTFRNLDAFNFMFLNNNSLTGPVPQFIINSKENLDLSDNNFTQPPTLSCNQLDVNLISSYPSVTDNSVQWCLREGLPCPEDAKQSSLFINCGGSRLKIGKDTYTDDLNSRGQSTFSSVSERWGYSSSGVWLGKEDAGYLATDRFNLINGSTPEYYKTARLSPQSLKYYGLCLRRGSYKLQLHFAEIMFSNDQTFNSLGRRIFDIYVQGNLLERDFNIAERAGGVGKPFIRQIDGVQVNGSTLEIHLQWTGKGTNVIPTRGVYGPLISAITITPNFKVDTGKPLSNGAVAGIVIAACAVFGLLVLVILRLTGYLGGKEVDENEELRGLDLQTGSFTLKQIKRATNNFDPENKIGEGGFGPVYKGVLADGMTIAVKQLSSKSKQGNREFVTEIGMISALQHPNLVKLYGCCIEGKELLLVYEYLENNSLARALFGTEKQRLHLDWSTRNKICIGIAKGLAYLHEESRLKIVHRDIKATNVLLDLSLNAKISDFGLAKLNDDENTHISTRIAGTIGYMAPEYAMRGYLTDKADVYSFGVVCLEIVSGKSNTNYRPKEEFVYLLDWAYVLQEQGSLLELVDPDLGTSFSKKEAMRMLNIALLCTNPSPTLRPPMSSVVSMLEGKIKVQPPLVKREADPSGSAAMRFKALELLSQDSESQVSTYARNREQDISSSSMDGPWVDSSFSEPGKDVSLQQQEEGRSSSSSRKLLDDLTDVKIE

SEQ ID NO: 107275 - protein, 1030 aa, Arabidopsis thaliana
  peptide (1)..(1030): Ceres Seq. ID no. 13621871
  misc_feature (1)..(989): Homolog of NCBI NO: 25403092 NR Description: Receptor-like serine/threonine kinase (RFK1)
  misc_feature (1)..(989): Homolog of NCBI NO: 2465923 NR Description: receptor-like serine/threonine kinase
  misc_feature (1)..(989): Homolog of NCBI NO: 30690881 NR Description: leucine-rich repeat transmembrane protein kinase,
  misc_feature (36)..(989): Homolog of NCBI NO: 20259415 NR Description: putative receptor serine/threonine kinase thaliana] >gi|23296778|gb|AAN13167.1| putative receptor
  misc_feature (36)..(989): Homolog of NCBI NO: 30690877 NR Description: leucine-rich repeat transmembrane protein kinase,
  misc_feature (113)..(989): Homolog of NCBI NO: 12321408 NR Description: receptor-like serine/threonine kinase, putative,
  misc_feature (120)..(980): Homolog of NCBI NO: 15220901 NR Description: leucine-rich repeat transmembrane protein kinase,
  misc_feature (102)..(998): Homolog of NCBI NO: 6056376 NR Description: Similar to serine/threonine kinases [Arabidopsis
  misc_feature (110)..(973): Homolog of NCBI NO: 9972372 NR Description: Putative receptor-like serine/threonine kinase -
  misc_feature (126)..(958): Homolog of NCBI NO: 15220545 NR Description: receptor-related serine/threonine kinase
MGFIFSTEKVVYVLLLIFVCLENFGSNAQLLPEDEVQTLRTIFRKLQNQTVNIERTSCSDQNWNFVVESASNSPTSNITCDCTFNASSVCRVTNIQLKSFSLPGIFPPEFGNLTRLREIDLSRNFLNGTIPTTLSQIPLEILSVIGNRLSGPFPPQLGDITTLTDVNLETNLFTGPLPRNLGNLRSLKELLLSANNFTGQIPESLSNLKNLTEFRIDGNSLSGKIPDFIGNWTLLERLDLQGTSMEGPIPPSISNLTNLTELRITDLRGQAAFSFPDLRNLMKMKRLGPIPEYIGSMSELKTLDLSSNMLTGVIPDTFRNLDAFNFMFLNNNSLTGPVPQFIINSKENLDLSDNNFTQPPTLSCNQLDVNLISSYPSVTDNSVQWCLREGLPCPEDAKQSSLFINCGGSRLKIGKDTYTDDLNSRGQSTFSSVSERWGYSSSGVWLGKEDAGYLATDRFNLINGSTPEYYKTARLSPQSLKYYGLCLRRGSYKLQLHFAEIMFSNDQTFNSLGRRIFDIYVQGNLLERDFNIAERAGGVGKPFIRQIDGVQVNGSTLEIHLQWTGKGTNVIPTRGVYGPLISAITITPNFKVDTGKPLSNGAVAGIVIAACAVFGLLVLVILRLTGYLGGKEVDENEELRGLDLQTGSFTLKQIKRATNNFDPENKIGEGGFGPVYKGVLADGMTIAVKQLSSKSKQGNREFVTEIGMISALQHPNLVKLYGCCIEGKELLLVYEYLENNSLARALFGTEKQRLHLDWSTRNKICIGIAKGLAYLHEESRLKIVHRDIKATNVLLDLSLNAKISDFGLAKLNDDENTHISTRIAGTIGYMAPEYAMRGYLTDKADVYSFGVVCLEIVSGKSNTNYRPKEEFVYLLDWAYVLQEQGSLLELVDPDLGTSFSKKEAMRMLNIALLCTNPSPTLRPPMSSVVSMLEGKIKVQPPLVKREADPSGSAAMRFKALELLSQDSESQVSTYARNREQDISSSSMDGPWVDSSFSEPGKDVSLQQQEEGRSSSSSRKLLDDLTDVKIE

SEQ ID NO: 107276 - protein, 786 aa, Arabidopsis thaliana
  peptide (1)..(786): Ceres Seq. ID no. 13621872
  misc_feature (1)..(745): Homolog of NCBI NO: 25403092 NR Description: Receptor-like serine/threonine kinase (RFK1)
  misc_feature (1)..(745): Homolog of NCBI NO: 2465923 NR Description: receptor-like serine/threonine kinase
  misc_feature (1)..(745): Homolog of NCBI NO: 30690881 NR Description: leucine-rich repeat transmembrane protein kinase,
  misc_feature (1)..(745): Homolog of NCBI NO: 20259415 NR Description: putative receptor serine/threonine kinase thaliana] >gi|23296778|gb|AAN13167.1| putative receptor
  misc_feature (1)..(745): Homolog of NCBI NO: 30690877 NR Description: leucine-rich repeat transmembrane protein kinase,
  misc_feature (1)..(745): Homolog of NCBI NO: 12321408 NR Description: receptor-like serine/threonine kinase, putative,
  misc_feature (1)..(736): Homolog of NCBI NO: 15220901 NR Description: leucine-rich repeat transmembrane protein kinase,
  misc_feature (1)..(754): Homolog of NCBI NO: 6056376 NR Description: Similar to serine/threonine kinases [Arabidopsis
  misc_feature (1)..(729): Homolog of NCBI NO: 9972372 NR Description: Putative receptor-like serine/threonine kinase -
  misc_feature (1)..(714): Homolog of NCBI NO: 15220545 NR Description: receptor-related serine/threonine kinase
MEGPIPPSISNLTNLTELRITDLRGQAAFSFPDLRNLMKMKRLGPIPEYIGSMSELKTLDLSSNMLTGVIPDTFRNLDAFNFMFLNNNSLTGPVPQFIINSKENLDLSDNNFTQPPTLSCNQLDVNLISSYPSVTDNSVQWCLREGLPCPEDAKQSSLFINCGGSRLKIGKDTYTDDLNSRGQSTFSSVSERWGYSSSGVWLGKEDAGYLATDRFNLINGSTPEYYKTARLSPQSLKYYGLCLRRGSYKLQLHFAEIMFSNDQTFNSLGRRIFDIYVQGNLLERDFNIAERAGGVGKPFIRQIDGVQVNGSTLEIHLQWTGKGTNVIPTRGVYGPLISAITITPNFKVDTGKPLSNGAVAGIVIAACAVFGLLVLVILRLTGYLGGKEVDENEELRGLDLQTGSFTLKQIKRATNNFDPENKIGEGGFGPVYKGVLADGMTIAVKQLSSKSKQGNREFVTEIGMISALQHPNLVKLYGCCIEGKELLLVYEYLENNSLARALFGTEKQRLHLDWSTRNKICIGIAKGLAYLHEESRLKIVHRDIKATNVLLDLSLNAKISDFGLAKLNDDENTHISTRIAGTIGYMAPEYAMRGYLTDKADVYSFGVVCLEIVSGKSNTNYRPKEEFVYLLDWAYVLQEQGSLLELVDPDLGTSFSKKEAMRMLNIALLCTNPSPTLRPPMSSVVSMLEGKIKVQPPLVKREADPSGSAAMRFKALELLSQDSESQVSTYARNREQDISSSSMDGPWVDSSFSEPGKDVSLQQQEEGRSSSSSRKLLDDLTDVKIE

SEQ ID NO: 107277 - DNA, 963 bp, Arabidopsis thaliana
  misc_feature (1)..(963): Ceres Seq. ID no. 13621877
  misc_feature: MA Experiment ID: 108461 Result: Up-regulated in Transcription
  misc_feature: MA Experiment 108461 PARAMETER Experiment Name: At_Germinating_Seeds_cDNA_P Parameter: Age (day) Value: 1 vs. 0
  misc_feature: MA Experiment 108461 PARAMETER Experiment Name: At_Germinating_Seeds_cDNA_P Parameter: Tissue Value: Germinating Seeds
  misc_feature: MA Experiment ID: 108462 Result: Up-regulated in Transcription
  misc_feature: MA Experiment 108462 PARAMETER Experiment Name: At_Germinating_Seeds_cDNA_P Parameter: Age (day) Value: 2 vs. 0
  misc_feature: MA Experiment 108462 PARAMETER Experiment Name: At_Germinating_Seeds_cDNA_P Parameter: Tissue Value: Germinating Seeds
  misc_feature: MA Experiment ID: 108463 Result: Up-regulated in Transcription
  misc_feature: MA Experiment 108463 PARAMETER Experiment Name: At_Germinating_Seeds_cDNA_P Parameter: Age (day) Value: 3 vs. 0
  misc_feature: MA Experiment 108463 PARAMETER Experiment Name: At_Germinating_Seeds_cDNA_P Parameter: Tissue Value: Germinating Seeds
  misc_feature: MA Experiment ID: 108464 Result: Up-regulated in Transcription
  misc_feature: MA Experiment 108464 PARAMETER Experiment Name: At_Germinating_Seeds_cDNA_P Parameter: Age (day) Value: 4 vs. 0
  misc_feature: MA Experiment 108464 PARAMETER Experiment Name: At_Germinating_Seeds_cDNA_P Parameter: Tissue Value: Germinating Seeds
  misc_feature: MA Experiment ID: 108585 Result: Down-regulated in Transcription
  misc_feature: MA Experiment 108585 PARAMETER Experiment Name: At_5mM_NaNP_cDNA_P Parameter: Timepoint (hr) Value: 6
  misc_feature: MA Experiment 108585 PARAMETER Experiment Name: At_5mM_NaNP_cDNA_P Parameter: Tissue Value: Aerial
  misc_feature: MA Experiment 108585 PARAMETER Experiment Name: At_5mM_NaNP_cDNA_P Parameter: Treatment Value: null
  misc_feature: MA Experiment ID: 108595 Result: Down-regulated in Transcription
  misc_feature: MA Experiment 108595 PARAMETER Experiment Name: At_Ler-pi_Ovule_cDNA_P Parameter: Plant Line Value: null
  misc_feature: MA Experiment ID: 20000112 Result: Down-regulated in Transcription
  misc_feature: MA Experiment 20000112 PARAMETER Experiment Name: At_42deg_Heat_cDNA_P Parameter: Temperature (deg C) Value: 42 vs. 22
  misc_feature: MA Experiment 20000112 PARAMETER Experiment Name: At_42deg_Heat_cDNA_P Parameter: Timepoint (hr) Value: 2
  misc_feature: MA Experiment 20000112 PARAMETER Experiment Name: At_42deg_Heat_cDNA_P Parameter: Tissue Value: Aerial
  misc_feature: MA Experiment ID: 20000113 Result: Down-regulated in Transcription
  misc_feature: MA Experiment 20000113 PARAMETER Experiment Name: At_42deg_Heat_cDNA_P Parameter: Temperature (deg C) Value: 42 vs. 22
  misc_feature: MA Experiment 20000113 PARAMETER Experiment Name: At_42deg_Heat_cDNA_P Parameter: Timepoint (hr) Value: 8
  misc_feature: MA Experiment 20000113 PARAMETER Experiment Name: At_42deg_Heat_cDNA_P Parameter: Tissue Value: Aerial
  misc_feature: MA Experiment ID: 20000173 Result: Down-regulated in Transcription
  misc_feature: MA Experiment 20000173 PARAMETER Experiment Name: At_42deg_Heat_P Parameter: Age (day) Value: 14
  misc_feature: MA Experiment 20000173 PARAMETER Experiment Name: At_42deg_Heat_P Parameter: Organism Value: A. thaliana
  misc_feature: MA Experiment 20000173 PARAMETER Experiment Name: At_42deg_Heat_P Parameter: Plant Line Value: WS
  misc_feature: MA Experiment 20000173 PARAMETER Experiment Name: At_42deg_Heat_P Parameter: Temperature (deg C) Value: 42 vs. 22
  misc_feature: MA Experiment 20000173 PARAMETER Experiment Name: At_42deg_Heat_P Parameter: Timepoint (hr) Value: 6
  misc_feature: MA Experiment 20000173 PARAMETER Experiment Name: At_42deg_Heat_P Parameter: Tissue Value: Aerial
  misc_feature: MA Experiment ID: 20000180 Result: Up-regulated in Transcription
  misc_feature: MA Experiment 20000180 PARAMETER Experiment Name: At_Germinating_Seeds_P Parameter: Age (hr) Value: 24 vs. 0
  misc_feature: MA Experiment 20000180 PARAMETER Experiment Name: At_Germinating_Seeds_P Parameter: Tissue Value: Germinating Seeds
  misc_feature: MA Experiment ID: 20000224 Result: Up-regulated in Transcription
  misc_feature: MA Experiment ID: 20000264 Result: Up-regulated in Transcription
  misc_feature: MA Experiment 20000264 PARAMETER Experiment Name: At_Open_Flower_P Parameter: Age (day) Value: 21
  misc_feature: MA Experiment 20000264 PARAMETER Experiment Name: At_Open_Flower_P Parameter: Plant Line Value: WS
  misc_feature: MA Experiment 20000264 PARAMETER Experiment Name: At_Open_Flower_P Parameter: Tissue Value: Open Flower vs. Whole Plant
  misc_feature: MA Experiment ID: 20000286 Result: Up-regulated in Transcription
  misc_feature: MA Experiment 20000286 PARAMETER Experiment Name: At_Open_Flower_P Parameter: Age (day) Value: 21
  misc_feature: MA Experiment 20000286 PARAMETER Experiment Name: At_Open_Flower_P Parameter: Plant Line Value: WS
  misc_feature: MA Experiment 20000286 PARAMETER Experiment Name: At_Open_Flower_P Parameter: Tissue Value: Half Open vs. Whole Plant
  misc_feature: MA Experiment ID: 20000307 Result: Up-regulated in Transcription
  misc_feature: MA Experiment 20000307 PARAMETER Experiment Name: At_Germinating_Seeds_Sub_P Parameter: Age (hr) Value: 24 vs. 0
  misc_feature: MA Experiment 20000307 PARAMETER Experiment Name: At_Germinating_Seeds_Sub_P Parameter: Organism Value: A. thaliana
  misc_feature: MA Experiment 20000307 PARAMETER Experiment Name: At_Germinating_Seeds_Sub_P Parameter: Plant Line Value: WS
  misc_feature: MA Experiment 20000307 PARAMETER Experiment Name: At_Germinating_Seeds_Sub_P Parameter: Tissue Value: Germinating Seeds
  misc_feature: MA Experiment ID: 20000327 Result: Down-regulated in Transcription
  misc_feature: MA Experiment 20000327 PARAMETER Experiment Name: At_42deg_Heat_Sub_P Parameter: Age (day) Value: 14
  misc_feature: MA Experiment 20000327 PARAMETER Experiment Name: At_42deg_Heat_Sub_P Parameter: Organism Value: A. thaliana
  misc_feature: MA Experiment 20000327 PARAMETER Experiment Name: At_42deg_Heat_Sub_P Parameter: Plant Line Value: WS
  misc_feature: MA Experiment 20000327 PARAMETER Experiment Name: At_42deg_Heat_Sub_P Parameter: Temperature (deg C) Value: 42 vs. 22
  misc_feature: MA Experiment 20000327 PARAMETER Experiment Name: At_42deg_Heat_Sub_P Parameter: Timepoint (hr) Value: 1
  misc_feature: MA Experiment 20000327 PARAMETER Experiment Name: At_42deg_Heat_Sub_P Parameter: Tissue Value: Aerial
  misc_feature: MA Experiment ID: 20000328 Result: Down-regulated in Transcription
  misc_feature: MA Experiment 20000328 PARAMETER Experiment Name: At_42deg_Heat_Sub_P Parameter: Age (day) Value: 14
  misc_feature: MA Experiment 20000328 PARAMETER Experiment Name: At_42deg_Heat_Sub_P Parameter: Organism Value: A. thaliana
  misc_feature: MA Experiment 20000328 PARAMETER Experiment Name: At_42deg_Heat_Sub_P Parameter: Plant Line Value: WS
  misc_feature: MA Experiment 20000328 PARAMETER Experiment Name: At_42deg_Heat_Sub_P Parameter: Temperature (deg C) Value: 42 vs. 22
  misc_feature: MA Experiment 20000328 PARAMETER Experiment Name: At_42deg_Heat_Sub_P Parameter: Timepoint (hr) Value: 6
  misc_feature: MA Experiment 20000328 PARAMETER Experiment Name: At_42deg_Heat_Sub_P Parameter: Tissue Value: Aerial
  misc_feature: MA Experiment ID: 20000437 Result: Down-regulated in Transcription
  misc_feature: MA Experiment 20000437 PARAMETER Experiment Name: At_Drought_P Parameter: Age (day) Value: 8
  misc_feature: MA Experiment 20000437 PARAMETER Experiment Name: At_Drought_P Parameter: Organism Value: A. thaliana
  misc_feature: MA Experiment 20000437 PARAMETER Experiment Name: At_Drought_P Parameter: Plant Line Value: WS
  misc_feature: MA Experiment 20000437 PARAMETER Experiment Name: At_Drought_P Parameter: Timepoint (hr) Value: 24
  misc_feature: MA Experiment 20000437 PARAMETER Experiment Name: At_Drought_P Parameter: Tissue Value: Whole Plant
  misc_feature: MA Experiment 20000437 PARAMETER Experiment Name: At_Drought_P Parameter: Treatment Value: Drought vs. No Drought
  misc_feature: MA Experiment ID: 20000794 Result: Up-regulated in Transcription
  misc_feature: MA Experiment 20000794 PARAMETER Experiment Name: At_Petals_P Parameter: Age (day) Value: 23-25 days
  misc_feature: MA Experiment 20000794 PARAMETER Experiment Name: At_Petals_P Parameter: Plant Line Value: WS
  misc_feature: MA Experiment 20000794 PARAMETER Experiment Name: At_Petals_P Parameter: Tissue Value: Petals vs. Whole plant
  misc_feature: MA Experiment ID: 20001555 Result: Down-regulated in Transcription
  misc_feature: MA Experiment 20001555 PARAMETER Experiment Name: At_Drought_Soil_Dry_P Parameter: Age (day) Value: 24
  misc_feature: MA Experiment 20001555 PARAMETER Experiment Name: At_Drought_Soil_Dry_P Parameter: Organism Value: A. thaliana
  misc_feature: MA Experiment 20001555 PARAMETER Experiment Name: At_Drought_Soil_Dry_P Parameter: Plant Line Value: WS
  misc_feature: MA Experiment 20001555 PARAMETER Experiment Name: At_Drought_Soil_Dry_P Parameter: Post Timepoint (hr) Value: None
  misc_feature: MA Experiment 20001555 PARAMETER Experiment Name: At_Drought_Soil_Dry_P Parameter: Post-Treatment Value: None
  misc_feature: MA Experiment 20001555 PARAMETER Experiment Name: At_Drought_Soil_Dry_P Parameter: Timepoint (day) Value: 10
  misc_feature: MA Experiment 20001555 PARAMETER Experiment Name: At_Drought_Soil_Dry_P Parameter: Treatment Value: Drought vs. No Drought
  misc_feature: MA Experiment ID: 20001911 Result: Down-regulated in Transcription
  misc_feature: MA Experiment 20001911 PARAMETER Experiment Name: At_Drought_Reproduction_P Parameter: Age (day) Value: 40
  misc_feature: MA Experiment 20001911 PARAMETER Experiment Name: At_Drought_Reproduction_P Parameter: Organism Value: A. thaliana
  misc_feature: MA Experiment 20001911 PARAMETER Experiment Name: At_Drought_Reproduction_P Parameter: Plant Line Value: WS
  misc_feature: MA Experiment 20001911 PARAMETER Experiment Name: At_Drought_Reproduction_P Parameter: Timepoint (day) Value: 10
  misc_feature: MA Experiment 20001911 PARAMETER Experiment Name: At_Drought_Reproduction_P Parameter: Tissue Value: Flowers
  misc_feature: MA Experiment 20001911 PARAMETER Experiment Name: At_Drought_Reproduction_P Parameter: Treatment Value: Drought vs. No Drought
ctaccaatttcaagatctggtcgtcgctcacaggagaaacgtaatggaaaacaaagagaccaagcaagaaccagcagcagcagctgagcaaaagaccgttccgttgatcgaagatgagatcgagaggagcaaagtcgggatcatgagagctctctgcgaccgacaagatcctgaaactaaggaggtggatgatctgatgataaggaggtttctgagagcgcgtgacctggacattgaaaaggcttcaacgatgtttctaaattacctgacttggaagagaagcatgctcccaaaggggcacataccagaagcagagattgcaaatgatctatcgcataacaagatgtgtatgcaaggtcatgacaagatgggtcgacctatcgctgttgccattgggaacagacataacccttccaaaggcaaccctgacgagttcaagcgttttgttgtctacacgctcgagaagatttgtgctagaatgccgagaggtcaagagaaattcgtagcaattggagatctgcaaggctggggatattctaattgtgacatccgtggctaccttgctgctctttccactttgcaggattgttacccagagagattagggaaactctatatagttcatgccccctacattttcatgaccgcatggaaggtcatttatccttttatcgacgccaacaccaagaaaaagattgttttcgtggagaacaagaaactcactccaacgctgcttgaagacatagacgaaagccaacttcccgacatctacggaggcaaattgccacttgttcctattcaggagacctgattataggtcttactacggcccacctctatttccaaattattacttactagtattattttttatttgaataaaatgaaaaacatattgagtgtcgccaaatgccaacaattatatatttactgtcaaagaagctaaaagatataatattgaaa

SEQ ID NO: 107278 - protein, 269 aa, Arabidopsis thaliana; identical to SEQ ID NO: 31059
  peptide (1)..(269): Ceres Seq. ID no. 13621878
  misc_feature (114)..(262): Pfam Name: CRAL/TRIO domain Pfam Description: CRAL/TRIO domain
  misc_feature (15)..(269): Homolog of NCBI NO: 15223439 NR Description: SEC14 cytosolic factor, putative [Arabidopsis
  misc_feature (78)..(269): Homolog of NCBI NO: 19347976 NR Description: putative polyphosphoinositide binding protein
  misc_feature (38)..(269): Homolog of NCBI NO: 17226662 NR Description: polyphosphoinositide binding protein [Gossypium

SEQ ID NO: 107279 - protein, 255 aa, Arabidopsis thaliana; identical to SEQ ID NO: 31060
  peptide (1)..(255): Ceres Seq. ID no. 13621879
  misc_feature (100)..(248): Pfam Name: CRAL/TRIO domain Pfam Description: CRAL/TRIO domain
  misc_feature (1)..(255): Homolog of NCBI NO: 15223439 NR Description: SEC14 cytosolic factor, putative [Arabidopsis
  misc_feature (64)..(255): Homolog of NCBI NO: 19347976 NR Description: putative polyphosphoinositide binding protein
  misc_feature (24)..(255): Homolog of NCBI NO: 17226662 NR Description: polyphosphoinositide binding protein [Gossypium

SEQ ID NO: 107280 - protein, 222 aa, Arabidopsis thaliana; identical to SEQ ID NO: 31061
  peptide (1)..(222): Ceres Seq. ID no. 13621880
  misc_feature (67)..(215): Pfam Name: CRAL/TRIO domain Pfam Description: CRAL/TRIO domain
  misc_feature (1)..(222): Homolog of NCBI NO: 15223439 NR Description: SEC14 cytosolic factor, putative [Arabidopsis
  misc_feature (31)..(222): Homolog of NCBI NO: 19347976 NR Description: putative polyphosphoinositide binding protein
  misc_feature (1)..(222): Homolog of NCBI NO: 17226662 NR Description: polyphosphoinositide binding protein [Gossypium

SEQ ID NO: 107281 - DNA, 2225 bp, Arabidopsis thaliana
  misc_feature (1)..(2225): Ceres Seq. ID no. 13621881
  misc_feature: MA Experiment ID: 108434 Result: Up-regulated in Transcription
  misc_feature: MA Experiment 108434 PARAMETER Experiment Name: At_Root_Tips_cDNA_P Parameter: Tissue Value: Root Tips
  misc_feature: MA Experiment ID: 108463 Result: Down-regulated in Transcription
  misc_feature: MA Experiment 108463 PARAMETER Experiment Name: At_Germinating_Seeds_cDNA_P Parameter: Age (day) Value: 3 vs. 0
  misc_feature: MA Experiment 108463 PARAMETER Experiment Name: At_Germinating_Seeds_cDNA_P Parameter: Tissue Value: Germinating Seeds
  misc_feature: MA Experiment ID: 108469 Result: Up-regulated in Transcription
  misc_feature: MA Experiment ID: 108573 Result: Down-regulated in Transcription
  misc_feature: MA Experiment 108573 PARAMETER Experiment Name: At_Drought_cDNA_P Parameter: Timepoint (hr) Value: 6
  misc_feature: MA Experiment 108573 PARAMETER Experiment Name: At_Drought_cDNA_P Parameter: Tissue Value: Aerial
  misc_feature: MA Experiment 108573 PARAMETER Experiment Name: At_Drought_cDNA_P Parameter: Treatment Value: Drought vs. No Drought
  misc_feature: MA Experiment ID: 108576 Result: Up-regulated in Transcription
  misc_feature: MA Experiment 108576 PARAMETER Experiment Name: At_42deg_Heat_cDNA_P Parameter: Temperature (deg C) Value: 42 vs. 22
  misc_feature: MA Experiment 108576 PARAMETER Experiment Name: At_42deg_Heat_cDNA_P Parameter: Timepoint (hr) Value: 1
  misc_feature: MA Experiment 108576 PARAMETER Experiment Name: At_42deg_Heat_cDNA_P Parameter: Tissue Value: Aerial
  misc_feature: MA Experiment ID: 108577 Result: Up-regulated in Transcription
  misc_feature: MA Experiment 108577 PARAMETER Experiment Name: At_42deg_Heat_cDNA_P Parameter: Temperature (deg C) Value: 42 vs. 22
  misc_feature: MA Experiment 108577 PARAMETER Experiment Name: At_42deg_Heat_cDNA_P Parameter: Timepoint (hr) Value: 6
  misc_feature: MA Experiment 108577 PARAMETER Experiment Name: At_42deg_Heat_cDNA_P Parameter: Tissue Value: Aerial
  misc_feature: MA Experiment ID: 108595 Result: Up-regulated in Transcription
  misc_feature: MA Experiment 108595 PARAMETER Experiment Name: At_Ler-pi_Ovule_cDNA_P Parameter: Plant Line Value: null
  misc_feature: MA Experiment ID: 108668 Result: Up-regulated in Transcription
  misc_feature: MA Experiment 108668 PARAMETER Experiment Name: At_2mM_SA_cDNA_P Parameter: Plant Line Value: WS
  misc_feature: MA Experiment 108668 PARAMETER Experiment Name: At_2mM_SA_cDNA_P Parameter: Timepoint (hr) Value: 6
  misc_feature: MA Experiment 108668 PARAMETER Experiment Name: At_2mM_SA_cDNA_P Parameter: Treatment Value: 2mM SA vs. No Treatment
  misc_feature: MA Experiment ID: 20000086 Result: Up-regulated in Transcription
  misc_feature: MA Experiment 20000086 PARAMETER Experiment Name: At_100uM_ABA_Mutants_cDNA_P Parameter: Plant Line Value: CS22
  misc_feature: MA Experiment 20000086 PARAMETER Experiment Name: At_100uM_ABA_Mutants_cDNA_P Parameter: Timepoint (hr) Value: 6
  misc_feature: MA Experiment 20000086 PARAMETER Experiment Name: At_100uM_ABA_Mutants_cDNA_P Parameter: Tissue Value: Aerial
  misc_feature: MA Experiment 20000086 PARAMETER Experiment Name: At_100uM_ABA_Mutants_cDNA_P Parameter: Treatment Value: 100uM ABA vs. No Treatment
  misc_feature: MA Experiment ID: 20000089 Result: Up-regulated in Transcription
  misc_feature: MA Experiment ID: 20000090 Result: Up-regulated in Transcription
  misc_feature: MA Experiment ID: 20000093 Result: Up-regulated in Transcription
  misc_feature: MA Experiment 20000093 PARAMETER Experiment Name: At_42deg_Heat_cDNA_P Parameter: Temperature (deg C) Value: 42 vs. 22
  misc_feature: MA Experiment 20000093 PARAMETER Experiment Name: At_42deg_Heat_cDNA_P Parameter: Timepoint (hr) Value: 0.5
  misc_feature: MA Experiment 20000093 PARAMETER Experiment Name: At_42deg_Heat_cDNA_P Parameter: Tissue Value: Aerial
  misc_feature: MA Experiment ID: 20000111 Result: Up-regulated in Transcription
  misc_feature: MA Experiment 20000111 PARAMETER Experiment Name: At_42deg_Heat_cDNA_P Parameter: Temperature (deg C) Value: 42 vs. 22
  misc_feature: MA Experiment 20000111 PARAMETER Experiment Name: At_42deg_Heat_cDNA_P Parameter: Timepoint (hr) Value: 6
  misc_feature: MA Experiment 20000111 PARAMETER Experiment Name: At_42deg_Heat_cDNA_P Parameter: Tissue Value: Aerial
  misc_feature: MA Experiment ID: 20000112 Result: Up-regulated in Transcription
  misc_feature: MA Experiment 20000112 PARAMETER Experiment Name: At_42deg_Heat_cDNA_P Parameter: Temperature (deg C) Value: 42 vs. 22
  misc_feature: MA Experiment 20000112 PARAMETER Experiment Name: At_42deg_Heat_cDNA_P Parameter: Timepoint (hr) Value: 2
  misc_feature: MA Experiment 20000112 PARAMETER Experiment Name: At_42deg_Heat_cDNA_P Parameter: Tissue Value: Aerial
  misc_feature: MA Experiment ID: 20000171 Result: Up-regulated in Transcription
  misc_feature: MA Experiment 20000171 PARAMETER Experiment Name: At_42deg_Heat_P Parameter: Age (day) Value: 14
  misc_feature: MA Experiment 20000171 PARAMETER Experiment Name: At_42deg_Heat_P Parameter: Organism Value: A. thaliana
  misc_feature: MA Experiment 20000171 PARAMETER Experiment Name: At_42deg_Heat_P Parameter: Plant Line Value: WS
  misc_feature: MA Experiment 20000171 PARAMETER Experiment Name: At_42deg_Heat_P Parameter: Temperature (deg C) Value: 42 vs. 22
  misc_feature: MA Experiment 20000171 PARAMETER Experiment Name: At_42deg_Heat_P Parameter: Timepoint (hr) Value: 1
  misc_feature: MA Experiment 20000171 PARAMETER Experiment Name: At_42deg_Heat_P Parameter: Tissue Value: Aerial
  misc_feature: MA Experiment ID: 20000173 Result: Up-regulated in Transcription
  misc_feature: MA Experiment 20000173 PARAMETER Experiment Name: At_42deg_Heat_P Parameter: Age (day) Value: 14
  misc_feature: MA Experiment 20000173 PARAMETER Experiment Name: At_42deg_Heat_P Parameter: Organism Value: A. thaliana
  misc_feature: MA Experiment 20000173 PARAMETER Experiment Name: At_42deg_Heat_P Parameter: Plant Line Value: WS
  misc_feature: MA Experiment 20000173 PARAMETER Experiment Name: At_42deg_Heat_P Parameter: Temperature (deg C) Value: 42 vs. 22
  misc_feature: MA Experiment 20000173 PARAMETER Experiment Name: At_42deg_Heat_P Parameter: Timepoint (hr) Value: 6
  misc_feature: MA Experiment 20000173 PARAMETER Experiment Name: At_42deg_Heat_P Parameter: Tissue Value: Aerial
  misc_feature: MA Experiment ID: 20000179 Result: Up-regulated in Transcription
  misc_feature: MA Experiment 20000179 PARAMETER Experiment Name: At_Germinating_Seeds_P Parameter: Age (hr) Value: 6 vs. 0
  misc_feature: MA Experiment 20000179 PARAMETER Experiment Name: At_Germinating_Seeds_P Parameter: Tissue Value: Germinating Seeds
  misc_feature: MA Experiment ID: 20000182 Result: Up-regulated in Transcription
  misc_feature: MA Experiment 20000182 PARAMETER Experiment Name: At_2mM_SA_P Parameter: Age (day) Value: 14
  misc_feature: MA Experiment 20000182 PARAMETER Experiment Name: At_2mM_SA_P Parameter: Organism Value: A. thaliana
  misc_feature: MA Experiment 20000182 PARAMETER Experiment Name: At_2mM_SA_P Parameter: Plant Line Value: WS
  misc_feature: MA Experiment 20000182 PARAMETER Experiment Name: At_2mM_SA_P Parameter: Timepoint (hr) Value: 6
  misc_feature: MA Experiment 20000182 PARAMETER Experiment Name: At_2mM_SA_P Parameter: Tissue Value: Aerial
  misc_feature: MA Experiment 20000182 PARAMETER Experiment Name: At_2mM_SA_P Parameter: Treatment Value: 2mM SA vs. No Treatment
  misc_feature: MA Experiment ID: 20000224 Result: Up-regulated in Transcription
  misc_feature: MA Experiment ID: 20000227 Result: Up-regulated in Transcription
  misc_feature: MA Experiment 20000227 PARAMETER Experiment Name: At_Root-Tips-vs-Tops_P Parameter: Tissue Value: Root Tips vs. Root Tops
  misc_feature: MA Experiment ID: 20000234 Result: Up-regulated in Transcription
  misc_feature: MA Experiment 20000234 PARAMETER Experiment Name: At_Siliques_P Parameter: Age (day) Value: 21
  misc_feature: MA Experiment 20000234 PARAMETER Experiment Name: At_Siliques_P Parameter: Organism Value: A. thaliana
  misc_feature: MA Experiment 20000234 PARAMETER Experiment Name: At_Siliques_P Parameter: Plant Line Value: WS
  misc_feature: MA Experiment 20000234 PARAMETER Experiment Name: At_Siliques_P Parameter: Tissue Value: Less Than 5mm Siliques vs. Whole Plant
  misc_feature: MA Experiment ID: 20000235 Result: Up-regulated in Transcription
  misc_feature: MA Experiment 20000235 PARAMETER Experiment Name: At_Siliques_P Parameter: Age (day) Value: 21
  misc_feature: MA Experiment 20000235 PARAMETER Experiment Name: At_Siliques_P Parameter: Organism Value: A. thaliana
  misc_feature: MA Experiment 20000235 PARAMETER Experiment Name: At_Siliques_P Parameter: Plant Line Value: WS
  misc_feature: MA Experiment 20000235 PARAMETER Experiment Name: At_Siliques_P Parameter: Tissue Value: 5-10mm Siliques vs. Whole Plant
  misc_feature: MA Experiment ID: 20000495 Result: Up-regulated in Transcription
  misc_feature: MA Experiment 20000495 PARAMETER Experiment Name: At_Guard_Cells_P Parameter: Harvest Date Value: 8/2/2002
  misc_feature: MA Experiment 20000495 PARAMETER Experiment Name: At_Guard_Cells_P Parameter: Organism Value: A. thaliana
  misc_feature: MA Experiment 20000495 PARAMETER Experiment Name: At_Guard_Cells_P Parameter: Tissue Value: Guard Cells vs. Leaves
  misc_feature: MA Experiment ID: 20000794 Result: Down-regulated in Transcription
  misc_feature: MA Experiment 20000794 PARAMETER Experiment Name: At_Petals_P Parameter: Age (day) Value: 23-25 days
  misc_feature: MA Experiment 20000794 PARAMETER Experiment Name: At_Petals_P Parameter: Plant Line Value: WS
  misc_feature: MA Experiment 20000794 PARAMETER Experiment Name: At_Petals_P Parameter: Tissue Value: Petals vs. Whole plant
  misc_feature: MA Experiment ID: 20001450 Result: Down-regulated in Transcription
  misc_feature: MA Experiment 20001450 PARAMETER Experiment Name: At_Far-red-induction_P Parameter: Age (day) Value: 7
  misc_feature: MA Experiment 20001450 PARAMETER Experiment Name: At_Far-red-induction_P Parameter: Light Value: Far-red vs. White
  misc_feature: MA Experiment 20001450 PARAMETER Experiment Name: At_Far-red-induction_P Parameter: Organism Value: A. thaliana
  misc_feature: MA Experiment 20001450 PARAMETER Experiment Name: At_Far-red-induction_P Parameter: Plant Line Value: Columbia
  misc_feature: MA Experiment 20001450 PARAMETER Experiment Name: At_Far-red-induction_P Parameter: Timepoint (hr) Value: 8
  misc_feature: MA Experiment 20001450 PARAMETER Experiment Name: At_Far-red-induction_P Parameter: Tissue Value: Whole Plant
  misc_feature: MA Experiment ID: 20001556 Result: Up-regulated in Transcription
  misc_feature: MA Experiment 20001556 PARAMETER Experiment Name: At_Drought_Soil_Dry_P Parameter: Age (day) Value: 26
  misc_feature: MA Experiment 20001556 PARAMETER Experiment Name: At_Drought_Soil_Dry_P Parameter: Organism Value: A. thaliana
  misc_feature: MA Experiment 20001556 PARAMETER Experiment Name: At_Drought_Soil_Dry_P Parameter: Plant Line Value: WS
  misc_feature: MA Experiment 20001556 PARAMETER Experiment Name: At_Drought_Soil_Dry_P Parameter: Post Timepoint (hr) Value: None
  misc_feature: MA Experiment 20001556 PARAMETER Experiment Name: At_Drought_Soil_Dry_P Parameter: Post-Treatment Value: None
  misc_feature: MA Experiment 20001556 PARAMETER Experiment Name: At_Drought_Soil_Dry_P Parameter: Timepoint (day) Value: 12
  misc_feature: MA Experiment 20001556 PARAMETER Experiment Name: At_Drought_Soil_Dry_P Parameter: Treatment Value: Drought vs. No Drought
  misc_feature: MA Experiment ID: 20001558 Result: Up-regulated in Transcription
  misc_feature: MA Experiment 20001558 PARAMETER Experiment Name: At_Drought_Soil_Dry_P Parameter: Age (day) Value: 27
  misc_feature: MA Experiment 20001558 PARAMETER Experiment Name: At_Drought_Soil_Dry_P Parameter: Organism Value: A. thaliana
  misc_feature: MA Experiment 20001558 PARAMETER Experiment Name: At_Drought_Soil_Dry_P Parameter: Plant Line Value: WS
  misc_feature: MA Experiment 20001558 PARAMETER Experiment Name: At_Drought_Soil_Dry_P Parameter: Post Timepoint (hr) Value: 6
  misc_feature: MA Experiment 20001558 PARAMETER Experiment Name: At_Drought_Soil_Dry_P Parameter: Post-Treatment Value: Re-Water vs. No Drought
  misc_feature: MA Experiment 20001558 PARAMETER Experiment Name: At_Drought_Soil_Dry_P Parameter: Timepoint (day) Value: 13
  misc_feature: MA Experiment 20001558 PARAMETER Experiment Name: At_Drought_Soil_Dry_P Parameter: Treatment Value: Drought vs. No Drought
  misc_feature: MA Experiment ID: 20001560 Result: Up-regulated in Transcription
  misc_feature: MA Experiment 20001560 PARAMETER Experiment Name: At_Drought_Soil_Dry_P Parameter: Age (day) Value: 28
  misc_feature: MA Experiment 20001560 PARAMETER Experiment Name: At_Drought_Soil_Dry_P Parameter: Organism Value: A. thaliana
  misc_feature: MA Experiment 20001560 PARAMETER Experiment Name: At_Drought_Soil_Dry_P Parameter: Plant Line Value: WS
  misc_feature: MA Experiment 20001560 PARAMETER Experiment Name: At_Drought_Soil_Dry_P Parameter: Post Timepoint (hr) Value: None
  misc_feature: MA Experiment 20001560 PARAMETER Experiment Name: At_Drought_Soil_Dry_P Parameter: Post-Treatment Value: None
  misc_feature: MA Experiment 20001560 PARAMETER Experiment Name: At_Drought_Soil_Dry_P Parameter: Timepoint (day) Value: 14
  misc_feature: MA Experiment 20001560 PARAMETER Experiment Name: At_Drought_Soil_Dry_P Parameter: Treatment Value: Drought vs. No Drought
atggctcgctcgtttggagcaaacagcactgttgtgcttgcgatcatcttcttcggatgtttatttgcgttttccactgcaaaagaagaggctacgaagttaggatcagttattgggatagatcttggtaccacttactcttgtgttggtgtttacaagaatggtcatgttgaaattattgccaatgaccaaggaaaccgtattacaccttcatgggttggttttactgactctgaaaggctcattggtgaggctgctaagaatcaggcggctgttaatcctgagaggactgtcttcgacgttaagagattgatcgggcgaaaatttgaggacaaggaggttcaaaaggacaggaaacttgtaccttaccagattgtgaacaaggatggtaagccatacattcaagtcaagatcaaggatggtgagactaaggttttcagtcctgaggagatcagtgccatgattctgactaagatgaaggagacagccgaagcctaccttggaaagaaaatcaaggacgctgttgtcactgttccagcttacttcaatgatgctcaaaggcaagctaccaaggatgccggtgttattgctgggctcaatgttgctagaatcatcaacgaacctactgctgctgctattgcctacggtcttgataagaagggtggtgagaagaacatccttgtatttgaccttggtggtggtacttttgatgtcagtgtcttgaccattgataacggagtgtttgaggttctctccacaaatggtgacactcacttgggaggtgaggactttgaccacaggatcatggagtacttcatcaagttaattaagaagaagcaccagaaggacatcagcaaggacaacaaggctcttggtaagctccgaagggaatgtgagagggcaaagagagctctaagcagtcagcaccaagtccgtgtagagattgagtcactctttgatggtgttgatttatctgagccactcaccagagctcgtttcgaggagcttaacaatgatttgttcaggaagaccatgggacctgtgaagaaggccatggatgatgccggtctacagaagagccagatcgatgagattgtccttgttggtggaagcaccaggatcccaaaggttcagcaactgttgaaggacttctttgaaggtaaagagccaaacaagggtgtgaaccccgacgaggctgttgcctatggtgctgctgttcagggtggtattttgagcggagaaggcggtgatgagaccaaagatatccttcttcttgatgttgcgccactcactttaggtatcgagactgtaggaggagtgatgacaaagttgatcccaagaaacacggttattccaaccaagaaatctcaggttttcacaacgtaccaagaccagcagaccaccgtctccattcaggtctttgaaggtgaaagaagtctcaccaaggactgcaggctactcgggaaattcgacctcactggagtcccaccggccccaagaggaacccctcaaatcgaggtcacatttgaagtggacgccaacggtattcttaatgtgaaagcagaggacaaggcgagtggtaaatcagagaagattacaatcacaaacgagaagggtcgtctgagccaagaagagattgaccggatggtgaaggaggcagaggagtttgcagaggaagacaagaaggtgaaggagaagatcgacgccaggaatgccctggagacatacgtgtacaacatgaagaaccaagtgagcgacaaggacaagcttgcagacaaattggaaggagatgagaaggagaagatagaagcagcgacgaaagaggccttggagtggctcgacgagaaccaaaactcagagaaagaagagtacgacgagaagctcaaggaggtagaggcagtgtgtaacccaatcatcacagcagtttaccagagatcaggcggagcaccaggtgcaggaggagaatcatcgactgaggaggaagatgagtctcacgatgagctctagatgtcttctgttattgttaatttattaaaccatagagacaagttttgaggatgaaacgtcgtttttgttttttgtatttggtttcctttttcttatggatttttaggaaaggggagagattaagtagcgtcccttctttagtctccctggacgttctctttatgttcatctgataactttacttcttcataacaaataccttttttctattcaacatc

SEQ ID NO: 107282 - protein, 668 aa, Arabidopsis thaliana; identical to SEQ ID NO: 97288
  peptide (1)..(668): Ceres Seq. ID no. 13621882
  misc_feature (9)..(663): Homolog of NCBI NO: 31981722 NR Description: heat shock 70kD protein 5 (glucose-regulated
  misc_feature (11)..(668): Homolog of NCBI NO: 31208237 NR Description: ENSANGP00000012893 [Anopheles gambiae]
  misc_feature (37)..(668): Homolog of NCBI NO: 1037176 NR Description: immunoglobulin heavy chain binding protein
  misc_feature (9)..(663): Homolog of NCBI NO: 1304157 NR Description: 78 kDa glucose-regulated protein [Mus musculus]
  misc_feature (13)..(663): Homolog of NCBI NO: 31419302 NR Description: Unknown (protein for MGC:55994) [Danio rerio]
  misc_feature (20)..(668): Homolog of NCBI NO: 29539338 NR Description: Heat shock 70 kDa protein [Cyanidioschyzon
  misc_feature (2)..(668): Homolog of NCBI NO: 32699500 NR Description: 78 kDa glucose-regulated protein homolog (GRP 78) (Immunoglobulin heavy chain binding protein homolog)
  misc_feature (13)..(668): Homolog of NCBI NO: 32405376 NR Description: 78 KDA GLUCOSE-REGULATED PROTEIN HOMOLOG (GRP 78) (IMMUNOGLOBULIN HEAVY CHAIN BINDING PROTEIN HOMOLOG)
  misc_feature (15)..(668): Homolog of NCBI NO: 23480384 NR Description: heat shock protein [Plasmodium yoelii yoelii]
  misc_feature (32)..(653): Homolog of NCBI NO: 31322197 NR Description: heat shock protein 70 [Crassostrea ariakensis]

SEQ ID NO: 107283 - protein, 515 aa, Arabidopsis thaliana; identical to SEQ ID NO: 97289
  peptide (1)..(515): Ceres Seq. ID no. 13621883
  misc_feature (1)..(510): Homolog of NCBI NO: 31981722 NR Description: heat shock 70kD protein 5 (glucose-regulated
  misc_feature (1)..(515): Homolog of NCBI NO: 31208237 NR Description: ENSANGP00000012893 [Anopheles gambiae]
  misc_feature (1)..(515): Homolog of NCBI NO: 1037176 NR Description: immunoglobulin heavy chain binding protein
  misc_feature (1)..(510): Homolog of NCBI NO: 1304157 NR Description: 78 kDa glucose-regulated protein [Mus musculus]
  misc_feature (1)..(510): Homolog of NCBI NO: 31419302 NR Description: Unknown (protein for MGC:55994) [Danio rerio]
  misc_feature (1)..(515): Homolog of NCBI NO: 29539338 NR Description: Heat shock 70 kDa protein [Cyanidioschyzon
  misc_feature (1)..(515): Homolog of NCBI NO: 32699500 NR Description: 78 kDa glucose-regulated protein homolog (GRP 78) (Immunoglobulin heavy chain binding protein homolog)
  misc_feature (1)..(515): Homolog of NCBI NO: 32405376 NR Description: 78 KDA GLUCOSE-REGULATED PROTEIN HOMOLOG (GRP 78) (IMMUNOGLOBULIN HEAVY CHAIN BINDING PROTEIN HOMOLOG)
  misc_feature (1)..(515): Homolog of NCBI NO: 23480384 NR Description: heat shock protein [Plasmodium yoelii yoelii]
  misc_feature (1)..(500): Homolog of NCBI NO: 31322197 NR Description: heat shock protein 70 [Crassostrea ariakensis]

SEQ ID NO: 107284 - protein, 510 aa, Arabidopsis thaliana
  peptide (1)..(510): Ceres Seq. ID no. 13621884
  misc_feature (1)..(505): Homolog of NCBI NO: 31981722 NR Description: heat shock 70kD protein 5 (glucose-regulated
  misc_feature (1)..(510): Homolog of NCBI NO: 31208237 NR Description: ENSANGP00000012893 [Anopheles gambiae]
  misc_feature (1)..(510): Homolog of NCBI NO: 1037176 NR Description: immunoglobulin heavy chain binding protein
  misc_feature (1)..(505): Homolog of NCBI NO: 1304157 NR Description: 78 kDa glucose-regulated protein [Mus musculus]
  misc_feature (1)..(505): Homolog of NCBI NO: 31419302 NR Description: Unknown (protein for MGC:55994) [Danio rerio]
  misc_feature (1)..(510): Homolog of NCBI NO: 29539338 NR Description: Heat shock 70 kDa protein [Cyanidioschyzon
  misc_feature (1)..(510): Homolog of NCBI NO: 32699500 NR Description: 78 kDa glucose-regulated protein homolog (GRP 78) (Immunoglobulin heavy chain binding protein homolog)
  misc_feature (1)..(510): Homolog of NCBI NO: 32405376 NR Description: 78 KDA GLUCOSE-REGULATED PROTEIN HOMOLOG (GRP 78) (IMMUNOGLOBULIN HEAVY CHAIN BINDING PROTEIN HOMOLOG)
  misc_feature (1)..(510): Homolog of NCBI NO: 23480384 NR Description: heat shock protein [Plasmodium yoelii yoelii]
  misc_feature (1)..(495): Homolog of NCBI NO: 31322197 NR Description: heat shock protein 70 [Crassostrea ariakensis]
MKETAEAYLGKKIKDAVVTVPAYFNDAQRQATKDAGVIAGLNVARIINEPTAAAIAYGLDKKGGEKNILVFDLGGGTFDVSVLTIDNGVFEVLSTNGDTHLGGEDFDHRIMEYFIKLIKKKHQKDISKDNKALGKLRRECERAKRALSSQHQVRVEIESLFDGVDLSEPLTRARFEELNNDLFRKTMGPVKKAMDDAGLQKSQIDEIVLVGGSTRIPKVQQLLKDFFEGKEPNKGVNPDEAVAYGAAVQGGILSGEGGDETKDILLLDVAPLTLGIETVGGVMTKLIPRNTVIPTKKSQVFTTYQDQQTTVSIQVFEGERSLTKDCRLLGKFDLTGVPPAPRGTPQIEVTFEVDANGILNVKAEDKASGKSEKITITNEKGRLSQEEIDRMVKEAEEFAEEDKKVKEKIDARNALETYVYNMKNQVSDKDKLADKLEGDEKEKIEAATKEALEWLDENQNSEKEEYDEKLKEVEAVCNPIITAVYQRSGGAPGAGGESSTEEEDESHDEL

SEQ ID NO: 107285 - DNA, 971 bp, Arabidopsis thaliana
  misc_feature (1)..(971): Ceres Seq. ID no. 13621896
  misc_feature: MA Experiment ID: 108434 Result: Up-regulated in Transcription
  misc_feature: MA Experiment 108434 PARAMETER Experiment Name: At_Root_Tips_cDNA_P Parameter: Tissue Value: Root Tips
  misc_feature: MA Experiment ID: 108462 Result: Down-regulated in Transcription
  misc_feature: MA Experiment 108462 PARAMETER Experiment Name: At_Germinating_Seeds_cDNA_P Parameter: Age (day) Value: 2 vs. 0
  misc_feature: MA Experiment 108462 PARAMETER Experiment Name: At_Germinating_Seeds_cDNA_P Parameter: Tissue Value: Germinating Seeds
  misc_feature: MA Experiment ID: 20000113 Result: Up-regulated in Transcription
  misc_feature: MA Experiment 20000113 PARAMETER Experiment Name: At_42deg_Heat_cDNA_P Parameter: Temperature (deg C) Value: 42 vs. 22
  misc_feature: MA Experiment 20000113 PARAMETER Experiment Name: At_42deg_Heat_cDNA_P Parameter: Timepoint (hr) Value: 8
  misc_feature: MA Experiment 20000113 PARAMETER Experiment Name: At_42deg_Heat_cDNA_P Parameter: Tissue Value: Aerial
  misc_feature: MA Experiment ID: 20000573 Result: Down-regulated in Transcription
  misc_feature: MA Experiment 20000573 PARAMETER Experiment Name: At_100uM_ABA_Mutants__P Parameter: Organism Value: A. thaliana
  misc_feature: MA Experiment 20000573 PARAMETER Experiment Name: At_100uM_ABA_Mutants__P Parameter: Plant Line Value: CS22 vs. Ler wt
  misc_feature: MA Experiment 20000573 PARAMETER Experiment Name: At_100uM_ABA_Mutants__P Parameter: Timepoint (hr) Value: N/A
  misc_feature: MA Experiment 20000573 PARAMETER Experiment Name: At_100uM_ABA_Mutants__P Parameter: Tissue Value: Whole Plant
  misc_feature: MA Experiment 20000573 PARAMETER Experiment Name: At_100uM_ABA_Mutants__P Parameter: Treatment Value: None
aacgaagcatcggcgaaaaaagaagatgaatatcgttggattgagcaaacgtttcttctccgatcgtcgctctcttcacgggatcaacaatgctctcttgaaaacagtgttcaccggtcggaaaccgattctcggattctccggccgatcgattcacgagctacgcaaaactgggaatttcgtaatccctcgtgttttctccgtgtcgcgaaatctaacgacgaaggcttcgtcttcttcttcgaaacaacctgcgtttctacgatggtatttgagaaagctcgaatcacatccttttatgactaagagtatcactacttctgtcatctatatggctgcagatctcacttctcagatgatcacaatggagccaactggttcttttgacttgataagaacagcgagaatggcgagctttgggttgatatttctcgggccgtctcagcatctgtggttcagttatctttcgaagatattgccaaagcgcgacgtgttgacaacctttaagaaaataatgatggggcaggttcttttcggacctgttagcaacacagtcttctattcctacaatgctgctttacaaggcgaaaattctgaggaaattgtggcgagattgaagagagatcttctgccaacattgaaaaatggacttatgtattggccggtctgtgattttgttacattcaagtatgtgccagttcatctacagccactgatgaatagctcgtgcgcatatatatggacaatctatttgacatatatggcaaaccagacgaaagctgacagctgaacaatgacaagtatgagtgttctgggtcacacgcaatcgcattctttttattcaattgaaccaaccatcagtactagtagattttttttgtttttttggtgtctacaatgcagcaaaagtatcgcatagatatggacataaacatgtatgaattttgatcatctaagcatatatttatcag

SEQ ID NO: 107286 - protein, 262 aa, Arabidopsis thaliana
  peptide (1)..(262): Ceres Seq. ID no. 13621897
  misc_feature (193)..(260): Pfam Name: Mpv17 / PMP22 family Pfam Description: Mpv17 / PMP22 family
  misc_feature (9)..(262): Homolog of NCBI NO: 18422298 NR Description: peroxisomal membrane protein family (22 kDa)
  misc_feature (9)..(262): Homolog of NCBI NO: 21553640 NR Description: contains similarity to 22 kDa peroxisomal
  misc_feature (9)..(236): Homolog of NCBI NO: 9757841 NR Description: contains similarity to 22 kDa peroxisomal
  misc_feature (68)..(257): Homolog of NCBI NO: 18418319 NR Description: peroxisomal membrane protein, putative (22 kDa) thaliana] >gi|11762212|gb|AAG40384.1|AF325032_1 AT4g33900
  misc_feature (76)..(259): Homolog of NCBI NO: 15226016 NR Description: peroxisomal membrane protein, putative (22 kDa) thaliana] >gi|25411581|pir||C84522 22 kDa peroxisomal membrane
  misc_feature (68)..(238): Homolog of NCBI NO: 7485624 NR Description: hypothetical protein F17I5.90 - Arabidopsis >gi|3297814|emb|CAA19872.1| putative protein [Arabidopsis >gi|7270339|emb|CAB80107.1| putative protein [Arabidopsis
  misc_feature (77)..(257): Homolog of NCBI NO: 21594286 NR Description: unknown [Arabidopsis thaliana]
  misc_feature (77)..(257): Homolog of NCBI NO: 15241166 NR Description: expressed protein [Arabidopsis thaliana]
  misc_feature (77)..(257): Homolog of NCBI NO: 16648746 NR Description: AT5g19750/T29J13_170 [Arabidopsis thaliana]
  misc_feature (79)..(255): Homolog of NCBI NO: 15233520 NR Description: peroxisomal membrane protein (22-kDa)(PMP22)
TKHRRKKKMNIVGLSKRFFSDRRSLHGINNALLKTVFTGRKPILGFSGRSIHELRKTGNFVIPRVFSVSRNLTTKASSSSSKQPAFLRWYLRKLESHPFMTKSITTSVIYMAADLTSQMITMEPTGSFDLIRTARMASFGLIFLGPSQHLWFSYLSKILPKRDVLTTFKKIMMGQVLFGPVSNTVFYSYNAALQGENSEEIVARLKRDLLPTLKNGLMYWPVCDFVTFKYVPVHLQPLMNSSCAYIWTIYLTYMANQTKADS

SEQ ID NO: 107287 - protein, 254 aa, Arabidopsis thaliana
  peptide (1)..(254): Ceres Seq. ID no. 13621898
  misc_feature (185)..(252): Pfam Name: Mpv17 / PMP22 family Pfam Description: Mpv17 / PMP22 family
  misc_feature (1)..(254): Homolog of NCBI NO: 18422298 NR Description: peroxisomal membrane protein family (22 kDa)
  misc_feature (1)..(254): Homolog of NCBI NO: 21553640 NR Description: contains similarity to 22 kDa peroxisomal
  misc_feature (1)..(228): Homolog of NCBI NO: 9757841 NR Description: contains similarity to 22 kDa peroxisomal
  misc_feature (60)..(249): Homolog of NCBI NO: 18418319 NR Description: peroxisomal membrane protein, putative (22 kDa) thaliana] >gi|11762212|gb|AAG40384.1|AF325032_1 AT4g33900
  misc_feature (68)..(251): Homolog of NCBI NO: 15226016 NR Description: peroxisomal membrane protein, putative (22 kDa) thaliana] >gi|25411581|pir||C84522 22 kDa peroxisomal membrane
  misc_feature (60)..(230): Homolog of NCBI NO: 7485624 NR Description: hypothetical protein F17I5.90 - Arabidopsis >gi|3297814|emb|CAA19872.1| putative protein [Arabidopsis >gi|7270339|emb|CAB80107.1| putative protein [Arabidopsis
  misc_feature (69)..(249): Homolog of NCBI NO: 21594286 NR Description: unknown [Arabidopsis thaliana]
  misc_feature (69)..(249): Homolog of NCBI NO: 15241166 NR Description: expressed protein [Arabidopsis thaliana]
  misc_feature (69)..(249): Homolog of NCBI NO: 16648746 NR Description: AT5g19750/T29J13_170 [Arabidopsis thaliana]
  misc_feature (71)..(247): Homolog of NCBI NO: 15233520 NR Description: peroxisomal membrane protein (22-kDa)(PMP22)
MNIVGLSKRFFSDRRSLHGINNALLKTVFTGRKPILGFSGRSIHELRKTGNFVIPRVFSVSRNLTTKASSSSSKQPAFLRWYLRKLESHPFMTKSITTSVIYMAADLTSQMITMEPTGSFDLIRTARMASFGLIFLGPSQHLWFSYLSKILPKRDVLTTFKKIMMGQVLFGPVSNTVFYSYNAALQGENSEEIVARLKRDLLPTLKNGLMYWPVCDFVTFKYVPVHLQPLMNSSCAYIWTIYLTYMANQTKADS

SEQ ID NO: 107288 - protein, 163 aa, Arabidopsis thaliana; identical to SEQ ID NO: 29825
  peptide (1)..(163): Ceres Seq. ID no. 13621899
  misc_feature (94)..(161): Pfam Name: Mpv17 / PMP22 family Pfam Description: Mpv17 / PMP22 family
  misc_feature (1)..(163): Homolog of NCBI NO: 18422298 NR Description: peroxisomal membrane protein family (22 kDa)
  misc_feature (1)..(163): Homolog of NCBI NO: 21553640 NR Description: contains similarity to 22 kDa peroxisomal
  misc_feature (1)..(137): Homolog of NCBI NO: 9757841 NR Description: contains similarity to 22 kDa peroxisomal
  misc_feature (1)..(158): Homolog of NCBI NO: 18418319 NR Description: peroxisomal membrane protein, putative (22 kDa) thaliana] >gi|11762212|gb|AAG40384.1|AF325032_1 AT4g33900
  misc_feature (1)..(160): Homolog of NCBI NO: 15226016 NR Description: peroxisomal membrane protein, putative (22 kDa) thaliana] >gi|25411581|pir||C84522 22 kDa peroxisomal membrane
  misc_feature (1)..(139): Homolog of NCBI NO: 7485624 NR Description: hypothetical protein F17I5.90 - Arabidopsis >gi|3297814|emb|CAA19872.1| putative protein [Arabidopsis >gi|7270339|emb|CAB80107.1| putative protein [Arabidopsis
  misc_feature (1)..(158): Homolog of NCBI NO: 21594286 NR Description: unknown [Arabidopsis thaliana]
  misc_feature (1)..(158): Homolog of NCBI NO: 15241166 NR Description: expressed protein [Arabidopsis thaliana]
  misc_feature (1)..(158): Homolog of NCBI NO: 16648746 NR Description: AT5g19750/T29J13_170 [Arabidopsis thaliana]
  misc_feature (1)..(156): Homolog of NCBI NO: 15233520 NR Description: peroxisomal membrane protein (22-kDa)(PMP22)

SEQ ID NO: 107289 - DNA, 1479 bp, Arabidopsis thaliana
  misc_feature (1)..(1479): Ceres Seq. ID no. 13621911
  misc_feature: MA Experiment ID: 20000180 Result: Down-regulated in Transcription
  misc_feature: MA Experiment 20000180 PARAMETER Experiment Name: At_Germinating_Seeds_P Parameter: Age (hr) Value: 24 vs. 0
  misc_feature: MA Experiment 20000180 PARAMETER Experiment Name: At_Germinating_Seeds_P Parameter: Tissue Value: Germinating Seeds
  misc_feature: MA Experiment ID: 20000185 Result: Down-regulated in Transcription
  misc_feature: MA Experiment 20000185 PARAMETER Experiment Name: At_Roots__P Parameter: Age (day) Value: 7 vs. 21
  misc_feature: MA Experiment 20000185 PARAMETER Experiment Name: At_Roots__P Parameter: Organism Value: A. thaliana
  misc_feature: MA Experiment 20000185 PARAMETER Experiment Name: At_Roots__P Parameter: Tissue Value: Roots vs. Whole Plant
  misc_feature: MA Experiment ID: 20000234 Result: Down-regulated in Transcription
  misc_feature: MA Experiment 20000234 PARAMETER Experiment Name: At_Siliques_P Parameter: Age (day) Value: 21
  misc_feature: MA Experiment 20000234 PARAMETER Experiment Name: At_Siliques_P Parameter: Organism Value: A. thaliana
  misc_feature: MA Experiment 20000234 PARAMETER Experiment Name: At_Siliques_P Parameter: Plant Line Value: WS
  misc_feature: MA Experiment 20000234 PARAMETER Experiment Name: At_Siliques_P Parameter: Tissue Value: Less Than 5mm Siliques vs. Whole Plant
  misc_feature: MA Experiment ID: 20000235 Result: Down-regulated in Transcription
  misc_feature: MA Experiment 20000235 PARAMETER Experiment Name: At_Siliques_P Parameter: Age (day) Value: 21
  misc_feature: MA Experiment 20000235 PARAMETER Experiment Name: At_Siliques_P Parameter: Organism Value: A. thaliana
  misc_feature: MA Experiment 20000235 PARAMETER Experiment Name: At_Siliques_P Parameter: Plant Line Value: WS
  misc_feature: MA Experiment 20000235 PARAMETER Experiment Name: At_Siliques_P Parameter: Tissue Value: 5-10mm Siliques vs. Whole Plant
  misc_feature: MA Experiment ID: 20000264 Result: Down-regulated in Transcription
  misc_feature: MA Experiment 20000264 PARAMETER Experiment Name: At_Open_Flower_P Parameter: Age (day) Value: 21
  misc_feature: MA Experiment 20000264 PARAMETER Experiment Name: At_Open_Flower_P Parameter: Plant Line Value: WS
  misc_feature: MA Experiment 20000264 PARAMETER Experiment Name: At_Open_Flower_P Parameter: Tissue Value: Open Flower vs. Whole Plant
  misc_feature: MA Experiment ID: 20000265 Result: Down-regulated in Transcription
  misc_feature: MA Experiment 20000265 PARAMETER Experiment Name: At_Open_Flower_P Parameter: Age (day) Value: 21
  misc_feature: MA Experiment 20000265 PARAMETER Experiment Name: At_Open_Flower_P Parameter: Plant Line Value: WS
  misc_feature: MA Experiment 20000265 PARAMETER Experiment Name: At_Open_Flower_P Parameter: Tissue Value: Closed Flower vs. Whole Plant
  misc_feature: MA Experiment ID: 20000286 Result: Down-regulated in Transcription
  misc_feature: MA Experiment 20000286 PARAMETER Experiment Name: At_Open_Flower_P Parameter: Age (day) Value: 21
  misc_feature: MA Experiment 20000286 PARAMETER Experiment Name: At_Open_Flower_P Parameter: Plant Line Value: WS
  misc_feature: MA Experiment 20000286 PARAMETER Experiment Name: At_Open_Flower_P Parameter: Tissue Value: Half Open vs. Whole Plant
  misc_feature: MA Experiment ID: 20000439 Result: Down-regulated in Transcription
  misc_feature: MA Experiment 20000439 PARAMETER Experiment Name: At_Roots__P Parameter: Age (day) Value: 14 vs. 21
  misc_feature: MA Experiment 20000439 PARAMETER Experiment Name: At_Roots__P Parameter: Organism Value: A. thaliana
  misc_feature: MA Experiment 20000439 PARAMETER Experiment Name: At_Roots__P Parameter: Tissue Value: Roots vs. Whole Plant
  misc_feature: MA Experiment ID: 20000495 Result: Up-regulated in Transcription
  misc_feature: MA Experiment 20000495 PARAMETER Experiment Name: At_Guard_Cells_P Parameter: Harvest Date Value: 8/2/2002
  misc_feature: MA Experiment 20000495 PARAMETER Experiment Name: At_Guard_Cells_P Parameter: Organism Value: A. thaliana
  misc_feature: MA Experiment 20000495 PARAMETER Experiment Name: At_Guard_Cells_P Parameter: Tissue Value: Guard Cells vs. Leaves
  misc_feature: MA Experiment ID: 20000794 Result: Down-regulated in Transcription
  misc_feature: MA Experiment 20000794 PARAMETER Experiment Name: At_Petals_P Parameter: Age (day) Value: 23-25 days
  misc_feature: MA Experiment 20000794 PARAMETER Experiment Name: At_Petals_P Parameter: Plant Line Value: WS
  misc_feature: MA Experiment 20000794 PARAMETER Experiment Name: At_Petals_P Parameter: Tissue Value: Petals vs. Whole plant
  misc_feature: MA Experiment ID: 20001247 Result: Up-regulated in Transcription
  misc_feature: MA Experiment 20001247 PARAMETER Experiment Name: At_Far-red-induction_P Parameter: Age (day) Value: 7
  misc_feature: MA Experiment 20001247 PARAMETER Experiment Name: At_Far-red-induction_P Parameter: Light Value: Far-red vs. White
  misc_feature: MA Experiment 20001247 PARAMETER Experiment Name: At_Far-red-induction_P Parameter: Organism Value: A. thaliana
  misc_feature: MA Experiment 20001247 PARAMETER Experiment Name: At_Far-red-induction_P Parameter: Plant Line Value: Columbia
  misc_feature: MA Experiment 20001247 PARAMETER Experiment Name: At_Far-red-induction_P Parameter: Timepoint (hr) Value: 1
  misc_feature: MA Experiment 20001247 PARAMETER Experiment Name: At_Far-red-induction_P Parameter: Tissue Value: Whole Plant
  misc_feature: MA Experiment ID: 20001450 Result: Up-regulated in Transcription
  misc_feature: MA Experiment 20001450 PARAMETER Experiment Name: At_Far-red-induction_P Parameter: Age (day) Value: 7
  misc_feature: MA Experiment 20001450 PARAMETER Experiment Name: At_Far-red-induction_P Parameter: Light Value: Far-red vs. White
  misc_feature: MA Experiment 20001450 PARAMETER Experiment Name: At_Far-red-induction_P Parameter: Organism Value: A. thaliana
  misc_feature: MA Experiment 20001450 PARAMETER Experiment Name: At_Far-red-induction_P Parameter: Plant Line Value: Columbia
  misc_feature: MA Experiment 20001450 PARAMETER Experiment Name: At_Far-red-induction_P Parameter: Timepoint (hr) Value: 8
  misc_feature: MA Experiment 20001450 PARAMETER Experiment Name: At_Far-red-induction_P Parameter: Tissue Value: Whole Plant
  misc_feature: MA Experiment ID: 20001451 Result: Up-regulated in Transcription
  misc_feature: MA Experiment 20001451 PARAMETER Experiment Name: At_Far-red-induction_P Parameter: Age (day) Value: 7
  misc_feature: MA Experiment 20001451 PARAMETER Experiment Name: At_Far-red-induction_P Parameter: Light Value: Far-red vs. White
  misc_feature: MA Experiment 20001451 PARAMETER Experiment Name: At_Far-red-induction_P Parameter: Organism Value: A. thaliana
  misc_feature: MA Experiment 20001451 PARAMETER Experiment Name: At_Far-red-induction_P Parameter: Plant Line Value: Columbia
  misc_feature: MA Experiment 20001451 PARAMETER Experiment Name: At_Far-red-induction_P Parameter: Timepoint (hr) Value: 24
  misc_feature: MA Experiment 20001451 PARAMETER Experiment Name: At_Far-red-induction_P Parameter: Tissue Value: Whole Plant
  misc_feature: MA Experiment ID: 20001457 Result: Down-regulated in Transcription
  misc_feature: MA Experiment 20001457 PARAMETER Experiment Name: At_50mM_NH4NO3_L-to-H_P Parameter: Age (day) Value: Undefined
  misc_feature: MA Experiment 20001457 PARAMETER Experiment Name: At_50mM_NH4NO3_L-to-H_P Parameter: Organism Value: Undefined
  misc_feature: MA Experiment 20001457 PARAMETER Experiment Name: At_50mM_NH4NO3_L-to-H_P Parameter: Plant Line Value: Undefined
  misc_feature: MA Experiment 20001457 PARAMETER Experiment Name: At_50mM_NH4NO3_L-to-H_P Parameter: Timepoint (hr) Value: 0.5
  misc_feature: MA Experiment 20001457 PARAMETER Experiment Name: At_50mM_NH4NO3_L-to-H_P Parameter: Tissue Value: Siliques
  misc_feature: MA Experiment 20001457 PARAMETER Experiment Name: At_50mM_NH4NO3_L-to-H_P Parameter: Treatment Value: 50mM NH4NO3 vs. 100mM Manitol
  misc_feature: MA Experiment ID: 20001769 Result: Down-regulated in Transcription
  misc_feature: MA Experiment 20001769 PARAMETER Experiment Name: At_Far-red-enriched-adult_P Parameter: Age (day) Value: 28
  misc_feature: MA Experiment 20001769 PARAMETER Experiment Name: At_Far-red-enriched-adult_P Parameter: Light Value: Far-red enriched vs. White
  misc_feature: MA Experiment 20001769 PARAMETER Experiment Name: At_Far-red-enriched-adult_P Parameter: Organism Value: A. thaliana
  misc_feature: MA Experiment 20001769 PARAMETER Experiment Name: At_Far-red-enriched-adult_P Parameter: Plant Line Value: Columbia
  misc_feature: MA Experiment 20001769 PARAMETER Experiment Name: At_Far-red-enriched-adult_P Parameter: Timepoint (hr) Value: 4
  misc_feature: MA Experiment 20001769 PARAMETER Experiment Name: At_Far-red-enriched-adult_P Parameter: Tissue Value: Aerial
  misc_feature: MA Experiment ID: 20001770 Result: Down-regulated in Transcription
  misc_feature: MA Experiment 20001770 PARAMETER Experiment Name: At_Far-red-enriched-adult_P Parameter: Age (day) Value: 28
  misc_feature: MA Experiment 20001770 PARAMETER Experiment Name: At_Far-red-enriched-adult_P Parameter: Light Value: Far-red enriched vs. White
  misc_feature: MA Experiment 20001770 PARAMETER Experiment Name: At_Far-red-enriched-adult_P Parameter: Organism Value: A. thaliana
  misc_feature: MA Experiment 20001770 PARAMETER Experiment Name: At_Far-red-enriched-adult_P Parameter: Plant Line Value: Columbia
  misc_feature: MA Experiment 20001770 PARAMETER Experiment Name: At_Far-red-enriched-adult_P Parameter: Timepoint (hr) Value: 8
  misc_feature: MA Experiment 20001770 PARAMETER Experiment Name: At_Far-red-enriched-adult_P Parameter: Tissue Value: Aerial
  misc_feature: MA Experiment ID: 20001905 Result: Down-regulated in Transcription
  misc_feature: MA Experiment 20001905 PARAMETER Experiment Name: At_Drought_Reproduction_P Parameter: Age (day) Value: 40
  misc_feature: MA Experiment 20001905 PARAMETER Experiment Name: At_Drought_Reproduction_P Parameter: Organism Value: A. thaliana
  misc_feature: MA Experiment 20001905 PARAMETER Experiment Name: At_Drought_Reproduction_P Parameter: Plant Line Value: WS
  misc_feature: MA Experiment 20001905 PARAMETER Experiment Name: At_Drought_Reproduction_P Parameter: Timepoint (day) Value: 10
  misc_feature: MA Experiment 20001905 PARAMETER Experiment Name: At_Drought_Reproduction_P Parameter: Tissue Value: Rosettes
  misc_feature: MA Experiment 20001905 PARAMETER Experiment Name: At_Drought_Reproduction_P Parameter: Treatment Value: Drought vs. No Drought
acaaccatcttactctacatttcccatttttgagactcctaaatcattttaaccttcttcctcaatcgtgaccatcaccaatgacgctacacgtcattgagactgcccgagtcacccccaccgactactcagtcatcaactcagccaacttgcacaaacttcctttaactttcttcgaccttccatggctactattccagccagtcaaaagagtcttcttctacgagctcaccgagtctactcgtgaccatttccactccattatcctccctaagctcaaggactctctgtcccttatcctccgtaactatctccctctcactggccacatcacttgggagccaaacgagccaaaaccgagcataatcgtctcggaaaacggcgtcgttttggtgactatagccgagagtgacgctgacttttctcatctttccggttatggacagcgtcctttgtcagagttacatgccttggttcccaagttaccggtttctgatgactcagcgaccgctttctccatacaaatcacgttgtttcctaaccaaggattctccataggtgttgcagcacaccatgctgttttagacgggaaaacgtcaagcacttttatcaaagcttgggctcaaatctgcaaacaagaacttcaaagcatgccggagaatctaactccgtcttatgaccggtctttgatcaaatatccgacctatcttgatgaaaagatgatagagttagtgagatctctcaaagaggaccaaaccaacatcagaagcttgacttcgcttccctctagtaaactcggagacgatgtcgtgttagccacgctagttctctctcgggctgatattgagagacttagggaacaagtcaagaacgtgtcaccgagcctccacttgtcgacttttgtcattgcttacgcttacgcgtggacttgtttcgtgaaggcacgtggaggtaataaagacagatcagtgagtctcttgttcgtaggagatttcagagaccggttagatccgaagctcccggggacttacttcggaaactgtatgattccggtgggctgttataaccgtaaggcggcggagtttatggaagagaagggatttgtgacggcggctgagattattagcgatttggtgaaagggttgagttcaagaaagatagagaccattgcggacactttcgtggaaggatttagttttcagagttggagtacacagtttgggacgatagccgggtcgacccggttgggagtatacgaggcggatttcgggtggggaagacccgttaaagttgatattgtctccattgaccaaggagaagcgatcgcaatggctgagagacgtgatgagtcaggtggcgttgagattggaatgtgtttgaaaaagactgaaatggattcggtcgtgtcttttttcaacaatggtttacatagctaaactcttgttttgtaagattttaataataaggtaatgcttggtt

SEQ ID NO: 107290 - protein, 451 aa, Arabidopsis thaliana
  peptide (1)..(451): Ceres Seq. ID no. 13621912
  misc_feature (1)..(448): Pfam Name: Transferase family Pfam Description: Transferase family
  misc_feature (1)..(451): Homolog of NCBI NO: 15230048 NR Description: transferase family [Arabidopsis thaliana]
  misc_feature (1)..(449): Homolog of NCBI NO: 15230034 NR Description: transferase family [Arabidopsis thaliana]
  misc_feature (1)..(447): Homolog of NCBI NO: 15230049 NR Description: transferase family [Arabidopsis thaliana]
  misc_feature (2)..(451): Homolog of NCBI NO: 15450469 NR Description: AT5g39050/MXF12_60 [Arabidopsis thaliana]
  misc_feature (1)..(445): Homolog of NCBI NO: 15240152 NR Description: transferase family [Arabidopsis thaliana]
  misc_feature (3)..(449): Homolog of NCBI NO: 15230013 NR Description: transferase family [Arabidopsis thaliana]
  misc_feature (2)..(451): Homolog of NCBI NO: 10177550 NR Description: anthocyanin acyltransferase-like protein
  misc_feature (2)..(449): Homolog of NCBI NO: 15241632 NR Description: transferase family [Arabidopsis thaliana]
  misc_feature (2)..(446): Homolog of NCBI NO: 21593292 NR Description: acyltransferase-like protein [Arabidopsis
  misc_feature (2)..(446): Homolog of NCBI NO: 15241631 NR Description: transferase family [Arabidopsis thaliana]
MTLHVIETARVTPTDYSVINSANLHKLPLTFFDLPWLLFQPVKRVFFYELTESTRDHFHSIILPKLKDSLSLILRNYLPLTGHITWEPNEPKPSIIVSENGVVLVTIAESDADFSHLSGYGQRPLSELHALVPKLPVSDDSATAFSIQITLFPNQGFSIGVAAHHAVLDGKTSSTFIKAWAQICKQELQSMPENLTPSYDRSLIKYPTYLDEKMIELVRSLKEDQTNIRSLTSLPSSKLGDDVVLATLVLSRADIERLREQVKNVSPSLHLSTFVIAYAYAWTCFVKARGGNKDRSVSLLFVGDFRDRLDPKLPGTYFGNCMIPVGCYNRKAAEFMEEKGFVTAAEIISDLVKGLSSRKIETIADTFVEGFSFQSWSTQFGTIAGSTRLGVYEADFGWGRPVKVDIVSIDQGEAIAMAERRDESGGVEIGMCLKKTEMDSVVSFFNNGLHS

SEQ ID NO: 107291 - protein, 261 aa, Arabidopsis thaliana
  peptide (1)..(261): Ceres Seq. ID no. 13621913
  misc_feature (1)..(258): Pfam Name: Transferase family Pfam Description: Transferase family
  misc_feature (1)..(261): Homolog of NCBI NO: 15230048 NR Description: transferase family [Arabidopsis thaliana]
  misc_feature (1)..(259): Homolog of NCBI NO: 15230034 NR Description: transferase family [Arabidopsis thaliana]
  misc_feature (1)..(257): Homolog of NCBI NO: 15230049 NR Description: transferase family [Arabidopsis thaliana]
  misc_feature (1)..(261): Homolog of NCBI NO: 15450469 NR Description: AT5g39050/MXF12_60 [Arabidopsis thaliana]
  misc_feature (1)..(255): Homolog of NCBI NO: 15240152 NR Description: transferase family [Arabidopsis thaliana]
  misc_feature (1)..(259): Homolog of NCBI NO: 15230013 NR Description: transferase family [Arabidopsis thaliana]
  misc_feature (1)..(261): Homolog of NCBI NO: 10177550 NR Description: anthocyanin acyltransferase-like protein
  misc_feature (1)..(259): Homolog of NCBI NO: 15241632 NR Description: transferase family [Arabidopsis thaliana]
  misc_feature (1)..(256): Homolog of NCBI NO: 21593292 NR Description: acyltransferase-like protein [Arabidopsis
  misc_feature (1)..(256): Homolog of NCBI NO: 15241631 NR Description: transferase family [Arabidopsis thaliana]
MPENLTPSYDRSLIKYPTYLDEKMIELVRSLKEDQTNIRSLTSLPSSKLGDDVVLATLVLSRADIERLREQVKNVSPSLHLSTFVIAYAYAWTCFVKARGGNKDRSVSLLFVGDFRDRLDPKLPGTYFGNCMIPVGCYNRKAAEFMEEKGFVTAAEIISDLVKGLSSRKIETIADTFVEGFSFQSWSTQFGTIAGSTRLGVYEADFGWGRPVKVDIVSIDQGEAIAMAERRDESGGVEIGMCLKKTEMDSVVSFFNNGLHS

SEQ ID NO: 107292 - protein, 238 aa, Arabidopsis thaliana
  peptide (1)..(238): Ceres Seq. ID no. 13621914
  misc_feature (1)..(235): Pfam Name: Transferase family Pfam Description: Transferase family
  misc_feature (1)..(238): Homolog of NCBI NO: 15230048 NR Description: transferase family [Arabidopsis thaliana]
  misc_feature (1)..(236): Homolog of NCBI NO: 15230034 NR Description: transferase family [Arabidopsis thaliana]
  misc_feature (1)..(234): Homolog of NCBI NO: 15230049 NR Description: transferase family [Arabidopsis thaliana]
  misc_feature (1)..(238): Homolog of NCBI NO: 15450469 NR Description: AT5g39050/MXF12_60 [Arabidopsis thaliana]
  misc_feature (1)..(232): Homolog of NCBI NO: 15240152 NR Description: transferase family [Arabidopsis thaliana]
  misc_feature (1)..(236): Homolog of NCBI NO: 15230013 NR Description: transferase family [Arabidopsis thaliana]
  misc_feature (1)..(238): Homolog of NCBI NO: 10177550 NR Description: anthocyanin acyltransferase-like protein
  misc_feature (1)..(236): Homolog of NCBI NO: 15241632 NR Description: transferase family [Arabidopsis thaliana]
  misc_feature (1)..(233): Homolog of NCBI NO: 21593292 NR Description: acyltransferase-like protein [Arabidopsis
  misc_feature (1)..(233): Homolog of NCBI NO: 15241631 NR Description: transferase family [Arabidopsis thaliana]
MIELVRSLKEDQTNIRSLTSLPSSKLGDDVVLATLVLSRADIERLREQVKNVSPSLHLSTFVIAYAYAWTCFVKARGGNKDRSVSLLFVGDFRDRLDPKLPGTYFGNCMIPVGCYNRKAAEFMEEKGFVTAAEIISDLVKGLSSRKIETIADTFVEGFSFQSWSTQFGTIAGSTRLGVYEADFGWGRPVKVDIVSIDQGEAIAMAERRDESGGVEIGMCLKKTEMDSVVSFFNNGLHS

SEQ ID NO: 107293 - DNA, 1600 bp, Arabidopsis thaliana
  misc_feature (1)..(1600): Ceres Seq. ID no. 13622039
  misc_feature: MA Experiment ID: 108577 Result: Up-regulated in Transcription
  misc_feature: MA Experiment 108577 PARAMETER Experiment Name: At_42deg_Heat_cDNA_P Parameter: Temperature (deg C) Value: 42 vs. 22
  misc_feature: MA Experiment 108577 PARAMETER Experiment Name: At_42deg_Heat_cDNA_P Parameter: Timepoint (hr) Value: 6
  misc_feature: MA Experiment 108577 PARAMETER Experiment Name: At_42deg_Heat_cDNA_P Parameter: Tissue Value: Aerial
  misc_feature: MA Experiment ID: 20000069 Result: Down-regulated in Transcription
  misc_feature: MA Experiment 20000069 PARAMETER Experiment Name: At_100uM_ABA_Mutants_cDNA_P Parameter: Plant Line Value: CS23
  misc_feature: MA Experiment 20000069 PARAMETER Experiment Name: At_100uM_ABA_Mutants_cDNA_P Parameter: Timepoint (hr) Value: 6
  misc_feature: MA Experiment 20000069 PARAMETER Experiment Name: At_100uM_ABA_Mutants_cDNA_P Parameter: Tissue Value: Aerial
  misc_feature: MA Experiment 20000069 PARAMETER Experiment Name: At_100uM_ABA_Mutants_cDNA_P Parameter: Treatment Value: 100uM ABA vs. No Treatment
  misc_feature: MA Experiment ID: 20000087 Result: Down-regulated in Transcription
  misc_feature: MA Experiment 20000087 PARAMETER Experiment Name: At_100uM_ABA_Mutants_cDNA_P Parameter: Plant Line Value: WS
  misc_feature: MA Experiment 20000087 PARAMETER Experiment Name: At_100uM_ABA_Mutants_cDNA_P Parameter: Timepoint (hr) Value: 6
  misc_feature: MA Experiment 20000087 PARAMETER Experiment Name: At_100uM_ABA_Mutants_cDNA_P Parameter: Tissue Value: Aerial
  misc_feature: MA Experiment 20000087 PARAMETER Experiment Name: At_100uM_ABA_Mutants_cDNA_P Parameter: Treatment Value: 100uM ABA vs. No Treatment
  misc_feature: MA Experiment ID: 20000111 Result: Up-regulated in Transcription
  misc_feature: MA Experiment 20000111 PARAMETER Experiment Name: At_42deg_Heat_cDNA_P Parameter: Temperature (deg C) Value: 42 vs. 22
  misc_feature: MA Experiment 20000111 PARAMETER Experiment Name: At_42deg_Heat_cDNA_P Parameter: Timepoint (hr) Value: 6
  misc_feature: MA Experiment 20000111 PARAMETER Experiment Name: At_42deg_Heat_cDNA_P Parameter: Tissue Value: Aerial
  misc_feature: MA Experiment ID: 20000315 Result: Up-regulated in Transcription
  misc_feature: MA Experiment 20000315 PARAMETER Experiment Name: At_14day_Shoots-Roots_Sub_P Parameter: Age (day) Value: 14
  misc_feature: MA Experiment 20000315 PARAMETER Experiment Name: At_14day_Shoots-Roots_Sub_P Parameter: Organism Value: A. thaliana
  misc_feature: MA Experiment 20000315 PARAMETER Experiment Name: At_14day_Shoots-Roots_Sub_P Parameter: Plant Line Value: WS
  misc_feature: MA Experiment 20000315 PARAMETER Experiment Name: At_14day_Shoots-Roots_Sub_P Parameter: Tissue Value: Shoots vs. Whole Plant
  misc_feature: MA Experiment ID: 20000328 Result: Up-regulated in Transcription
  misc_feature: MA Experiment 20000328 PARAMETER Experiment Name: At_42deg_Heat_Sub_P Parameter: Age (day) Value: 14
  misc_feature: MA Experiment 20000328 PARAMETER Experiment Name: At_42deg_Heat_Sub_P Parameter: Organism Value: A. thaliana
  misc_feature: MA Experiment 20000328 PARAMETER Experiment Name: At_42deg_Heat_Sub_P Parameter: Plant Line Value: WS
  misc_feature: MA Experiment 20000328 PARAMETER Experiment Name: At_42deg_Heat_Sub_P Parameter: Temperature (deg C) Value: 42 vs. 22
  misc_feature: MA Experiment 20000328 PARAMETER Experiment Name: At_42deg_Heat_Sub_P Parameter: Timepoint (hr) Value: 6
  misc_feature: MA Experiment 20000328 PARAMETER Experiment Name: At_42deg_Heat_Sub_P Parameter: Tissue Value: Aerial
atgggtaaagagaagtttcacatcaacattgtggtcattggccacgtcgattctggaaagtcgacaaccactggacacttgatctacaagttgggtggtattgacaagcgtgtgatcgagaggttcgagaaggaggctgctgagatgaacaagaggtccttcaagtacgcatgggtgttggacaaacttaaggctgagcgtgagcgtggtatcaccattgacattgctctctggaagttcgagaccaccaagtactactgcactgtcattgatgctcctggtcatcgtgatttcatcaagaacatgatcactggtacctcccaggctgattgtgctgtccttatcattgactccaccactggtggttttgaggctggtatctccaaggatggtcagacccgtgagcacgctctccttgctttcacccttggtgtcaagcagatgatctgctgttgtaacaagatggatgccactacccccaagtactccaaggccaggtacgatgaaatcatcaaggaggtgtcttcctacttgaagaaggttggttacaaccccgacaaaatcccatttgtgcccatctctggatttgagggtgacaacatgattgagaggtccaccaaccttgactggtacaagggaccaactctccttgaggctcttgaccagatcaacgagcccaagaggccgtcagacaagccccttcgtctcccacttcaggatgtctacaagattggtggtattggaacggtgccagtgggacgtgttgagactggtatgatcaagcctggtatggttgtgacctttgctcccacaggattgaccactgaggtcaagtctgttgagatgcaccacgagtctcttcttgaggcacttccaggtgacaacgttgggttcaatgttaagaatgttgccgtgaaggatcttaagagagggtacgtcgcctccaactccaaggatgaccctgccaagggtgctgctaacttcacctcccaggtcatcatcatgaaccaccctggtcagattggtaacggttacgccccagtcttggattgccacacctctcacattgcagtcaagttctctgagatcttgaccaagattgacaggcgttctggtaaggagattgagaaggagcccaaattcttgaagaatggtgatgctggtatggtgaagatgactccaaccaagcccatggttgtggagaccttctctgagtacccaccacttggacgtttcgctgttagggacatgaggcagactgttgcagtcggtgttatcaagagtgttgacaagaaggacccaaccggagccaaggttaccaaggctgcagttaagaagggtgcaaagtgaactcgaatcctcaaaactctatccgcagatgaatcaaaaaacaatattagtttctttactttagtttggtatttggtcgcgtgttatagcttcgtttcttctccatcggaactctgttcccggaactgggttcttgatcggaggtggcggagctactttgcacctattttgcttttgaattgttatcaattttgaacctatttggagattcggttatatgatgtgattttccgaggatattctctctttt

SEQ ID NO: 107294 - protein, 449 aa, Arabidopsis thaliana; identical to SEQ ID NO: 27284
  peptide (1)..(449): Ceres Seq. ID no. 13622040
  misc_feature (5)..(227): Pfam Name: Elongation factor Tu GTP binding domain Pfam Description: Elongation factor Tu GTP binding domain
  misc_feature (1)..(449): Homolog of NCBI NO: 25407012 NR Description: protein T6D22.2 [imported] - Arabidopsis thaliana
  misc_feature (1)..(449): Homolog of NCBI NO: 15239308 NR Description: elongation factor 1-alpha (EF-1-alpha)
  misc_feature (1)..(449): Homolog of NCBI NO: 25407012 NR Description: protein T6D22.2 [imported] - Arabidopsis thaliana
  misc_feature (1)..(449): Homolog of NCBI NO: 99688 NR Description: translation elongation factor eEF-1 alpha chain
  misc_feature (1)..(449): Homolog of NCBI NO: 13605682 NR Description: At1g07930/T6D22_3 [Arabidopsis thaliana]
  misc_feature (1)..(449): Homolog of NCBI NO: 13430510 NR Description: putative translation elongation factor eEF-1
  misc_feature (1)..(449): Homolog of NCBI NO: 23397097 NR Description: putative translation elongation factor eEF-1
  misc_feature (1)..(449): Homolog of NCBI NO: 18086389 NR Description: At1g07930/T6D22_3 [Arabidopsis thaliana]
  misc_feature (1)..(449): Homolog of NCBI NO: 17064954 NR Description: putative elongation factor 1-a [Arabidopsis
  misc_feature (1)..(449): Homolog of NCBI NO: 15081765 NR Description: At1g07930/T6D22_3 [Arabidopsis thaliana]

SEQ ID NO: 107295 - protein, 401 aa, Arabidopsis thaliana; identical to SEQ ID NO: 21437
  peptide (1)..(401): Ceres Seq. ID no. 13622041
  misc_feature (1)..(179): Pfam Name: Elongation factor Tu GTP binding domain Pfam Description: Elongation factor Tu GTP binding domain
  misc_feature (1)..(401): Homolog of NCBI NO: 25407012 NR Description: protein T6D22.2 [imported] - Arabidopsis thaliana
  misc_feature (1)..(401): Homolog of NCBI NO: 15239308 NR Description: elongation factor 1-alpha (EF-1-alpha)
  misc_feature (1)..(401): Homolog of NCBI NO: 25407012 NR Description: protein T6D22.2 [imported] - Arabidopsis thaliana
  misc_feature (1)..(401): Homolog of NCBI NO: 99688 NR Description: translation elongation factor eEF-1 alpha chain
  misc_feature (1)..(401): Homolog of NCBI NO: 13605682 NR Description: At1g07930/T6D22_3 [Arabidopsis thaliana]
  misc_feature (1)..(401): Homolog of NCBI NO: 13430510 NR Description: putative translation elongation factor eEF-1
  misc_feature (1)..(401): Homolog of NCBI NO: 23397097 NR Description: putative translation elongation factor eEF-1
  misc_feature (1)..(401): Homolog of NCBI NO: 18086389 NR Description: At1g07930/T6D22_3 [Arabidopsis thaliana]
  misc_feature (1)..(401): Homolog of NCBI NO: 17064954 NR Description: putative elongation factor 1-a [Arabidopsis
  misc_feature (1)..(401): Homolog of NCBI NO: 15081765 NR Description: At1g07930/T6D22_3 [Arabidopsis thaliana]

SEQ ID NO: 107296 - protein, 348 aa, Arabidopsis thaliana; identical to SEQ ID NO: 21438
  peptide (1)..(348): Ceres Seq. ID no. 13622042
  misc_feature (1)..(126): Pfam Name: Elongation factor Tu GTP binding domain Pfam Description: Elongation factor Tu GTP binding domain
  misc_feature (1)..(348): Homolog of NCBI NO: 25407012 NR Description: protein T6D22.2 [imported] - Arabidopsis thaliana
  misc_feature (1)..(348): Homolog of NCBI NO: 15239308 NR Description: elongation factor 1-alpha (EF-1-alpha)
  misc_feature (1)..(348): Homolog of NCBI NO: 25407012 NR Description: protein T6D22.2 [imported] - Arabidopsis thaliana
  misc_feature (1)..(348): Homolog of NCBI NO: 99688 NR Description: translation elongation factor eEF-1 alpha chain
  misc_feature (1)..(348): Homolog of NCBI NO: 13605682 NR Description: At1g07930/T6D22_3 [Arabidopsis thaliana]
  misc_feature (1)..(348): Homolog of NCBI NO: 13430510 NR Description: putative translation elongation factor eEF-1
  misc_feature (1)..(348): Homolog of NCBI NO: 23397097 NR Description: putative translation elongation factor eEF-1
  misc_feature (1)..(348): Homolog of NCBI NO: 18086389 NR Description: At1g07930/T6D22_3 [Arabidopsis thaliana]
  misc_feature (1)..(348): Homolog of NCBI NO: 17064954 NR Description: putative elongation factor 1-a [Arabidopsis
  misc_feature (1)..(348): Homolog of NCBI NO: 15081765 NR Description: At1g07930/T6D22_3 [Arabidopsis thaliana]

SEQ ID NO: 107297 - DNA, 1272 bp, Arabidopsis thaliana
  misc_feature (1)..(1272): Ceres Seq. ID no. 13622043
  misc_feature: MA Experiment ID: 108434 Result: Up-regulated in Transcription
  misc_feature: MA Experiment 108434 PARAMETER Experiment Name: At_Root_Tips_cDNA_P Parameter: Tissue Value: Root Tips
  misc_feature: MA Experiment ID: 108461 Result: Up-regulated in Transcription
  misc_feature: MA Experiment 108461 PARAMETER Experiment Name: At_Germinating_Seeds_cDNA_P Parameter: Age (day) Value: 1 vs. 0
  misc_feature: MA Experiment 108461 PARAMETER Experiment Name: At_Germinating_Seeds_cDNA_P Parameter: Tissue Value: Germinating Seeds
  misc_feature: MA Experiment ID: 108462 Result: Up-regulated in Transcription
  misc_feature: MA Experiment 108462 PARAMETER Experiment Name: At_Germinating_Seeds_cDNA_P Parameter: Age (day) Value: 2 vs. 0
  misc_feature: MA Experiment 108462 PARAMETER Experiment Name: At_Germinating_Seeds_cDNA_P Parameter: Tissue Value: Germinating Seeds
  misc_feature: MA Experiment ID: 108464 Result: Up-regulated in Transcription
  misc_feature: MA Experiment 108464 PARAMETER Experiment Name: At_Germinating_Seeds_cDNA_P Parameter: Age (day) Value: 4 vs. 0
  misc_feature: MA Experiment 108464 PARAMETER Experiment Name: At_Germinating_Seeds_cDNA_P Parameter: Tissue Value: Germinating Seeds
  misc_feature: MA Experiment ID: 108577 Result: Down-regulated in Transcription
  misc_feature: MA Experiment 108577 PARAMETER Experiment Name: At_42deg_Heat_cDNA_P Parameter: Temperature (deg C) Value: 42 vs. 22
  misc_feature: MA Experiment 108577 PARAMETER Experiment Name: At_42deg_Heat_cDNA_P Parameter: Timepoint (hr) Value: 6
  misc_feature: MA Experiment 108577 PARAMETER Experiment Name: At_42deg_Heat_cDNA_P Parameter: Tissue Value: Aerial
  misc_feature: MA Experiment ID: 108595 Result: Down-regulated in Transcription
  misc_feature: MA Experiment 108595 PARAMETER Experiment Name: At_Ler-pi_Ovule_cDNA_P Parameter: Plant Line Value: null
  misc_feature: MA Experiment ID: 20000087 Result: Down-regulated in Transcription
  misc_feature: MA Experiment 20000087 PARAMETER Experiment Name: At_100uM_ABA_Mutants_cDNA_P Parameter: Plant Line Value: WS
  misc_feature: MA Experiment 20000087 PARAMETER Experiment Name: At_100uM_ABA_Mutants_cDNA_P Parameter: Timepoint (hr) Value: 6
  misc_feature: MA Experiment 20000087 PARAMETER Experiment Name: At_100uM_ABA_Mutants_cDNA_P Parameter: Tissue Value: Aerial
  misc_feature: MA Experiment 20000087 PARAMETER Experiment Name: At_100uM_ABA_Mutants_cDNA_P Parameter: Treatment Value: 100uM ABA vs. No Treatment
  misc_feature: MA Experiment ID: 20000111 Result: Down-regulated in Transcription
  misc_feature: MA Experiment 20000111 PARAMETER Experiment Name: At_42deg_Heat_cDNA_P Parameter: Temperature (deg C) Value: 42 vs. 22
  misc_feature: MA Experiment 20000111 PARAMETER Experiment Name: At_42deg_Heat_cDNA_P Parameter: Timepoint (hr) Value: 6
  misc_feature: MA Experiment 20000111 PARAMETER Experiment Name: At_42deg_Heat_cDNA_P Parameter: Tissue Value: Aerial
  misc_feature: MA Experiment ID: 20000113 Result: Down-regulated in Transcription
  misc_feature: MA Experiment 20000113 PARAMETER Experiment Name: At_42deg_Heat_cDNA_P Parameter: Temperature (deg C) Value: 42 vs. 22
  misc_feature: MA Experiment 20000113 PARAMETER Experiment Name: At_42deg_Heat_cDNA_P Parameter: Timepoint (hr) Value: 8
  misc_feature: MA Experiment 20000113 PARAMETER Experiment Name: At_42deg_Heat_cDNA_P Parameter: Tissue Value: Aerial
  misc_feature: MA Experiment ID: 20000173 Result: Down-regulated in Transcription
  misc_feature: MA Experiment 20000173 PARAMETER Experiment Name: At_42deg_Heat_P Parameter: Age (day) Value: 14
  misc_feature: MA Experiment 20000173 PARAMETER Experiment Name: At_42deg_Heat_P Parameter: Organism Value: A. thaliana
  misc_feature: MA Experiment 20000173 PARAMETER Experiment Name: At_42deg_Heat_P Parameter: Plant Line Value: WS
  misc_feature: MA Experiment 20000173 PARAMETER Experiment Name: At_42deg_Heat_P Parameter: Temperature (deg C) Value: 42 vs. 22
  misc_feature: MA Experiment 20000173 PARAMETER Experiment Name: At_42deg_Heat_P Parameter: Timepoint (hr) Value: 6
  misc_feature: MA Experiment 20000173 PARAMETER Experiment Name: At_42deg_Heat_P Parameter: Tissue Value: Aerial
  misc_feature: MA Experiment ID: 20000180 Result: Up-regulated in Transcription
  misc_feature: MA Experiment 20000180 PARAMETER Experiment Name: At_Germinating_Seeds_P Parameter: Age (hr) Value: 24 vs. 0
  misc_feature: MA Experiment 20000180 PARAMETER Experiment Name: At_Germinating_Seeds_P Parameter: Tissue Value: Germinating Seeds
  misc_feature: MA Experiment ID: 20000227 Result: Up-regulated in Transcription
  misc_feature: MA Experiment 20000227 PARAMETER Experiment Name: At_Root-Tips-vs-Tops_P Parameter: Tissue Value: Root Tips vs. Root Tops
  misc_feature: MA Experiment ID: 20000267 Result: Down-regulated in Transcription
  misc_feature: MA Experiment 20000267 PARAMETER Experiment Name: At_Drought_P Parameter: Age (day) Value: 7
  misc_feature: MA Experiment 20000267 PARAMETER Experiment Name: At_Drought_P Parameter: Organism Value: A. thaliana
  misc_feature: MA Experiment 20000267 PARAMETER Experiment Name: At_Drought_P Parameter: Plant Line Value: WS
  misc_feature: MA Experiment 20000267 PARAMETER Experiment Name: At_Drought_P Parameter: Timepoint (hr) Value: 6
  misc_feature: MA Experiment 20000267 PARAMETER Experiment Name: At_Drought_P Parameter: Tissue Value: Whole Plant
  misc_feature: MA Experiment 20000267 PARAMETER Experiment Name: At_Drought_P Parameter: Treatment Value: Drought vs. No Drought
  misc_feature: MA Experiment ID: 20000436 Result: Down-regulated in Transcription
  misc_feature: MA Experiment 20000436 PARAMETER Experiment Name: At_Drought_P Parameter: Age (day) Value: 7
  misc_feature: MA Experiment 20000436 PARAMETER Experiment Name: At_Drought_P Parameter: Organism Value: A. thaliana
  misc_feature: MA Experiment 20000436 PARAMETER Experiment Name: At_Drought_P Parameter: Plant Line Value: WS
  misc_feature: MA Experiment 20000436 PARAMETER Experiment Name: At_Drought_P Parameter: Timepoint (hr) Value: 12
  misc_feature: MA Experiment 20000436 PARAMETER Experiment Name: At_Drought_P Parameter: Tissue Value: Whole Plant
  misc_feature: MA Experiment 20000436 PARAMETER Experiment Name: At_Drought_P Parameter: Treatment Value: Drought vs. No Drought
  misc_feature: MA Experiment ID: 20000437 Result: Down-regulated in Transcription
  misc_feature: MA Experiment 20000437 PARAMETER Experiment Name: At_Drought_P Parameter: Age (day) Value: 8
  misc_feature: MA Experiment 20000437 PARAMETER Experiment Name: At_Drought_P Parameter: Organism Value: A. thaliana
  misc_feature: MA Experiment 20000437 PARAMETER Experiment Name: At_Drought_P Parameter: Plant Line Value: WS
  misc_feature: MA Experiment 20000437 PARAMETER Experiment Name: At_Drought_P Parameter: Timepoint (hr) Value: 24
  misc_feature: MA Experiment 20000437 PARAMETER Experiment Name: At_Drought_P Parameter: Tissue Value: Whole Plant
  misc_feature: MA Experiment 20000437 PARAMETER Experiment Name: At_Drought_P Parameter: Treatment Value: Drought vs. No Drought
  misc_feature: MA Experiment ID: 20001247 Result: Up-regulated in Transcription
  misc_feature: MA Experiment 20001247 PARAMETER Experiment Name: At_Far-red-induction_P Parameter: Age (day) Value: 7
  misc_feature: MA Experiment 20001247 PARAMETER Experiment Name: At_Far-red-induction_P Parameter: Light Value: Far-red vs. White
  misc_feature: MA Experiment 20001247 PARAMETER Experiment Name: At_Far-red-induction_P Parameter: Organism Value: A. thaliana
  misc_feature: MA Experiment 20001247 PARAMETER Experiment Name: At_Far-red-induction_P Parameter: Plant Line Value: Columbia
  misc_feature: MA Experiment 20001247 PARAMETER Experiment Name: At_Far-red-induction_P Parameter: Timepoint (hr) Value: 1
  misc_feature: MA Experiment 20001247 PARAMETER Experiment Name: At_Far-red-induction_P Parameter: Tissue Value: Whole Plant
  misc_feature: MA Experiment ID: 20001248 Result: Up-regulated in Transcription
  misc_feature: MA Experiment 20001248 PARAMETER Experiment Name: At_Far-red-induction_P Parameter: Age (day) Value: 7
  misc_feature: MA Experiment 20001248 PARAMETER Experiment Name: At_Far-red-induction_P Parameter: Light Value: Far-red vs. White
  misc_feature: MA Experiment 20001248 PARAMETER Experiment Name: At_Far-red-induction_P Parameter: Organism Value: A. thaliana
  misc_feature: MA Experiment 20001248 PARAMETER Experiment Name: At_Far-red-induction_P Parameter: Plant Line Value: Columbia
  misc_feature: MA Experiment 20001248 PARAMETER Experiment Name: At_Far-red-induction_P Parameter: Timepoint (hr) Value: 4
  misc_feature: MA Experiment 20001248 PARAMETER Experiment Name: At_Far-red-induction_P Parameter: Tissue Value: Whole Plant
  misc_feature: MA Experiment ID: 20001450 Result: Up-regulated in Transcription
  misc_feature: MA Experiment 20001450 PARAMETER Experiment Name: At_Far-red-induction_P Parameter: Age (day) Value: 7
  misc_feature: MA Experiment 20001450 PARAMETER Experiment Name: At_Far-red-induction_P Parameter: Light Value: Far-red vs. White
  misc_feature: MA Experiment 20001450 PARAMETER Experiment Name: At_Far-red-induction_P Parameter: Organism Value: A. thaliana
  misc_feature: MA Experiment 20001450 PARAMETER Experiment Name: At_Far-red-induction_P Parameter: Plant Line Value: Columbia
  misc_feature: MA Experiment 20001450 PARAMETER Experiment Name: At_Far-red-induction_P Parameter: Timepoint (hr) Value: 8
  misc_feature: MA Experiment 20001450 PARAMETER Experiment Name: At_Far-red-induction_P Parameter: Tissue Value: Whole Plant
  misc_feature: MA Experiment ID: 20001451 Result: Up-regulated in Transcription
  misc_feature: MA Experiment 20001451 PARAMETER Experiment Name: At_Far-red-induction_P Parameter: Age (day) Value: 7
  misc_feature: MA Experiment 20001451 PARAMETER Experiment Name: At_Far-red-induction_P Parameter: Light Value: Far-red vs. White
  misc_feature: MA Experiment 20001451 PARAMETER Experiment Name: At_Far-red-induction_P Parameter: Organism Value: A. thaliana
  misc_feature: MA Experiment 20001451 PARAMETER Experiment Name: At_Far-red-induction_P Parameter: Plant Line Value: Columbia
  misc_feature: MA Experiment 20001451 PARAMETER Experiment Name: At_Far-red-induction_P Parameter: Timepoint (hr) Value: 24
  misc_feature: MA Experiment 20001451 PARAMETER Experiment Name: At_Far-red-induction_P Parameter: Tissue Value: Whole Plant
  misc_feature: MA Experiment ID: 20001554 Result: Down-regulated in Transcription
  misc_feature: MA Experiment 20001554 PARAMETER Experiment Name: At_Drought_Soil_Dry_P Parameter: Age (day) Value: 21
  misc_feature: MA Experiment 20001554 PARAMETER Experiment Name: At_Drought_Soil_Dry_P Parameter: Organism Value: A. thaliana
  misc_feature: MA Experiment 20001554 PARAMETER Experiment Name: At_Drought_Soil_Dry_P Parameter: Plant Line Value: WS
  misc_feature: MA Experiment 20001554 PARAMETER Experiment Name: At_Drought_Soil_Dry_P Parameter: Post Timepoint (hr) Value: None
  misc_feature: MA Experiment 20001554 PARAMETER Experiment Name: At_Drought_Soil_Dry_P Parameter: Post-Treatment Value: None
  misc_feature: MA Experiment 20001554 PARAMETER Experiment Name: At_Drought_Soil_Dry_P Parameter: Timepoint (day) Value: 7
  misc_feature: MA Experiment 20001554 PARAMETER Experiment Name: At_Drought_Soil_Dry_P Parameter: Treatment Value: Drought vs. No Drought
  misc_feature: MA Experiment ID: 20001555 Result: Down-regulated in Transcription
  misc_feature: MA Experiment 20001555 PARAMETER Experiment Name: At_Drought_Soil_Dry_P Parameter: Age (day) Value: 24
  misc_feature: MA Experiment 20001555 PARAMETER Experiment Name: At_Drought_Soil_Dry_P Parameter: Organism Value: A. thaliana
  misc_feature: MA Experiment 20001555 PARAMETER Experiment Name: At_Drought_Soil_Dry_P Parameter: Plant Line Value: WS
  misc_feature: MA Experiment 20001555 PARAMETER Experiment Name: At_Drought_Soil_Dry_P Parameter: Post Timepoint (hr) Value: None
  misc_feature: MA Experiment 20001555 PARAMETER Experiment Name: At_Drought_Soil_Dry_P Parameter: Post-Treatment Value: None
  misc_feature: MA Experiment 20001555 PARAMETER Experiment Name: At_Drought_Soil_Dry_P Parameter: Timepoint (day) Value: 10
  misc_feature: MA Experiment 20001555 PARAMETER Experiment Name: At_Drought_Soil_Dry_P Parameter: Treatment Value: Drought vs. No Drought
  misc_feature: MA Experiment ID: 20001560 Result: Up-regulated in Transcription
  misc_feature: MA Experiment 20001560 PARAMETER Experiment Name: At_Drought_Soil_Dry_P Parameter: Age (day) Value: 28
  misc_feature: MA Experiment 20001560 PARAMETER Experiment Name: At_Drought_Soil_Dry_P Parameter: Organism Value: A. thaliana
  misc_feature: MA Experiment 20001560 PARAMETER Experiment Name: At_Drought_Soil_Dry_P Parameter: Plant Line Value: WS
  misc_feature: MA Experiment 20001560 PARAMETER Experiment Name: At_Drought_Soil_Dry_P Parameter: Post Timepoint (hr) Value: None
  misc_feature: MA Experiment 20001560 PARAMETER Experiment Name: At_Drought_Soil_Dry_P Parameter: Post-Treatment Value: None
  misc_feature: MA Experiment 20001560 PARAMETER Experiment Name: At_Drought_Soil_Dry_P Parameter: Timepoint (day) Value: 14
  misc_feature: MA Experiment 20001560 PARAMETER Experiment Name: At_Drought_Soil_Dry_P Parameter: Treatment Value: Drought vs. No Drought
  misc_feature: MA Experiment ID: 20001904 Result: Down-regulated in Transcription
  misc_feature: MA Experiment 20001904 PARAMETER Experiment Name: At_Drought_Reproduction_P Parameter: Age (day) Value: 37
  misc_feature: MA Experiment 20001904 PARAMETER Experiment Name: At_Drought_Reproduction_P Parameter: Organism Value: A. thaliana
  misc_feature: MA Experiment 20001904 PARAMETER Experiment Name: At_Drought_Reproduction_P Parameter: Plant Line Value: WS
  misc_feature: MA Experiment 20001904 PARAMETER Experiment Name: At_Drought_Reproduction_P Parameter: Timepoint (day) Value: 7
  misc_feature: MA Experiment 20001904 PARAMETER Experiment Name: At_Drought_Reproduction_P Parameter: Tissue Value: Rosettes
  misc_feature: MA Experiment 20001904 PARAMETER Experiment Name: At_Drought_Reproduction_P Parameter: Treatment Value: Drought vs. No Drought
  misc_feature: MA Experiment ID: 20001905 Result: Down-regulated in Transcription
  misc_feature: MA Experiment 20001905 PARAMETER Experiment Name: At_Drought_Reproduction_P Parameter: Age (day) Value: 40
  misc_feature: MA Experiment 20001905 PARAMETER Experiment Name: At_Drought_Reproduction_P Parameter: Organism Value: A. thaliana
  misc_feature: MA Experiment 20001905 PARAMETER Experiment Name: At_Drought_Reproduction_P Parameter: Plant Line Value: WS
  misc_feature: MA Experiment 20001905 PARAMETER Experiment Name: At_Drought_Reproduction_P Parameter: Timepoint (day) Value: 10
  misc_feature: MA Experiment 20001905 PARAMETER Experiment Name: At_Drought_Reproduction_P Parameter: Tissue Value: Rosettes
  misc_feature: MA Experiment 20001905 PARAMETER Experiment Name: At_Drought_Reproduction_P Parameter: Treatment Value: Drought vs. No Drought
  misc_feature: MA Experiment ID: 20001911 Result: Down-regulated in Transcription
  misc_feature: MA Experiment 20001911 PARAMETER Experiment Name: At_Drought_Reproduction_P Parameter: Age (day) Value: 40
  misc_feature: MA Experiment 20001911 PARAMETER Experiment Name: At_Drought_Reproduction_P Parameter: Organism Value: A. thaliana
  misc_feature: MA Experiment 20001911 PARAMETER Experiment Name: At_Drought_Reproduction_P Parameter: Plant Line Value: WS
  misc_feature: MA Experiment 20001911 PARAMETER Experiment Name: At_Drought_Reproduction_P Parameter: Timepoint (day) Value: 10
  misc_feature: MA Experiment 20001911 PARAMETER Experiment Name: At_Drought_Reproduction_P Parameter: Tissue Value: Flowers
  misc_feature: MA Experiment 20001911 PARAMETER Experiment Name: At_Drought_Reproduction_P Parameter: Treatment Value: Drought vs. No Drought
agctcttccccaccactccgattcatctttatcctctctctcatctcgtccgttgttgcataagtgctatggatctcgcgtcgaatcttggtgggaagatcgataaatccgatgttctcaccgccgtcgaaaagtatgagcaatatcatgtcttccatggaggaaacgaggaagagagaaaagccaattatactgacatggttaataagtactatgaccttgctactagcttttatgagtacggatggggagaatccttccattttgcacaaagatggaaaggagaatcgcttcgagagagtattaagcgacacgagcactttcttgctcttcagcttggcatccaaccaggacaaaaggtactggatgtaggatgtggaattggtggaccgttgagggaaattgcaagattcagcaattcagttgttaccgggctcaacaataacgaataccagatcaccagaggcaaggaactaaaccgacttgcaggtgtcgacaagacatgtaactttgtcaaggctgacttcatgaagatgccattcccggaaaacagtttcgatgcagtttatgcaatagaagcaacttgccatgcacctgatgcgtatggatgctacaaagagatctacagagtgctaaagcctgggcaatgttttgctgcctatgagtggtgtatgactgatgcatttgaccctgataacgccgaacatcagaaaataaagggagagatagagattggagatggtcttcctgacattaggctgactacaaaatgcctcgaagctctgaagcaggccggttttgaagtgatatgggaaaaggatctggccaaggactcgccggtcccatggtacttacctcttgacaaaaatcatttctcactcagtagcttccgccttacagctgttggacgattcataaccaaaaacatggtcaagatccttgaatacataagacttgcacctcaaggaagccaaagggtctcaaatttcctggagcaggctgcggaaggattagtcgacggtggaaggagagagattttcacgccaatgtatttcttcttggcccggaagccagagtaagcggatgagagatggcgatggtcatcgtaggtcgaatgaagtgacaaaatttctcaatttgcagtcttattttctatgtttatcggatttgttgcagagtttcttattcaccaactatattttggatgttcgtaacatgtcacgtgttgttcatgtgcactctgcctgaaatctgaatcatgtgcacatgccc

SEQ ID NO: 107298 - protein, 358 aa, Arabidopsis thaliana
  peptide (1)..(358): Ceres Seq. ID no. 13622044
  misc_feature (73)..(274): Pfam Name: ubiE/COQ5 methyltransferase family Pfam Description: ubiE/COQ5 methyltransferase family
  misc_feature (23)..(358): Homolog of NCBI NO: 15240691 NR Description: 24-sterol C-methyltransferase [Arabidopsis
  misc_feature (23)..(358): Homolog of NCBI NO: 21434843 NR Description: cephalopod [Arabidopsis thaliana]
  misc_feature (20)..(358): Homolog of NCBI NO: 7443720 NR Description: probable sterol 24-C-methyltransferase (EC
  misc_feature (22)..(357): Homolog of NCBI NO: 7443719 NR Description: sterol 24-C-methyltransferase (EC 2.1.1.41) -
  misc_feature (22)..(357): Homolog of NCBI NO: 7443716 NR Description: sterol 24-C-methyltransferase (EC 2.1.1.41)
  misc_feature (22)..(357): Homolog of NCBI NO: 3560474 NR Description: S-adenosyl-methionine-sterol-C- methyltransferase
  misc_feature (22)..(357): Homolog of NCBI NO: 34393309 NR Description: cycloartenol-C24-methyltransferase [Oryza sativa
  misc_feature (22)..(357): Homolog of NCBI NO: 7443715 NR Description: sterol 24-C-methyltransferase (EC 2.1.1.41) -
  misc_feature (22)..(357): Homolog of NCBI NO: 3560531 NR Description: cycloartenol-C24-methyltransferase [Oryza sativa
  misc_feature (24)..(357): Homolog of NCBI NO: 3603295 NR Description: S-adenosyl-methionine
LFPTTPIHLYPLSHLVRCCISAMDLASNLGGKIDKSDVLTAVEKYEQYHVFHGGNEEERKANYTDMVNKYYDLATSFYEYGWGESFHFAQRWKGESLRESIKRHEHFLALQLGIQPGQKVLDVGCGIGGPLREIARFSNSVVTGLNNNEYQITRGKELNRLAGVDKTCNFVKADFMKMPFPENSFDAVYAIEATCHAPDAYGCYKEIYRVLKPGQCFAAYEWCMTDAFDPDNAEHQKIKGEIEIGDGLPDIRLTTKCLEALKQAGFEVIWEKDLAKDSPVPWYLPLDKNHFSLSSFRLTAVGRFITKNMVKILEYIRLAPQGSQRVSNFLEQAAEGLVDGGRREIFTPMYFFLARKPE

SEQ ID NO: 107299 - protein, 336 aa, Arabidopsis thaliana; identical to SEQ ID NO: 26651
  peptide (1)..(336): Ceres Seq. ID no. 13622045
  misc_feature (51)..(252): Pfam Name: ubiE/COQ5 methyltransferase family Pfam Description: ubiE/COQ5 methyltransferase family
  misc_feature (1)..(336): Homolog of NCBI NO: 15240691 NR Description: 24-sterol C-methyltransferase [Arabidopsis
  misc_feature (1)..(336): Homolog of NCBI NO: 21434843 NR Description: cephalopod [Arabidopsis thaliana]
  misc_feature (1)..(336): Homolog of NCBI NO: 7443720 NR Description: probable sterol 24-C-methyltransferase (EC
  misc_feature (1)..(335): Homolog of NCBI NO: 7443719 NR Description: sterol 24-C-methyltransferase (EC 2.1.1.41) -
  misc_feature (1)..(335): Homolog of NCBI NO: 7443716 NR Description: sterol 24-C-methyltransferase (EC 2.1.1.41)
  misc_feature (1)..(335): Homolog of NCBI NO: 3560474 NR Description: S-adenosyl-methionine-sterol-C- methyltransferase
  misc_feature (1)..(335): Homolog of NCBI NO: 34393309 NR Description: cycloartenol-C24-methyltransferase [Oryza sativa
  misc_feature (1)..(335): Homolog of NCBI NO: 7443715 NR Description: sterol 24-C-methyltransferase (EC 2.1.1.41) -
  misc_feature (1)..(335): Homolog of NCBI NO: 3560531 NR Description: cycloartenol-C24-methyltransferase [Oryza sativa
  misc_feature (2)..(335): Homolog of NCBI NO: 3603295 NR Description: S-adenosyl-methionine

SEQ ID NO: 107300 - protein, 293 aa, Arabidopsis thaliana; identical to SEQ ID NO: 26652
  peptide (1)..(293): Ceres Seq. ID no. 13622046
  misc_feature (8)..(209): Pfam Name: ubiE/COQ5 methyltransferase family Pfam Description: ubiE/COQ5 methyltransferase family
  misc_feature (1)..(293): Homolog of NCBI NO: 15240691 NR Description: 24-sterol C-methyltransferase [Arabidopsis
  misc_feature (1)..(293): Homolog of NCBI NO: 21434843 NR Description: cephalopod [Arabidopsis thaliana]
  misc_feature (1)..(293): Homolog of NCBI NO: 7443720 NR Description: probable sterol 24-C-methyltransferase (EC
  misc_feature (1)..(292): Homolog of NCBI NO: 7443719 NR Description: sterol 24-C-methyltransferase (EC 2.1.1.41) -
  misc_feature (1)..(292): Homolog of NCBI NO: 7443716 NR Description: sterol 24-C-methyltransferase (EC 2.1.1.41)
  misc_feature (1)..(292): Homolog of NCBI NO: 3560474 NR Description: S-adenosyl-methionine-sterol-C- methyltransferase
  misc_feature (1)..(292): Homolog of NCBI NO: 34393309 NR Description: cycloartenol-C24-methyltransferase [Oryza sativa
  misc_feature (1)..(292): Homolog of NCBI NO: 7443715 NR Description: sterol 24-C-methyltransferase (EC 2.1.1.41) -
  misc_feature (1)..(292): Homolog of NCBI NO: 3560531 NR Description: cycloartenol-C24-methyltransferase [Oryza sativa
  misc_feature (1)..(292): Homolog of NCBI NO: 3603295 NR Description: S-adenosyl-methionine

SEQ ID NO: 107301 - DNA, 728 bp, Arabidopsis thaliana
  misc_feature (1)..(728): Ceres Seq. ID no. 13622136
  misc_feature: MA Experiment ID: 20000306 Result: Up-regulated in Transcription
  misc_feature: MA Experiment 20000306 PARAMETER Experiment Name: At_Germinating_Seeds_Sub_P Parameter: Age (hr) Value: 6 vs. 0
  misc_feature: MA Experiment 20000306 PARAMETER Experiment Name: At_Germinating_Seeds_Sub_P Parameter: Organism Value: A. thaliana
  misc_feature: MA Experiment 20000306 PARAMETER Experiment Name: At_Germinating_Seeds_Sub_P Parameter: Plant Line Value: WS
  misc_feature: MA Experiment 20000306 PARAMETER Experiment Name: At_Germinating_Seeds_Sub_P Parameter: Tissue Value: Germinating Seeds
  misc_feature: MA Experiment ID: 20000307 Result: Up-regulated in Transcription
  misc_feature: MA Experiment 20000307 PARAMETER Experiment Name: At_Germinating_Seeds_Sub_P Parameter: Age (hr) Value: 24 vs. 0
  misc_feature: MA Experiment 20000307 PARAMETER Experiment Name: At_Germinating_Seeds_Sub_P Parameter: Organism Value: A. thaliana
  misc_feature: MA Experiment 20000307 PARAMETER Experiment Name: At_Germinating_Seeds_Sub_P Parameter: Plant Line Value: WS
  misc_feature: MA Experiment 20000307 PARAMETER Experiment Name: At_Germinating_Seeds_Sub_P Parameter: Tissue Value: Germinating Seeds
  misc_feature: MA Experiment ID: 20000314 Result: Down-regulated in Transcription
  misc_feature: MA Experiment 20000314 PARAMETER Experiment Name: At_14day_Shoots-Roots_Sub_P Parameter: Age (day) Value: 14
  misc_feature: MA Experiment 20000314 PARAMETER Experiment Name: At_14day_Shoots-Roots_Sub_P Parameter: Organism Value: A. thaliana
  misc_feature: MA Experiment 20000314 PARAMETER Experiment Name: At_14day_Shoots-Roots_Sub_P Parameter: Plant Line Value: WS
  misc_feature: MA Experiment 20000314 PARAMETER Experiment Name: At_14day_Shoots-Roots_Sub_P Parameter: Tissue Value: Roots vs. Whole Plant
  misc_feature: MA Experiment ID: 20000315 Result: Up-regulated in Transcription
  misc_feature: MA Experiment 20000315 PARAMETER Experiment Name: At_14day_Shoots-Roots_Sub_P Parameter: Age (day) Value: 14
  misc_feature: MA Experiment 20000315 PARAMETER Experiment Name: At_14day_Shoots-Roots_Sub_P Parameter: Organism Value: A. thaliana
  misc_feature: MA Experiment 20000315 PARAMETER Experiment Name: At_14day_Shoots-Roots_Sub_P Parameter: Plant Line Value: WS
  misc_feature: MA Experiment 20000315 PARAMETER Experiment Name: At_14day_Shoots-Roots_Sub_P Parameter: Tissue Value: Shoots vs. Whole Plant
  misc_feature: MA Experiment ID: 20000328 Result: Up-regulated in Transcription
  misc_feature: MA Experiment 20000328 PARAMETER Experiment Name: At_42deg_Heat_Sub_P Parameter: Age (day) Value: 14
  misc_feature: MA Experiment 20000328 PARAMETER Experiment Name: At_42deg_Heat_Sub_P Parameter: Organism Value: A. thaliana
  misc_feature: MA Experiment 20000328 PARAMETER Experiment Name: At_42deg_Heat_Sub_P Parameter: Plant Line Value: WS
  misc_feature: MA Experiment 20000328 PARAMETER Experiment Name: At_42deg_Heat_Sub_P Parameter: Temperature (deg C) Value: 42 vs. 22
  misc_feature: MA Experiment 20000328 PARAMETER Experiment Name: At_42deg_Heat_Sub_P Parameter: Timepoint (hr) Value: 6
  misc_feature: MA Experiment 20000328 PARAMETER Experiment Name: At_42deg_Heat_Sub_P Parameter: Tissue Value: Aerial
  misc_feature: MA Experiment ID: 20001807 Result: Up-regulated in Transcription
  misc_feature: MA Experiment 20001807 PARAMETER Experiment Name: At_50mM_NH4NO3_L-to-H_Sub_P Parameter: Timepoint (hr) Value: 6
  misc_feature: MA Experiment 20001807 PARAMETER Experiment Name: At_50mM_NH4NO3_L-to-H_Sub_P Parameter: Tissue Value: Leaf
  misc_feature: MA Experiment 20001807 PARAMETER Experiment Name: At_50mM_NH4NO3_L-to-H_Sub_P Parameter: Treatment Value: 50mM NH4NO3 vs 100mM Mannitol
  misc_feature: Pfam Name: RuBisCO_small Pfam Description: Ribulose bisphosphate carboxylase, small chain
aagtaagtaagagaaaaaccaaaagaagaagagaaacaacaagaagaagtaatggcttcctctatgttctcctccaccgctgtggttacctccccggctcaagccaccatggtcgctccattcaccggcttgaagtcatccgcttctttcccggtcacccgcaaggccaacaacgacattacttccatcacaagcaacggaggaagagttagctgcatgaaggtgtggccaccaatcggaaagaagaagtttgagactctatcttacctccctgaccttagtgacgttgaattggctaaggaagttgactaccttctccgcaacaagtggattccttgtgttgaattcgagttggagcacggatttgtgtaccgtgagcacggaaacactcccggatactatgatggacgatactggacaatgtggaagcttccattgttcggatgcaccgactccgctcaagtgttgaaggaagttgaagaatgcaagaaggagtaccctggcgccttcattaggatcatcggattcgacaacacccgtcaagtccaatgcatcagtttcattgcctacaagcccccaagcttcaccgaagcttaatcccctttctggaatattcagcgttgattattctggaacccatttctatgtggtcaatgcaaatttaagaaattatttgccgacttaacagttgaggaactattgtttgaaagtgaaaatgttattcctac

SEQ ID NO: 107302 - protein, 181 aa, Arabidopsis thaliana; identical to SEQ ID NO: 86291
  peptide (1)..(181): Ceres Seq. ID no. 13622137
  misc_feature: Pfam Name: RuBisCO_small Pfam Description: Ribulose bisphosphate carboxylase, small chain
  misc_feature (1)..(181): Homolog of NCBI NO: 15240903 NR Description: ribulose bisphosphate carboxylase small chain 2b (RuBisCO small subunit 2b) (sp|P10797) [Arabidopsis thaliana] Ribulose bisphosphate carboxylase small subunit 2b) [Arabidopsis
  misc_feature (1)..(181): Homolog of NCBI NO: 68061 NR Description: ribulose-bisphosphate carboxylase (EC 4.1.1.39)
  misc_feature (1)..(181): Homolog of NCBI NO: 15240912 NR Description: ribulose bisphosphate carboxylase small chain 1b (RuBisCO small subunit 1b) (sp|P10796) [Arabidopsis thaliana] Ribulose bisphosphate carboxylase subunit 1b) [Arabidopsis
  misc_feature (1)..(181): Homolog of NCBI NO: 68060 NR Description: ribulose-bisphosphate carboxylase (EC 4.1.1.39)
  misc_feature (1)..(181): Homolog of NCBI NO: 15240901 NR Description: ribulose bisphosphate carboxylase small chain 3b (RuBisCO small subunit 3b) (sp|P10798) [Arabidopsis thaliana] Ribulose bisphosphate carboxylase subunit precursor [Arabidopsis
  misc_feature (1)..(181): Homolog of NCBI NO: 132091 NR Description: Ribulose bisphosphate carboxylase small chain F1,
  misc_feature (1)..(181): Homolog of NCBI NO: 266891 NR Description: Ribulose bisphosphate carboxylase small chain,
  misc_feature (1)..(181): Homolog of NCBI NO: 132154 NR Description: Ribulose bisphosphate carboxylase small chain,
  misc_feature (1)..(179): Homolog of NCBI NO: 15219826 NR Description: ribulose-bisphosphate carboxylase small unit [Arabidopsis thaliana] >gi|27735223|sp|P10795|RBS1_ARATH Ribulose
  misc_feature (1)..(179): Homolog of NCBI NO: 68063 NR Description: ribulose-bisphosphate carboxylase (EC 4.1.1.39)

SEQ ID NO: 107303 - protein, 177 aa, Arabidopsis thaliana; identical to SEQ ID NO: 86292
  peptide (1)..(177): Ceres Seq. ID no. 13622138
  misc_feature: Pfam Name: RuBisCO_small Pfam Description: Ribulose bisphosphate carboxylase, small chain
  misc_feature (1)..(177): Homolog of NCBI NO: 15240903 NR Description: ribulose bisphosphate carboxylase small chain 2b (RuBisCO small subunit 2b) (sp|P10797) [Arabidopsis thaliana] Ribulose bisphosphate carboxylase small subunit 2b) [Arabidopsis
  misc_feature (1)..(177): Homolog of NCBI NO: 68061 NR Description: ribulose-bisphosphate carboxylase (EC 4.1.1.39)
  misc_feature (1)..(177): Homolog of NCBI NO: 15240912 NR Description: ribulose bisphosphate carboxylase small chain 1b (RuBisCO small subunit 1b) (sp|P10796) [Arabidopsis thaliana] Ribulose bisphosphate carboxylase subunit 1b) [Arabidopsis
  misc_feature (1)..(177): Homolog of NCBI NO: 68060 NR Description: ribulose-bisphosphate carboxylase (EC 4.1.1.39)
  misc_feature (1)..(177): Homolog of NCBI NO: 15240901 NR Description: ribulose bisphosphate carboxylase small chain 3b (RuBisCO small subunit 3b) (sp|P10798) [Arabidopsis thaliana] Ribulose bisphosphate carboxylase subunit precursor [Arabidopsis
  misc_feature (1)..(177): Homolog of NCBI NO: 132091 NR Description: Ribulose bisphosphate carboxylase small chain F1,
  misc_feature (1)..(177): Homolog of NCBI NO: 266891 NR Description: Ribulose bisphosphate carboxylase small chain,
  misc_feature (1)..(177): Homolog of NCBI NO: 132154 NR Description: Ribulose bisphosphate carboxylase small chain,
  misc_feature (1)..(175): Homolog of NCBI NO: 15219826 NR Description: ribulose-bisphosphate carboxylase small unit [Arabidopsis thaliana] >gi|27735223|sp|P10795|RBS1_ARATH Ribulose
  misc_feature (1)..(175): Homolog of NCBI NO: 68063 NR Description: ribulose-bisphosphate carboxylase (EC 4.1.1.39)

SEQ ID NO: 107304 - protein, 162 aa, Arabidopsis thaliana; identical to SEQ ID NO: 47248
  peptide (1)..(162): Ceres Seq. ID no. 13622139
  misc_feature: Pfam Name: RuBisCO_small Pfam Description: Ribulose bisphosphate carboxylase, small chain
  misc_feature (1)..(162): Homolog of NCBI NO: 15240903 NR Description: ribulose bisphosphate carboxylase small chain 2b (RuBisCO small subunit 2b) (sp|P10797) [Arabidopsis thaliana] Ribulose bisphosphate carboxylase small subunit 2b) [Arabidopsis
  misc_feature (1)..(162): Homolog of NCBI NO: 68061 NR Description: ribulose-bisphosphate carboxylase (EC 4.1.1.39)
  misc_feature (1)..(162): Homolog of NCBI NO: 15240912 NR Description: ribulose bisphosphate carboxylase small chain 1b (RuBisCO small subunit 1b) (sp|P10796) [Arabidopsis thaliana] Ribulose bisphosphate carboxylase subunit 1b) [Arabidopsis
  misc_feature (1)..(162): Homolog of NCBI NO: 68060 NR Description: ribulose-bisphosphate carboxylase (EC 4.1.1.39)
  misc_feature (1)..(162): Homolog of NCBI NO: 15240901 NR Description: ribulose bisphosphate carboxylase small chain 3b (RuBisCO small subunit 3b) (sp|P10798) [Arabidopsis thaliana] Ribulose bisphosphate carboxylase subunit precursor [Arabidopsis
  misc_feature (1)..(162): Homolog of NCBI NO: 132091 NR Description: Ribulose bisphosphate carboxylase small chain F1,
  misc_feature (1)..(162): Homolog of NCBI NO: 266891 NR Description: Ribulose bisphosphate carboxylase small chain,
  misc_feature (1)..(162): Homolog of NCBI NO: 132154 NR Description: Ribulose bisphosphate carboxylase small chain,
  misc_feature (1)..(160): Homolog of NCBI NO: 15219826 NR Description: ribulose-bisphosphate carboxylase small unit [Arabidopsis thaliana] >gi|27735223|sp|P10795|RBS1_ARATH Ribulose
  misc_feature (1)..(160): Homolog of NCBI NO: 68063 NR Description: ribulose-bisphosphate carboxylase (EC 4.1.1.39)

SEQ ID NO: 107305 - DNA, 1234 bp, Arabidopsis thaliana
  misc_feature (1)..(1234): Ceres Seq. ID no. 13622144
  misc_feature: MA Experiment ID: 108434 Result: Down-regulated in Transcription
  misc_feature: MA Experiment 108434 PARAMETER Experiment Name: At_Root_Tips_cDNA_P Parameter: Tissue Value: Root Tips
  misc_feature: MA Experiment ID: 108462 Result: Up-regulated in Transcription
  misc_feature: MA Experiment 108462 PARAMETER Experiment Name: At_Germinating_Seeds_cDNA_P Parameter: Age (day) Value: 2 vs. 0
  misc_feature: MA Experiment 108462 PARAMETER Experiment Name: At_Germinating_Seeds_cDNA_P Parameter: Tissue Value: Germinating Seeds
  misc_feature: MA Experiment ID: 108463 Result: Up-regulated in Transcription
  misc_feature: MA Experiment 108463 PARAMETER Experiment Name: At_Germinating_Seeds_cDNA_P Parameter: Age (day) Value: 3 vs. 0
  misc_feature: MA Experiment 108463 PARAMETER Experiment Name: At_Germinating_Seeds_cDNA_P Parameter: Tissue Value: Germinating Seeds
  misc_feature: MA Experiment ID: 108464 Result: Up-regulated in Transcription
  misc_feature: MA Experiment 108464 PARAMETER Experiment Name: At_Germinating_Seeds_cDNA_P Parameter: Age (day) Value: 4 vs. 0
  misc_feature: MA Experiment 108464 PARAMETER Experiment Name: At_Germinating_Seeds_cDNA_P Parameter: Tissue Value: Germinating Seeds
  misc_feature: MA Experiment ID: 108561 Result: Up-regulated in Transcription
  misc_feature: MA Experiment 108561 PARAMETER Experiment Name: At_100uM_ABA_cDNA_P Parameter: Timepoint (hr) Value: 6
  misc_feature: MA Experiment 108561 PARAMETER Experiment Name: At_100uM_ABA_cDNA_P Parameter: Tissue Value: Aerial
  misc_feature: MA Experiment 108561 PARAMETER Experiment Name: At_100uM_ABA_cDNA_P Parameter: Treatment Value: 100uM ABA vs. No Treatment
  misc_feature: MA Experiment ID: 108569 Result: Up-regulated in Transcription
  misc_feature: MA Experiment 108569 PARAMETER Experiment Name: At_0.001%_MeJA__cDNA_P Parameter: Timepoint (hr) Value: 6
  misc_feature: MA Experiment 108569 PARAMETER Experiment Name: At_0.001%_MeJA__cDNA_P Parameter: Tissue Value: Aerial
  misc_feature: MA Experiment 108569 PARAMETER Experiment Name: At_0.001%_MeJA__cDNA_P Parameter: Treatment Value: 0.001% MeJA vs. No Treatment
  misc_feature: MA Experiment ID: 108572 Result: Up-regulated in Transcription
  misc_feature: MA Experiment 108572 PARAMETER Experiment Name: At_Drought_cDNA_P Parameter: Timepoint (hr) Value: 1
  misc_feature: MA Experiment 108572 PARAMETER Experiment Name: At_Drought_cDNA_P Parameter: Tissue Value: Aerial
  misc_feature: MA Experiment 108572 PARAMETER Experiment Name: At_Drought_cDNA_P Parameter: Treatment Value: Drought vs. No Drought
  misc_feature: MA Experiment ID: 108573 Result: Up-regulated in Transcription
  misc_feature: MA Experiment 108573 PARAMETER Experiment Name: At_Drought_cDNA_P Parameter: Timepoint (hr) Value: 6
  misc_feature: MA Experiment 108573 PARAMETER Experiment Name: At_Drought_cDNA_P Parameter: Tissue Value: Aerial
  misc_feature: MA Experiment 108573 PARAMETER Experiment Name: At_Drought_cDNA_P Parameter: Treatment Value: Drought vs. No Drought
  misc_feature: MA Experiment ID: 108577 Result: Up-regulated in Transcription
  misc_feature: MA Experiment 108577 PARAMETER Experiment Name: At_42deg_Heat_cDNA_P Parameter: Temperature (deg C) Value: 42 vs. 22
  misc_feature: MA Experiment 108577 PARAMETER Experiment Name: At_42deg_Heat_cDNA_P Parameter: Timepoint (hr) Value: 6
  misc_feature: MA Experiment 108577 PARAMETER Experiment Name: At_42deg_Heat_cDNA_P Parameter: Tissue Value: Aerial
  misc_feature: MA Experiment ID: 108594 Result: Down-regulated in Transcription
  misc_feature: MA Experiment 108594 PARAMETER Experiment Name: At_Ler-rhl_Root_cDNA_P Parameter: Plant Line Value: null
  misc_feature: MA Experiment ID: 108595 Result: Down-regulated in Transcription
  misc_feature: MA Experiment 108595 PARAMETER Experiment Name: At_Ler-pi_Ovule_cDNA_P Parameter: Plant Line Value: null
  misc_feature: MA Experiment ID: 108668 Result: Up-regulated in Transcription
  misc_feature: MA Experiment 108668 PARAMETER Experiment Name: At_2mM_SA_cDNA_P Parameter: Plant Line Value: WS
  misc_feature: MA Experiment 108668 PARAMETER Experiment Name: At_2mM_SA_cDNA_P Parameter: Timepoint (hr) Value: 6
  misc_feature: MA Experiment 108668 PARAMETER Experiment Name: At_2mM_SA_cDNA_P Parameter: Treatment Value: 2mM SA vs. No Treatment
  misc_feature: MA Experiment ID: 20000089 Result: Down-regulated in Transcription
  misc_feature: MA Experiment ID: 20000113 Result: Up-regulated in Transcription
  misc_feature: MA Experiment 20000113 PARAMETER Experiment Name: At_42deg_Heat_cDNA_P Parameter: Temperature (deg C) Value: 42 vs. 22
  misc_feature: MA Experiment 20000113 PARAMETER Experiment Name: At_42deg_Heat_cDNA_P Parameter: Timepoint (hr) Value: 8
  misc_feature: MA Experiment 20000113 PARAMETER Experiment Name: At_42deg_Heat_cDNA_P Parameter: Tissue Value: Aerial
  misc_feature: MA Experiment ID: 20000169 Result: Up-regulated in Transcription
  misc_feature: MA Experiment 20000169 PARAMETER Experiment Name: At_100uM_ABA_P Parameter: Age (day) Value: 14
  misc_feature: MA Experiment 20000169 PARAMETER Experiment Name: At_100uM_ABA_P Parameter: Organism Value: A. thaliana
  misc_feature: MA Experiment 20000169 PARAMETER Experiment Name: At_100uM_ABA_P Parameter: Plant Line Value: WS
  misc_feature: MA Experiment 20000169 PARAMETER Experiment Name: At_100uM_ABA_P Parameter: Timepoint (hr) Value: 6
  misc_feature: MA Experiment 20000169 PARAMETER Experiment Name: At_100uM_ABA_P Parameter: Tissue Value: Aerial
  misc_feature: MA Experiment 20000169 PARAMETER Experiment Name: At_100uM_ABA_P Parameter: Treatment Value: 100uM ABA vs. No Treatment
  misc_feature: MA Experiment ID: 20000180 Result: Up-regulated in Transcription
  misc_feature: MA Experiment 20000180 PARAMETER Experiment Name: At_Germinating_Seeds_P Parameter: Age (hr) Value: 24 vs. 0
  misc_feature: MA Experiment 20000180 PARAMETER Experiment Name: At_Germinating_Seeds_P Parameter: Tissue Value: Germinating Seeds
  misc_feature: MA Experiment ID: 20000182 Result: Up-regulated in Transcription
  misc_feature: MA Experiment 20000182 PARAMETER Experiment Name: At_2mM_SA_P Parameter: Age (day) Value: 14
  misc_feature: MA Experiment 20000182 PARAMETER Experiment Name: At_2mM_SA_P Parameter: Organism Value: A. thaliana
  misc_feature: MA Experiment 20000182 PARAMETER Experiment Name: At_2mM_SA_P Parameter: Plant Line Value: WS
  misc_feature: MA Experiment 20000182 PARAMETER Experiment Name: At_2mM_SA_P Parameter: Timepoint (hr) Value: 6
  misc_feature: MA Experiment 20000182 PARAMETER Experiment Name: At_2mM_SA_P Parameter: Tissue Value: Aerial
  misc_feature: MA Experiment 20000182 PARAMETER Experiment Name: At_2mM_SA_P Parameter: Treatment Value: 2mM SA vs. No Treatment
  misc_feature: MA Experiment ID: 20000234 Result: Down-regulated in Transcription
  misc_feature: MA Experiment 20000234 PARAMETER Experiment Name: At_Siliques_P Parameter: Age (day) Value: 21
  misc_feature: MA Experiment 20000234 PARAMETER Experiment Name: At_Siliques_P Parameter: Organism Value: A. thaliana
  misc_feature: MA Experiment 20000234 PARAMETER Experiment Name: At_Siliques_P Parameter: Plant Line Value: WS
  misc_feature: MA Experiment 20000234 PARAMETER Experiment Name: At_Siliques_P Parameter: Tissue Value: Less Than 5mm Siliques vs. Whole Plant
  misc_feature: MA Experiment ID: 20000451 Result: Down-regulated in Transcription
  misc_feature: MA Experiment 20000451 PARAMETER Experiment Name: At_CS6879_Shoots-Roots_P Parameter: Age (day) Value: 14
  misc_feature: MA Experiment 20000451 PARAMETER Experiment Name: At_CS6879_Shoots-Roots_P Parameter: Organism Value: A. thaliana
  misc_feature: MA Experiment 20000451 PARAMETER Experiment Name: At_CS6879_Shoots-Roots_P Parameter: Plant Line Value: CS6879 vs. WS
  misc_feature: MA Experiment 20000451 PARAMETER Experiment Name: At_CS6879_Shoots-Roots_P Parameter: Tissue Value: Roots
  misc_feature: MA Experiment ID: 20000506 Result: Up-regulated in Transcription
  misc_feature: MA Experiment 20000506 PARAMETER Experiment Name: At_Wounding_P Parameter: Organism Value: A. thaliana
  misc_feature: MA Experiment 20000506 PARAMETER Experiment Name: At_Wounding_P Parameter: Plant Line Value: WS
  misc_feature: MA Experiment 20000506 PARAMETER Experiment Name: At_Wounding_P Parameter: Timepoint (hr) Value: 6
  misc_feature: MA Experiment 20000506 PARAMETER Experiment Name: At_Wounding_P Parameter: Tissue Value: Aerial
  misc_feature: MA Experiment 20000506 PARAMETER Experiment Name: At_Wounding_P Parameter: Treatment Value: Wounding vs. No Wounding
  misc_feature: MA Experiment ID: 20001247 Result: Up-regulated in Transcription
  misc_feature: MA Experiment 20001247 PARAMETER Experiment Name: At_Far-red-induction_P Parameter: Age (day) Value: 7
  misc_feature: MA Experiment 20001247 PARAMETER Experiment Name: At_Far-red-induction_P Parameter: Light Value: Far-red vs. White
  misc_feature: MA Experiment 20001247 PARAMETER Experiment Name: At_Far-red-induction_P Parameter: Organism Value: A. thaliana
  misc_feature: MA Experiment 20001247 PARAMETER Experiment Name: At_Far-red-induction_P Parameter: Plant Line Value: Columbia
  misc_feature: MA Experiment 20001247 PARAMETER Experiment Name: At_Far-red-induction_P Parameter: Timepoint (hr) Value: 1
  misc_feature: MA Experiment 20001247 PARAMETER Experiment Name: At_Far-red-induction_P Parameter: Tissue Value: Whole Plant
  misc_feature: MA Experiment ID: 20001450 Result: Up-regulated in Transcription
  misc_feature: MA Experiment 20001450 PARAMETER Experiment Name: At_Far-red-induction_P Parameter: Age (day) Value: 7
  misc_feature: MA Experiment 20001450 PARAMETER Experiment Name: At_Far-red-induction_P Parameter: Light Value: Far-red vs. White
  misc_feature: MA Experiment 20001450 PARAMETER Experiment Name: At_Far-red-induction_P Parameter: Organism Value: A. thaliana
  misc_feature: MA Experiment 20001450 PARAMETER Experiment Name: At_Far-red-induction_P Parameter: Plant Line Value: Columbia
  misc_feature: MA Experiment 20001450 PARAMETER Experiment Name: At_Far-red-induction_P Parameter: Timepoint (hr) Value: 8
  misc_feature: MA Experiment 20001450 PARAMETER Experiment Name: At_Far-red-induction_P Parameter: Tissue Value: Whole Plant
  misc_feature: MA Experiment ID: 20001556 Result: Down-regulated in Transcription
  misc_feature: MA Experiment 20001556 PARAMETER Experiment Name: At_Drought_Soil_Dry_P Parameter: Age (day) Value: 26
  misc_feature: MA Experiment 20001556 PARAMETER Experiment Name: At_Drought_Soil_Dry_P Parameter: Organism Value: A. thaliana
  misc_feature: MA Experiment 20001556 PARAMETER Experiment Name: At_Drought_Soil_Dry_P Parameter: Plant Line Value: WS
  misc_feature: MA Experiment 20001556 PARAMETER Experiment Name: At_Drought_Soil_Dry_P Parameter: Post Timepoint (hr) Value: None
  misc_feature: MA Experiment 20001556 PARAMETER Experiment Name: At_Drought_Soil_Dry_P Parameter: Post-Treatment Value: None
  misc_feature: MA Experiment 20001556 PARAMETER Experiment Name: At_Drought_Soil_Dry_P Parameter: Timepoint (day) Value: 12
  misc_feature: MA Experiment 20001556 PARAMETER Experiment Name: At_Drought_Soil_Dry_P Parameter: Treatment Value: Drought vs. No Drought
  misc_feature: MA Experiment ID: 20001559 Result: Down-regulated in Transcription
  misc_feature: MA Experiment 20001559 PARAMETER Experiment Name: At_Drought_Soil_Dry_P Parameter: Age (day) Value: 28
  misc_feature: MA Experiment 20001559 PARAMETER Experiment Name: At_Drought_Soil_Dry_P Parameter: Organism Value: A. thaliana
  misc_feature: MA Experiment 20001559 PARAMETER Experiment Name: At_Drought_Soil_Dry_P Parameter: Plant Line Value: WS
  misc_feature: MA Experiment 20001559 PARAMETER Experiment Name: At_Drought_Soil_Dry_P Parameter: Post Timepoint (hr) Value: 29
  misc_feature: MA Experiment 20001559 PARAMETER Experiment Name: At_Drought_Soil_Dry_P Parameter: Post-Treatment Value: Re-Water vs. No Drought
  misc_feature: MA Experiment 20001559 PARAMETER Experiment Name: At_Drought_Soil_Dry_P Parameter: Timepoint (day) Value: 14
  misc_feature: MA Experiment 20001559 PARAMETER Experiment Name: At_Drought_Soil_Dry_P Parameter: Treatment Value: Drought vs. No Drought
  misc_feature: MA Experiment ID: 20001905 Result: Down-regulated in Transcription
  misc_feature: MA Experiment 20001905 PARAMETER Experiment Name: At_Drought_Reproduction_P Parameter: Age (day) Value: 40
  misc_feature: MA Experiment 20001905 PARAMETER Experiment Name: At_Drought_Reproduction_P Parameter: Organism Value: A. thaliana
  misc_feature: MA Experiment 20001905 PARAMETER Experiment Name: At_Drought_Reproduction_P Parameter: Plant Line Value: WS
  misc_feature: MA Experiment 20001905 PARAMETER Experiment Name: At_Drought_Reproduction_P Parameter: Timepoint (day) Value: 10
  misc_feature: MA Experiment 20001905 PARAMETER Experiment Name: At_Drought_Reproduction_P Parameter: Tissue Value: Rosettes
  misc_feature: MA Experiment 20001905 PARAMETER Experiment Name: At_Drought_Reproduction_P Parameter: Treatment Value: Drought vs. No Drought
  misc_feature: MA Experiment ID: 20001907 Result: Down-regulated in Transcription
  misc_feature: MA Experiment 20001907 PARAMETER Experiment Name: At_Drought_Reproduction_P Parameter: Age (day) Value: 37
  misc_feature: MA Experiment 20001907 PARAMETER Experiment Name: At_Drought_Reproduction_P Parameter: Organism Value: A. thaliana
  misc_feature: MA Experiment 20001907 PARAMETER Experiment Name: At_Drought_Reproduction_P Parameter: Plant Line Value: WS
  misc_feature: MA Experiment 20001907 PARAMETER Experiment Name: At_Drought_Reproduction_P Parameter: Timepoint (day) Value: 7
  misc_feature: MA Experiment 20001907 PARAMETER Experiment Name: At_Drought_Reproduction_P Parameter: Tissue Value: Siliques
  misc_feature: MA Experiment 20001907 PARAMETER Experiment Name: At_Drought_Reproduction_P Parameter: Treatment Value: Drought vs. No Drought
  misc_feature: MA Experiment ID: 20001908 Result: Down-regulated in Transcription
  misc_feature: MA Experiment 20001908 PARAMETER Experiment Name: At_Drought_Reproduction_P Parameter: Age (day) Value: 40
  misc_feature: MA Experiment 20001908 PARAMETER Experiment Name: At_Drought_Reproduction_P Parameter: Organism Value: A. thaliana
  misc_feature: MA Experiment 20001908 PARAMETER Experiment Name: At_Drought_Reproduction_P Parameter: Plant Line Value: WS
  misc_feature: MA Experiment 20001908 PARAMETER Experiment Name: At_Drought_Reproduction_P Parameter: Timepoint (day) Value: 10
  misc_feature: MA Experiment 20001908 PARAMETER Experiment Name: At_Drought_Reproduction_P Parameter: Tissue Value: Siliques
  misc_feature: MA Experiment 20001908 PARAMETER Experiment Name: At_Drought_Reproduction_P Parameter: Treatment Value: Drought vs. No Drought
aacaaaattttatgttattgtcaatttgtcatcatcgtctttattttttatttctcaactttctttgcattacatcttccaactatataattaaccactctactttctcaaatcccacactcagagaagaagaagaagaaaaaaaacagagctttacaatttctctctacagagatcgaagatatggaaggcaaggaagaagacgttagagttggagctaacaagttcccggagagacaaccaatcggaacatcagctcagagtgacaaggactacaaggaaccaccaccagctccgtttttcgaacctggtgagctttcttcatggtctttttggagagctgggatcgctgagttcatcgctacttttctctttctctacatcactgtcttgactgttatgggagtgaaaaggtcaccgaacatgtgtgcttccgtcggaatccaaggaatcgcttgggctttcggtggtatgatatttgccttagtctactgtaccgctggtatctccggtggacacatcaacccagcggttacttttggtctgttcttagcccggaagctgtcgcttactagagctctgtactacatagtgatgcagtgcttgggagctatctgtggtgctggagtggttaaagggttccagcctaagcaataccaggctctaggaggaggagctaacactgtggctcatggttacaccaagggaagtggtcttggagctgagatcattggcacattcgttcttgtatacacagtcttctcagcaactgacgccaagagaaatgctcgtgactctcatgtccctattcttgcaccactcccaatcgggtttgcggttttcttggttcacttggcaaccatcccaatcactggcacaggcatcaacccagctagaagccttggagctgcaatcatctacaacaaagaccattcctgggatgaccactgggtgttttgggttggccccttcattggagctgcacttgctgctctttaccatgtggttgtcatcagagccatccccttcaagtccagaagctaagtaaaaacaagacatcaagtcctctggtttctggccttgtccttagttgcttctatagttctattgttgatctactacatgtatgtgtgcaatgtgtttatctatgtgccctcttaatgcaatatttgtaaacaaggaagaagttccaaaggagaattatttgcaaattatgatgtttaacatgtttatt

SEQ ID NO: 107306 - protein, 286 aa, Arabidopsis thaliana; identical to SEQ ID NO: 97671
  peptide (1)..(286): Ceres Seq. ID no. 13622145
  misc_feature (44)..(273): Pfam Name: Major intrinsic protein Pfam Description: Major intrinsic protein
  misc_feature (1)..(286): Homolog of NCBI NO: 15233109 NR Description: plasma membrane intrinsic protein 1A [Arabidopsis >gi|21431895|sp|P43285|WC1A_ARATH Plasma membrane intrinsic
  misc_feature (1)..(286): Homolog of NCBI NO: 472873 NR Description: plasma membrane intrinsic protein 1a [Arabidopsis
  misc_feature (1)..(286): Homolog of NCBI NO: 3551131 NR Description: plasma membrane aquaporin (PAQ1) [Raphanus
  misc_feature (1)..(286): Homolog of NCBI NO: 21594059 NR Description: plasma membrane intrinsic protein 1a [Arabidopsis
  misc_feature (1)..(286): Homolog of NCBI NO: 10799093 NR Description: aquaporin PIP1b1 [Brassica oleracea]
  misc_feature (1)..(286): Homolog of NCBI NO: 15225913 NR Description: plasma membrane intrinsic protein 1B [Arabidopsis >gi|1175011|sp|Q06611|WC1B_ARATH Plasma membrane intrinsic
  misc_feature (1)..(286): Homolog of NCBI NO: 10799095 NR Description: aquaporin PIP1b2 [Brassica oleracea]
  misc_feature (1)..(286): Homolog of NCBI NO: 1199804 NR Description: transmembrane channel protein [Brassica oleracea]
  misc_feature (1)..(286): Homolog of NCBI NO: 4467357 NR Description: PIP1b protein [Arabidopsis thaliana]
  misc_feature (1)..(286): Homolog of NCBI NO: 7209556 NR Description: plasma membrane aquaporin 1b [Raphanus sativus]

SEQ ID NO: 107307 - protein, 214 aa, Arabidopsis thaliana; identical to SEQ ID NO: 27567
  peptide (1)..(214): Ceres Seq. ID no. 13622146
  misc_feature (1)..(201): Pfam Name: Major intrinsic protein Pfam Description: Major intrinsic protein
  misc_feature (1)..(214): Homolog of NCBI NO: 15233109 NR Description: plasma membrane intrinsic protein 1A [Arabidopsis >gi|21431895|sp|P43285|WC1A_ARATH Plasma membrane intrinsic
  misc_feature (1)..(214): Homolog of NCBI NO: 472873 NR Description: plasma membrane intrinsic protein 1a [Arabidopsis
  misc_feature (1)..(214): Homolog of NCBI NO: 3551131 NR Description: plasma membrane aquaporin (PAQ1) [Raphanus
  misc_feature (1)..(214): Homolog of NCBI NO: 21594059 NR Description: plasma membrane intrinsic protein 1a [Arabidopsis
  misc_feature (1)..(214): Homolog of NCBI NO: 10799093 NR Description: aquaporin PIP1b1 [Brassica oleracea]
  misc_feature (1)..(214): Homolog of NCBI NO: 15225913 NR Description: plasma membrane intrinsic protein 1B [Arabidopsis >gi|1175011|sp|Q06611|WC1B_ARATH Plasma membrane intrinsic
  misc_feature (1)..(214): Homolog of NCBI NO: 10799095 NR Description: aquaporin PIP1b2 [Brassica oleracea]
  misc_feature (1)..(214): Homolog of NCBI NO: 1199804 NR Description: transmembrane channel protein [Brassica oleracea]
  misc_feature (1)..(214): Homolog of NCBI NO: 4467357 NR Description: PIP1b protein [Arabidopsis thaliana]
  misc_feature (1)..(214): Homolog of NCBI NO: 7209556 NR Description: plasma membrane aquaporin 1b [Raphanus sativus]

SEQ ID NO: 107308 - protein, 206 aa, Arabidopsis thaliana; identical to SEQ ID NO: 27568
  peptide (1)..(206): Ceres Seq. ID no. 13622147
  misc_feature (1)..(193): Pfam Name: Major intrinsic protein Pfam Description: Major intrinsic protein
  misc_feature (1)..(206): Homolog of NCBI NO: 15233109 NR Description: plasma membrane intrinsic protein 1A [Arabidopsis >gi|21431895|sp|P43285|WC1A_ARATH Plasma membrane intrinsic
  misc_feature (1)..(206): Homolog of NCBI NO: 472873 NR Description: plasma membrane intrinsic protein 1a [Arabidopsis
  misc_feature (1)..(206): Homolog of NCBI NO: 3551131 NR Description: plasma membrane aquaporin (PAQ1) [Raphanus
  misc_feature (1)..(206): Homolog of NCBI NO: 21594059 NR Description: plasma membrane intrinsic protein 1a [Arabidopsis
  misc_feature (1)..(206): Homolog of NCBI NO: 10799093 NR Description: aquaporin PIP1b1 [Brassica oleracea]
  misc_feature (1)..(206): Homolog of NCBI NO: 15225913 NR Description: plasma membrane intrinsic protein 1B [Arabidopsis >gi|1175011|sp|Q06611|WC1B_ARATH Plasma membrane intrinsic
  misc_feature (1)..(206): Homolog of NCBI NO: 10799095 NR Description: aquaporin PIP1b2 [Brassica oleracea]
  misc_feature (1)..(206): Homolog of NCBI NO: 1199804 NR Description: transmembrane channel protein [Brassica oleracea]
  misc_feature (1)..(206): Homolog of NCBI NO: 4467357 NR Description: PIP1b protein [Arabidopsis thaliana]
  misc_feature (1)..(206): Homolog of NCBI NO: 7209556 NR Description: plasma membrane aquaporin 1b [Raphanus sativus]

SEQ ID NO: 107309 - DNA, 1033 bp, Arabidopsis thaliana
  misc_feature (1)..(1033): Ceres Seq. ID no. 13645690
  misc_feature: MA Experiment ID: 108434 Result: Down-regulated in Transcription
  misc_feature: MA Experiment 108434 PARAMETER Experiment Name: At_Root_Tips_cDNA_P Parameter: Tissue Value: Root Tips
  misc_feature: MA Experiment ID: 108435 Result: Down-regulated in Transcription
  misc_feature: MA Experiment 108435 PARAMETER Experiment Name: At_stm_Mutants_cDNA_P Parameter: Plant Line Value: wt Landsburg vs stm
  misc_feature: MA Experiment 108435 PARAMETER Experiment Name: At_stm_Mutants_cDNA_P Parameter: Tissue Value: Shoot Apical Meristem Region
  misc_feature: MA Experiment ID: 108461 Result: Down-regulated in Transcription
  misc_feature: MA Experiment 108461 PARAMETER Experiment Name: At_Germinating_Seeds_cDNA_P Parameter: Age (day) Value: 1 vs. 0
  misc_feature: MA Experiment 108461 PARAMETER Experiment Name: At_Germinating_Seeds_cDNA_P Parameter: Tissue Value: Germinating Seeds
  misc_feature: MA Experiment ID: 108462 Result: Down-regulated in Transcription
  misc_feature: MA Experiment 108462 PARAMETER Experiment Name: At_Germinating_Seeds_cDNA_P Parameter: Age (day) Value: 2 vs. 0
  misc_feature: MA Experiment 108462 PARAMETER Experiment Name: At_Germinating_Seeds_cDNA_P Parameter: Tissue Value: Germinating Seeds
  misc_feature: MA Experiment ID: 108473 Result: Up-regulated in Transcription
  misc_feature: MA Experiment 108473 PARAMETER Experiment Name: At_Drought_Flowers_cDNA_P Parameter: Timepoint (hr) Value: 7 d
  misc_feature: MA Experiment 108473 PARAMETER Experiment Name: At_Drought_Flowers_cDNA_P Parameter: Tissue Value: Flower
  misc_feature: MA Experiment 108473 PARAMETER Experiment Name: At_Drought_Flowers_cDNA_P Parameter: Treatment Value: Drought vs. No Drought
  misc_feature: MA Experiment ID: 108488 Result: Down-regulated in Transcription
  misc_feature: MA Experiment ID: 108501 Result: Down-regulated in Transcription
  misc_feature: MA Experiment 108501 PARAMETER Experiment Name: At_ap2_floral_buds_cDNA_P Parameter: Plant Line Value: ap2 (Ler.)
  misc_feature: MA Experiment 108501 PARAMETER Experiment Name: At_ap2_floral_buds_cDNA_P Parameter: Tissue Value: Closed Flower
  misc_feature: MA Experiment ID: 108561 Result: Up-regulated in Transcription
  misc_feature: MA Experiment 108561 PARAMETER Experiment Name: At_100uM_ABA_cDNA_P Parameter: Timepoint (hr) Value: 6
  misc_feature: MA Experiment 108561 PARAMETER Experiment Name: At_100uM_ABA_cDNA_P Parameter: Tissue Value: Aerial
  misc_feature: MA Experiment 108561 PARAMETER Experiment Name: At_100uM_ABA_cDNA_P Parameter: Treatment Value: 100uM ABA vs. No Treatment
  misc_feature: MA Experiment ID: 108572 Result: Up-regulated in Transcription
  misc_feature: MA Experiment 108572 PARAMETER Experiment Name: At_Drought_cDNA_P Parameter: Timepoint (hr) Value: 1
  misc_feature: MA Experiment 108572 PARAMETER Experiment Name: At_Drought_cDNA_P Parameter: Tissue Value: Aerial
  misc_feature: MA Experiment 108572 PARAMETER Experiment Name: At_Drought_cDNA_P Parameter: Treatment Value: Drought vs. No Drought
  misc_feature: MA Experiment ID: 108573 Result: Up-regulated in Transcription
  misc_feature: MA Experiment 108573 PARAMETER Experiment Name: At_Drought_cDNA_P Parameter: Timepoint (hr) Value: 6
  misc_feature: MA Experiment 108573 PARAMETER Experiment Name: At_Drought_cDNA_P Parameter: Tissue Value: Aerial
  misc_feature: MA Experiment 108573 PARAMETER Experiment Name: At_Drought_cDNA_P Parameter: Treatment Value: Drought vs. No Drought
  misc_feature: MA Experiment ID: 108574 Result: Down-regulated in Transcription
  misc_feature: MA Experiment 108574 PARAMETER Experiment Name: At_Wounding__cDNA_P Parameter: Timepoint (hr) Value: 1
  misc_feature: MA Experiment 108574 PARAMETER Experiment Name: At_Wounding__cDNA_P Parameter: Tissue Value: Aerial
  misc_feature: MA Experiment 108574 PARAMETER Experiment Name: At_Wounding__cDNA_P Parameter: Treatment Value: Wounding vs. No Wounding
  misc_feature: MA Experiment ID: 108576 Result: Down-regulated in Transcription
  misc_feature: MA Experiment 108576 PARAMETER Experiment Name: At_42deg_Heat_cDNA_P Parameter: Temperature (deg C) Value: 42 vs. 22
  misc_feature: MA Experiment 108576 PARAMETER Experiment Name: At_42deg_Heat_cDNA_P Parameter: Timepoint (hr) Value: 1
  misc_feature: MA Experiment 108576 PARAMETER Experiment Name: At_42deg_Heat_cDNA_P Parameter: Tissue Value: Aerial
  misc_feature: MA Experiment ID: 108585 Result: Up-regulated in Transcription
  misc_feature: MA Experiment 108585 PARAMETER Experiment Name: At_5mM_NaNP_cDNA_P Parameter: Timepoint (hr) Value: 6
  misc_feature: MA Experiment 108585 PARAMETER Experiment Name: At_5mM_NaNP_cDNA_P Parameter: Tissue Value: Aerial
  misc_feature: MA Experiment 108585 PARAMETER Experiment Name: At_5mM_NaNP_cDNA_P Parameter: Treatment Value: null
  misc_feature: MA Experiment ID: 108594 Result: Up-regulated in Transcription
  misc_feature: MA Experiment 108594 PARAMETER Experiment Name: At_Ler-rhl_Root_cDNA_P Parameter: Plant Line Value: null
  misc_feature: MA Experiment ID: 108595 Result: Up-regulated in Transcription
  misc_feature: MA Experiment 108595 PARAMETER Experiment Name: At_Ler-pi_Ovule_cDNA_P Parameter: Plant Line Value: null
  misc_feature: MA Experiment ID: 108609 Result: Up-regulated in Transcription
  misc_feature: MA Experiment 108609 PARAMETER Experiment Name: At_100uM_ABA_cDNA_P Parameter: Timepoint (hr) Value: 24
  misc_feature: MA Experiment 108609 PARAMETER Experiment Name: At_100uM_ABA_cDNA_P Parameter: Tissue Value: Aerial
  misc_feature: MA Experiment 108609 PARAMETER Experiment Name: At_100uM_ABA_cDNA_P Parameter: Treatment Value: 100uM ABA vs. No Treatment
  misc_feature: MA Experiment ID: 20000068 Result: Down-regulated in Transcription
  misc_feature: MA Experiment ID: 20000069 Result: Up-regulated in Transcription
  misc_feature: MA Experiment 20000069 PARAMETER Experiment Name: At_100uM_ABA_Mutants_cDNA_P Parameter: Plant Line Value: CS23
  misc_feature: MA Experiment 20000069 PARAMETER Experiment Name: At_100uM_ABA_Mutants_cDNA_P Parameter: Timepoint (hr) Value: 6
  misc_feature: MA Experiment 20000069 PARAMETER Experiment Name: At_100uM_ABA_Mutants_cDNA_P Parameter: Tissue Value: Aerial
  misc_feature: MA Experiment 20000069 PARAMETER Experiment Name: At_100uM_ABA_Mutants_cDNA_P Parameter: Treatment Value: 100uM ABA vs. No Treatment
  misc_feature: MA Experiment ID: 20000070 Result: Up-regulated in Transcription
  misc_feature: MA Experiment 20000070 PARAMETER Experiment Name: At_100uM_ABA_Mutants_cDNA_P Parameter: Plant Line Value: CS24
  misc_feature: MA Experiment 20000070 PARAMETER Experiment Name: At_100uM_ABA_Mutants_cDNA_P Parameter: Timepoint (hr) Value: 6
  misc_feature: MA Experiment 20000070 PARAMETER Experiment Name: At_100uM_ABA_Mutants_cDNA_P Parameter: Tissue Value: Aerial
  misc_feature: MA Experiment 20000070 PARAMETER Experiment Name: At_100uM_ABA_Mutants_cDNA_P Parameter: Treatment Value: 100uM ABA vs. No Treatment
  misc_feature: MA Experiment ID: 20000071 Result: Up-regulated in Transcription
  misc_feature: MA Experiment 20000071 PARAMETER Experiment Name: At_100uM_ABA_Mutants_cDNA_P Parameter: Plant Line Value: CS8104
  misc_feature: MA Experiment 20000071 PARAMETER Experiment Name: At_100uM_ABA_Mutants_cDNA_P Parameter: Timepoint (hr) Value: 6
  misc_feature: MA Experiment 20000071 PARAMETER Experiment Name: At_100uM_ABA_Mutants_cDNA_P Parameter: Tissue Value: Aerial
  misc_feature: MA Experiment 20000071 PARAMETER Experiment Name: At_100uM_ABA_Mutants_cDNA_P Parameter: Treatment Value: 100uM ABA vs. No Treatment
  misc_feature: MA Experiment ID: 20000072 Result: Up-regulated in Transcription
  misc_feature: MA Experiment 20000072 PARAMETER Experiment Name: At_100uM_ABA_Mutants_cDNA_P Parameter: Plant Line Value: CS8105
  misc_feature: MA Experiment 20000072 PARAMETER Experiment Name: At_100uM_ABA_Mutants_cDNA_P Parameter: Timepoint (hr) Value: 6
  misc_feature: MA Experiment 20000072 PARAMETER Experiment Name: At_100uM_ABA_Mutants_cDNA_P Parameter: Tissue Value: Aerial
  misc_feature: MA Experiment 20000072 PARAMETER Experiment Name: At_100uM_ABA_Mutants_cDNA_P Parameter: Treatment Value: 100uM ABA vs. No Treatment
  misc_feature: MA Experiment ID: 20000087 Result: Up-regulated in Transcription
  misc_feature: MA Experiment 20000087 PARAMETER Experiment Name: At_100uM_ABA_Mutants_cDNA_P Parameter: Plant Line Value: WS
  misc_feature: MA Experiment 20000087 PARAMETER Experiment Name: At_100uM_ABA_Mutants_cDNA_P Parameter: Timepoint (hr) Value: 6
  misc_feature: MA Experiment 20000087 PARAMETER Experiment Name: At_100uM_ABA_Mutants_cDNA_P Parameter: Tissue Value: Aerial
  misc_feature: MA Experiment 20000087 PARAMETER Experiment Name: At_100uM_ABA_Mutants_cDNA_P Parameter: Treatment Value: 100uM ABA vs. No Treatment
  misc_feature: MA Experiment ID: 20000179 Result: Down-regulated in Transcription
  misc_feature: MA Experiment 20000179 PARAMETER Experiment Name: At_Germinating_Seeds_P Parameter: Age (hr) Value: 6 vs. 0
  misc_feature: MA Experiment 20000179 PARAMETER Experiment Name: At_Germinating_Seeds_P Parameter: Tissue Value: Germinating Seeds
  misc_feature: MA Experiment ID: 20000180 Result: Down-regulated in Transcription
  misc_feature: MA Experiment 20000180 PARAMETER Experiment Name: At_Germinating_Seeds_P Parameter: Age (hr) Value: 24 vs. 0
  misc_feature: MA Experiment 20000180 PARAMETER Experiment Name: At_Germinating_Seeds_P Parameter: Tissue Value: Germinating Seeds
  misc_feature: MA Experiment ID: 20000224 Result: Down-regulated in Transcription
  misc_feature: MA Experiment ID: 20000438 Result: Down-regulated in Transcription
  misc_feature: MA Experiment 20000438 PARAMETER Experiment Name: At_Shoots__P Parameter: Age (day) Value: 14
  misc_feature: MA Experiment 20000438 PARAMETER Experiment Name: At_Shoots__P Parameter: Tissue Value: Shoots vs. Whole Plant
  misc_feature: MA Experiment ID: 20000439 Result: Down-regulated in Transcription
  misc_feature: MA Experiment 20000439 PARAMETER Experiment Name: At_Roots__P Parameter: Age (day) Value: 14 vs. 21
  misc_feature: MA Experiment 20000439 PARAMETER Experiment Name: At_Roots__P Parameter: Organism Value: A. thaliana
  misc_feature: MA Experiment 20000439 PARAMETER Experiment Name: At_Roots__P Parameter: Tissue Value: Roots vs. Whole Plant
  misc_feature: MA Experiment ID: 20000495 Result: Down-regulated in Transcription
  misc_feature: MA Experiment 20000495 PARAMETER Experiment Name: At_Guard_Cells_P Parameter: Harvest Date Value: 8/2/2002
  misc_feature: MA Experiment 20000495 PARAMETER Experiment Name: At_Guard_Cells_P Parameter: Organism Value: A. thaliana
  misc_feature: MA Experiment 20000495 PARAMETER Experiment Name: At_Guard_Cells_P Parameter: Tissue Value: Guard Cells vs. Leaves
  misc_feature: MA Experiment ID: 20001904 Result: Up-regulated in Transcription
  misc_feature: MA Experiment 20001904 PARAMETER Experiment Name: At_Drought_Reproduction_P Parameter: Age (day) Value: 37
  misc_feature: MA Experiment 20001904 PARAMETER Experiment Name: At_Drought_Reproduction_P Parameter: Organism Value: A. thaliana
  misc_feature: MA Experiment 20001904 PARAMETER Experiment Name: At_Drought_Reproduction_P Parameter: Plant Line Value: WS
  misc_feature: MA Experiment 20001904 PARAMETER Experiment Name: At_Drought_Reproduction_P Parameter: Timepoint (day) Value: 7
  misc_feature: MA Experiment 20001904 PARAMETER Experiment Name: At_Drought_Reproduction_P Parameter: Tissue Value: Rosettes
  misc_feature: MA Experiment 20001904 PARAMETER Experiment Name: At_Drought_Reproduction_P Parameter: Treatment Value: Drought vs. No Drought
aatctttccctctcctcctcgaacaaaaacaacaaacgcagagaaactcaaaactcgaaaacgtttcatatagcaacgatgctttcttcatctccaacttcctttactcatccatttctctcttcttctccgcctctatctccgatatctccgccgtctcgcacggctcggatctctccacctctcgtctccgcctcttgctcatacacctacacggaagattcgccgagactgcatcagatcccgcggcgattgacgacggtgccagcttcgctttacgatgttcttgaggttcctttaggcgcgacgagtcaggatatcaaatcggcttaccggagattagccaggatctgccatccagacgtggcgggaactgatcggacttcttcttcatcggcggatgaattcatgaagatccatgccgcttactgtacgctttctgatcctgagaaacgctccgtttatgatcggaggatgttgcgacggagccgtcctttgaccgtcggaacctccgggttgggaagctacgtcggacggaactgggaaaccgatcagtgttggtagtgagttaactcggtgaccgagttagtagaacgagttaattagtgtaaatacgaagccataaaatccttgtaatttaatcatagtaagctaacatggacgggaactagtgtgctaacatacgccatgtgcttaccgtacgctccctcccccacgagcgatcggtgccgtttgtatccgtgtttacgtaggatctacgcgttttttttaccttgtgaatcctattagtttaaataatcaatgaaaatcatataaaaagatattttcttttgattatggtttggtttctttccctaaggtaagctcactaagcactgattttgagcacttctttattgttgttgatattacttgttcaaaataaccgagtgtaataaataaacaaatctaatagtatggttttattttagttgcaatcaattacgtttaggtttatagccaagttaatgctaaaacgcgggtattctgtgtt

SEQ ID NO: 107310 - protein, 187 aa, Arabidopsis thaliana
  peptide (1)..(187): Ceres Seq. ID no. 13645691
  misc_feature (91)..(159): Pfam Name: DnaJ domain Pfam Description: DnaJ domain
  misc_feature (27)..(187): Homolog of NCBI NO: 15233446 NR Description: DnaJ protein family [Arabidopsis thaliana]
  misc_feature (27)..(187): Homolog of NCBI NO: 9843641 NR Description: J11 protein [Arabidopsis thaliana]
  misc_feature (27)..(187): Homolog of NCBI NO: 15227919 NR Description: J11 protein, putative [Arabidopsis thaliana]
  misc_feature (42)..(187): Homolog of NCBI NO: 7488763 NR Description: DnaJ protein homolog - kidney bean (fragment)
  misc_feature (53)..(187): Homolog of NCBI NO: 15231204 NR Description: DnaJ protein family [Arabidopsis thaliana]
  misc_feature (29)..(157): Homolog of NCBI NO: 6691127 NR Description: DnaJ-like protein [Arabidopsis thaliana]
  misc_feature (29)..(157): Homolog of NCBI NO: 30682610 NR Description: DnaJ protein family [Arabidopsis thaliana]
  misc_feature (29)..(157): Homolog of NCBI NO: 15236355 NR Description: DnaJ protein family [Arabidopsis thaliana]
  misc_feature (38)..(187): Homolog of NCBI NO: 34894012 NR Description: P0672D08.16 [Oryza sativa (japonica >gi|15128446|dbj|BAB62630.1| hypothetical protein [Oryza sativa
  misc_feature (76)..(157): Homolog of NCBI NO: 34863272 NR Description: similar to hypothetical protein FLJ40417 [Rattus
NLSLSSSNKNNKRRETQNSKTFHIATMLSSSPTSFTHPFLSSSPPLSPISPPSRTARISPPLVSASCSYTYTEDSPRLHQIPRRLTTVPASLYDVLEVPLGATSQDIKSAYRRLARICHPDVAGTDRTSSSSADEFMKIHAAYCTLSDPEKRSVYDRRMLRRSRPLTVGTSGLGSYVGRNWETDQCW

SEQ ID NO: 107311 - protein, 161 aa, Arabidopsis thaliana
  peptide (1)..(161): Ceres Seq. ID no. 13645692
  misc_feature (65)..(133): Pfam Name: DnaJ domain Pfam Description: DnaJ domain
  misc_feature (1)..(161): Homolog of NCBI NO: 15233446 NR Description: DnaJ protein family [Arabidopsis thaliana]
  misc_feature (1)..(161): Homolog of NCBI NO: 9843641 NR Description: J11 protein [Arabidopsis thaliana]
  misc_feature (1)..(161): Homolog of NCBI NO: 15227919 NR Description: J11 protein, putative [Arabidopsis thaliana]
  misc_feature (16)..(161): Homolog of NCBI NO: 7488763 NR Description: DnaJ protein homolog - kidney bean (fragment)
  misc_feature (27)..(161): Homolog of NCBI NO: 15231204 NR Description: DnaJ protein family [Arabidopsis thaliana]
  misc_feature (3)..(131): Homolog of NCBI NO: 6691127 NR Description: DnaJ-like protein [Arabidopsis thaliana]
  misc_feature (3)..(131): Homolog of NCBI NO: 15236355 NR Description: DnaJ protein family [Arabidopsis thaliana]
  misc_feature (3)..(131): Homolog of NCBI NO: 30682610 NR Description: DnaJ protein family [Arabidopsis thaliana]
  misc_feature (12)..(161): Homolog of NCBI NO: 34894012 NR Description: P0672D08.16 [Oryza sativa (japonica >gi|15128446|dbj|BAB62630.1| hypothetical protein [Oryza sativa
  misc_feature (50)..(131): Homolog of NCBI NO: 34863272 NR Description: similar to hypothetical protein FLJ40417 [Rattus
MLSSSPTSFTHPFLSSSPPLSPISPPSRTARISPPLVSASCSYTYTEDSPRLHQIPRRLTTVPASLYDVLEVPLGATSQDIKSAYRRLARICHPDVAGTDRTSSSSADEFMKIHAAYCTLSDPEKRSVYDRRMLRRSRPLTVGTSGLGSYVGRNWETDQCW

SEQ ID NO: 107312 - protein, 95 aa, Arabidopsis thaliana
  peptide (1)..(95): Ceres Seq. ID no. 13645693
SFPLLLEQKQQTQRNSKLENVSYSNDAFFISNFLYSSISLFFSASISDISAVSHGSDLSTSRLRLLLIHLHGRFAETASDPAAIDDGASFALRCS

SEQ ID NO: 107313 - DNA, 1578 bp, Arabidopsis thaliana
  misc_feature (1)..(1578): Ceres Seq. ID no. 13645782
  misc_feature: MA Experiment ID: 108434 Result: Down-regulated in Transcription
  misc_feature: MA Experiment 108434 PARAMETER Experiment Name: At_Root_Tips_cDNA_P Parameter: Tissue Value: Root Tips
  misc_feature: MA Experiment ID: 108435 Result: Down-regulated in Transcription
  misc_feature: MA Experiment 108435 PARAMETER Experiment Name: At_stm_Mutants_cDNA_P Parameter: Plant Line Value: wt Landsburg vs stm
  misc_feature: MA Experiment 108435 PARAMETER Experiment Name: At_stm_Mutants_cDNA_P Parameter: Tissue Value: Shoot Apical Meristem Region
  misc_feature: MA Experiment ID: 108461 Result: Up-regulated in Transcription
  misc_feature: MA Experiment 108461 PARAMETER Experiment Name: At_Germinating_Seeds_cDNA_P Parameter: Age (day) Value: 1 vs. 0
  misc_feature: MA Experiment 108461 PARAMETER Experiment Name: At_Germinating_Seeds_cDNA_P Parameter: Tissue Value: Germinating Seeds
  misc_feature: MA Experiment ID: 108462 Result: Up-regulated in Transcription
  misc_feature: MA Experiment 108462 PARAMETER Experiment Name: At_Germinating_Seeds_cDNA_P Parameter: Age (day) Value: 2 vs. 0
  misc_feature: MA Experiment 108462 PARAMETER Experiment Name: At_Germinating_Seeds_cDNA_P Parameter: Tissue Value: Germinating Seeds
  misc_feature: MA Experiment ID: 108463 Result: Up-regulated in Transcription
  misc_feature: MA Experiment 108463 PARAMETER Experiment Name: At_Germinating_Seeds_cDNA_P Parameter: Age (day) Value: 3 vs. 0
  misc_feature: MA Experiment 108463 PARAMETER Experiment Name: At_Germinating_Seeds_cDNA_P Parameter: Tissue Value: Germinating Seeds
  misc_feature: MA Experiment ID: 108488 Result: Up-regulated in Transcription
  misc_feature: MA Experiment ID: 108489 Result: Down-regulated in Transcription
  misc_feature: MA Experiment ID: 108573 Result: Up-regulated in Transcription
  misc_feature: MA Experiment 108573 PARAMETER Experiment Name: At_Drought_cDNA_P Parameter: Timepoint (hr) Value: 6
  misc_feature: MA Experiment 108573 PARAMETER Experiment Name: At_Drought_cDNA_P Parameter: Tissue Value: Aerial
  misc_feature: MA Experiment 108573 PARAMETER Experiment Name: At_Drought_cDNA_P Parameter: Treatment Value: Drought vs. No Drought
  misc_feature: MA Experiment ID: 108594 Result: Down-regulated in Transcription
  misc_feature: MA Experiment 108594 PARAMETER Experiment Name: At_Ler-rhl_Root_cDNA_P Parameter: Plant Line Value: null
  misc_feature: MA Experiment ID: 108595 Result: Down-regulated in Transcription
  misc_feature: MA Experiment 108595 PARAMETER Experiment Name: At_Ler-pi_Ovule_cDNA_P Parameter: Plant Line Value: null
  misc_feature: MA Experiment ID: 20000113 Result: Down-regulated in Transcription
  misc_feature: MA Experiment 20000113 PARAMETER Experiment Name: At_42deg_Heat_cDNA_P Parameter: Temperature (deg C) Value: 42 vs. 22
  misc_feature: MA Experiment 20000113 PARAMETER Experiment Name: At_42deg_Heat_cDNA_P Parameter: Timepoint (hr) Value: 8
  misc_feature: MA Experiment 20000113 PARAMETER Experiment Name: At_42deg_Heat_cDNA_P Parameter: Tissue Value: Aerial
  misc_feature: MA Experiment ID: 20000179 Result: Up-regulated in Transcription
  misc_feature: MA Experiment 20000179 PARAMETER Experiment Name: At_Germinating_Seeds_P Parameter: Age (hr) Value: 6 vs. 0
  misc_feature: MA Experiment 20000179 PARAMETER Experiment Name: At_Germinating_Seeds_P Parameter: Tissue Value: Germinating Seeds
  misc_feature: MA Experiment ID: 20000180 Result: Up-regulated in Transcription
  misc_feature: MA Experiment 20000180 PARAMETER Experiment Name: At_Germinating_Seeds_P Parameter: Age (hr) Value: 24 vs. 0
  misc_feature: MA Experiment 20000180 PARAMETER Experiment Name: At_Germinating_Seeds_P Parameter: Tissue Value: Germinating Seeds
  misc_feature: MA Experiment ID: 20000185 Result: Down-regulated in Transcription
  misc_feature: MA Experiment 20000185 PARAMETER Experiment Name: At_Roots__P Parameter: Age (day) Value: 7 vs. 21
  misc_feature: MA Experiment 20000185 PARAMETER Experiment Name: At_Roots__P Parameter: Organism Value: A. thaliana
  misc_feature: MA Experiment 20000185 PARAMETER Experiment Name: At_Roots__P Parameter: Tissue Value: Roots vs. Whole Plant
  misc_feature: MA Experiment ID: 20000227 Result: Down-regulated in Transcription
  misc_feature: MA Experiment 20000227 PARAMETER Experiment Name: At_Root-Tips-vs-Tops_P Parameter: Tissue Value: Root Tips vs. Root Tops
  misc_feature: MA Experiment ID: 20000269 Result: Down-regulated in Transcription
  misc_feature: MA Experiment 20000269 PARAMETER Experiment Name: At_1mM_KNO3_L-vs-H_Roots_P Parameter: Age (day) Value: 7,10,12
  misc_feature: MA Experiment 20000269 PARAMETER Experiment Name: At_1mM_KNO3_L-vs-H_Roots_P Parameter: Organism Value: A. thaliana
  misc_feature: MA Experiment 20000269 PARAMETER Experiment Name: At_1mM_KNO3_L-vs-H_Roots_P Parameter: Plant Line Value: WS
  misc_feature: MA Experiment 20000269 PARAMETER Experiment Name: At_1mM_KNO3_L-vs-H_Roots_P Parameter: Timepoint (day) Value: 7,10,12
  misc_feature: MA Experiment 20000269 PARAMETER Experiment Name: At_1mM_KNO3_L-vs-H_Roots_P Parameter: Tissue Value: Roots
  misc_feature: MA Experiment 20000269 PARAMETER Experiment Name: At_1mM_KNO3_L-vs-H_Roots_P Parameter: Treatment Value: 1mM KNO3 vs. 50mM KNO3
  misc_feature: MA Experiment ID: 20000437 Result: Down-regulated in Transcription
  misc_feature: MA Experiment 20000437 PARAMETER Experiment Name: At_Drought_P Parameter: Age (day) Value: 8
  misc_feature: MA Experiment 20000437 PARAMETER Experiment Name: At_Drought_P Parameter: Organism Value: A. thaliana
  misc_feature: MA Experiment 20000437 PARAMETER Experiment Name: At_Drought_P Parameter: Plant Line Value: WS
  misc_feature: MA Experiment 20000437 PARAMETER Experiment Name: At_Drought_P Parameter: Timepoint (hr) Value: 24
  misc_feature: MA Experiment 20000437 PARAMETER Experiment Name: At_Drought_P Parameter: Tissue Value: Whole Plant
  misc_feature: MA Experiment 20000437 PARAMETER Experiment Name: At_Drought_P Parameter: Treatment Value: Drought vs. No Drought
  misc_feature: MA Experiment ID: 20000439 Result: Down-regulated in Transcription
  misc_feature: MA Experiment 20000439 PARAMETER Experiment Name: At_Roots__P Parameter: Age (day) Value: 14 vs. 21
  misc_feature: MA Experiment 20000439 PARAMETER Experiment Name: At_Roots__P Parameter: Organism Value: A. thaliana
  misc_feature: MA Experiment 20000439 PARAMETER Experiment Name: At_Roots__P Parameter: Tissue Value: Roots vs. Whole Plant
  misc_feature: MA Experiment ID: 20001557 Result: Down-regulated in Transcription
  misc_feature: MA Experiment 20001557 PARAMETER Experiment Name: At_Drought_Soil_Dry_P Parameter: Age (day) Value: 27
  misc_feature: MA Experiment 20001557 PARAMETER Experiment Name: At_Drought_Soil_Dry_P Parameter: Organism Value: A. thaliana
  misc_feature: MA Experiment 20001557 PARAMETER Experiment Name: At_Drought_Soil_Dry_P Parameter: Plant Line Value: WS
  misc_feature: MA Experiment 20001557 PARAMETER Experiment Name: At_Drought_Soil_Dry_P Parameter: Post Timepoint (hr) Value: 3
  misc_feature: MA Experiment 20001557 PARAMETER Experiment Name: At_Drought_Soil_Dry_P Parameter: Post-Treatment Value: Re-Water vs. No Drought
  misc_feature: MA Experiment 20001557 PARAMETER Experiment Name: At_Drought_Soil_Dry_P Parameter: Timepoint (day) Value: 13
  misc_feature: MA Experiment 20001557 PARAMETER Experiment Name: At_Drought_Soil_Dry_P Parameter: Treatment Value: Drought vs. No Drought
  misc_feature: MA Experiment ID: 20001558 Result: Down-regulated in Transcription
  misc_feature: MA Experiment 20001558 PARAMETER Experiment Name: At_Drought_Soil_Dry_P Parameter: Age (day) Value: 27
  misc_feature: MA Experiment 20001558 PARAMETER Experiment Name: At_Drought_Soil_Dry_P Parameter: Organism Value: A. thaliana
  misc_feature: MA Experiment 20001558 PARAMETER Experiment Name: At_Drought_Soil_Dry_P Parameter: Plant Line Value: WS
  misc_feature: MA Experiment 20001558 PARAMETER Experiment Name: At_Drought_Soil_Dry_P Parameter: Post Timepoint (hr) Value: 6
  misc_feature: MA Experiment 20001558 PARAMETER Experiment Name: At_Drought_Soil_Dry_P Parameter: Post-Treatment Value: Re-Water vs. No Drought
  misc_feature: MA Experiment 20001558 PARAMETER Experiment Name: At_Drought_Soil_Dry_P Parameter: Timepoint (day) Value: 13
  misc_feature: MA Experiment 20001558 PARAMETER Experiment Name: At_Drought_Soil_Dry_P Parameter: Treatment Value: Drought vs. No Drought
  misc_feature: MA Experiment ID: 20001559 Result: Down-regulated in Transcription
  misc_feature: MA Experiment 20001559 PARAMETER Experiment Name: At_Drought_Soil_Dry_P Parameter: Age (day) Value: 28
  misc_feature: MA Experiment 20001559 PARAMETER Experiment Name: At_Drought_Soil_Dry_P Parameter: Organism Value: A. thaliana
  misc_feature: MA Experiment 20001559 PARAMETER Experiment Name: At_Drought_Soil_Dry_P Parameter: Plant Line Value: WS
  misc_feature: MA Experiment 20001559 PARAMETER Experiment Name: At_Drought_Soil_Dry_P Parameter: Post Timepoint (hr) Value: 29
  misc_feature: MA Experiment 20001559 PARAMETER Experiment Name: At_Drought_Soil_Dry_P Parameter: Post-Treatment Value: Re-Water vs. No Drought
  misc_feature: MA Experiment 20001559 PARAMETER Experiment Name: At_Drought_Soil_Dry_P Parameter: Timepoint (day) Value: 14
  misc_feature: MA Experiment 20001559 PARAMETER Experiment Name: At_Drought_Soil_Dry_P Parameter: Treatment Value: Drought vs. No Drought
  misc_feature: MA Experiment ID: 20001560 Result: Down-regulated in Transcription
  misc_feature: MA Experiment 20001560 PARAMETER Experiment Name: At_Drought_Soil_Dry_P Parameter: Age (day) Value: 28
  misc_feature: MA Experiment 20001560 PARAMETER Experiment Name: At_Drought_Soil_Dry_P Parameter: Organism Value: A. thaliana
  misc_feature: MA Experiment 20001560 PARAMETER Experiment Name: At_Drought_Soil_Dry_P Parameter: Plant Line Value: WS
  misc_feature: MA Experiment 20001560 PARAMETER Experiment Name: At_Drought_Soil_Dry_P Parameter: Post Timepoint (hr) Value: None
  misc_feature: MA Experiment 20001560 PARAMETER Experiment Name: At_Drought_Soil_Dry_P Parameter: Post-Treatment Value: None
  misc_feature: MA Experiment 20001560 PARAMETER Experiment Name: At_Drought_Soil_Dry_P Parameter: Timepoint (day) Value: 14
  misc_feature: MA Experiment 20001560 PARAMETER Experiment Name: At_Drought_Soil_Dry_P Parameter: Treatment Value: Drought vs. No Drought
  misc_feature: MA Experiment ID: 20001757 Result: Up-regulated in Transcription
  misc_feature: MA Experiment 20001757 PARAMETER Experiment Name: At_50mM_NH4NO3_L-to-H_P Parameter: Timepoint (hr) Value: 6
  misc_feature: MA Experiment 20001757 PARAMETER Experiment Name: At_50mM_NH4NO3_L-to-H_P Parameter: Tissue Value: Leaf
  misc_feature: MA Experiment 20001757 PARAMETER Experiment Name: At_50mM_NH4NO3_L-to-H_P Parameter: Treatment Value: 50mM NH4NO3 vs 100mM Mannitol
  misc_feature: MA Experiment ID: 20001904 Result: Down-regulated in Transcription
  misc_feature: MA Experiment 20001904 PARAMETER Experiment Name: At_Drought_Reproduction_P Parameter: Age (day) Value: 37
  misc_feature: MA Experiment 20001904 PARAMETER Experiment Name: At_Drought_Reproduction_P Parameter: Organism Value: A. thaliana
  misc_feature: MA Experiment 20001904 PARAMETER Experiment Name: At_Drought_Reproduction_P Parameter: Plant Line Value: WS
  misc_feature: MA Experiment 20001904 PARAMETER Experiment Name: At_Drought_Reproduction_P Parameter: Timepoint (day) Value: 7
  misc_feature: MA Experiment 20001904 PARAMETER Experiment Name: At_Drought_Reproduction_P Parameter: Tissue Value: Rosettes
  misc_feature: MA Experiment 20001904 PARAMETER Experiment Name: At_Drought_Reproduction_P Parameter: Treatment Value: Drought vs. No Drought
  misc_feature: MA Experiment ID: 20001905 Result: Down-regulated in Transcription
  misc_feature: MA Experiment 20001905 PARAMETER Experiment Name: At_Drought_Reproduction_P Parameter: Age (day) Value: 40
  misc_feature: MA Experiment 20001905 PARAMETER Experiment Name: At_Drought_Reproduction_P Parameter: Organism Value: A. thaliana
  misc_feature: MA Experiment 20001905 PARAMETER Experiment Name: At_Drought_Reproduction_P Parameter: Plant Line Value: WS
  misc_feature: MA Experiment 20001905 PARAMETER Experiment Name: At_Drought_Reproduction_P Parameter: Timepoint (day) Value: 10
  misc_feature: MA Experiment 20001905 PARAMETER Experiment Name: At_Drought_Reproduction_P Parameter: Tissue Value: Rosettes
  misc_feature: MA Experiment 20001905 PARAMETER Experiment Name: At_Drought_Reproduction_P Parameter: Treatment Value: Drought vs. No Drought
  misc_feature: MA Experiment ID: 20001906 Result: Down-regulated in Transcription
  misc_feature: MA Experiment 20001906 PARAMETER Experiment Name: At_Drought_Reproduction_P Parameter: Age (day) Value: 35
  misc_feature: MA Experiment 20001906 PARAMETER Experiment Name: At_Drought_Reproduction_P Parameter: Organism Value: A. thaliana
  misc_feature: MA Experiment 20001906 PARAMETER Experiment Name: At_Drought_Reproduction_P Parameter: Plant Line Value: WS
  misc_feature: MA Experiment 20001906 PARAMETER Experiment Name: At_Drought_Reproduction_P Parameter: Timepoint (day) Value: 5
  misc_feature: MA Experiment 20001906 PARAMETER Experiment Name: At_Drought_Reproduction_P Parameter: Tissue Value: Siliques
  misc_feature: MA Experiment 20001906 PARAMETER Experiment Name: At_Drought_Reproduction_P Parameter: Treatment Value: Drought vs. No Drought
  misc_feature: MA Experiment ID: 20001908 Result: Down-regulated in Transcription
  misc_feature: MA Experiment 20001908 PARAMETER Experiment Name: At_Drought_Reproduction_P Parameter: Age (day) Value: 40
  misc_feature: MA Experiment 20001908 PARAMETER Experiment Name: At_Drought_Reproduction_P Parameter: Organism Value: A. thaliana
  misc_feature: MA Experiment 20001908 PARAMETER Experiment Name: At_Drought_Reproduction_P Parameter: Plant Line Value: WS
  misc_feature: MA Experiment 20001908 PARAMETER Experiment Name: At_Drought_Reproduction_P Parameter: Timepoint (day) Value: 10
  misc_feature: MA Experiment 20001908 PARAMETER Experiment Name: At_Drought_Reproduction_P Parameter: Tissue Value: Siliques
  misc_feature: MA Experiment 20001908 PARAMETER Experiment Name: At_Drought_Reproduction_P Parameter: Treatment Value: Drought vs. No Drought
ccctctttgctctcactatcaaaactctgaatttcgatttcaatggagtcacgcgtgctgttacgcgccaccgcgaatgtcgttggaattccgaaattgagacgaccaatcggagcgatccaccgtcaattcagcactgcatcgtcttcctcgttctcggttaaaccaatcggaggaatcggagagggagcgaatctgatctccggtcgtcagcttcgtccaattcttcttctcgattcgtcggcgatcaacggaggagagaaaagagaaattctcaaaccggttaaagccgccgctgctgaaggtggagataccgctggggatgctaaagttggattcctcgccaagtatccatggctagtcactggattcttcttcttcatgtggtacttcttgaatgtgattttcaacatccttaacaagaagatctataattacttcccttatccctattttgtatcggtgatacacttgttcgtgggagttgtttactgcttgatcagctggtccgtgggtcttcctaaacgtgccccgattgactcgaacctcctcaaggtattgataccagtcgcagtctgtcacgccttaggccatgtcactagcaatgtctctttcgctgcggttgctgtctccttcactcacaccatcaaagcacttgagccattcttcaatgcggctgcttctcaattcattatgggacaatccatccccataacactatggttgtctctagctcctgttgttcttggtgttgcaatggcttcactaactgagctatcattcaactggctcggtttcatcagtgctatgatatcaaacatttctttcacttaccgaagcatcttctccaagaaagccatgactgatatggacagtacaaatgtctacgcttacatctccatcatcgcactcttcgtctgcattcctcctgccatcatcgttgaaggtcctaaactacttaaccatggtttcgccgacgcgattgctaaagttggaatgactaaattcatctctgatctcttctgggttggaatgttttaccatctctacaatcagctggctaccaataccttggagagggttgcaccgctgactcacgcggttggaaacgttctgaaacgtgtgttcgtgatcggtttctccatcgttatcttcggaaacaagatatcgacacagacaggtataggaacaggaatagccattgctggagttgcaatgtactctatcattaaggccaagatcgaagaagagaaacggcaaggaaagaaagcatagaaagcagctgaagacggcggtcgacagttgcataaacaagttctccgatggatatatatatctatataataaataaccaaatgcaatagtatgttgtattgtaccatcaaccattgttttcgagtttttcctttctttgttttttttttgctttctgaaaagttatatataaattttttattctgcttcttctctttttaatggagaacattttcatttccatttcttctgatatgcaattatcttaacggataaaaggcataataatgtatttatttgctctttctcttggagcatataccc

SEQ ID NO: 107314 - protein, 410 aa, Arabidopsis thaliana; identical to SEQ ID NO: 106343
  peptide (1)..(410): Ceres Seq. ID no. 13645783
  misc_feature (1)..(410): Homolog of NCBI NO: 30694881 NR Description: phosphate/triose-phosphate translocator, putative
  misc_feature (1)..(410): Homolog of NCBI NO: 21593093 NR Description: phosphate/triose-phosphate translocator precursor
  misc_feature (1)..(405): Homolog of NCBI NO: 9757731 NR Description: phosphate/triose-phosphate translocator precursor
  misc_feature (1)..(410): Homolog of NCBI NO: 1706107 NR Description: TRIOSE PHOSPHATE/PHOSPHATE TRANSLOCATOR,
  misc_feature (1)..(410): Homolog of NCBI NO: 9295273 NR Description: triose phosphate/phosphate translocator precursor
  misc_feature (1)..(410): Homolog of NCBI NO: 629694 NR Description: phosphate translocator, chloroplast - common >gi|403023|emb|CAA52979.1| phosphate translocator [Nicotiana
  misc_feature (1)..(408): Homolog of NCBI NO: 117291 NR Description: TRIOSE PHOSPHATE/PHOSPHATE TRANSLOCATOR,
  misc_feature (1)..(410): Homolog of NCBI NO: 117290 NR Description: TRIOSE PHOSPHATE/PHOSPHATE TRANSLOCATOR,
  misc_feature (1)..(410): Homolog of NCBI NO: 1352198 NR Description: TRIOSE PHOSPHATE/PHOSPHATE TRANSLOCATOR,
  misc_feature (1)..(410): Homolog of NCBI NO: 1352199 NR Description: Triose phosphate/phosphate translocator,

SEQ ID NO: 107315 - protein, 297 aa, Arabidopsis thaliana; identical to SEQ ID NO: 23306
  peptide (1)..(297): Ceres Seq. ID no. 13645784
  misc_feature (1)..(297): Homolog of NCBI NO: 30694881 NR Description: phosphate/triose-phosphate translocator, putative
  misc_feature (1)..(297): Homolog of NCBI NO: 21593093 NR Description: phosphate/triose-phosphate translocator precursor
  misc_feature (1)..(292): Homolog of NCBI NO: 9757731 NR Description: phosphate/triose-phosphate translocator precursor
  misc_feature (1)..(297): Homolog of NCBI NO: 1706107 NR Description: TRIOSE PHOSPHATE/PHOSPHATE TRANSLOCATOR,
  misc_feature (1)..(297): Homolog of NCBI NO: 9295273 NR Description: triose phosphate/phosphate translocator precursor
  misc_feature (1)..(297): Homolog of NCBI NO: 629694 NR Description: phosphate translocator, chloroplast - common >gi|403023|emb|CAA52979.1| phosphate translocator [Nicotiana
  misc_feature (1)..(295): Homolog of NCBI NO: 117291 NR Description: TRIOSE PHOSPHATE/PHOSPHATE TRANSLOCATOR,
  misc_feature (1)..(297): Homolog of NCBI NO: 117290 NR Description: TRIOSE PHOSPHATE/PHOSPHATE TRANSLOCATOR,
  misc_feature (1)..(297): Homolog of NCBI NO: 1352198 NR Description: TRIOSE PHOSPHATE/PHOSPHATE TRANSLOCATOR,
  misc_feature (1)..(297): Homolog of NCBI NO: 1352199 NR Description: Triose phosphate/phosphate translocator,

SEQ ID NO: 107316 - DNA, 1152 bp, Arabidopsis thaliana
  misc_feature (1)..(1152): Ceres Seq. ID no. 13645999
  misc_feature: MA Experiment ID: 20000307 Result: Up-regulated in Transcription
  misc_feature: MA Experiment 20000307 PARAMETER Experiment Name: At_Germinating_Seeds_Sub_P Parameter: Age (hr) Value: 24 vs. 0
  misc_feature: MA Experiment 20000307 PARAMETER Experiment Name: At_Germinating_Seeds_Sub_P Parameter: Organism Value: A. thaliana
  misc_feature: MA Experiment 20000307 PARAMETER Experiment Name: At_Germinating_Seeds_Sub_P Parameter: Plant Line Value: WS
  misc_feature: MA Experiment 20000307 PARAMETER Experiment Name: At_Germinating_Seeds_Sub_P Parameter: Tissue Value: Germinating Seeds
  misc_feature: MA Experiment ID: 20000314 Result: Down-regulated in Transcription
  misc_feature: MA Experiment 20000314 PARAMETER Experiment Name: At_14day_Shoots-Roots_Sub_P Parameter: Age (day) Value: 14
  misc_feature: MA Experiment 20000314 PARAMETER Experiment Name: At_14day_Shoots-Roots_Sub_P Parameter: Organism Value: A. thaliana
  misc_feature: MA Experiment 20000314 PARAMETER Experiment Name: At_14day_Shoots-Roots_Sub_P Parameter: Plant Line Value: WS
  misc_feature: MA Experiment 20000314 PARAMETER Experiment Name: At_14day_Shoots-Roots_Sub_P Parameter: Tissue Value: Roots vs. Whole Plant
  misc_feature: MA Experiment ID: 20001807 Result: Up-regulated in Transcription
  misc_feature: MA Experiment 20001807 PARAMETER Experiment Name: At_50mM_NH4NO3_L-to-H_Sub_P Parameter: Timepoint (hr) Value: 6
  misc_feature: MA Experiment 20001807 PARAMETER Experiment Name: At_50mM_NH4NO3_L-to-H_Sub_P Parameter: Tissue Value: Leaf
  misc_feature: MA Experiment 20001807 PARAMETER Experiment Name: At_50mM_NH4NO3_L-to-H_Sub_P Parameter: Treatment Value: 50mM NH4NO3 vs 100mM Mannitol
actcatctctaacgtttctttctatctctaatccaagcaacaatatggattccgtaatcgctttcgacagatctccgatgtttcgagtctacaagagtggccgcattgagcgtctcttaggagaaacaaccgtcccaccatctcttacaccacaaaacggtgtcgtctccaaagatatcatccattcaccggagaaaaacctctccctccgcatctacctaccggagaaagtcactgttaaaaagctcccaatcctcatctacttccacggtggtggtttcatcatagaaacagctttttctccaccctaccacactttcctcacatccgccgtcgcggccgctaactgcttagcaatatcagtaaactatcgccgtgcaccggagtttccggtacctattccgtacgaagattcatgggattcactcaaatgggtgttaactcatatcacaggaaccggaccggaaacttggataaacaaacacggcgatttcggaaaagtgtttctcgccggagatagcgccggtggaaacatatctcatcatctaacgatgcgagcgaaaaaagagaagctttgtgattctttaatatcagggataatcttgattcatccatatttttggagtaagactccaattgatgagtttgaggttagagacgtggggaagacgaaaggtgttgaaggaagttggagagtcgcaagtccgaatagtaaacaaggagttgatgatccatggctcaacgttgtcggatcggatccatccggattaggttgcgggcgggttttggtaatggtagctggagatgatctgtttgtgagacaaggttggtgttacgcggagaagctgaagaagagtggatgggaaggtgaagttgaggtaatggagactaaaaatgaaggtcatgtttttcatttgaagaatcctaatagtgataatgctcgtcaagtcgtgaagaaacttgaagagtttattaataagtaatattaatgagtacgtttgtcgaaggagataacaataactaaagaataaattggtgtatttgtcactgattacatatagaattatgctatcacatttagggttaaagccaagaggagtcagttaaagtttcagttattttctttcaagtaactgatagaaagacgattaa

SEQ ID NO: 107317 - protein, 326 aa, Arabidopsis thaliana
  peptide (1)..(326): Ceres Seq. ID no. 13646000
  misc_feature (71)..(124): Pfam Name: Carboxylesterase Pfam Description: Carboxylesterase
  misc_feature (15)..(326): Homolog of NCBI NO: 15227669 NR Description: expressed protein [Arabidopsis thaliana]
  misc_feature (19)..(326): Homolog of NCBI NO: 28393060 NR Description: putative esterase [Arabidopsis thaliana]
  misc_feature (15)..(324): Homolog of NCBI NO: 15228425 NR Description: expressed protein [Arabidopsis thaliana]
  misc_feature (15)..(324): Homolog of NCBI NO: 18086341 NR Description: AT3g48690/T8P19_200 [Arabidopsis thaliana]
  misc_feature (15)..(324): Homolog of NCBI NO: 15228426 NR Description: expressed protein [Arabidopsis thaliana]
  misc_feature (15)..(326): Homolog of NCBI NO: 15221975 NR Description: expressed protein [Arabidopsis thaliana]
  misc_feature (13)..(324): Homolog of NCBI NO: 21537287 NR Description: putative esterase [Arabidopsis thaliana]
  misc_feature (15)..(324): Homolog of NCBI NO: 15222795 NR Description: expressed protein [Arabidopsis thaliana]
  misc_feature (13)..(324): Homolog of NCBI NO: 18402731 NR Description: expressed protein [Arabidopsis thaliana]
  misc_feature (25)..(324): Homolog of NCBI NO: 15222791 NR Description: hypothetical protein [Arabidopsis thaliana]
SSLTFLSISNPSNNMDSVIAFDRSPMFRVYKSGRIERLLGETTVPPSLTPQNGVVSKDIIHSPEKNLSLRIYLPEKVTVKKLPILIYFHGGGFIIETAFSPPYHTFLTSAVAAANCLAISVNYRRAPEFPVPIPYEDSWDSLKWVLTHITGTGPETWINKHGDFGKVFLAGDSAGGNISHHLTMRAKKEKLCDSLISGIILIHPYFWSKTPIDEFEVRDVGKTKGVEGSWRVASPNSKQGVDDPWLNVVGSDPSGLGCGRVLVMVAGDDLFVRQGWCYAEKLKKSGWEGEVEVMETKNEGHVFHLKNPNSDNARQVVKKLEEFINK

SEQ ID NO: 107318 - protein, 312 aa, Arabidopsis thaliana
  peptide (1)..(312): Ceres Seq. ID no. 13646001
  misc_feature (57)..(110): Pfam Name: Carboxylesterase Pfam Description: Carboxylesterase
  misc_feature (1)..(312): Homolog of NCBI NO: 15227669 NR Description: expressed protein [Arabidopsis thaliana]
  misc_feature (5)..(312): Homolog of NCBI NO: 28393060 NR Description: putative esterase [Arabidopsis thaliana]
  misc_feature (1)..(310): Homolog of NCBI NO: 15228425 NR Description: expressed protein [Arabidopsis thaliana]
  misc_feature (1)..(310): Homolog of NCBI NO: 18086341 NR Description: AT3g48690/T8P19_200 [Arabidopsis thaliana]
  misc_feature (1)..(310): Homolog of NCBI NO: 15228426 NR Description: expressed protein [Arabidopsis thaliana]
  misc_feature (1)..(312): Homolog of NCBI NO: 15221975 NR Description: expressed protein [Arabidopsis thaliana]
  misc_feature (1)..(310): Homolog of NCBI NO: 21537287 NR Description: putative esterase [Arabidopsis thaliana]
  misc_feature (1)..(310): Homolog of NCBI NO: 15222795 NR Description: expressed protein [Arabidopsis thaliana]
  misc_feature (1)..(310): Homolog of NCBI NO: 18402731 NR Description: expressed protein [Arabidopsis thaliana]
  misc_feature (11)..(310): Homolog of NCBI NO: 15222791 NR Description: hypothetical protein [Arabidopsis thaliana]
MDSVIAFDRSPMFRVYKSGRIERLLGETTVPPSLTPQNGVVSKDIIHSPEKNLSLRIYLPEKVTVKKLPILIYFHGGGFIIETAFSPPYHTFLTSAVAAANCLAISVNYRRAPEFPVPIPYEDSWDSLKWVLTHITGTGPETWINKHGDFGKVFLAGDSAGGNISHHLTMRAKKEKLCDSLISGIILIHPYFWSKTPIDEFEVRDVGKTKGVEGSWRVASPNSKQGVDDPWLNVVGSDPSGLGCGRVLVMVAGDDLFVRQGWCYAEKLKKSGWEGEVEVMETKNEGHVFHLKNPNSDNARQVVKKLEEFINK

SEQ ID NO: 107319 - protein, 301 aa, Arabidopsis thaliana
  peptide (1)..(301): Ceres Seq. ID no. 13646002
  misc_feature (46)..(99): Pfam Name: Carboxylesterase Pfam Description: Carboxylesterase
  misc_feature (1)..(301): Homolog of NCBI NO: 15227669 NR Description: expressed protein [Arabidopsis thaliana]
  misc_feature (1)..(301): Homolog of NCBI NO: 28393060 NR Description: putative esterase [Arabidopsis thaliana]
  misc_feature (1)..(299): Homolog of NCBI NO: 15228425 NR Description: expressed protein [Arabidopsis thaliana]
  misc_feature (1)..(299): Homolog of NCBI NO: 18086341 NR Description: AT3g48690/T8P19_200 [Arabidopsis thaliana]
  misc_feature (1)..(299): Homolog of NCBI NO: 15228426 NR Description: expressed protein [Arabidopsis thaliana]
  misc_feature (1)..(301): Homolog of NCBI NO: 15221975 NR Description: expressed protein [Arabidopsis thaliana]
  misc_feature (1)..(299): Homolog of NCBI NO: 21537287 NR Description: putative esterase [Arabidopsis thaliana]
  misc_feature (1)..(299): Homolog of NCBI NO: 15222795 NR Description: expressed protein [Arabidopsis thaliana]
  misc_feature (1)..(299): Homolog of NCBI NO: 18402731 NR Description: expressed protein [Arabidopsis thaliana]
  misc_feature (1)..(299): Homolog of NCBI NO: 15222791 NR Description: hypothetical protein [Arabidopsis thaliana]
MFRVYKSGRIERLLGETTVPPSLTPQNGVVSKDIIHSPEKNLSLRIYLPEKVTVKKLPILIYFHGGGFIIETAFSPPYHTFLTSAVAAANCLAISVNYRRAPEFPVPIPYEDSWDSLKWVLTHITGTGPETWINKHGDFGKVFLAGDSAGGNISHHLTMRAKKEKLCDSLISGIILIHPYFWSKTPIDEFEVRDVGKTKGVEGSWRVASPNSKQGVDDPWLNVVGSDPSGLGCGRVLVMVAGDDLFVRQGWCYAEKLKKSGWEGEVEVMETKNEGHVFHLKNPNSDNARQVVKKLEEFINK

SEQ ID NO: 107320 - DNA, 1411 bp, Arabidopsis thaliana
  misc_feature (1)..(1411): Ceres Seq. ID no. 13646259
  misc_feature: MA Experiment ID: 20000171 Result: Up-regulated in Transcription
  misc_feature: MA Experiment 20000171 PARAMETER Experiment Name: At_42deg_Heat_P Parameter: Age (day) Value: 14
  misc_feature: MA Experiment 20000171 PARAMETER Experiment Name: At_42deg_Heat_P Parameter: Organism Value: A. thaliana
  misc_feature: MA Experiment 20000171 PARAMETER Experiment Name: At_42deg_Heat_P Parameter: Plant Line Value: WS
  misc_feature: MA Experiment 20000171 PARAMETER Experiment Name: At_42deg_Heat_P Parameter: Temperature (deg C) Value: 42 vs. 22
  misc_feature: MA Experiment 20000171 PARAMETER Experiment Name: At_42deg_Heat_P Parameter: Timepoint (hr) Value: 1
  misc_feature: MA Experiment 20000171 PARAMETER Experiment Name: At_42deg_Heat_P Parameter: Tissue Value: Aerial
  misc_feature: MA Experiment ID: 20000265 Result: Up-regulated in Transcription
  misc_feature: MA Experiment 20000265 PARAMETER Experiment Name: At_Open_Flower_P Parameter: Age (day) Value: 21
  misc_feature: MA Experiment 20000265 PARAMETER Experiment Name: At_Open_Flower_P Parameter: Plant Line Value: WS
  misc_feature: MA Experiment 20000265 PARAMETER Experiment Name: At_Open_Flower_P Parameter: Tissue Value: Closed Flower vs. Whole Plant
  misc_feature: MA Experiment ID: 20000286 Result: Up-regulated in Transcription
  misc_feature: MA Experiment 20000286 PARAMETER Experiment Name: At_Open_Flower_P Parameter: Age (day) Value: 21
  misc_feature: MA Experiment 20000286 PARAMETER Experiment Name: At_Open_Flower_P Parameter: Plant Line Value: WS
  misc_feature: MA Experiment 20000286 PARAMETER Experiment Name: At_Open_Flower_P Parameter: Tissue Value: Half Open vs. Whole Plant
  misc_feature: MA Experiment ID: 20000794 Result: Up-regulated in Transcription
  misc_feature: MA Experiment 20000794 PARAMETER Experiment Name: At_Petals_P Parameter: Age (day) Value: 23-25 days
  misc_feature: MA Experiment 20000794 PARAMETER Experiment Name: At_Petals_P Parameter: Plant Line Value: WS
  misc_feature: MA Experiment 20000794 PARAMETER Experiment Name: At_Petals_P Parameter: Tissue Value: Petals vs. Whole plant
  misc_feature: MA Experiment ID: 20001910 Result: Up-regulated in Transcription
  misc_feature: MA Experiment 20001910 PARAMETER Experiment Name: At_Drought_Reproduction_P Parameter: Age (day) Value: 37
  misc_feature: MA Experiment 20001910 PARAMETER Experiment Name: At_Drought_Reproduction_P Parameter: Organism Value: A. thaliana
  misc_feature: MA Experiment 20001910 PARAMETER Experiment Name: At_Drought_Reproduction_P Parameter: Plant Line Value: WS
  misc_feature: MA Experiment 20001910 PARAMETER Experiment Name: At_Drought_Reproduction_P Parameter: Timepoint (day) Value: 7
  misc_feature: MA Experiment 20001910 PARAMETER Experiment Name: At_Drought_Reproduction_P Parameter: Tissue Value: Flowers
  misc_feature: MA Experiment 20001910 PARAMETER Experiment Name: At_Drought_Reproduction_P Parameter: Treatment Value: Drought vs. No Drought
  misc_feature: MA Experiment ID: 20001911 Result: Up-regulated in Transcription
  misc_feature: MA Experiment 20001911 PARAMETER Experiment Name: At_Drought_Reproduction_P Parameter: Age (day) Value: 40
  misc_feature: MA Experiment 20001911 PARAMETER Experiment Name: At_Drought_Reproduction_P Parameter: Organism Value: A. thaliana
  misc_feature: MA Experiment 20001911 PARAMETER Experiment Name: At_Drought_Reproduction_P Parameter: Plant Line Value: WS
  misc_feature: MA Experiment 20001911 PARAMETER Experiment Name: At_Drought_Reproduction_P Parameter: Timepoint (day) Value: 10
  misc_feature: MA Experiment 20001911 PARAMETER Experiment Name: At_Drought_Reproduction_P Parameter: Tissue Value: Flowers
  misc_feature: MA Experiment 20001911 PARAMETER Experiment Name: At_Drought_Reproduction_P Parameter: Treatment Value: Drought vs. No Drought
aaagaaaaagtctattagagatcgatgaaggattaaagacgatcaataacggagatagagatcgattacaataatggatgaagagtatgatgtgattgtccttgggactggtcttaaggagtgtatccttagtggcctcctctctgtcgatggcctcaaggtactacatatggatagaaacgactactatggaggagaatcatcctctcttaacctcactcagctatggaagcgttttaggggaagtgacactcctgaagaaaatcttggagcaagcagagaatacaatgtcgatatgatcccaaagtttataatggctaatggactccttgttcaaaccctaatccacaccgatgttaccaagtatcttaactttaaggccgttgatggtagctttgtctacaagaaaggcaagatctacaaagtcccagccactgatgtggaagccctgaaatcgccattgatgggtcttttcgagaagcgacgtgcgagaaagttctttatctatgtgcaagactatgatgagaaggatcctaagtctcacgaaggacttgacctaagcaaagtcactgctagagagatcatctcaaagtatggacttgaagatgacacaatcgacttcatagggcatgccttagcgcttcacaacgatgatgactacttggatcaacccgccattgattttgttaagagaatcaagctctatgcggagtctctggctcgattccaaggaggatccccttacatctatccgttgtacggtctaggagagctgccacaggcttttgcacgtttgagtgctgtgtacggtgggacttacatgctcaacaagcccgaatgcaaggtagagtttgatggttctggaaaagctattggtgtcacttctgcaggagaaactgctaaatgcaagaaagttgtatgtgatccttcttacctgtctgaaaaggttaagaaagttggaaaagtaactcgagcggtgtgtataatgagccatcctattccagacacaaatgatgctcactcggttcaaatcattcttcctcagaagcaactcggtcgcaaatcagacatgtacttgttctgttgctcatacgctcacaatgtggcaccaaagggcaaatacatagcttttgtctctgcagaagctgaaactgacaatccagaagaggagcttaaacccggaatcgaattgcttggacctactgatgagatcttctatcattcttatgacacatacgttccaaccaatattcaagaagaagataactgtttcatctctgctacttacgatgcaacaacacatttcgagagtacagttgtagatgtacttgacatgtacaccaagatcactggaaagactcttgatttgtctgtggacttgagtgctgcaagtgctgctgcagagaattga

SEQ ID NO: 107321 - protein, 445 aa, Arabidopsis thaliana; identical to SEQ ID NO: 44495
  peptide (1)..(445): Ceres Seq. ID no. 13646260
  misc_feature (1)..(438): Pfam Name: GDP dissociation inhibitor Pfam Description: GDP dissociation inhibitor
  misc_feature (1)..(445): Homolog of NCBI NO: 15242440 NR Description: GDP dissociation inhibitor [Arabidopsis thaliana]
  misc_feature (1)..(444): Homolog of NCBI NO: 7489133 NR Description: GDP dissociation inhibitor - common tobacco
  misc_feature (8)..(444): Homolog of NCBI NO: 8439465 NR Description: GDP dissociation inhibitor [Lycopersicon
  misc_feature (1)..(444): Homolog of NCBI NO: 3175990 NR Description: GDP dissociation inhibitor [Cicer arietinum]
  misc_feature (1)..(442): Homolog of NCBI NO: 7489478 NR Description: GDP dissociation inhibitor protein - rice
  misc_feature (1)..(444): Homolog of NCBI NO: 7489479 NR Description: GDP dissociation inhibitor protein - rice
  misc_feature (1)..(444): Homolog of NCBI NO: 15232210 NR Description: Rab GDP dissociation inhibitor [Arabidopsis
  misc_feature (1)..(445): Homolog of NCBI NO: 33146460 NR Description: putative GDP dissociation inhibitor [Oryza sativa
  misc_feature (1)..(444): Homolog of NCBI NO: 15224814 NR Description: GDP dissociation inhibitor [Arabidopsis thaliana]
  misc_feature (1)..(444): Homolog of NCBI NO: 1550740 NR Description: GDP-associated inhibitor [Arabidopsis thaliana]

SEQ ID NO: 107322 - protein, 413 aa, Arabidopsis thaliana; identical to SEQ ID NO: 44496
  peptide (1)..(413): Ceres Seq. ID no. 13646261
  misc_feature (1)..(406): Pfam Name: GDP dissociation inhibitor Pfam Description: GDP dissociation inhibitor
  misc_feature (1)..(413): Homolog of NCBI NO: 15242440 NR Description: GDP dissociation inhibitor [Arabidopsis thaliana]
  misc_feature (1)..(412): Homolog of NCBI NO: 7489133 NR Description: GDP dissociation inhibitor - common tobacco
  misc_feature (1)..(412): Homolog of NCBI NO: 8439465 NR Description: GDP dissociation inhibitor [Lycopersicon
  misc_feature (1)..(412): Homolog of NCBI NO: 3175990 NR Description: GDP dissociation inhibitor [Cicer arietinum]
  misc_feature (1)..(410): Homolog of NCBI NO: 7489478 NR Description: GDP dissociation inhibitor protein - rice
  misc_feature (1)..(412): Homolog of NCBI NO: 7489479 NR Description: GDP dissociation inhibitor protein - rice
  misc_feature (1)..(412): Homolog of NCBI NO: 15232210 NR Description: Rab GDP dissociation inhibitor [Arabidopsis
  misc_feature (1)..(413): Homolog of NCBI NO: 33146460 NR Description: putative GDP dissociation inhibitor [Oryza sativa
  misc_feature (1)..(412): Homolog of NCBI NO: 15224814 NR Description: GDP dissociation inhibitor [Arabidopsis thaliana]
  misc_feature (1)..(412): Homolog of NCBI NO: 1550740 NR Description: GDP-associated inhibitor [Arabidopsis thaliana]

SEQ ID NO: 107323 - protein, 371 aa, Arabidopsis thaliana; identical to SEQ ID NO: 44497
  peptide (1)..(371): Ceres Seq. ID no. 13646262
  misc_feature (1)..(364): Pfam Name: GDP dissociation inhibitor Pfam Description: GDP dissociation inhibitor
  misc_feature (1)..(371): Homolog of NCBI NO: 15242440 NR Description: GDP dissociation inhibitor [Arabidopsis thaliana]
  misc_feature (1)..(370): Homolog of NCBI NO: 7489133 NR Description: GDP dissociation inhibitor - common tobacco
  misc_feature (1)..(370): Homolog of NCBI NO: 8439465 NR Description: GDP dissociation inhibitor [Lycopersicon
  misc_feature (1)..(370): Homolog of NCBI NO: 3175990 NR Description: GDP dissociation inhibitor [Cicer arietinum]
  misc_feature (1)..(368): Homolog of NCBI NO: 7489478 NR Description: GDP dissociation inhibitor protein - rice
  misc_feature (1)..(370): Homolog of NCBI NO: 7489479 NR Description: GDP dissociation inhibitor protein - rice
  misc_feature (1)..(370): Homolog of NCBI NO: 15232210 NR Description: Rab GDP dissociation inhibitor [Arabidopsis
  misc_feature (1)..(371): Homolog of NCBI NO: 33146460 NR Description: putative GDP dissociation inhibitor [Oryza sativa
  misc_feature (1)..(370): Homolog of NCBI NO: 15224814 NR Description: GDP dissociation inhibitor [Arabidopsis thaliana]
  misc_feature (1)..(370): Homolog of NCBI NO: 1550740 NR Description: GDP-associated inhibitor [Arabidopsis thaliana]

SEQ ID NO: 107324 - DNA, 3020 bp, Arabidopsis thaliana
  misc_feature (1)..(3020): Ceres Seq. ID no. 13646381
  misc_feature: MA Experiment ID: 20001247 Result: Up-regulated in Transcription
  misc_feature: MA Experiment 20001247 PARAMETER Experiment Name: At_Far-red-induction_P Parameter: Age (day) Value: 7
  misc_feature: MA Experiment 20001247 PARAMETER Experiment Name: At_Far-red-induction_P Parameter: Light Value: Far-red vs. White
  misc_feature: MA Experiment 20001247 PARAMETER Experiment Name: At_Far-red-induction_P Parameter: Organism Value: A. thaliana
  misc_feature: MA Experiment 20001247 PARAMETER Experiment Name: At_Far-red-induction_P Parameter: Plant Line Value: Columbia
  misc_feature: MA Experiment 20001247 PARAMETER Experiment Name: At_Far-red-induction_P Parameter: Timepoint (hr) Value: 1
  misc_feature: MA Experiment 20001247 PARAMETER Experiment Name: At_Far-red-induction_P Parameter: Tissue Value: Whole Plant
  misc_feature: MA Experiment ID: 20001248 Result: Up-regulated in Transcription
  misc_feature: MA Experiment 20001248 PARAMETER Experiment Name: At_Far-red-induction_P Parameter: Age (day) Value: 7
  misc_feature: MA Experiment 20001248 PARAMETER Experiment Name: At_Far-red-induction_P Parameter: Light Value: Far-red vs. White
  misc_feature: MA Experiment 20001248 PARAMETER Experiment Name: At_Far-red-induction_P Parameter: Organism Value: A. thaliana
  misc_feature: MA Experiment 20001248 PARAMETER Experiment Name: At_Far-red-induction_P Parameter: Plant Line Value: Columbia
  misc_feature: MA Experiment 20001248 PARAMETER Experiment Name: At_Far-red-induction_P Parameter: Timepoint (hr) Value: 4
  misc_feature: MA Experiment 20001248 PARAMETER Experiment Name: At_Far-red-induction_P Parameter: Tissue Value: Whole Plant
gctctctctctctctttcgctgctctcacacgcaaataatggctcatctcttcagggagctgtctctgggccactccaagagagagtctacgccgccgccgccgtcacattcggcgacttcacgttcttcttcaatgtcttccgatctacctccatcaccactcggacaactcgctgtccaactttccgattccgatctccgtctcactgcttacgagatcttcgtcgccgcatgtcgtagcgccaccggtaaacctctctcatcggctgtttcagtcgctgttttgaatcaggattctcccaatggctctcctgcttcgccggcgattcagcgttctctgacctcaaccgccgctagtaaaatgaagaaagctttggggttaaggtcgtcttcttcgctttcacctggatctaataagagttctggttctgcttcgggttctaatggtaagtcgaaacgtcctactactgtcggtgagcttatgcggatccaaatgcgagtatcggaggctgtcgattctcgtgttcgtagagcttttcttagaatcgctgcttcacaggttggaaggaagattgagtcagtagttcttcctttagagttgttacagcagctaaagtcttctgattttacggatcagcaagaatatgatgcttggctgaagagatcattgaaggttcttgaggcaggtcttttgttgcatcctcgtgtacctcttgataagacgaatagttctcaacgactgcgacagattattcatggtgctttagatcggcctttggagactggaaggaataatgagcaaatgcaaagtcttagatcagcggtcatgtctcttgcaactagatctgatgggtctttctctgattcttgtcactgggctgatggatctccgtttaatctcaggctttatgaattgcttttagaagcgtgttttgattctaatgatgcgacgtccatggttgaggaagttgacgacctaatggaacatataaagaagacgtgggtaattcttggaatcaatcaaatgctgcataacctctgttttacgtggcttttgtttagtcgttatgttgttactggacaagttgagatggacctgcttcatgcttgtgattctcaactggcagaagttgctaaagatgcaaagacaacaaaggatcctgaatactcccaggttttaagttctacactgagtgctatattaggatgggcagagaaaaggctccttgcataccatgacacttttgaccgaggaaatattcataccatggagggaattgtttctttgggtgtatcagctgccaggatattagttgaagatatatctaacgagtaccgtagaagaaggaaaggagaagttgatgtagctcgtaccaggattgagacgtacatcaggtcctcactacgaacttcttttgcgcaggcaagtatttgcattgtcagaatggagaaagcagattcaagccggagagcatctaggaaccagaaaaatcctcttcctgttctagccatccttgctaaggacattggtgagctagctattcaggaaaagcggatgttcagtccaatattgaagagatggcatccgtttgctgcaggggttgctgtggcgacccttcatgtttgttacggaaatgagattaaacagtttatagccggaatatctgaattgacacctgatgctgtccagatactaagagctgcagataagctagaaaaggatctggtgcaaatcgcagtagaggattctgttgacagtgatgatggtggcaaagcaattatccgtgaaatgcctcccttcgaagctgagaccgtaattgctaatttggtcaaagactggataaaggcaagaatagacagacttaaggaatgggttgacaggaatttgcagcaagaggtttggaaacccctggagaacctagaaggaggatatgcacagtctgctgccgaagtgttgcggattactgatgaaactttggaagctttttttcagcttcccatacctatgcatcctgctgtattacctgatttaattattggtttagacaaatatcttcagtattatgtctcaaaggcgaaatctggctgcggctctcggactacgtacatgcctacaatgcctgcactcaccagatgtacaacgggatcaaaattccaatggaagaagaaagaaaagacacctaccactcagaagagagaatctcaggtttcggttatgaacggtgagaattcttttggggtcacgcaaatatgtgtcagaataaacagcttgcacaaaatccgcagtgagcttgatgttgtggaaaaaagagtgatcacacatttgaggaactgtgagtcagctcacaccgatgacttttccaacggcttagaaaaaaagtttgagctcacaccagcggcttgcatagaaggcgttcaacagctttctgagtctctggcttataaggtcgtcttccacgacctaagccacacgttatgggacgggttatacatcggagacctctcttcctctagaatcgatcctttcctcaaggaactcgaacagaatttgacagtcatagcagagacagtacatgaaagagttcgaacacgcatcatcaccgatattatgagagcctctttagatggcttcttacttgtcctgcttgccggaggaccctctagggcgttcacaagacaagactctcagataatggaagaagatttcaaatcaatgaaagatatgttctgggctaacggagacggtctagccatggacctgatcgataaattctcaaccactgtcagaggcgtgcttcctctgttcagtacagatacagacagtttaatagagaggttcaagggaacgaccctcgaagcatatggttcttcagctaagtcgaggcttccgttgcctccaacatcaggccagtggaatggcatggagccaaacacactcttacgtgttttgtgttaccgtaacgacgaatctgccacgaggtttctcaagaagacatataatctacctaagaagctttag

SEQ ID NO: 107325 - protein, 1005 aa, Arabidopsis thaliana
  peptide (1)..(1005): Ceres Seq. ID no. 13646382
  misc_feature (51)..(1005): Homolog of NCBI NO: 25411952 NR Description: hypothetical protein At2g20010 [imported] - thaliana >gi|4580471|gb|AAD24395.1| unknown protein [Arabidopsis
  misc_feature (165)..(1005): Homolog of NCBI NO: 30680849 NR Description: expressed protein [Arabidopsis thaliana]
  misc_feature (27)..(1005): Homolog of NCBI NO: 40253418 NR Description: hypothetical protein [Oryza sativa (japonica
  misc_feature (108)..(1004): Homolog of NCBI NO: 15226107 NR Description: expressed protein [Arabidopsis thaliana]
  misc_feature (108)..(1004): Homolog of NCBI NO: 26451960 NR Description: unknown protein [Arabidopsis thaliana]
  misc_feature (109)..(1004): Homolog of NCBI NO: 30678889 NR Description: expressed protein [Arabidopsis thaliana]
  misc_feature (34)..(474): Homolog of NCBI NO: 37535276 NR Description: hypothetical protein [Oryza sativa (japonica group)] >gi|10716609|gb|AAG21907.1| hypothetical protein [Oryza >gi|31432619|gb|AAP54227.1| hypothetical protein [Oryza sativa
  misc_feature (648)..(1004): Homolog of NCBI NO: 37535276 NR Description: hypothetical protein [Oryza sativa (japonica group)] >gi|10716609|gb|AAG21907.1| hypothetical protein [Oryza >gi|31432619|gb|AAP54227.1| hypothetical protein [Oryza sativa
  misc_feature (119)..(1003): Homolog of NCBI NO: 22326641 NR Description: expressed protein [Arabidopsis thaliana] AT5g06970/MOJ9_14 [Arabidopsis thaliana]
  misc_feature (119)..(601): Homolog of NCBI NO: 9759553 NR Description: contains similarity to unknown
SLSLFRCSHTQIMAHLFRELSLGHSKRESTPPPPSHSATSRSSSMSSDLPPSPLGQLAVQLSDSDLRLTAYEIFVAACRSATGKPLSSAVSVAVLNQDSPNGSPASPAIQRSLTSTAASKMKKALGLRSSSSLSPGSNKSSGSASGSNGKSKRPTTVGELMRIQMRVSEAVDSRVRRAFLRIAASQVGRKIESVVLPLELLQQLKSSDFTDQQEYDAWLKRSLKVLEAGLLLHPRVPLDKTNSSQRLRQIIHGALDRPLETGRNNEQMQSLRSAVMSLATRSDGSFSDSCHWADGSPFNLRLYELLLEACFDSNDATSMVEEVDDLMEHIKKTWVILGINQMLHNLCFTWLLFSRYVVTGQVEMDLLHACDSQLAEVAKDAKTTKDPEYSQVLSSTLSAILGWAEKRLLAYHDTFDRGNIHTMEGIVSLGVSAARILVEDISNEYRRRRKGEVDVARTRIETYIRSSLRTSFAQASICIVRMEKADSSRRASRNQKNPLPVLAILAKDIGELAIQEKRMFSPILKRWHPFAAGVAVATLHVCYGNEIKQFIAGISELTPDAVQILRAADKLEKDLVQIAVEDSVDSDDGGKAIIREMPPFEAETVIANLVKDWIKARIDRLKEWVDRNLQQEVWKPLENLEGGYAQSAAEVLRITDETLEAFFQLPIPMHPAVLPDLIIGLDKYLQYYVSKAKSGCGSRTTYMPTMPALTRCTTGSKFQWKKKEKTPTTQKRESQVSVMNGENSFGVTQICVRINSLHKIRSELDVVEKRVITHLRNCESAHTDDFSNGLEKKFELTPAACIEGVQQLSESLAYKVVFHDLSHTLWDGLYIGDLSSSRIDPFLKELEQNLTVIAETVHERVRTRIITDIMRASLDGFLLVLLAGGPSRAFTRQDSQIMEEDFKSMKDMFWANGDGLAMDLIDKFSTTVRGVLPLFSTDTDSLIERFKGTTLEAYGSSAKSRLPLPPTSGQWNGMEPNTLLRVLCYRNDESATRFLKKTYNLPKKL

SEQ ID NO: 107326 - protein, 993 aa, Arabidopsis thaliana
  peptide (1)..(993): Ceres Seq. ID no. 13646383
  misc_feature (39)..(993): Homolog of NCBI NO: 25411952 NR Description: hypothetical protein At2g20010 [imported] - thaliana >gi|4580471|gb|AAD24395.1| unknown protein [Arabidopsis
  misc_feature (153)..(993): Homolog of NCBI NO: 30680849 NR Description: expressed protein [Arabidopsis thaliana]
  misc_feature (15)..(993): Homolog of NCBI NO: 40253418 NR Description: hypothetical protein [Oryza sativa (japonica
  misc_feature (96)..(992): Homolog of NCBI NO: 15226107 NR Description: expressed protein [Arabidopsis thaliana]
  misc_feature (96)..(992): Homolog of NCBI NO: 26451960 NR Description: unknown protein [Arabidopsis thaliana]
  misc_feature (97)..(992): Homolog of NCBI NO: 30678889 NR Description: expressed protein [Arabidopsis thaliana]
  misc_feature (22)..(462): Homolog of NCBI NO: 37535276 NR Description: hypothetical protein [Oryza sativa (japonica group)] >gi|10716609|gb|AAG21907.1| hypothetical protein [Oryza >gi|31432619|gb|AAP54227.1| hypothetical protein [Oryza sativa
  misc_feature (636)..(992): Homolog of NCBI NO: 37535276 NR Description: hypothetical protein [Oryza sativa (japonica group)] >gi|10716609|gb|AAG21907.1| hypothetical protein [Oryza >gi|31432619|gb|AAP54227.1| hypothetical protein [Oryza sativa
  misc_feature (107)..(991): Homolog of NCBI NO: 22326641 NR Description: expressed protein [Arabidopsis thaliana] AT5g06970/MOJ9_14 [Arabidopsis thaliana]
  misc_feature (107)..(589): Homolog of NCBI NO: 9759553 NR Description: contains similarity to unknown
MAHLFRELSLGHSKRESTPPPPSHSATSRSSSMSSDLPPSPLGQLAVQLSDSDLRLTAYEIFVAACRSATGKPLSSAVSVAVLNQDSPNGSPASPAIQRSLTSTAASKMKKALGLRSSSSLSPGSNKSSGSASGSNGKSKRPTTVGELMRIQMRVSEAVDSRVRRAFLRIAASQVGRKIESVVLPLELLQQLKSSDFTDQQEYDAWLKRSLKVLEAGLLLHPRVPLDKTNSSQRLRQIIHGALDRPLETGRNNEQMQSLRSAVMSLATRSDGSFSDSCHWADGSPFNLRLYELLLEACFDSNDATSMVEEVDDLMEHIKKTWVILGINQMLHNLCFTWLLFSRYVVTGQVEMDLLHACDSQLAEVAKDAKTTKDPEYSQVLSSTLSAILGWAEKRLLAYHDTFDRGNIHTMEGIVSLGVSAARILVEDISNEYRRRRKGEVDVARTRIETYIRSSLRTSFAQASICIVRMEKADSSRRASRNQKNPLPVLAILAKDIGELAIQEKRMFSPILKRWHPFAAGVAVATLHVCYGNEIKQFIAGISELTPDAVQILRAADKLEKDLVQIAVEDSVDSDDGGKAIIREMPPFEAETVIANLVKDWIKARIDRLKEWVDRNLQQEVWKPLENLEGGYAQSAAEVLRITDETLEAFFQLPIPMHPAVLPDLIIGLDKYLQYYVSKAKSGCGSRTTYMPTMPALTRCTTGSKFQWKKKEKTPTTQKRESQVSVMNGENSFGVTQICVRINSLHKIRSELDVVEKRVITHLRNCESAHTDDFSNGLEKKFELTPAACIEGVQQLSESLAYKVVFHDLSHTLWDGLYIGDLSSSRIDPFLKELEQNLTVIAETVHERVRTRIITDIMRASLDGFLLVLLAGGPSRAFTRQDSQIMEEDFKSMKDMFWANGDGLAMDLIDKFSTTVRGVLPLFSTDTDSLIERFKGTTLEAYGSSAKSRLPLPPTSGQWNGMEPNTLLRVLCYRNDESATRFLKKTYNLPKKL

SEQ ID NO: 107327 - protein, 961 aa, Arabidopsis thaliana
  peptide (1)..(961): Ceres Seq. ID no. 13646384
  misc_feature (7)..(961): Homolog of NCBI NO: 25411952 NR Description: hypothetical protein At2g20010 [imported] - thaliana >gi|4580471|gb|AAD24395.1| unknown protein [Arabidopsis
  misc_feature (121)..(961): Homolog of NCBI NO: 30680849 NR Description: expressed protein [Arabidopsis thaliana]
  misc_feature (1)..(961): Homolog of NCBI NO: 40253418 NR Description: hypothetical protein [Oryza sativa (japonica
  misc_feature (64)..(960): Homolog of NCBI NO: 15226107 NR Description: expressed protein [Arabidopsis thaliana]
  misc_feature (64)..(960): Homolog of NCBI NO: 26451960 NR Description: unknown protein [Arabidopsis thaliana]
  misc_feature (65)..(960): Homolog of NCBI NO: 30678889 NR Description: expressed protein [Arabidopsis thaliana]
  misc_feature (1)..(430): Homolog of NCBI NO: 37535276 NR Description: hypothetical protein [Oryza sativa (japonica group)] >gi|10716609|gb|AAG21907.1| hypothetical protein [Oryza >gi|31432619|gb|AAP54227.1| hypothetical protein [Oryza sativa
  misc_feature (604)..(960): Homolog of NCBI NO: 37535276 NR Description: hypothetical protein [Oryza sativa (japonica group)] >gi|10716609|gb|AAG21907.1| hypothetical protein [Oryza >gi|31432619|gb|AAP54227.1| hypothetical protein [Oryza sativa
  misc_feature (75)..(959): Homolog of NCBI NO: 22326641 NR Description: expressed protein [Arabidopsis thaliana] AT5g06970/MOJ9_14 [Arabidopsis thaliana]
  misc_feature (75)..(557): Homolog of NCBI NO: 9759553 NR Description: contains similarity to unknown
MSSDLPPSPLGQLAVQLSDSDLRLTAYEIFVAACRSATGKPLSSAVSVAVLNQDSPNGSPASPAIQRSLTSTAASKMKKALGLRSSSSLSPGSNKSSGSASGSNGKSKRPTTVGELMRIQMRVSEAVDSRVRRAFLRIAASQVGRKIESVVLPLELLQQLKSSDFTDQQEYDAWLKRSLKVLEAGLLLHPRVPLDKTNSSQRLRQIIHGALDRPLETGRNNEQMQSLRSAVMSLATRSDGSFSDSCHWADGSPFNLRLYELLLEACFDSNDATSMVEEVDDLMEHIKKTWVILGINQMLHNLCFTWLLFSRYVVTGQVEMDLLHACDSQLAEVAKDAKTTKDPEYSQVLSSTLSAILGWAEKRLLAYHDTFDRGNIHTMEGIVSLGVSAARILVEDISNEYRRRRKGEVDVARTRIETYIRSSLRTSFAQASICIVRMEKADSSRRASRNQKNPLPVLAILAKDIGELAIQEKRMFSPILKRWHPFAAGVAVATLHVCYGNEIKQFIAGISELTPDAVQILRAADKLEKDLVQIAVEDSVDSDDGGKAIIREMPPFEAETVIANLVKDWIKARIDRLKEWVDRNLQQEVWKPLENLEGGYAQSAAEVLRITDETLEAFFQLPIPMHPAVLPDLIIGLDKYLQYYVSKAKSGCGSRTTYMPTMPALTRCTTGSKFQWKKKEKTPTTQKRESQVSVMNGENSFGVTQICVRINSLHKIRSELDVVEKRVITHLRNCESAHTDDFSNGLEKKFELTPAACIEGVQQLSESLAYKVVFHDLSHTLWDGLYIGDLSSSRIDPFLKELEQNLTVIAETVHERVRTRIITDIMRASLDGFLLVLLAGGPSRAFTRQDSQIMEEDFKSMKDMFWANGDGLAMDLIDKFSTTVRGVLPLFSTDTDSLIERFKGTTLEAYGSSAKSRLPLPPTSGQWNGMEPNTLLRVLCYRNDESATRFLKKTYNLPKKL

SEQ ID NO: 107328 - DNA, 2568 bp, Arabidopsis thaliana
  misc_feature (1)..(2568): Ceres Seq. ID no. 13646430
  misc_feature: MA Experiment ID: 20000184 Result: Down-regulated in Transcription
  misc_feature: MA Experiment 20000184 PARAMETER Experiment Name: At_Shoots__P Parameter: Age (day) Value: 7
  misc_feature: MA Experiment 20000184 PARAMETER Experiment Name: At_Shoots__P Parameter: Tissue Value: Shoots vs. Whole Plant
aaataaaatcagttacagaggaggagcacatcatcgtgttcttcttcgactcggcgattccaaaaaaggacgcttgcttcatcgccggcgtcgctgtatcactctccggccgagtctttcactttttgtttcgaaggaatgcaaaactatggtgattgattaaatcgtgtgacaatcgaaaagttgaggaattgcaaggattcgagatagagtctaaaatggagcaccaagaccttacagattcgagaaaggatcctctttgcatttctcaattgaaaatttcttcttcttctctcgacccattgcctcaggccaacatggcagaggatttaacaaagagtcgtagacattcacctataaaagtggaagggagtgaagaaacttggggagtagaagatgatgatgaccttactgaccctatttttgataccattgagggcaatggacattcagatccaacaagctgcttcgatgctgatttaagtgagtacaaaaagaaggccacagtaatcgttgaggaatactttggcaccaatgatgttgtctctgttgttaatgaactaaaggagcttggaatggctgagtaccgttattattttgtcaagaagttagtctccatggctatggatagacatgacaaagagaaagaaatggctgcttttctcctctctaccctttatgccgacgtcattgatcccccagaagtttacagaggtttcaacaaactggtcgcttctgctgatgatttatctgttgatattcccgatgcagttgatgttcttgctgtctttgtggctcgggcaattgttgacgacattcttcctcctgcgtttctcaagaagcaaatgaaattgctgccagataactccaaaggtgttgaggttttgagaaaggctgagaagagctatctagcgactccgcttcatgctgaagttgttgagaagagatggggagggactgataattggactgctgaggatgtgaaagctagaattaacgacttgttgaaagagtatgtcatgagtggagacaaaaaagaagcttttagatgcatcaaaggattgaaagttcctttctttcatcatgagattgtcaaacgagcactgatcatggcaatggaaaggcgaaaagctcaagtcaggctgctagatctgttgaaagaaacgattgaggttggtctcataaactccactcaggtgacaaaagggtttagcagaatcattgattcaatcgaagatttgtctcttgacataccagacgcacgccgtattttacagtctttcatctctaaagcggcttctgaaggatggttatgtgcttcttctctgaaatcactctctgctgatgcaggagaaaagttacttgaaaactccagcgccaatgtttttaaagacaaggcgaagtcgatcatccgagagtatttcctttcaggtgacacttcagaggtcgtacattgtctagacaccgaattgaatgcatcttcgagtcagctacgcgcaatctttgtcaaatatctgataactctagcaatggacaggaagaaaagagagaaggagatggcttgtgtgctcgtctctactcttggtttccctcccaaagatgtcagaagcgcattctcgatgctcatagaatctgcagacgacactgctttggacaacccagtggttgttgaagaccttgccatgttcttagcaagagctgtggttgacgaggtgttagctccacgggatttggaagaagtgttaaatcagactcccgaggcaggctcaagtgtgggcgagaaagtgattcaaatggcgaaaacattgctgaaagcacgtctttccggtgaaaggatcttacgttgctggggaggaggaggaattgagacaaactcgccgggatccacagtgaaggaagtgaaagagaagatccagattcttctagaagagtatgtctctggtggagacctcagagaagctagtaggtgcgtaaaggaactaggaatgccgttttttcaccacgaagtagtgaagaagtcagtagtgaggatcatagaagagaaggagaacgaggaacggttatggaagctactaaaagtgtgttttgattcaggactagtgacgatatatcagatgactaaagggtttaaaagagttgatgaatcacttgaagatctgtctttggatgtccctgatgctgccaaaaagttttcaagttgcgttgaaagaggcaagcttgaagggttcttggacgaatcattcgcttctgaggattcgcaaagtaagaaacagaacggctcgtcttcttcctctggatgataacatttgagcaccatacctcaaacctcgagacgttggtttcacgcaaaatcaccttttggagttttttttttttttttcttataaacaaactaaaaaagttttggatactttttgatgacgtttcttacagaaaacaaatttatctttatcttagtgacgttttgttatagcacattattactttatgacctgttttttttgttcctttgtcaatgattacattgtcttgctaatattttcatacagaaattttattttatattct

SEQ ID NO: 107329 - protein, 693 aa, Arabidopsis thaliana
  peptide (1)..(693): Ceres Seq. ID no. 15218749
  misc_feature (561)..(672): Pfam Name: MA3 domain Pfam Description: MA3 domain
  misc_feature (6)..(681): Homolog of NCBI NO: 18424679 NR Description: MA3 domain-containing protein [Arabidopsis
  misc_feature (6)..(681): Homolog of NCBI NO: 21554025 NR Description: topoisomerase-like protein [Arabidopsis thaliana]
  misc_feature (51)..(681): Homolog of NCBI NO: 10177300 NR Description: topoisomerase-like protein [Arabidopsis thaliana]
  misc_feature (51)..(675): Homolog of NCBI NO: 18416429 NR Description: MA3 domain-containing protein [Arabidopsis >gi|17063163|gb|AAL32978.1| AT4g24800/F6I7_10 [Arabidopsis >gi|21700927|gb|AAM70587.1| AT4g24800/F6I7_10 [Arabidopsis
  misc_feature (52)..(680): Homolog of NCBI NO: 15228376 NR Description: MA3 domain-containing protein [Arabidopsis
  misc_feature (51)..(666): Homolog of NCBI NO: 7486528 NR Description: hypothetical protein F6I7.10 - Arabidopsis >gi|4678259|emb|CAB41120.1| putative protein [Arabidopsis >gi|7269331|emb|CAB79390.1| putative protein [Arabidopsis
  misc_feature (85)..(377): Homolog of NCBI NO: 18416429 NR Description: MA3 domain-containing protein [Arabidopsis >gi|17063163|gb|AAL32978.1| AT4g24800/F6I7_10 [Arabidopsis >gi|21700927|gb|AAM70587.1| AT4g24800/F6I7_10 [Arabidopsis
  misc_feature (376)..(686): Homolog of NCBI NO: 18416429 NR Description: MA3 domain-containing protein [Arabidopsis >gi|17063163|gb|AAL32978.1| AT4g24800/F6I7_10 [Arabidopsis >gi|21700927|gb|AAM70587.1| AT4g24800/F6I7_10 [Arabidopsis
  misc_feature (388)..(687): Homolog of NCBI NO: 18424679 NR Description: MA3 domain-containing protein [Arabidopsis
  misc_feature (388)..(687): Homolog of NCBI NO: 21554025 NR Description: topoisomerase-like protein [Arabidopsis thaliana]
MEHQDLTDSRKDPLCISQLKISSSSLDPLPQANMAEDLTKSRRHSPIKVEGSEETWGVEDDDDLTDPIFDTIEGNGHSDPTSCFDADLSEYKKKATVIVEEYFGTNDVVSVVNELKELGMAEYRYYFVKKLVSMAMDRHDKEKEMAAFLLSTLYADVIDPPEVYRGFNKLVASADDLSVDIPDAVDVLAVFVARAIVDDILPPAFLKKQMKLLPDNSKGVEVLRKAEKSYLATPLHAEVVEKRWGGTDNWTAEDVKARINDLLKEYVMSGDKKEAFRCIKGLKVPFFHHEIVKRALIMAMERRKAQVRLLDLLKETIEVGLINSTQVTKGFSRIIDSIEDLSLDIPDARRILQSFISKAASEGWLCASSLKSLSADAGEKLLENSSANVFKDKAKSIIREYFLSGDTSEVVHCLDTELNASSSQLRAIFVKYLITLAMDRKKREKEMACVLVSTLGFPPKDVRSAFSMLIESADDTALDNPVVVEDLAMFLARAVVDEVLAPRDLEEVLNQTPEAGSSVGEKVIQMAKTLLKARLSGERILRCWGGGGIETNSPGSTVKEVKEKIQILLEEYVSGGDLREASRCVKELGMPFFHHEVVKKSVVRIIEEKENEERLWKLLKVCFDSGLVTIYQMTKGFKRVDESLEDLSLDVPDAAKKFSSCVERGKLEGFLDESFASEDSQSKKQNGSSSSSG

SEQ ID NO: 107330 - protein, 660 aa, Arabidopsis thaliana
  peptide (1)..(660): Ceres Seq. ID no. 15218750
  misc_feature (528)..(639): Pfam Name: MA3 domain Pfam Description: MA3 domain
  misc_feature (1)..(648): Homolog of NCBI NO: 18424679 NR Description: MA3 domain-containing protein [Arabidopsis
  misc_feature (1)..(648): Homolog of NCBI NO: 21554025 NR Description: topoisomerase-like protein [Arabidopsis thaliana]
  misc_feature (18)..(648): Homolog of NCBI NO: 10177300 NR Description: topoisomerase-like protein [Arabidopsis thaliana]
  misc_feature (18)..(642): Homolog of NCBI NO: 18416429 NR Description: MA3 domain-containing protein [Arabidopsis >gi|17063163|gb|AAL32978.1| AT4g24800/F6I7_10 [Arabidopsis >gi|21700927|gb|AAM70587.1| AT4g24800/F6I7_10 [Arabidopsis
  misc_feature (19)..(647): Homolog of NCBI NO: 15228376 NR Description: MA3 domain-containing protein [Arabidopsis
  misc_feature (18)..(633): Homolog of NCBI NO: 7486528 NR Description: hypothetical protein F6I7.10 - Arabidopsis >gi|4678259|emb|CAB41120.1| putative protein [Arabidopsis >gi|7269331|emb|CAB79390.1| putative protein [Arabidopsis
  misc_feature (52)..(344): Homolog of NCBI NO: 18416429 NR Description: MA3 domain-containing protein [Arabidopsis >gi|17063163|gb|AAL32978.1| AT4g24800/F6I7_10 [Arabidopsis >gi|21700927|gb|AAM70587.1| AT4g24800/F6I7_10 [Arabidopsis
  misc_feature (343)..(653): Homolog of NCBI NO: 18416429 NR Description: MA3 domain-containing protein [Arabidopsis >gi|17063163|gb|AAL32978.1| AT4g24800/F6I7_10 [Arabidopsis >gi|21700927|gb|AAM70587.1| AT4g24800/F6I7_10 [Arabidopsis
  misc_feature (355)..(654): Homolog of NCBI NO: 18424679 NR Description: MA3 domain-containing protein [Arabidopsis
  misc_feature (355)..(654): Homolog of NCBI NO: 21554025 NR Description: topoisomerase-like protein [Arabidopsis thaliana]
MAEDLTKSRRHSPIKVEGSEETWGVEDDDDLTDPIFDTIEGNGHSDPTSCFDADLSEYKKKATVIVEEYFGTNDVVSVVNELKELGMAEYRYYFVKKLVSMAMDRHDKEKEMAAFLLSTLYADVIDPPEVYRGFNKLVASADDLSVDIPDAVDVLAVFVARAIVDDILPPAFLKKQMKLLPDNSKGVEVLRKAEKSYLATPLHAEVVEKRWGGTDNWTAEDVKARINDLLKEYVMSGDKKEAFRCIKGLKVPFFHHEIVKRALIMAMERRKAQVRLLDLLKETIEVGLINSTQVTKGFSRIIDSIEDLSLDIPDARRILQSFISKAASEGWLCASSLKSLSADAGEKLLENSSANVFKDKAKSIIREYFLSGDTSEVVHCLDTELNASSSQLRAIFVKYLITLAMDRKKREKEMACVLVSTLGFPPKDVRSAFSMLIESADDTALDNPVVVEDLAMFLARAVVDEVLAPRDLEEVLNQTPEAGSSVGEKVIQMAKTLLKARLSGERILRCWGGGGIETNSPGSTVKEVKEKIQILLEEYVSGGDLREASRCVKELGMPFFHHEVVKKSVVRIIEEKENEERLWKLLKVCFDSGLVTIYQMTKGFKRVDESLEDLSLDVPDAAKKFSSCVERGKLEGFLDESFASEDSQSKKQNGSSSSSG

SEQ ID NO: 107331 - protein, 574 aa, Arabidopsis thaliana
  peptide (1)..(574): Ceres Seq. ID no. 15218751
  misc_feature (442)..(553): Pfam Name: MA3 domain Pfam Description: MA3 domain
  misc_feature (1)..(562): Homolog of NCBI NO: 18424679 NR Description: MA3 domain-containing protein [Arabidopsis
  misc_feature (1)..(562): Homolog of NCBI NO: 21554025 NR Description: topoisomerase-like protein [Arabidopsis thaliana]
  misc_feature (1)..(562): Homolog of NCBI NO: 10177300 NR Description: topoisomerase-like protein [Arabidopsis thaliana]
  misc_feature (1)..(556): Homolog of NCBI NO: 18416429 NR Description: MA3 domain-containing protein [Arabidopsis >gi|17063163|gb|AAL32978.1| AT4g24800/F6I7_10 [Arabidopsis >gi|21700927|gb|AAM70587.1| AT4g24800/F6I7_10 [Arabidopsis
  misc_feature (1)..(561): Homolog of NCBI NO: 15228376 NR Description: MA3 domain-containing protein [Arabidopsis
  misc_feature (1)..(547): Homolog of NCBI NO: 7486528 NR Description: hypothetical protein F6I7.10 - Arabidopsis >gi|4678259|emb|CAB41120.1| putative protein [Arabidopsis >gi|7269331|emb|CAB79390.1| putative protein [Arabidopsis
  misc_feature (1)..(258): Homolog of NCBI NO: 18416429 NR Description: MA3 domain-containing protein [Arabidopsis >gi|17063163|gb|AAL32978.1| AT4g24800/F6I7_10 [Arabidopsis >gi|21700927|gb|AAM70587.1| AT4g24800/F6I7_10 [Arabidopsis
  misc_feature (257)..(567): Homolog of NCBI NO: 18416429 NR Description: MA3 domain-containing protein [Arabidopsis >gi|17063163|gb|AAL32978.1| AT4g24800/F6I7_10 [Arabidopsis >gi|21700927|gb|AAM70587.1| AT4g24800/F6I7_10 [Arabidopsis
  misc_feature (269)..(568): Homolog of NCBI NO: 18424679 NR Description: MA3 domain-containing protein [Arabidopsis
  misc_feature (269)..(568): Homolog of NCBI NO: 21554025 NR Description: topoisomerase-like protein [Arabidopsis thaliana]
MAEYRYYFVKKLVSMAMDRHDKEKEMAAFLLSTLYADVIDPPEVYRGFNKLVASADDLSVDIPDAVDVLAVFVARAIVDDILPPAFLKKQMKLLPDNSKGVEVLRKAEKSYLATPLHAEVVEKRWGGTDNWTAEDVKARINDLLKEYVMSGDKKEAFRCIKGLKVPFFHHEIVKRALIMAMERRKAQVRLLDLLKETIEVGLINSTQVTKGFSRIIDSIEDLSLDIPDARRILQSFISKAASEGWLCASSLKSLSADAGEKLLENSSANVFKDKAKSIIREYFLSGDTSEVVHCLDTELNASSSQLRAIFVKYLITLAMDRKKREKEMACVLVSTLGFPPKDVRSAFSMLIESADDTALDNPVVVEDLAMFLARAVVDEVLAPRDLEEVLNQTPEAGSSVGEKVIQMAKTLLKARLSGERILRCWGGGGIETNSPGSTVKEVKEKIQILLEEYVSGGDLREASRCVKELGMPFFHHEVVKKSVVRIIEEKENEERLWKLLKVCFDSGLVTIYQMTKGFKRVDESLEDLSLDVPDAAKKFSSCVERGKLEGFLDESFASEDSQSKKQNGSSSSSG

SEQ ID NO: 107332 - DNA, 2390 bp, Arabidopsis thaliana
  misc_feature (1)..(2390): Ceres Seq. ID no. 13646599
  misc_feature: MA Experiment ID: 20000234 Result: Up-regulated in Transcription
  misc_feature: MA Experiment 20000234 PARAMETER Experiment Name: At_Siliques_P Parameter: Age (day) Value: 21
  misc_feature: MA Experiment 20000234 PARAMETER Experiment Name: At_Siliques_P Parameter: Organism Value: A. thaliana
  misc_feature: MA Experiment 20000234 PARAMETER Experiment Name: At_Siliques_P Parameter: Plant Line Value: WS
  misc_feature: MA Experiment 20000234 PARAMETER Experiment Name: At_Siliques_P Parameter: Tissue Value: Less Than 5mm Siliques vs. Whole Plant
  misc_feature: MA Experiment ID: 20000235 Result: Up-regulated in Transcription
  misc_feature: MA Experiment 20000235 PARAMETER Experiment Name: At_Siliques_P Parameter: Age (day) Value: 21
  misc_feature: MA Experiment 20000235 PARAMETER Experiment Name: At_Siliques_P Parameter: Organism Value: A. thaliana
  misc_feature: MA Experiment 20000235 PARAMETER Experiment Name: At_Siliques_P Parameter: Plant Line Value: WS
  misc_feature: MA Experiment 20000235 PARAMETER Experiment Name: At_Siliques_P Parameter: Tissue Value: 5-10mm Siliques vs. Whole Plant
  misc_feature: MA Experiment ID: 20000264 Result: Up-regulated in Transcription
  misc_feature: MA Experiment 20000264 PARAMETER Experiment Name: At_Open_Flower_P Parameter: Age (day) Value: 21
  misc_feature: MA Experiment 20000264 PARAMETER Experiment Name: At_Open_Flower_P Parameter: Plant Line Value: WS
  misc_feature: MA Experiment 20000264 PARAMETER Experiment Name: At_Open_Flower_P Parameter: Tissue Value: Open Flower vs. Whole Plant
  misc_feature: MA Experiment ID: 20000439 Result: Up-regulated in Transcription
  misc_feature: MA Experiment 20000439 PARAMETER Experiment Name: At_Roots__P Parameter: Age (day) Value: 14 vs. 21
  misc_feature: MA Experiment 20000439 PARAMETER Experiment Name: At_Roots__P Parameter: Organism Value: A. thaliana
  misc_feature: MA Experiment 20000439 PARAMETER Experiment Name: At_Roots__P Parameter: Tissue Value: Roots vs. Whole Plant
  misc_feature: MA Experiment ID: 20000794 Result: Up-regulated in Transcription
  misc_feature: MA Experiment 20000794 PARAMETER Experiment Name: At_Petals_P Parameter: Age (day) Value: 23-25 days
  misc_feature: MA Experiment 20000794 PARAMETER Experiment Name: At_Petals_P Parameter: Plant Line Value: WS
  misc_feature: MA Experiment 20000794 PARAMETER Experiment Name: At_Petals_P Parameter: Tissue Value: Petals vs. Whole plant
atgtggctaccaaaagcaaatggggcaaagaaagaaacaggaagtggttcagtagcagttgcaatagacaaagacaaaggaagccaacatgctcttaaatggacaatcgacaatcttgcttctcgtggccaaaccatttctcttattcatgtcctctgcagatctcattcttcttcagatcttgaagaaggaacgccacaacagaaacagcaaatggagaagatagctaaagatctctttgtatccttccactgctattgttcccgtaaagagataaattgtcgagacattttgctggaagacgcagacaaagttcgagccattaccgaatatgtttcatcttctgcaattgagaacttagtcgttggatctgcatcacgtaatggcttcatgagaagattcaagacggatttgccaacaacagtgtcaaaatcagctccagatttctgcaatgtttatgtcatttcaaaaggcaaaattgcttcagtacgaaatgcatcacgtcctgctccttaccaaaattcgatgcagcaatgtgaaattgacaatcatcacccacatactcctgacaaagcaccaaagtaccatgaccatcccaattctgcaggtagtacaccatctagaccgcgcaaatcagttgaagcagataggtataggaattggaagcttgttgtgatgtctttaagtccgtcttctcatcgtgactctgacatttccttcatcagctcaggaagaccaagcgttgagcggtcttcctttagccttgattttcctgaatctgcaaggacttcaagaatgtcaacgagctcagagcaaagcattggctcaaatcgtttgggaattaagttcagtgatcctgatttccttaacgaatcctctacattctctgaagagagtggtagaacatcctcctattcatctcagagcttggatgatgttgaagctgaaatgaagaggctgcgtctagagctgaaacaaaccatggatatgtatagcacagcttgtaaagaagctttaagcgctagacaacaggcaacggagctgcaaaagctgagaaccgaagaggagagacggttggaagaagcaaaaagttcagaggaagcagcaatgtcaatagtggaaaaggagagagctaaagccaaagcagcgttggaagctgctgaagctgcaaagagattagcagaagtggaatctaaaagaaggttgactgcagagatgaagacaatgaaggaatcagattcattctctcgcggatttgttcggtataggaaatacacggttgacgaaatcgaagaagctacttcaaattttgcagagtctcaaaaggtaggagaaggaggctatggtcctgtctttagaggctttcttgatcacacaagtgttgctgttaaagttctacgcccagacgcagctcaagggagatcacagtttcagaaagaggttgaagtgttaagctgcataaggcatccaaacatggtgcttcttcttggagcttgtccagaatttgggattcttgtttatgaatacatggccaaaggaagtttagaagaccggcttttcatgcgaggaaacacaccgccgattacctggcagctacgtttcagaatcgctgctgagatcgccacgggactcctcttcctccaccagaccaaacctgaaccaattgtccacagagaccttaaaccaggaaatgttctgctcgattacaactatgtgagcaagatcagtgatgtcgggctagcgagattagtccctgcagtagcggaaaacgttacacagtacagagtcacttcagctgcaggaactttctgttacattgatcctgagtaccaacaaacaggaatgttgggtgtgaagtcagatgtttattctcttggaatcatgcttttgcagatcttaaccgcaaaacagccaatgggtttggcttattacgttgaacaagcgatcgaagaagggactcttaaggatatgcttgatccagcagtaccggactggcctatagaagaagctctatctttagcaaagctttcgcttcaatgcgcggaactaagaagaaaagatagacctgacctcgggaaagagatattgcctgagctcaatcggttaagagagataggtgaagagagtttagagagtgtgttttatgcaggaaatcaaggaaagtctccaaacactagccaagtctcgattccggaatctccagctgcagactctcaatcctagttttgatatgagggaagcaaatgtgctctaacactcaatttgcaggagttataaacaaaagcagagcaagtttctttgctgattagtgtatagcattagaggaatttggtattctgttaaataatcagttatgtaaccgcctttttgttaggcccataacggttttg

SEQ ID NO: 107333 - protein, 740 aa, Arabidopsis thaliana
  peptide (1)..(740): Ceres Seq. ID no. 13646600
  misc_feature (14)..(144): Pfam Name: Universal stress protein family Pfam Description: Universal stress protein family
  misc_feature (1)..(729): Homolog of NCBI NO: 15219360 NR Description: protein kinase family [Arabidopsis thaliana]
  misc_feature (228)..(740): Homolog of NCBI NO: 7487915 NR Description: hypothetical protein YUP8H12R.45 - Arabidopsis >gi|3152590|gb|AAC17071.1| Similar to protein serine/threonine
  misc_feature (228)..(729): Homolog of NCBI NO: 25518361 NR Description: hypothetical protein F17F16.3 [imported] - thaliana >gi|9954729|gb|AAG09082.1|AC026237_3 Similar to protein
  misc_feature (2)..(726): Homolog of NCBI NO: 18092335 NR Description: serine threonine kinase [Zea mays]
  misc_feature (18)..(711): Homolog of NCBI NO: 14719286 NR Description: serine threonine kinase 1 [Zea mays]
  misc_feature (78)..(711): Homolog of NCBI NO: 15238484 NR Description: protein kinase family [Arabidopsis thaliana]
  misc_feature (17)..(709): Homolog of NCBI NO: 15239834 NR Description: protein kinase family [Arabidopsis thaliana]
  misc_feature (92)..(711): Homolog of NCBI NO: 10178101 NR Description: receptor-like protein kinase [Arabidopsis
  misc_feature (229)..(731): Homolog of NCBI NO: 9293976 NR Description: Ser/Thr protein kinaseroteinase) [Arabidopsis
  misc_feature (6)..(740): Homolog of NCBI NO: 8778472 NR Description: F1L3.25 [Arabidopsis thaliana]
MWLPKANGAKKETGSGSVAVAIDKDKGSQHALKWTIDNLASRGQTISLIHVLCRSHSSSDLEEGTPQQKQQMEKIAKDLFVSFHCYCSRKEINCRDILLEDADKVRAITEYVSSSAIENLVVGSASRNGFMRRFKTDLPTTVSKSAPDFCNVYVISKGKIASVRNASRPAPYQNSMQQCEIDNHHPHTPDKAPKYHDHPNSAGSTPSRPRKSVEADRYRNWKLVVMSLSPSSHRDSDISFISSGRPSVERSSFSLDFPESARTSRMSTSSEQSIGSNRLGIKFSDPDFLNESSTFSEESGRTSSYSSQSLDDVEAEMKRLRLELKQTMDMYSTACKEALSARQQATELQKLRTEEERRLEEAKSSEEAAMSIVEKERAKAKAALEAAEAAKRLAEVESKRRLTAEMKTMKESDSFSRGFVRYRKYTVDEIEEATSNFAESQKVGEGGYGPVFRGFLDHTSVAVKVLRPDAAQGRSQFQKEVEVLSCIRHPNMVLLLGACPEFGILVYEYMAKGSLEDRLFMRGNTPPITWQLRFRIAAEIATGLLFLHQTKPEPIVHRDLKPGNVLLDYNYVSKISDVGLARLVPAVAENVTQYRVTSAAGTFCYIDPEYQQTGMLGVKSDVYSLGIMLLQILTAKQPMGLAYYVEQAIEEGTLKDMLDPAVPDWPIEEALSLAKLSLQCAELRRKDRPDLGKEILPELNRLREIGEESLESVFYAGNQGKSPNTSQVSIPESPAADSQS

SEQ ID NO: 107334 - protein, 669 aa, Arabidopsis thaliana
  peptide (1)..(669): Ceres Seq. ID no. 13646601
  misc_feature (1)..(73): Pfam Name: Universal stress protein family Pfam Description: Universal stress protein family
  misc_feature (1)..(658): Homolog of NCBI NO: 15219360 NR Description: protein kinase family [Arabidopsis thaliana]
  misc_feature (157)..(669): Homolog of NCBI NO: 7487915 NR Description: hypothetical protein YUP8H12R.45 - Arabidopsis >gi|3152590|gb|AAC17071.1| Similar to protein serine/threonine
  misc_feature (157)..(658): Homolog of NCBI NO: 25518361 NR Description: hypothetical protein F17F16.3 [imported] - thaliana >gi|9954729|gb|AAG09082.1|AC026237_3 Similar to protein
  misc_feature (1)..(655): Homolog of NCBI NO: 18092335 NR Description: serine threonine kinase [Zea mays]
  misc_feature (1)..(640): Homolog of NCBI NO: 14719286 NR Description: serine threonine kinase 1 [Zea mays]
  misc_feature (7)..(640): Homolog of NCBI NO: 15238484 NR Description: protein kinase family [Arabidopsis thaliana]
  misc_feature (1)..(638): Homolog of NCBI NO: 15239834 NR Description: protein kinase family [Arabidopsis thaliana]
  misc_feature (21)..(640): Homolog of NCBI NO: 10178101 NR Description: receptor-like protein kinase [Arabidopsis
  misc_feature (158)..(660): Homolog of NCBI NO: 9293976 NR Description: Ser/Thr protein kinaseroteinase) [Arabidopsis
  misc_feature (1)..(669): Homolog of NCBI NO: 8778472 NR Description: F1L3.25 [Arabidopsis thaliana]
MEKIAKDLFVSFHCYCSRKEINCRDILLEDADKVRAITEYVSSSAIENLVVGSASRNGFMRRFKTDLPTTVSKSAPDFCNVYVISKGKIASVRNASRPAPYQNSMQQCEIDNHHPHTPDKAPKYHDHPNSAGSTPSRPRKSVEADRYRNWKLVVMSLSPSSHRDSDISFISSGRPSVERSSFSLDFPESARTSRMSTSSEQSIGSNRLGIKFSDPDFLNESSTFSEESGRTSSYSSQSLDDVEAEMKRLRLELKQTMDMYSTACKEALSARQQATELQKLRTEEERRLEEAKSSEEAAMSIVEKERAKAKAALEAAEAAKRLAEVESKRRLTAEMKTMKESDSFSRGFVRYRKYTVDEIEEATSNFAESQKVGEGGYGPVFRGFLDHTSVAVKVLRPDAAQGRSQFQKEVEVLSCIRHPNMVLLLGACPEFGILVYEYMAKGSLEDRLFMRGNTPPITWQLRFRIAAEIATGLLFLHQTKPEPIVHRDLKPGNVLLDYNYVSKISDVGLARLVPAVAENVTQYRVTSAAGTFCYIDPEYQQTGMLGVKSDVYSLGIMLLQILTAKQPMGLAYYVEQAIEEGTLKDMLDPAVPDWPIEEALSLAKLSLQCAELRRKDRPDLGKEILPELNRLREIGEESLESVFYAGNQGKSPNTSQVSIPESPAADSQS

SEQ ID NO: 107335 - protein, 610 aa, Arabidopsis thaliana
  peptide (1)..(610): Ceres Seq. ID no. 13646602
  misc_feature (1)..(599): Homolog of NCBI NO: 15219360 NR Description: protein kinase family [Arabidopsis thaliana]
  misc_feature (98)..(610): Homolog of NCBI NO: 7487915 NR Description: hypothetical protein YUP8H12R.45 - Arabidopsis >gi|3152590|gb|AAC17071.1| Similar to protein serine/threonine
  misc_feature (98)..(599): Homolog of NCBI NO: 25518361 NR Description: hypothetical protein F17F16.3 [imported] - thaliana >gi|9954729|gb|AAG09082.1|AC026237_3 Similar to protein
  misc_feature (1)..(596): Homolog of NCBI NO: 18092335 NR Description: serine threonine kinase [Zea mays]
  misc_feature (1)..(581): Homolog of NCBI NO: 14719286 NR Description: serine threonine kinase 1 [Zea mays]
  misc_feature (1)..(581): Homolog of NCBI NO: 15238484 NR Description: protein kinase family [Arabidopsis thaliana]
  misc_feature (1)..(579): Homolog of NCBI NO: 15239834 NR Description: protein kinase family [Arabidopsis thaliana]
  misc_feature (1)..(581): Homolog of NCBI NO: 10178101 NR Description: receptor-like protein kinase [Arabidopsis
  misc_feature (99)..(601): Homolog of NCBI NO: 9293976 NR Description: Ser/Thr protein kinaseroteinase) [Arabidopsis
  misc_feature (1)..(610): Homolog of NCBI NO: 8778472 NR Description: F1L3.25 [Arabidopsis thaliana]
MRRFKTDLPTTVSKSAPDFCNVYVISKGKIASVRNASRPAPYQNSMQQCEIDNHHPHTPDKAPKYHDHPNSAGSTPSRPRKSVEADRYRNWKLVVMSLSPSSHRDSDISFISSGRPSVERSSFSLDFPESARTSRMSTSSEQSIGSNRLGIKFSDPDFLNESSTFSEESGRTSSYSSQSLDDVEAEMKRLRLELKQTMDMYSTACKEALSARQQATELQKLRTEEERRLEEAKSSEEAAMSIVEKERAKAKAALEAAEAAKRLAEVESKRRLTAEMKTMKESDSFSRGFVRYRKYTVDEIEEATSNFAESQKVGEGGYGPVFRGFLDHTSVAVKVLRPDAAQGRSQFQKEVEVLSCIRHPNMVLLLGACPEFGILVYEYMAKGSLEDRLFMRGNTPPITWQLRFRIAAEIATGLLFLHQTKPEPIVHRDLKPGNVLLDYNYVSKISDVGLARLVPAVAENVTQYRVTSAAGTFCYIDPEYQQTGMLGVKSDVYSLGIMLLQILTAKQPMGLAYYVEQAIEEGTLKDMLDPAVPDWPIEEALSLAKLSLQCAELRRKDRPDLGKEILPELNRLREIGEESLESVFYAGNQGKSPNTSQVSIPESPAADSQS

SEQ ID NO: 107336 - DNA, 2278 bp, Arabidopsis thaliana
  misc_feature (1)..(2278): Ceres Seq. ID no. 13646608
  misc_feature: MA Experiment ID: 20000171 Result: Down-regulated in Transcription
  misc_feature: MA Experiment 20000171 PARAMETER Experiment Name: At_42deg_Heat_P Parameter: Age (day) Value: 14
  misc_feature: MA Experiment 20000171 PARAMETER Experiment Name: At_42deg_Heat_P Parameter: Organism Value: A. thaliana
  misc_feature: MA Experiment 20000171 PARAMETER Experiment Name: At_42deg_Heat_P Parameter: Plant Line Value: WS
  misc_feature: MA Experiment 20000171 PARAMETER Experiment Name: At_42deg_Heat_P Parameter: Temperature (deg C) Value: 42 vs. 22
  misc_feature: MA Experiment 20000171 PARAMETER Experiment Name: At_42deg_Heat_P Parameter: Timepoint (hr) Value: 1
  misc_feature: MA Experiment 20000171 PARAMETER Experiment Name: At_42deg_Heat_P Parameter: Tissue Value: Aerial
  misc_feature: MA Experiment ID: 20000173 Result: Down-regulated in Transcription
  misc_feature: MA Experiment 20000173 PARAMETER Experiment Name: At_42deg_Heat_P Parameter: Age (day) Value: 14
  misc_feature: MA Experiment 20000173 PARAMETER Experiment Name: At_42deg_Heat_P Parameter: Organism Value: A. thaliana
  misc_feature: MA Experiment 20000173 PARAMETER Experiment Name: At_42deg_Heat_P Parameter: Plant Line Value: WS
  misc_feature: MA Experiment 20000173 PARAMETER Experiment Name: At_42deg_Heat_P Parameter: Temperature (deg C) Value: 42 vs. 22
  misc_feature: MA Experiment 20000173 PARAMETER Experiment Name: At_42deg_Heat_P Parameter: Timepoint (hr) Value: 6
  misc_feature: MA Experiment 20000173 PARAMETER Experiment Name: At_42deg_Heat_P Parameter: Tissue Value: Aerial
  misc_feature: MA Experiment ID: 20000180 Result: Down-regulated in Transcription
  misc_feature: MA Experiment 20000180 PARAMETER Experiment Name: At_Germinating_Seeds_P Parameter: Age (hr) Value: 24 vs. 0
  misc_feature: MA Experiment 20000180 PARAMETER Experiment Name: At_Germinating_Seeds_P Parameter: Tissue Value: Germinating Seeds
  misc_feature: MA Experiment ID: 20000227 Result: Up-regulated in Transcription
  misc_feature: MA Experiment 20000227 PARAMETER Experiment Name: At_Root-Tips-vs-Tops_P Parameter: Tissue Value: Root Tips vs. Root Tops
  misc_feature: MA Experiment ID: 20000437 Result: Down-regulated in Transcription
  misc_feature: MA Experiment 20000437 PARAMETER Experiment Name: At_Drought_P Parameter: Age (day) Value: 8
  misc_feature: MA Experiment 20000437 PARAMETER Experiment Name: At_Drought_P Parameter: Organism Value: A. thaliana
  misc_feature: MA Experiment 20000437 PARAMETER Experiment Name: At_Drought_P Parameter: Plant Line Value: WS
  misc_feature: MA Experiment 20000437 PARAMETER Experiment Name: At_Drought_P Parameter: Timepoint (hr) Value: 24
  misc_feature: MA Experiment 20000437 PARAMETER Experiment Name: At_Drought_P Parameter: Tissue Value: Whole Plant
  misc_feature: MA Experiment 20000437 PARAMETER Experiment Name: At_Drought_P Parameter: Treatment Value: Drought vs. No Drought
  misc_feature: MA Experiment ID: 20000794 Result: Down-regulated in Transcription
  misc_feature: MA Experiment 20000794 PARAMETER Experiment Name: At_Petals_P Parameter: Age (day) Value: 23-25 days
  misc_feature: MA Experiment 20000794 PARAMETER Experiment Name: At_Petals_P Parameter: Plant Line Value: WS
  misc_feature: MA Experiment 20000794 PARAMETER Experiment Name: At_Petals_P Parameter: Tissue Value: Petals vs. Whole plant
  misc_feature: MA Experiment ID: 20001247 Result: Up-regulated in Transcription
  misc_feature: MA Experiment 20001247 PARAMETER Experiment Name: At_Far-red-induction_P Parameter: Age (day) Value: 7
  misc_feature: MA Experiment 20001247 PARAMETER Experiment Name: At_Far-red-induction_P Parameter: Light Value: Far-red vs. White
  misc_feature: MA Experiment 20001247 PARAMETER Experiment Name: At_Far-red-induction_P Parameter: Organism Value: A. thaliana
  misc_feature: MA Experiment 20001247 PARAMETER Experiment Name: At_Far-red-induction_P Parameter: Plant Line Value: Columbia
  misc_feature: MA Experiment 20001247 PARAMETER Experiment Name: At_Far-red-induction_P Parameter: Timepoint (hr) Value: 1
  misc_feature: MA Experiment 20001247 PARAMETER Experiment Name: At_Far-red-induction_P Parameter: Tissue Value: Whole Plant
  misc_feature: MA Experiment ID: 20001554 Result: Down-regulated in Transcription
  misc_feature: MA Experiment 20001554 PARAMETER Experiment Name: At_Drought_Soil_Dry_P Parameter: Age (day) Value: 21
  misc_feature: MA Experiment 20001554 PARAMETER Experiment Name: At_Drought_Soil_Dry_P Parameter: Organism Value: A. thaliana
  misc_feature: MA Experiment 20001554 PARAMETER Experiment Name: At_Drought_Soil_Dry_P Parameter: Plant Line Value: WS
  misc_feature: MA Experiment 20001554 PARAMETER Experiment Name: At_Drought_Soil_Dry_P Parameter: Post Timepoint (hr) Value: None
  misc_feature: MA Experiment 20001554 PARAMETER Experiment Name: At_Drought_Soil_Dry_P Parameter: Post-Treatment Value: None
  misc_feature: MA Experiment 20001554 PARAMETER Experiment Name: At_Drought_Soil_Dry_P Parameter: Timepoint (day) Value: 7
  misc_feature: MA Experiment 20001554 PARAMETER Experiment Name: At_Drought_Soil_Dry_P Parameter: Treatment Value: Drought vs. No Drought
  misc_feature: MA Experiment ID: 20001555 Result: Down-regulated in Transcription
  misc_feature: MA Experiment 20001555 PARAMETER Experiment Name: At_Drought_Soil_Dry_P Parameter: Age (day) Value: 24
  misc_feature: MA Experiment 20001555 PARAMETER Experiment Name: At_Drought_Soil_Dry_P Parameter: Organism Value: A. thaliana
  misc_feature: MA Experiment 20001555 PARAMETER Experiment Name: At_Drought_Soil_Dry_P Parameter: Plant Line Value: WS
  misc_feature: MA Experiment 20001555 PARAMETER Experiment Name: At_Drought_Soil_Dry_P Parameter: Post Timepoint (hr) Value: None
  misc_feature: MA Experiment 20001555 PARAMETER Experiment Name: At_Drought_Soil_Dry_P Parameter: Post-Treatment Value: None
  misc_feature: MA Experiment 20001555 PARAMETER Experiment Name: At_Drought_Soil_Dry_P Parameter: Timepoint (day) Value: 10
  misc_feature: MA Experiment 20001555 PARAMETER Experiment Name: At_Drought_Soil_Dry_P Parameter: Treatment Value: Drought vs. No Drought
  misc_feature: MA Experiment ID: 20001556 Result: Down-regulated in Transcription
  misc_feature: MA Experiment 20001556 PARAMETER Experiment Name: At_Drought_Soil_Dry_P Parameter: Age (day) Value: 26
  misc_feature: MA Experiment 20001556 PARAMETER Experiment Name: At_Drought_Soil_Dry_P Parameter: Organism Value: A. thaliana
  misc_feature: MA Experiment 20001556 PARAMETER Experiment Name: At_Drought_Soil_Dry_P Parameter: Plant Line Value: WS
  misc_feature: MA Experiment 20001556 PARAMETER Experiment Name: At_Drought_Soil_Dry_P Parameter: Post Timepoint (hr) Value: None
  misc_feature: MA Experiment 20001556 PARAMETER Experiment Name: At_Drought_Soil_Dry_P Parameter: Post-Treatment Value: None
  misc_feature: MA Experiment 20001556 PARAMETER Experiment Name: At_Drought_Soil_Dry_P Parameter: Timepoint (day) Value: 12
  misc_feature: MA Experiment 20001556 PARAMETER Experiment Name: At_Drought_Soil_Dry_P Parameter: Treatment Value: Drought vs. No Drought
  misc_feature: MA Experiment ID: 20001557 Result: Up-regulated in Transcription
  misc_feature: MA Experiment 20001557 PARAMETER Experiment Name: At_Drought_Soil_Dry_P Parameter: Age (day) Value: 27
  misc_feature: MA Experiment 20001557 PARAMETER Experiment Name: At_Drought_Soil_Dry_P Parameter: Organism Value: A. thaliana
  misc_feature: MA Experiment 20001557 PARAMETER Experiment Name: At_Drought_Soil_Dry_P Parameter: Plant Line Value: WS
  misc_feature: MA Experiment 20001557 PARAMETER Experiment Name: At_Drought_Soil_Dry_P Parameter: Post Timepoint (hr) Value: 3
  misc_feature: MA Experiment 20001557 PARAMETER Experiment Name: At_Drought_Soil_Dry_P Parameter: Post-Treatment Value: Re-Water vs. No Drought
  misc_feature: MA Experiment 20001557 PARAMETER Experiment Name: At_Drought_Soil_Dry_P Parameter: Timepoint (day) Value: 13
  misc_feature: MA Experiment 20001557 PARAMETER Experiment Name: At_Drought_Soil_Dry_P Parameter: Treatment Value: Drought vs. No Drought
  misc_feature: MA Experiment ID: 20001558 Result: Up-regulated in Transcription
  misc_feature: MA Experiment 20001558 PARAMETER Experiment Name: At_Drought_Soil_Dry_P Parameter: Age (day) Value: 27
  misc_feature: MA Experiment 20001558 PARAMETER Experiment Name: At_Drought_Soil_Dry_P Parameter: Organism Value: A. thaliana
  misc_feature: MA Experiment 20001558 PARAMETER Experiment Name: At_Drought_Soil_Dry_P Parameter: Plant Line Value: WS
  misc_feature: MA Experiment 20001558 PARAMETER Experiment Name: At_Drought_Soil_Dry_P Parameter: Post Timepoint (hr) Value: 6
  misc_feature: MA Experiment 20001558 PARAMETER Experiment Name: At_Drought_Soil_Dry_P Parameter: Post-Treatment Value: Re-Water vs. No Drought
  misc_feature: MA Experiment 20001558 PARAMETER Experiment Name: At_Drought_Soil_Dry_P Parameter: Timepoint (day) Value: 13
  misc_feature: MA Experiment 20001558 PARAMETER Experiment Name: At_Drought_Soil_Dry_P Parameter: Treatment Value: Drought vs. No Drought
  misc_feature: MA Experiment ID: 20001904 Result: Down-regulated in Transcription
  misc_feature: MA Experiment 20001904 PARAMETER Experiment Name: At_Drought_Reproduction_P Parameter: Age (day) Value: 37
  misc_feature: MA Experiment 20001904 PARAMETER Experiment Name: At_Drought_Reproduction_P Parameter: Organism Value: A. thaliana
  misc_feature: MA Experiment 20001904 PARAMETER Experiment Name: At_Drought_Reproduction_P Parameter: Plant Line Value: WS
  misc_feature: MA Experiment 20001904 PARAMETER Experiment Name: At_Drought_Reproduction_P Parameter: Timepoint (day) Value: 7
  misc_feature: MA Experiment 20001904 PARAMETER Experiment Name: At_Drought_Reproduction_P Parameter: Tissue Value: Rosettes
  misc_feature: MA Experiment 20001904 PARAMETER Experiment Name: At_Drought_Reproduction_P Parameter: Treatment Value: Drought vs. No Drought
agagcccaacattggattcctcttctttgaccattcctctctacctgaataacccgttaatctctctctgtccctttcttcttcttttttcaagaacaataaaaaaatgtctcaagattctgcaactactactccgccgccacctttaacctccgacgtttcaatgccttccggtgaagaagatgagccaaagcatgtaacatcggaagaagaggcaccggtgacttcggagacaaatctgaagctacctttgatgccggagctagaggagtcaaatcatacggcggaggttgtttcagagaaggtgacgccggagacgatgactttggagtcagaaggtctcaaccacgcggcggaggattcagagcagacacatgaagtgacgccggagacagagactgcgaagctagaggttctcaaccacacggcggaggattcagagcagacacatgaagtgacgccggagaaagagactgtgaaatcagagtttctcaaccacgtggcggaggattcagagcagacacatgaagtgacgccggagacagagactgtgaagtcagaggttctcaaccatgcggcggaggattcagagcagccacgtggagtgacaccgacgccggagacagaaacatcggaggcagacacgtcattgcttgtaacttccgagacagaagagcctaaccatgcggcggaggattattcagagacagagccatcacagaaactaatgttggagcagaggagaaagtacatggaagtagaagattggacagagccagaactaccagatgaagcggtgttagaagctgcagcgtcagtccctgagccaaagcaaccagagcctcagacaccaccaccaccaccatctactactacttccactgttgcatctagatctttagccgaaatgatgaacagagaagaagcagaagtagaagagaaacaaaagattcagattcctcgtagtctcggttcattcaaagaagaaacaaacaaaatctccgatctttcagaaacagagttaaacgcacttcaagagcttcgtcaccttcttcaagtatcacaagattcaagcaaaacctctatatggggtgtgccacttctcaaagacgacagaaccgacgtcgttttgttaaagtttctaagagcaagagactttaaacctcaagaagcttactcaatgctaaacaagacactccaatggagaatcgacttcaacatcgaagagcttctagacgaaaacctcggtgacgatttagacaaagttgtgttcatgcaaggacaagacaaggagaatcatcctgtctgttacaatgtctacggtgagtttcagaacaaagatctttatcagaaaacgttttcagatgaagagaagagagaacggttcttgagatggaggattcagtttcttgaaaagagtatcaggaatcttgattttgtagctggtggtgtttccacgatatgtcaagtaaatgatcttaagaattctccaggacctggtaagactgagcttaggttagctactaagcaagctcttcatcttcttcaagacaattaccctgagtttgtctctaaacagatattcatcaatgttccatggtggtaccttgcgttctatagaattattagtccttttatgtcacaaaggtcaaagagcaaactagttttcgcaggtccttcaagatctgcagaaacccttctcaagtacatatcacccgaacatgtcccggttcagtatggtggactaagtgtggataattgcgagtgtaactcggatttcacacacgatgatatcgctaccgagattactgttaaaccaactactaaacaaaccgtcgagattattgtttacgaggtgagaccattttgtataaagacattttatacaactttttcaaacgcccatttctgtgtttgtgtttggaagataactaattgtggtttcaatactaagtacttaagattcagctatgttttgaagtcttcttacatttgtgcctcaaaacacttttttcttcagaaatgtacaatcgtgtgggagataagagtagtgggatgggaggtttcgtatggagcggagtttgtgccggagaacaaagaagggtatacagtgatcattcagaaaccgaggaagatgactgcgaaaaatgaactggtggtgtctcatagcttcaaagttggagaagttggcaggattttgctaactgttgataacccgacttcgaccaagaaaatgcttatctacaggttcaaggttaagcctttagcttgtgagtaa

SEQ ID NO: 107337 - protein, 723 aa, Arabidopsis thaliana
  peptide (1)..(723): Ceres Seq. ID no. 13646609
  misc_feature (389)..(555): Pfam Name: CRAL/TRIO domain Pfam Description: CRAL/TRIO domain
  misc_feature (177)..(583): Homolog of NCBI NO: 15218383 NR Description: cytosolic factor -related [Arabidopsis thaliana]
  misc_feature (638)..(720): Homolog of NCBI NO: 15218383 NR Description: cytosolic factor -related [Arabidopsis thaliana]
  misc_feature (284)..(583): Homolog of NCBI NO: 15081614 NR Description: At1g72160/T9N14_8 [Arabidopsis thaliana]
  misc_feature (638)..(720): Homolog of NCBI NO: 15081614 NR Description: At1g72160/T9N14_8 [Arabidopsis thaliana]
  misc_feature (196)..(583): Homolog of NCBI NO: 8894548 NR Description: hypothetical protein [Cicer arietinum]
  misc_feature (638)..(721): Homolog of NCBI NO: 8894548 NR Description: hypothetical protein [Cicer arietinum]
  misc_feature (54)..(583): Homolog of NCBI NO: 34907288 NR Description: contains ESTs
  misc_feature (638)..(718): Homolog of NCBI NO: 34907288 NR Description: contains ESTs
  misc_feature (13)..(579): Homolog of NCBI NO: 15219901 NR Description: expressed protein [Arabidopsis thaliana]
  misc_feature (641)..(718): Homolog of NCBI NO: 15219901 NR Description: expressed protein [Arabidopsis thaliana]
MSQDSATTTPPPPLTSDVSMPSGEEDEPKHVTSEEEAPVTSETNLKLPLMPELEESNHTAEVVSEKVTPETMTLESEGLNHAAEDSEQTHEVTPETETAKLEVLNHTAEDSEQTHEVTPEKETVKSEFLNHVAEDSEQTHEVTPETETVKSEVLNHAAEDSEQPRGVTPTPETETSEADTSLLVTSETEEPNHAAEDYSETEPSQKLMLEQRRKYMEVEDWTEPELPDEAVLEAAASVPEPKQPEPQTPPPPPSTTTSTVASRSLAEMMNREEAEVEEKQKIQIPRSLGSFKEETNKISDLSETELNALQELRHLLQVSQDSSKTSIWGVPLLKDDRTDVVLLKFLRARDFKPQEAYSMLNKTLQWRIDFNIEELLDENLGDDLDKVVFMQGQDKENHPVCYNVYGEFQNKDLYQKTFSDEEKRERFLRWRIQFLEKSIRNLDFVAGGVSTICQVNDLKNSPGPGKTELRLATKQALHLLQDNYPEFVSKQIFINVPWWYLAFYRIISPFMSQRSKSKLVFAGPSRSAETLLKYISPEHVPVQYGGLSVDNCECNSDFTHDDIATEITVKPTTKQTVEIIVYEVRPFCIKTFYTTFSNAHFCVCVWKITNCGFNTKYLRFSYVLKSSYICASKHFFLQKCTIVWEIRVVGWEVSYGAEFVPENKEGYTVIIQKPRKMTAKNELVVSHSFKVGEVGRILLTVDNPTSTKKMLIYRFKVKPLACE

SEQ ID NO: 107338 - protein, 704 aa, Arabidopsis thaliana
  peptide (1)..(704): Ceres Seq. ID no. 13646610
  misc_feature (370)..(536): Pfam Name: CRAL/TRIO domain Pfam Description: CRAL/TRIO domain
  misc_feature (158)..(564): Homolog of NCBI NO: 15218383 NR Description: cytosolic factor -related [Arabidopsis thaliana]
  misc_feature (619)..(701): Homolog of NCBI NO: 15218383 NR Description: cytosolic factor -related [Arabidopsis thaliana]
  misc_feature (265)..(564): Homolog of NCBI NO: 15081614 NR Description: At1g72160/T9N14_8 [Arabidopsis thaliana]
  misc_feature (619)..(701): Homolog of NCBI NO: 15081614 NR Description: At1g72160/T9N14_8 [Arabidopsis thaliana]
  misc_feature (177)..(564): Homolog of NCBI NO: 8894548 NR Description: hypothetical protein [Cicer arietinum]
  misc_feature (619)..(702): Homolog of NCBI NO: 8894548 NR Description: hypothetical protein [Cicer arietinum]
  misc_feature (35)..(564): Homolog of NCBI NO: 34907288 NR Description: contains ESTs
  misc_feature (619)..(699): Homolog of NCBI NO: 34907288 NR Description: contains ESTs
  misc_feature (1)..(560): Homolog of NCBI NO: 15219901 NR Description: expressed protein [Arabidopsis thaliana]
  misc_feature (622)..(699): Homolog of NCBI NO: 15219901 NR Description: expressed protein [Arabidopsis thaliana]
MPSGEEDEPKHVTSEEEAPVTSETNLKLPLMPELEESNHTAEVVSEKVTPETMTLESEGLNHAAEDSEQTHEVTPETETAKLEVLNHTAEDSEQTHEVTPEKETVKSEFLNHVAEDSEQTHEVTPETETVKSEVLNHAAEDSEQPRGVTPTPETETSEADTSLLVTSETEEPNHAAEDYSETEPSQKLMLEQRRKYMEVEDWTEPELPDEAVLEAAASVPEPKQPEPQTPPPPPSTTTSTVASRSLAEMMNREEAEVEEKQKIQIPRSLGSFKEETNKISDLSETELNALQELRHLLQVSQDSSKTSIWGVPLLKDDRTDVVLLKFLRARDFKPQEAYSMLNKTLQWRIDFNIEELLDENLGDDLDKVVFMQGQDKENHPVCYNVYGEFQNKDLYQKTFSDEEKRERFLRWRIQFLEKSIRNLDFVAGGVSTICQVNDLKNSPGPGKTELRLATKQALHLLQDNYPEFVSKQIFINVPWWYLAFYRIISPFMSQRSKSKLVFAGPSRSAETLLKYISPEHVPVQYGGLSVDNCECNSDFTHDDIATEITVKPTTKQTVEIIVYEVRPFCIKTFYTTFSNAHFCVCVWKITNCGFNTKYLRFSYVLKSSYICASKHFFLQKCTIVWEIRVVGWEVSYGAEFVPENKEGYTVIIQKPRKMTAKNELVVSHSFKVGEVGRILLTVDNPTSTKKMLIYRFKVKPLACE

SEQ ID NO: 107339 - protein, 674 aa, Arabidopsis thaliana
  peptide (1)..(674): Ceres Seq. ID no. 13646611
  misc_feature (340)..(506): Pfam Name: CRAL/TRIO domain Pfam Description: CRAL/TRIO domain
  misc_feature (128)..(534): Homolog of NCBI NO: 15218383 NR Description: cytosolic factor -related [Arabidopsis thaliana]
  misc_feature (589)..(671): Homolog of NCBI NO: 15218383 NR Description: cytosolic factor -related [Arabidopsis thaliana]
  misc_feature (235)..(534): Homolog of NCBI NO: 15081614 NR Description: At1g72160/T9N14_8 [Arabidopsis thaliana]
  misc_feature (589)..(671): Homolog of NCBI NO: 15081614 NR Description: At1g72160/T9N14_8 [Arabidopsis thaliana]
  misc_feature (147)..(534): Homolog of NCBI NO: 8894548 NR Description: hypothetical protein [Cicer arietinum]
  misc_feature (589)..(672): Homolog of NCBI NO: 8894548 NR Description: hypothetical protein [Cicer arietinum]
  misc_feature (5)..(534): Homolog of NCBI NO: 34907288 NR Description: contains ESTs
  misc_feature (589)..(669): Homolog of NCBI NO: 34907288 NR Description: contains ESTs
  misc_feature (1)..(530): Homolog of NCBI NO: 15219901 NR Description: expressed protein [Arabidopsis thaliana]
  misc_feature (592)..(669): Homolog of NCBI NO: 15219901 NR Description: expressed protein [Arabidopsis thaliana]
MPELEESNHTAEVVSEKVTPETMTLESEGLNHAAEDSEQTHEVTPETETAKLEVLNHTAEDSEQTHEVTPEKETVKSEFLNHVAEDSEQTHEVTPETETVKSEVLNHAAEDSEQPRGVTPTPETETSEADTSLLVTSETEEPNHAAEDYSETEPSQKLMLEQRRKYMEVEDWTEPELPDEAVLEAAASVPEPKQPEPQTPPPPPSTTTSTVASRSLAEMMNREEAEVEEKQKIQIPRSLGSFKEETNKISDLSETELNALQELRHLLQVSQDSSKTSIWGVPLLKDDRTDVVLLKFLRARDFKPQEAYSMLNKTLQWRIDFNIEELLDENLGDDLDKVVFMQGQDKENHPVCYNVYGEFQNKDLYQKTFSDEEKRERFLRWRIQFLEKSIRNLDFVAGGVSTICQVNDLKNSPGPGKTELRLATKQALHLLQDNYPEFVSKQIFINVPWWYLAFYRIISPFMSQRSKSKLVFAGPSRSAETLLKYISPEHVPVQYGGLSVDNCECNSDFTHDDIATEITVKPTTKQTVEIIVYEVRPFCIKTFYTTFSNAHFCVCVWKITNCGFNTKYLRFSYVLKSSYICASKHFFLQKCTIVWEIRVVGWEVSYGAEFVPENKEGYTVIIQKPRKMTAKNELVVSHSFKVGEVGRILLTVDNPTSTKKMLIYRFKVKPLACE

SEQ ID NO: 107340 - DNA, 1698 bp, Arabidopsis thaliana
  misc_feature (1)..(1698): Ceres Seq. ID no. 13646617
  misc_feature: MA Experiment ID: 20001248 Result: Up-regulated in Transcription
  misc_feature: MA Experiment 20001248 PARAMETER Experiment Name: At_Far-red-induction_P Parameter: Age (day) Value: 7
  misc_feature: MA Experiment 20001248 PARAMETER Experiment Name: At_Far-red-induction_P Parameter: Light Value: Far-red vs. White
  misc_feature: MA Experiment 20001248 PARAMETER Experiment Name: At_Far-red-induction_P Parameter: Organism Value: A. thaliana
  misc_feature: MA Experiment 20001248 PARAMETER Experiment Name: At_Far-red-induction_P Parameter: Plant Line Value: Columbia
  misc_feature: MA Experiment 20001248 PARAMETER Experiment Name: At_Far-red-induction_P Parameter: Timepoint (hr) Value: 4
  misc_feature: MA Experiment 20001248 PARAMETER Experiment Name: At_Far-red-induction_P Parameter: Tissue Value: Whole Plant
  misc_feature: MA Experiment ID: 20001450 Result: Up-regulated in Transcription
  misc_feature: MA Experiment 20001450 PARAMETER Experiment Name: At_Far-red-induction_P Parameter: Age (day) Value: 7
  misc_feature: MA Experiment 20001450 PARAMETER Experiment Name: At_Far-red-induction_P Parameter: Light Value: Far-red vs. White
  misc_feature: MA Experiment 20001450 PARAMETER Experiment Name: At_Far-red-induction_P Parameter: Organism Value: A. thaliana
  misc_feature: MA Experiment 20001450 PARAMETER Experiment Name: At_Far-red-induction_P Parameter: Plant Line Value: Columbia
  misc_feature: MA Experiment 20001450 PARAMETER Experiment Name: At_Far-red-induction_P Parameter: Timepoint (hr) Value: 8
  misc_feature: MA Experiment 20001450 PARAMETER Experiment Name: At_Far-red-induction_P Parameter: Tissue Value: Whole Plant
atggcggttaagcacggcgtcgacggcgacggcagcgaaatcgaatcgagaactctggcggtagatcgaaaaagcggtttctgcgaatcaacatcgatattctacagcaaacgtgagccaatggctctcccgccaaaccaatttctcgacgtcacgtctttcattgcatcacagcctcatcgcggcaaaaccgtattcgtcgacgccgtaaccggtcgtcgactaagcttccctgagctctggctcggtgtcgaaagagtcgcgggttgtctttacgcattaggtgtacgcaaaggaaatgtcgtcattatactctctccaaactcaatcctcttcccgatcgtctccctctccgtaatgtcactcggcgcaatcataaccaccgctaatccgatcaacacgtccgacgaaatctccaaacagataggcgattcgcgtcctgttctcgccttcaccacatgcaaactcgtctccaaactcgccgccgcgtcgaattttaatctcccggtggttctcatggacgactaccacgttccttcgcaaagttacggtgaccgcgtgaaactagtcgggaggttagagacgatgattgaaacagaaccgagtgagtcacgagttaagcaacgagtcaaccaggacgacacggcggctctgttatactcatcaggtacgacggggacgagtaaaggagtaatgctgagtcaccgtaacctaatcgcattggtacaagcataccgggcccggttcggtttagagcagcgaaccatttgcacaatcccaatgtgtcacatcttcggattcggtggtttcgcgacggggctaatcgcgttaggatggacaatcgttgttcttcctaaattcgacatggctaagcttctctcggcggtggagactcatcgttcttcgtacctttctcttgtaccgccgattgtagtagctatggttaacggagcaaatgagattaattccaagtatgatctgagctcgttgcacactgtggtggctggaggagctccgttgagtagagaggtgacggagaagttcgttgagaattatcccaaggttaagatcctacaagggtatggtttgactgagtcaacggctatagctgcttctatgtttaataaagaggagactaagaggtatggagcttctggcttactggctccgaatgtggaaggtaagattgtggatccggatacgggtcgggttttgggtgtgaatcaaacgggtgagctgtggattcgaagtcctactgtgatgaaaggttatttcaagaataaagaagctactgcttctaccattgattcagaaggatggttgaaaactggagatttgtgttacattgacggtgatgggtttgtctttgttgttgatagattaaaggagctcatcaaatgcaatggttatcaggttgctccagctgaactagaggcattgttgcttgctcatccagagattgctgatgcagcagtaatacccatccctgacatgaaagctgggcaatatccaatggcatatatcgtaagaaaagttggaagtaacttatccgagagcgaaatcatgggatttgtcgcaaaacaggtatcaccgtacaagaagattcgcaaagtcacatttttggcttcaatccccaaaaatccttcgggcaagattttaagaagagaacttacaaagctcacaacttcaaaactctag

SEQ ID NO: 107341 - protein, 565 aa, Arabidopsis thaliana
  peptide (1)..(565): Ceres Seq. ID no. 13646618
  misc_feature (76)..(492): Pfam Name: AMP-binding enzyme Pfam Description: AMP-binding enzyme
  misc_feature (1)..(565): Homolog of NCBI NO: 15217956 NR Description: 4-coumarate:CoA ligase 1 (4-coumaroyl-CoA
  misc_feature (1)..(565): Homolog of NCBI NO: 29888143 NR Description: 4-coumarate-CoA ligase-like protein [Arabidopsis
  misc_feature (22)..(565): Homolog of NCBI NO: 25402913 NR Description: protein F5M15.18 [imported] - Arabidopsis >gi|8778604|gb|AAF79612.1|AC027665_13 F5M15.18 [Arabidopsis
  misc_feature (20)..(563): Homolog of NCBI NO: 18394871 NR Description: 4-coumarate:CoA ligase 1 (4-coumaroyl-CoA unknown protein [Arabidopsis thaliana]
  misc_feature (20)..(563): Homolog of NCBI NO: 29893225 NR Description: 4-coumarate-CoA ligase-like protein [Arabidopsis
  misc_feature (20)..(476): Homolog of NCBI NO: 8778603 NR Description: F5M15.17 [Arabidopsis thaliana]
  misc_feature (472)..(563): Homolog of NCBI NO: 8778603 NR Description: F5M15.17 [Arabidopsis thaliana]
  misc_feature (17)..(552): Homolog of NCBI NO: 25402913 NR Description: protein F5M15.18 [imported] - Arabidopsis >gi|8778604|gb|AAF79612.1|AC027665_13 F5M15.18 [Arabidopsis
  misc_feature (21)..(565): Homolog of NCBI NO: 30693203 NR Description: 4-coumarate:CoA ligase (4-coumaroyl-CoA synthase)
  misc_feature (21)..(565): Homolog of NCBI NO: 29888141 NR Description: 4-coumarate-CoA ligase-like protein [Arabidopsis
MAVKHGVDGDGSEIESRTLAVDRKSGFCESTSIFYSKREPMALPPNQFLDVTSFIASQPHRGKTVFVDAVTGRRLSFPELWLGVERVAGCLYALGVRKGNVVIILSPNSILFPIVSLSVMSLGAIITTANPINTSDEISKQIGDSRPVLAFTTCKLVSKLAAASNFNLPVVLMDDYHVPSQSYGDRVKLVGRLETMIETEPSESRVKQRVNQDDTAALLYSSGTTGTSKGVMLSHRNLIALVQAYRARFGLEQRTICTIPMCHIFGFGGFATGLIALGWTIVVLPKFDMAKLLSAVETHRSSYLSLVPPIVVAMVNGANEINSKYDLSSLHTVVAGGAPLSREVTEKFVENYPKVKILQGYGLTESTAIAASMFNKEETKRYGASGLLAPNVEGKIVDPDTGRVLGVNQTGELWIRSPTVMKGYFKNKEATASTIDSEGWLKTGDLCYIDGDGFVFVVDRLKELIKCNGYQVAPAELEALLLAHPEIADAAVIPIPDMKAGQYPMAYIVRKVGSNLSESEIMGFVAKQVSPYKKIRKVTFLASIPKNPSGKILRRELTKLTTSKL

SEQ ID NO: 107342 - protein, 525 aa, Arabidopsis thaliana
  peptide (1)..(525): Ceres Seq. ID no. 13646619
  misc_feature (36)..(452): Pfam Name: AMP-binding enzyme Pfam Description: AMP-binding enzyme
  misc_feature (1)..(525): Homolog of NCBI NO: 15217956 NR Description: 4-coumarate:CoA ligase 1 (4-coumaroyl-CoA
  misc_feature (1)..(525): Homolog of NCBI NO: 29888143 NR Description: 4-coumarate-CoA ligase-like protein [Arabidopsis
  misc_feature (1)..(525): Homolog of NCBI NO: 25402913 NR Description: protein F5M15.18 [imported] - Arabidopsis >gi|8778604|gb|AAF79612.1|AC027665_13 F5M15.18 [Arabidopsis
  misc_feature (1)..(523): Homolog of NCBI NO: 18394871 NR Description: 4-coumarate:CoA ligase 1 (4-coumaroyl-CoA unknown protein [Arabidopsis thaliana]
  misc_feature (1)..(523): Homolog of NCBI NO: 29893225 NR Description: 4-coumarate-CoA ligase-like protein [Arabidopsis
  misc_feature (1)..(436): Homolog of NCBI NO: 8778603 NR Description: F5M15.17 [Arabidopsis thaliana]
  misc_feature (432)..(523): Homolog of NCBI NO: 8778603 NR Description: F5M15.17 [Arabidopsis thaliana]
  misc_feature (1)..(512): Homolog of NCBI NO: 25402913 NR Description: protein F5M15.18 [imported] - Arabidopsis >gi|8778604|gb|AAF79612.1|AC027665_13 F5M15.18 [Arabidopsis
  misc_feature (1)..(525): Homolog of NCBI NO: 30693203 NR Description: 4-coumarate:CoA ligase (4-coumaroyl-CoA synthase)
  misc_feature (1)..(525): Homolog of NCBI NO: 29888141 NR Description: 4-coumarate-CoA ligase-like protein [Arabidopsis
MALPPNQFLDVTSFIASQPHRGKTVFVDAVTGRRLSFPELWLGVERVAGCLYALGVRKGNVVIILSPNSILFPIVSLSVMSLGAIITTANPINTSDEISKQIGDSRPVLAFTTCKLVSKLAAASNFNLPVVLMDDYHVPSQSYGDRVKLVGRLETMIETEPSESRVKQRVNQDDTAALLYSSGTTGTSKGVMLSHRNLIALVQAYRARFGLEQRTICTIPMCHIFGFGGFATGLIALGWTIVVLPKFDMAKLLSAVETHRSSYLSLVPPIVVAMVNGANEINSKYDLSSLHTVVAGGAPLSREVTEKFVENYPKVKILQGYGLTESTAIAASMFNKEETKRYGASGLLAPNVEGKIVDPDTGRVLGVNQTGELWIRSPTVMKGYFKNKEATASTIDSEGWLKTGDLCYIDGDGFVFVVDRLKELIKCNGYQVAPAELEALLLAHPEIADAAVIPIPDMKAGQYPMAYIVRKVGSNLSESEIMGFVAKQVSPYKKIRKVTFLASIPKNPSGKILRRELTKLTTSKL

SEQ ID NO: 107343 - protein, 446 aa, Arabidopsis thaliana
  peptide (1)..(446): Ceres Seq. ID no. 13646620
  misc_feature (1)..(373): Pfam Name: AMP-binding enzyme Pfam Description: AMP-binding enzyme
  misc_feature (1)..(446): Homolog of NCBI NO: 15217956 NR Description: 4-coumarate:CoA ligase 1 (4-coumaroyl-CoA
  misc_feature (1)..(446): Homolog of NCBI NO: 29888143 NR Description: 4-coumarate-CoA ligase-like protein [Arabidopsis
  misc_feature (1)..(446): Homolog of NCBI NO: 25402913 NR Description: protein F5M15.18 [imported] - Arabidopsis >gi|8778604|gb|AAF79612.1|AC027665_13 F5M15.18 [Arabidopsis
  misc_feature (1)..(444): Homolog of NCBI NO: 18394871 NR Description: 4-coumarate:CoA ligase 1 (4-coumaroyl-CoA unknown protein [Arabidopsis thaliana]
  misc_feature (1)..(444): Homolog of NCBI NO: 29893225 NR Description: 4-coumarate-CoA ligase-like protein [Arabidopsis
  misc_feature (1)..(357): Homolog of NCBI NO: 8778603 NR Description: F5M15.17 [Arabidopsis thaliana]
  misc_feature (353)..(444): Homolog of NCBI NO: 8778603 NR Description: F5M15.17 [Arabidopsis thaliana]
  misc_feature (1)..(433): Homolog of NCBI NO: 25402913 NR Description: protein F5M15.18 [imported] - Arabidopsis >gi|8778604|gb|AAF79612.1|AC027665_13 F5M15.18 [Arabidopsis
  misc_feature (1)..(446): Homolog of NCBI NO: 30693203 NR Description: 4-coumarate:CoA ligase (4-coumaroyl-CoA synthase)
  misc_feature (1)..(446): Homolog of NCBI NO: 29888141 NR Description: 4-coumarate-CoA ligase-like protein [Arabidopsis
MSLGAIITTANPINTSDEISKQIGDSRPVLAFTTCKLVSKLAAASNFNLPVVLMDDYHVPSQSYGDRVKLVGRLETMIETEPSESRVKQRVNQDDTAALLYSSGTTGTSKGVMLSHRNLIALVQAYRARFGLEQRTICTIPMCHIFGFGGFATGLIALGWTIVVLPKFDMAKLLSAVETHRSSYLSLVPPIVVAMVNGANEINSKYDLSSLHTVVAGGAPLSREVTEKFVENYPKVKILQGYGLTESTAIAASMFNKEETKRYGASGLLAPNVEGKIVDPDTGRVLGVNQTGELWIRSPTVMKGYFKNKEATASTIDSEGWLKTGDLCYIDGDGFVFVVDRLKELIKCNGYQVAPAELEALLLAHPEIADAAVIPIPDMKAGQYPMAYIVRKVGSNLSESEIMGFVAKQVSPYKKIRKVTFLASIPKNPSGKILRRELTKLTTSKL

SEQ ID NO: 107344 - DNA, 2122 bp, Arabidopsis thaliana
  misc_feature (1)..(2122): Ceres Seq. ID no. 13646734
  misc_feature: MA Experiment ID: 20000184 Result: Down-regulated in Transcription
  misc_feature: MA Experiment 20000184 PARAMETER Experiment Name: At_Shoots__P Parameter: Age (day) Value: 7
  misc_feature: MA Experiment 20000184 PARAMETER Experiment Name: At_Shoots__P Parameter: Tissue Value: Shoots vs. Whole Plant
  misc_feature: MA Experiment ID: 20000495 Result: Up-regulated in Transcription
  misc_feature: MA Experiment 20000495 PARAMETER Experiment Name: At_Guard_Cells_P Parameter: Harvest Date Value: 8/2/2002
  misc_feature: MA Experiment 20000495 PARAMETER Experiment Name: At_Guard_Cells_P Parameter: Organism Value: A. thaliana
  misc_feature: MA Experiment 20000495 PARAMETER Experiment Name: At_Guard_Cells_P Parameter: Tissue Value: Guard Cells vs. Leaves
  misc_feature: MA Experiment ID: 20000794 Result: Up-regulated in Transcription
  misc_feature: MA Experiment 20000794 PARAMETER Experiment Name: At_Petals_P Parameter: Age (day) Value: 23-25 days
  misc_feature: MA Experiment 20000794 PARAMETER Experiment Name: At_Petals_P Parameter: Plant Line Value: WS
  misc_feature: MA Experiment 20000794 PARAMETER Experiment Name: At_Petals_P Parameter: Tissue Value: Petals vs. Whole plant
atgtcgacgatttgcagccacagagaacttaaagcttatcgtccgctgcaagataataatctacaggaggtgtatgcttcctcagctgctgcagtgcactacgatccagatctgaaactgttatctcaggatgtgaacatagttgcgacatacagtgaccattacggcaatatacgccttggtagggtgaaaatgggggatctttcaccttcttgggttttggagaatcctgcctatcaagttagccgcaaaacaaaaggttcgcagctagttataccacgggattcatttcaaaatgatactggaatggaagataatgcaagccattctacaactaatcagactgatgaaagcgaaaatcagtttccaaacgtggattttgcaagcccagcaaaactgaagcggcagattttacgtcaggaaaggagaggtcaacgaactttagagctgatccgacaagaaaaggaaactgatgagcagatgcaagaagcagccattcagaagtcaatgagctttgaaaactcagtcatagggaaatacagtatatggaggagagactatgagagcccaaatgctgatgctatcttgaagcttatgagagaccagatcataatggcaaaagcatatgcaaatattgccaaatcaaaaaatgtaaccaatctgtacgttttcttgatgcagcagtgtggagaaaataaacgtgttataggtaaagcaacctctgatgctgaccttccttcaagcgctcttgatcaagcaaaagccatgggccatgcactctctcttgcaaaagacgagttatatgactgccatgaacttgcaaaaaagttccgggccatccttcagtccactgaacgcaaagtagatggactgaagaaaaagggaaccttcttaattcagctagctgccaaaacatttcccaagccattgcattgcctgagtctgcagctagcggcagactattttattctaggtttcaatgaagaggatgcagtgaaagaggatgtcagtcaaaagaagcttgaagatccttcgctctatcactatgcgatcttttcggataacgttctggctacatcagtggtggtgaactccactgtcttgaatgcaaaggaaccgcagaggcatgtgttccatatagtaactgacaaactgaattttggtgcaatgaagatgtggtttcgcatcaatgctcctgctgatgcgacgattcaagttgaaaacataaatgatttcaagtggctgaactcctcttactgctctgttctacggcagcttgaatctgcaaggctgaaagaatactatttcaaagcaaatcatccttcatcaatctcagctggcgcagataatctaaagtaccgcaacccaaagtatctatcgatgctgaatcatctcagattctaccttcctgaggtttatccgaagctggagaagattctgtttctagacgatgacattgtggtgcagaaggacctggcaccactatgggaaatagacatgcaaggaaaagtgaatggtgcggtggagacgtgcaaggagagcttccacagatttgacaagtacctcaacttctcaaatccaaagatttcagagaattttgacgctggtgcttgtgggtgggcatttgggatgaatatgtttgacctgaaagagtggaggaaacggaacattacagggatatatcactattggcaagacttgaatgaagacagaacactgtggaagctgggatcgttgccaccggggctgataacattttacaacctgacgaatgcaatggagaggagctggcacgtactagggctgggatatgacccagcgctaaaccaaacagcaatagagaatgcagcggtagtgcattacaatgggaactacaagccatggctgggtttagcattcgccaagtacaaaccgtactggtccaagtacgttgagtacgacaacccttatctccgacggtgcgacatcaatgaatgaatgaagagatggtggaggtagtatacatgatgaagcactcaaaggaaactaaataagtaaaaattgttttcagtttaccataatactaggaatcagcagacaatcacacatgacgattaattaaatagaatctcttgtttttctc

SEQ ID NO: 107345 - protein, 658 aa, Arabidopsis thaliana
  peptide (1)..(658): Ceres Seq. ID no. 13646735
  misc_feature (67)..(658): Homolog of NCBI NO: 15233046 NR Description: glycosyltransferase family 8 [Arabidopsis
  misc_feature (129)..(658): Homolog of NCBI NO: 7271113 NR Description: 68 kDa protein [Cicer arietinum]
  misc_feature (137)..(658): Homolog of NCBI NO: 37533460 NR Description: hypothetical protein [Oryza sativa (japonica group)] >gi|20279459|gb|AAM18739.1| hypothetical protein [Oryza
  misc_feature (67)..(595): Homolog of NCBI NO: 14517362 NR Description: AT3g61130/T20K12_30 [Arabidopsis thaliana]
  misc_feature (193)..(657): Homolog of NCBI NO: 10177914 NR Description: emb|CAB71043.1~gene_id:MCA23.10~strong similarity
  misc_feature (193)..(657): Homolog of NCBI NO: 18422837 NR Description: glycosyltransferase family 8 [Arabidopsis >gi|15810327|gb|AAL07051.1| unknown protein [Arabidopsis >gi|20259235|gb|AAM14333.1| unknown protein [Arabidopsis
  misc_feature (145)..(657): Homolog of NCBI NO: 38423965 NR Description: putative glycosyltransferase [Oryza sativa
  misc_feature (129)..(505): Homolog of NCBI NO: 15227235 NR Description: glycosyltransferase family 8 [Arabidopsis
  misc_feature (528)..(658): Homolog of NCBI NO: 15227235 NR Description: glycosyltransferase family 8 [Arabidopsis
  misc_feature (194)..(657): Homolog of NCBI NO: 18399484 NR Description: glycosyltransferase family 8 [Arabidopsis >gi|14334692|gb|AAK59524.1| unknown protein [Arabidopsis >gi|16323394|gb|AAL15191.1| unknown protein [Arabidopsis
MSTICSHRELKAYRPLQDNNLQEVYASSAAAVHYDPDLKLLSQDVNIVATYSDHYGNIRLGRVKMGDLSPSWVLENPAYQVSRKTKGSQLVIPRDSFQNDTGMEDNASHSTTNQTDESENQFPNVDFASPAKLKRQILRQERRGQRTLELIRQEKETDEQMQEAAIQKSMSFENSVIGKYSIWRRDYESPNADAILKLMRDQIIMAKAYANIAKSKNVTNLYVFLMQQCGENKRVIGKATSDADLPSSALDQAKAMGHALSLAKDELYDCHELAKKFRAILQSTERKVDGLKKKGTFLIQLAAKTFPKPLHCLSLQLAADYFILGFNEEDAVKEDVSQKKLEDPSLYHYAIFSDNVLATSVVVNSTVLNAKEPQRHVFHIVTDKLNFGAMKMWFRINAPADATIQVENINDFKWLNSSYCSVLRQLESARLKEYYFKANHPSSISAGADNLKYRNPKYLSMLNHLRFYLPEVYPKLEKILFLDDDIVVQKDLAPLWEIDMQGKVNGAVETCKESFHRFDKYLNFSNPKISENFDAGACGWAFGMNMFDLKEWRKRNITGIYHYWQDLNEDRTLWKLGSLPPGLITFYNLTNAMERSWHVLGLGYDPALNQTAIENAAVVHYNGNYKPWLGLAFAKYKPYWSKYVEYDNPYLRRCDINE

SEQ ID NO: 107346 - protein, 594 aa, Arabidopsis thaliana
  peptide (1)..(594): Ceres Seq. ID no. 13646736
  misc_feature (3)..(594): Homolog of NCBI NO: 15233046 NR Description: glycosyltransferase family 8 [Arabidopsis
  misc_feature (65)..(594): Homolog of NCBI NO: 7271113 NR Description: 68 kDa protein [Cicer arietinum]
  misc_feature (73)..(594): Homolog of NCBI NO: 37533460 NR Description: hypothetical protein [Oryza sativa (japonica group)] >gi|20279459|gb|AAM18739.1| hypothetical protein [Oryza
  misc_feature (3)..(531): Homolog of NCBI NO: 14517362 NR Description: AT3g61130/T20K12_30 [Arabidopsis thaliana]
  misc_feature (129)..(593): Homolog of NCBI NO: 10177914 NR Description: emb|CAB71043.1~gene_id:MCA23.10~strong similarity
  misc_feature (129)..(593): Homolog of NCBI NO: 18422837 NR Description: glycosyltransferase family 8 [Arabidopsis >gi|15810327|gb|AAL07051.1| unknown protein [Arabidopsis >gi|20259235|gb|AAM14333.1| unknown protein [Arabidopsis
  misc_feature (81)..(593): Homolog of NCBI NO: 38423965 NR Description: putative glycosyltransferase [Oryza sativa
  misc_feature (65)..(441): Homolog of NCBI NO: 15227235 NR Description: glycosyltransferase family 8 [Arabidopsis
  misc_feature (464)..(594): Homolog of NCBI NO: 15227235 NR Description: glycosyltransferase family 8 [Arabidopsis
  misc_feature (130)..(593): Homolog of NCBI NO: 18399484 NR Description: glycosyltransferase family 8 [Arabidopsis >gi|14334692|gb|AAK59524.1| unknown protein [Arabidopsis >gi|16323394|gb|AAL15191.1| unknown protein [Arabidopsis
MGDLSPSWVLENPAYQVSRKTKGSQLVIPRDSFQNDTGMEDNASHSTTNQTDESENQFPNVDFASPAKLKRQILRQERRGQRTLELIRQEKETDEQMQEAAIQKSMSFENSVIGKYSIWRRDYESPNADAILKLMRDQIIMAKAYANIAKSKNVTNLYVFLMQQCGENKRVIGKATSDADLPSSALDQAKAMGHALSLAKDELYDCHELAKKFRAILQSTERKVDGLKKKGTFLIQLAAKTFPKPLHCLSLQLAADYFILGFNEEDAVKEDVSQKKLEDPSLYHYAIFSDNVLATSVVVNSTVLNAKEPQRHVFHIVTDKLNFGAMKMWFRINAPADATIQVENINDFKWLNSSYCSVLRQLESARLKEYYFKANHPSSISAGADNLKYRNPKYLSMLNHLRFYLPEVYPKLEKILFLDDDIVVQKDLAPLWEIDMQGKVNGAVETCKESFHRFDKYLNFSNPKISENFDAGACGWAFGMNMFDLKEWRKRNITGIYHYWQDLNEDRTLWKLGSLPPGLITFYNLTNAMERSWHVLGLGYDPALNQTAIENAAVVHYNGNYKPWLGLAFAKYKPYWSKYVEYDNPYLRRCDINE

SEQ ID NO: 107347 - protein, 556 aa, Arabidopsis thaliana; identical to SEQ ID NO: 45700
  peptide (1)..(556): Ceres Seq. ID no. 13646737
  misc_feature (1)..(556): Homolog of NCBI NO: 15233046 NR Description: glycosyltransferase family 8 [Arabidopsis
  misc_feature (27)..(556): Homolog of NCBI NO: 7271113 NR Description: 68 kDa protein [Cicer arietinum]
  misc_feature (35)..(556): Homolog of NCBI NO: 37533460 NR Description: hypothetical protein [Oryza sativa (japonica group)] >gi|20279459|gb|AAM18739.1| hypothetical protein [Oryza
  misc_feature (1)..(493): Homolog of NCBI NO: 14517362 NR Description: AT3g61130/T20K12_30 [Arabidopsis thaliana]
  misc_feature (91)..(555): Homolog of NCBI NO: 10177914 NR Description: emb|CAB71043.1~gene_id:MCA23.10~strong similarity
  misc_feature (91)..(555): Homolog of NCBI NO: 18422837 NR Description: glycosyltransferase family 8 [Arabidopsis >gi|15810327|gb|AAL07051.1| unknown protein [Arabidopsis >gi|20259235|gb|AAM14333.1| unknown protein [Arabidopsis
  misc_feature (43)..(555): Homolog of NCBI NO: 38423965 NR Description: putative glycosyltransferase [Oryza sativa
  misc_feature (27)..(403): Homolog of NCBI NO: 15227235 NR Description: glycosyltransferase family 8 [Arabidopsis
  misc_feature (426)..(556): Homolog of NCBI NO: 15227235 NR Description: glycosyltransferase family 8 [Arabidopsis
  misc_feature (92)..(555): Homolog of NCBI NO: 18399484 NR Description: glycosyltransferase family 8 [Arabidopsis >gi|14334692|gb|AAK59524.1| unknown protein [Arabidopsis >gi|16323394|gb|AAL15191.1| unknown protein [Arabidopsis

SEQ ID NO: 107348 - DNA, 1467 bp, Arabidopsis thaliana
  misc_feature (1)..(1467): Ceres Seq. ID no. 13646772
  misc_feature: MA Experiment ID: 20000315 Result: Down-regulated in Transcription
  misc_feature: MA Experiment 20000315 PARAMETER Experiment Name: At_14day_Shoots-Roots_Sub_P Parameter: Age (day) Value: 14
  misc_feature: MA Experiment 20000315 PARAMETER Experiment Name: At_14day_Shoots-Roots_Sub_P Parameter: Organism Value: A. thaliana
  misc_feature: MA Experiment 20000315 PARAMETER Experiment Name: At_14day_Shoots-Roots_Sub_P Parameter: Plant Line Value: WS
  misc_feature: MA Experiment 20000315 PARAMETER Experiment Name: At_14day_Shoots-Roots_Sub_P Parameter: Tissue Value: Shoots vs. Whole Plant
ggactgtccctgtggaagatataattttacatgtccgaattccggagaagaaaaagatgaagtgattgattaaattgaaatcgatcacatcaaccatctctttctctcgcctgcaaagttatctccttttcaaaccgaacgaatcaattcgggaatcttcatctttctacgtgttttctcagctatgtatctctgggttcgacttcagtaaaagcttcaccagccatggatttcgttaggggtttttggaggaagcatagaaggaaggtcttggtgacggctggttgtttgggaagtgggtatttactctacaaactatacaattcccatactcgtaggcttgctgatttggaacgagaactcgctcacgagcgtgaaaatgacgaaatcatcaaaacccaaatgaaagcacatttcgagagtattcagatgattgtggattcgaccacactgcctcacgcaatgcagtttttgagtatccgtatcagcgaggagatcgatgtctctcatgttatggacagactgaaccaagggaaaggaatgctgagtccacctgagaaacttcagctctgggatgagctcaagattttgagtttcacgaggatggttttgtctctgtggtctgtgacaatgcttagcttatacattagggttcaagtcaacattttaggcagacatttgtatgttgacaccgctcgagctcttggcagctctcatttacttgaagaggtagatctcattgatagagatgatgaacagaagtttttgtcgagtgctgattttcttgtcaccaatgcaatgccaagtttgatttcagatatgcagggttcagccgaggaagtccttaaaggaaagcagttaaaggatgtaattaccacaagagttcttcaagaaaccgtgatgcagattgtagatgtgtttatgagcactggaagcccacatcactgggttgattatttaatgatgcctcaagacacaaagctttcaagaaccacaagtgactcttctgatgaagctgtgtccaagtttcatcaactcatggttgagactcgagaagtactcatcagcactgaattcacaaatatagtcgaaatttcgctcaagtgcttcacggatgcgttggtagaggaaatggaaacgcagactgaagcaggcggtttggctacagggaaaccattggcaaaggtcttaccacagattgagaagacaatgaatgtgattacagctgaaccaagcaagaaccggttcttacaaatcatcagagatctgcctgaagttaaactcttttttactcttttatacgctaatatgccgcaatagcaacttttgtttgttctcttagaaattccccaaagtgttttgctatatgctttctttgtaggggggtcttttagcttgaaagaaatgcaggaattttcgtgttttgagcttgtagaaccaaagttgatttcatttatttgttttgat

SEQ ID NO: 107349 - protein, 364 aa, Arabidopsis thaliana; identical to SEQ ID NO: 45785
  peptide (1)..(364): Ceres Seq. ID no. 13646773
  misc_feature (11)..(62): Pfam Name: Peroxin-3 Pfam Description: Peroxin-3
  misc_feature (1)..(364): Homolog of NCBI NO: 22330115 NR Description: expressed protein [Arabidopsis thaliana] At1g48640/F11I4_17 [Arabidopsis thaliana]
  misc_feature (55)..(351): Homolog of NCBI NO: 12597815 NR Description: lysine and histidine specific transporter,
  misc_feature (10)..(62): Homolog of NCBI NO: 12597815 NR Description: lysine and histidine specific transporter,
  misc_feature (55)..(340): Homolog of NCBI NO: 12321594 NR Description: hypothetical protein, 3' partial [Arabidopsis
  misc_feature (10)..(62): Homolog of NCBI NO: 12321594 NR Description: hypothetical protein, 3' partial [Arabidopsis
  misc_feature (1)..(364): Homolog of NCBI NO: 18401790 NR Description: expressed protein [Arabidopsis thaliana]
  misc_feature (1)..(364): Homolog of NCBI NO: 21554142 NR Description: unknown [Arabidopsis thaliana]
  misc_feature (167)..(364): Homolog of NCBI NO: 9294071 NR Description: gene_id:MRC8.15~unknown protein [Arabidopsis
  misc_feature (7)..(359): Homolog of NCBI NO: 28278477 NR Description: Similar to peroxisomal biogenesis factor 3 [Danio
  misc_feature (4)..(359): Homolog of NCBI NO: 4505727 NR Description: peroxisomal biogenesis factor 3 [Homo sapiens]

SEQ ID NO: 107350 - protein, 305 aa, Arabidopsis thaliana; identical to SEQ ID NO: 45786
  peptide (1)..(305): Ceres Seq. ID no. 13646774
  misc_feature (1)..(292): Pfam Name: Peroxin-3 Pfam Description: Peroxin-3
  misc_feature (1)..(305): Homolog of NCBI NO: 22330115 NR Description: expressed protein [Arabidopsis thaliana] At1g48640/F11I4_17 [Arabidopsis thaliana]
  misc_feature (1)..(292): Homolog of NCBI NO: 12597815 NR Description: lysine and histidine specific transporter,
  misc_feature (1)..(281): Homolog of NCBI NO: 12321594 NR Description: hypothetical protein, 3' partial [Arabidopsis
  misc_feature (1)..(305): Homolog of NCBI NO: 18401790 NR Description: expressed protein [Arabidopsis thaliana]
  misc_feature (1)..(305): Homolog of NCBI NO: 21554142 NR Description: unknown [Arabidopsis thaliana]
  misc_feature (108)..(305): Homolog of NCBI NO: 9294071 NR Description: gene_id:MRC8.15~unknown protein [Arabidopsis
  misc_feature (1)..(300): Homolog of NCBI NO: 28278477 NR Description: Similar to peroxisomal biogenesis factor 3 [Danio
  misc_feature (1)..(300): Homolog of NCBI NO: 4505727 NR Description: peroxisomal biogenesis factor 3 [Homo sapiens]
  misc_feature (1)..(300): Homolog of NCBI NO: 12230450 NR Description: Peroxisomal assembly protein PEX3 (Peroxin-3)
  misc_feature (1)..(300): Homolog of NCBI NO: 9910484 NR Description: peroxisomal biogenesis factor 3; peroxisomal protein 3 [Mus musculus] >gi|9087165|sp|Q9QXY9|PEX3_MOUSE

SEQ ID NO: 107351 - protein, 296 aa, Arabidopsis thaliana; identical to SEQ ID NO: 45787
  peptide (1)..(296): Ceres Seq. ID no. 13646775
  misc_feature (1)..(283): Pfam Name: Peroxin-3 Pfam Description: Peroxin-3
  misc_feature (1)..(296): Homolog of NCBI NO: 22330115 NR Description: expressed protein [Arabidopsis thaliana] At1g48640/F11I4_17 [Arabidopsis thaliana]
  misc_feature (1)..(283): Homolog of NCBI NO: 12597815 NR Description: lysine and histidine specific transporter,
  misc_feature (1)..(272): Homolog of NCBI NO: 12321594 NR Description: hypothetical protein, 3' partial [Arabidopsis
  misc_feature (1)..(296): Homolog of NCBI NO: 18401790 NR Description: expressed protein [Arabidopsis thaliana]
  misc_feature (1)..(296): Homolog of NCBI NO: 21554142 NR Description: unknown [Arabidopsis thaliana]
  misc_feature (99)..(296): Homolog of NCBI NO: 9294071 NR Description: gene_id:MRC8.15~unknown protein [Arabidopsis
  misc_feature (1)..(291): Homolog of NCBI NO: 28278477 NR Description: Similar to peroxisomal biogenesis factor 3 [Danio
  misc_feature (1)..(291): Homolog of NCBI NO: 4505727 NR Description: peroxisomal biogenesis factor 3 [Homo sapiens]
  misc_feature (1)..(291): Homolog of NCBI NO: 12230450 NR Description: Peroxisomal assembly protein PEX3 (Peroxin-3)
  misc_feature (1)..(291): Homolog of NCBI NO: 9910484 NR Description: peroxisomal biogenesis factor 3; peroxisomal protein 3 [Mus musculus] >gi|9087165|sp|Q9QXY9|PEX3_MOUSE

SEQ ID NO: 107352 - DNA, 3006 bp, Arabidopsis thaliana
  misc_feature (1)..(3006): Ceres Seq. ID no. 13646785
  misc_feature: MA Experiment ID: 20000166 Result: Up-regulated in Transcription
  misc_feature: MA Experiment 20000166 PARAMETER Experiment Name: At_100uM_ABA_P Parameter: Age (day) Value: 14
  misc_feature: MA Experiment 20000166 PARAMETER Experiment Name: At_100uM_ABA_P Parameter: Organism Value: A. thaliana
  misc_feature: MA Experiment 20000166 PARAMETER Experiment Name: At_100uM_ABA_P Parameter: Plant Line Value: WS
  misc_feature: MA Experiment 20000166 PARAMETER Experiment Name: At_100uM_ABA_P Parameter: Timepoint (hr) Value: 1
  misc_feature: MA Experiment 20000166 PARAMETER Experiment Name: At_100uM_ABA_P Parameter: Tissue Value: Aerial
  misc_feature: MA Experiment 20000166 PARAMETER Experiment Name: At_100uM_ABA_P Parameter: Treatment Value: 100uM ABA vs. No Treatment
  misc_feature: MA Experiment ID: 20000214 Result: Down-regulated in Transcription
  misc_feature: MA Experiment 20000214 PARAMETER Experiment Name: At_4deg_Cold_P Parameter: Timepoint (hr) Value: 6
  misc_feature: MA Experiment ID: 20000436 Result: Up-regulated in Transcription
  misc_feature: MA Experiment 20000436 PARAMETER Experiment Name: At_Drought_P Parameter: Age (day) Value: 7
  misc_feature: MA Experiment 20000436 PARAMETER Experiment Name: At_Drought_P Parameter: Organism Value: A. thaliana
  misc_feature: MA Experiment 20000436 PARAMETER Experiment Name: At_Drought_P Parameter: Plant Line Value: WS
  misc_feature: MA Experiment 20000436 PARAMETER Experiment Name: At_Drought_P Parameter: Timepoint (hr) Value: 12
  misc_feature: MA Experiment 20000436 PARAMETER Experiment Name: At_Drought_P Parameter: Tissue Value: Whole Plant
  misc_feature: MA Experiment 20000436 PARAMETER Experiment Name: At_Drought_P Parameter: Treatment Value: Drought vs. No Drought
  misc_feature: MA Experiment ID: 20000437 Result: Up-regulated in Transcription
  misc_feature: MA Experiment 20000437 PARAMETER Experiment Name: At_Drought_P Parameter: Age (day) Value: 8
  misc_feature: MA Experiment 20000437 PARAMETER Experiment Name: At_Drought_P Parameter: Organism Value: A. thaliana
  misc_feature: MA Experiment 20000437 PARAMETER Experiment Name: At_Drought_P Parameter: Plant Line Value: WS
  misc_feature: MA Experiment 20000437 PARAMETER Experiment Name: At_Drought_P Parameter: Timepoint (hr) Value: 24
  misc_feature: MA Experiment 20000437 PARAMETER Experiment Name: At_Drought_P Parameter: Tissue Value: Whole Plant
  misc_feature: MA Experiment 20000437 PARAMETER Experiment Name: At_Drought_P Parameter: Treatment Value: Drought vs. No Drought
  misc_feature: MA Experiment ID: 20001247 Result: Up-regulated in Transcription
  misc_feature: MA Experiment 20001247 PARAMETER Experiment Name: At_Far-red-induction_P Parameter: Age (day) Value: 7
  misc_feature: MA Experiment 20001247 PARAMETER Experiment Name: At_Far-red-induction_P Parameter: Light Value: Far-red vs. White
  misc_feature: MA Experiment 20001247 PARAMETER Experiment Name: At_Far-red-induction_P Parameter: Organism Value: A. thaliana
  misc_feature: MA Experiment 20001247 PARAMETER Experiment Name: At_Far-red-induction_P Parameter: Plant Line Value: Columbia
  misc_feature: MA Experiment 20001247 PARAMETER Experiment Name: At_Far-red-induction_P Parameter: Timepoint (hr) Value: 1
  misc_feature: MA Experiment 20001247 PARAMETER Experiment Name: At_Far-red-induction_P Parameter: Tissue Value: Whole Plant
  misc_feature: MA Experiment ID: 20001248 Result: Up-regulated in Transcription
  misc_feature: MA Experiment 20001248 PARAMETER Experiment Name: At_Far-red-induction_P Parameter: Age (day) Value: 7
  misc_feature: MA Experiment 20001248 PARAMETER Experiment Name: At_Far-red-induction_P Parameter: Light Value: Far-red vs. White
  misc_feature: MA Experiment 20001248 PARAMETER Experiment Name: At_Far-red-induction_P Parameter: Organism Value: A. thaliana
  misc_feature: MA Experiment 20001248 PARAMETER Experiment Name: At_Far-red-induction_P Parameter: Plant Line Value: Columbia
  misc_feature: MA Experiment 20001248 PARAMETER Experiment Name: At_Far-red-induction_P Parameter: Timepoint (hr) Value: 4
  misc_feature: MA Experiment 20001248 PARAMETER Experiment Name: At_Far-red-induction_P Parameter: Tissue Value: Whole Plant
  misc_feature: MA Experiment ID: 20001450 Result: Up-regulated in Transcription
  misc_feature: MA Experiment 20001450 PARAMETER Experiment Name: At_Far-red-induction_P Parameter: Age (day) Value: 7
  misc_feature: MA Experiment 20001450 PARAMETER Experiment Name: At_Far-red-induction_P Parameter: Light Value: Far-red vs. White
  misc_feature: MA Experiment 20001450 PARAMETER Experiment Name: At_Far-red-induction_P Parameter: Organism Value: A. thaliana
  misc_feature: MA Experiment 20001450 PARAMETER Experiment Name: At_Far-red-induction_P Parameter: Plant Line Value: Columbia
  misc_feature: MA Experiment 20001450 PARAMETER Experiment Name: At_Far-red-induction_P Parameter: Timepoint (hr) Value: 8
  misc_feature: MA Experiment 20001450 PARAMETER Experiment Name: At_Far-red-induction_P Parameter: Tissue Value: Whole Plant
  misc_feature: MA Experiment ID: 20001451 Result: Up-regulated in Transcription
  misc_feature: MA Experiment 20001451 PARAMETER Experiment Name: At_Far-red-induction_P Parameter: Age (day) Value: 7
  misc_feature: MA Experiment 20001451 PARAMETER Experiment Name: At_Far-red-induction_P Parameter: Light Value: Far-red vs. White
  misc_feature: MA Experiment 20001451 PARAMETER Experiment Name: At_Far-red-induction_P Parameter: Organism Value: A. thaliana
  misc_feature: MA Experiment 20001451 PARAMETER Experiment Name: At_Far-red-induction_P Parameter: Plant Line Value: Columbia
  misc_feature: MA Experiment 20001451 PARAMETER Experiment Name: At_Far-red-induction_P Parameter: Timepoint (hr) Value: 24
  misc_feature: MA Experiment 20001451 PARAMETER Experiment Name: At_Far-red-induction_P Parameter: Tissue Value: Whole Plant
  misc_feature: MA Experiment ID: 20001757 Result: Down-regulated in Transcription
  misc_feature: MA Experiment 20001757 PARAMETER Experiment Name: At_50mM_NH4NO3_L-to-H_P Parameter: Timepoint (hr) Value: 6
  misc_feature: MA Experiment 20001757 PARAMETER Experiment Name: At_50mM_NH4NO3_L-to-H_P Parameter: Tissue Value: Leaf
  misc_feature: MA Experiment 20001757 PARAMETER Experiment Name: At_50mM_NH4NO3_L-to-H_P Parameter: Treatment Value: 50mM NH4NO3 vs 100mM Mannitol
agctcactagtcccccccccccgacttttgaagctgtaataatattcttgaatctattcctttctttctctttctcatgtttaatcggtgaaggctttactctgtttctttcatcatgtttcaatcaaaagccttaactttttctttagctctttccattacaagagacctctagcttcatactttttataaaaattctctctttttctcagtttaatctcaagaaatggtttcaagatcgtattcaaatctgttggagttagcttcaggagactcaccaacgtttggacgcatgaaccgacaaatcccacgaatcatggccgttgctggaatcatgtcaaacatcgataatgactctaaagacactgatctgtctcctaaagatcgtatcatcattgtagccaatgaattacctatacgagctcagagaagggttgatggtaatggtagtggtagtagtagtagtagtacttgttgtagcaaaggttggaacttttcttgggatgagaattcacttcttctccaattgaaagatgggttaggagatgaagctattgaagttatctatgttggttgtttgaaagaagagattcctcttaatgagcaagaagaagtgtatcagattcttcttgagagtttcaagtgtgtgcctacgtttttgcctttggatttgtacactagatactaccatggattctgtaagcaacagctttggcctttgtttcattacatgttgccactttctcctgatcttggaggtaggtttgataggactttgtggcaagcttatgtctctgtgaacaagatttttgctgatagaattatggaggtgattaatcctgaggatgattttgtgtggatacatgattatcatttgatggttttgcctactttcttgaggaagaggtttaacagagtcaagcttggtttcttccttcatagtccatttccatcgtctgagatttacaaaactttgcctattcgtgaagagcttcttcgggctttgctaaactcggatttgatagggttccatacttttgactacgctaggcatttcttgtcttgttgtagtcgaatgcttggtcttacttatgaatctaagagaggatacattggacttgagtattatggtagaaccgtgagtatcaaaattctacctgttggaatccacatgggtcagcttcagtcggttttgagcttacccgagactgaaaggaaagtcggggaacttattgaacggtatggtcgaaaaggcaggacgatgctgcttggtgtggatgatatggacattttcaaagggattactttaaagctgttggctatggagcagctgcttatgcaacatcctgaatggcaagggaaggttgtgttggtgcagatagctaatccggcgagagggaaagggaaagatgttaaagagatgcaagctgagacgtattcaactgttaagcggattaatgaaacgtttgggagacccggttacgatcctatagtattgatcgatgcaccgttgaagttctatgaaagggttgcttattacgtagtagctgagtgttgtttggtgacagcggttagggatgggatgaatcttataccttatgagtacatagtttctcgtcaaggaaatgagaaactggacaaaattctgaagctggaggcgaataatcgtaacaagaaaagcatgctggtggtttctgagtttattggttgctctccatcgctaagcggagccattcgtgttaatccatggaatgttgatgcagtagctgatgcaatggatagtgcccttgaagtagctgaaccggagaagcagctaagacatgagaagcattacaagtatgtgagcacacatgatgttggctattgggctcgtagcttcctccaagatcttgagaggagttgtggtgagcatggacgaaggaggtgttggggaattgggtttggtctcagtttcagagttgtggcactagaccagagcttcaggaagctgtcaatggaacacatagtatcagcttataagaggacaaagacacgggctatccttttagactatgatgatactttaatgccacaaggctcgatcgataaaaggccttcatcgaagtcaatcgacatattgaacaccttgtgtagggacaagggcaatctggtgttcattgttagtgctaaaagccgagaaactctatcggactggtttagtccttgtgagaagcttggtattgctgctgaacatggctattttctgaggtattcaaccaaaactttttattttctagcattacctttatatcttataactcaagctccatctaactactacacaggctaaggaaggcagtagagtgggaaaactgtgtggcagcagtagattgttcttggaagcaaattgccgagcctgtgatggaactctacaccgagacaaccgatggctcaacaattgaagacaaggagactgctcttgtttggagttatgaggatgctgaccctgattttggctcatgtcaagctaaggaacttctagatcatcttgaaagtgtccttgccaatgaacctgtaacagtgaaacgaggacagaactatgttgaggtcaagccacagggcgtgagcaagggacttatagcgagaaggatgctttcgatgatgcaagaaagaggaacacttcctgagtttgttctatgtattggagatgaccggtctgacgaagacatgtttgaggtgatctgcagttccactgaaggcccttcgattgccccaagagctgagattttcgcttgtactgtcggtcaaaagcctagcaaggccaagtattacctggatgacactactgagattgtcaggttaatgcatggtttagcttctgttacagaccagatcactcctgtttaaacaatcacagagaaagtatcagagactagagatcttatgtttgtatatctaccacggaaaattgtaacaaagagagatcttatgtttgttgacaatcttagaatatatgagtaaggcttt

SEQ ID NO: 107353 - protein, 700 aa, Arabidopsis thaliana
  peptide (1)..(700): Ceres Seq. ID no. 13646786
  misc_feature (53)..(557): Pfam Name: Glycosyltransferase family 20 Pfam Description: Glycosyltransferase family 20
  misc_feature (1)..(678): Homolog of NCBI NO: 15220891 NR Description: trehalose phosphatase family [Arabidopsis >gi|9369388|gb|AAF87136.1|AC002423_1 T23E23.3 [Arabidopsis
  misc_feature (1)..(676): Homolog of NCBI NO: 15221478 NR Description: trehalose phosphatase family [Arabidopsis
  misc_feature (1)..(675): Homolog of NCBI NO: 19568935 NR Description: putative trehalose synthase [Solanum tuberosum]
  misc_feature (1)..(678): Homolog of NCBI NO: 30698024 NR Description: alpha,alpha-trehalose-phosphate synthase,
  misc_feature (31)..(678): Homolog of NCBI NO: 7488401 NR Description: trehalose-6-phosphate synthase homolog F17O7.18 -
  misc_feature (1)..(676): Homolog of NCBI NO: 15219002 NR Description: trehalose phosphatase family [Arabidopsis
  misc_feature (1)..(488): Homolog of NCBI NO: 7488400 NR Description: trehalose-6-phosphate synthase homolog DL4920W -
  misc_feature (296)..(674): Homolog of NCBI NO: 7488400 NR Description: trehalose-6-phosphate synthase homolog DL4920W -
  misc_feature (52)..(468): Homolog of NCBI NO: 15219969 NR Description: alpha,alpha-trehalose-phosphate synthase,
  misc_feature (11)..(468): Homolog of NCBI NO: 15218422 NR Description: alpha,alpha-trehalose-phosphate synthase,
MVSRSYSNLLELASGDSPTFGRMNRQIPRIMAVAGIMSNIDNDSKDTDLSPKDRIIIVANELPIRAQRRVDGNGSGSSSSSTCCSKGWNFSWDENSLLLQLKDGLGDEAIEVIYVGCLKEEIPLNEQEEVYQILLESFKCVPTFLPLDLYTRYYHGFCKQQLWPLFHYMLPLSPDLGGRFDRTLWQAYVSVNKIFADRIMEVINPEDDFVWIHDYHLMVLPTFLRKRFNRVKLGFFLHSPFPSSEIYKTLPIREELLRALLNSDLIGFHTFDYARHFLSCCSRMLGLTYESKRGYIGLEYYGRTVSIKILPVGIHMGQLQSVLSLPETERKVGELIERYGRKGRTMLLGVDDMDIFKGITLKLLAMEQLLMQHPEWQGKVVLVQIANPARGKGKDVKEMQAETYSTVKRINETFGRPGYDPIVLIDAPLKFYERVAYYVVAECCLVTAVRDGMNLIPYEYIVSRQGNEKLDKILKLEANNRNKKSMLVVSEFIGCSPSLSGAIRVNPWNVDAVADAMDSALEVAEPEKQLRHEKHYKYVSTHDVGYWARSFLQDLERSCGEHGRRRCWGIGFGLSFRVVALDQSFRKLSMEHIVSAYKRTKTRAILLDYDDTLMPQGSIDKRPSSKSIDILNTLCRDKGNLVFIVSAKSRETLSDWFSPCEKLGIAAEHGYFLRYSTKTFYFLALPLYLITQAPSNYYTG

SEQ ID NO: 107354 - protein, 678 aa, Arabidopsis thaliana
  peptide (1)..(678): Ceres Seq. ID no. 13646787
  misc_feature (31)..(535): Pfam Name: Glycosyltransferase family 20 Pfam Description: Glycosyltransferase family 20
  misc_feature (1)..(656): Homolog of NCBI NO: 15220891 NR Description: trehalose phosphatase family [Arabidopsis >gi|9369388|gb|AAF87136.1|AC002423_1 T23E23.3 [Arabidopsis
  misc_feature (1)..(654): Homolog of NCBI NO: 15221478 NR Description: trehalose phosphatase family [Arabidopsis
  misc_feature (1)..(653): Homolog of NCBI NO: 19568935 NR Description: putative trehalose synthase [Solanum tuberosum]
  misc_feature (1)..(656): Homolog of NCBI NO: 30698024 NR Description: alpha,alpha-trehalose-phosphate synthase,
  misc_feature (9)..(656): Homolog of NCBI NO: 7488401 NR Description: trehalose-6-phosphate synthase homolog F17O7.18 -
  misc_feature (1)..(654): Homolog of NCBI NO: 15219002 NR Description: trehalose phosphatase family [Arabidopsis
  misc_feature (1)..(466): Homolog of NCBI NO: 7488400 NR Description: trehalose-6-phosphate synthase homolog DL4920W -
  misc_feature (274)..(652): Homolog of NCBI NO: 7488400 NR Description: trehalose-6-phosphate synthase homolog DL4920W -
  misc_feature (30)..(446): Homolog of NCBI NO: 15219969 NR Description: alpha,alpha-trehalose-phosphate synthase,
  misc_feature (1)..(446): Homolog of NCBI NO: 15218422 NR Description: alpha,alpha-trehalose-phosphate synthase,
MNRQIPRIMAVAGIMSNIDNDSKDTDLSPKDRIIIVANELPIRAQRRVDGNGSGSSSSSTCCSKGWNFSWDENSLLLQLKDGLGDEAIEVIYVGCLKEEIPLNEQEEVYQILLESFKCVPTFLPLDLYTRYYHGFCKQQLWPLFHYMLPLSPDLGGRFDRTLWQAYVSVNKIFADRIMEVINPEDDFVWIHDYHLMVLPTFLRKRFNRVKLGFFLHSPFPSSEIYKTLPIREELLRALLNSDLIGFHTFDYARHFLSCCSRMLGLTYESKRGYIGLEYYGRTVSIKILPVGIHMGQLQSVLSLPETERKVGELIERYGRKGRTMLLGVDDMDIFKGITLKLLAMEQLLMQHPEWQGKVVLVQIANPARGKGKDVKEMQAETYSTVKRINETFGRPGYDPIVLIDAPLKFYERVAYYVVAECCLVTAVRDGMNLIPYEYIVSRQGNEKLDKILKLEANNRNKKSMLVVSEFIGCSPSLSGAIRVNPWNVDAVADAMDSALEVAEPEKQLRHEKHYKYVSTHDVGYWARSFLQDLERSCGEHGRRRCWGIGFGLSFRVVALDQSFRKLSMEHIVSAYKRTKTRAILLDYDDTLMPQGSIDKRPSSKSIDILNTLCRDKGNLVFIVSAKSRETLSDWFSPCEKLGIAAEHGYFLRYSTKTFYFLALPLYLITQAPSNYYTG

SEQ ID NO: 107355 - protein, 670 aa, Arabidopsis thaliana
  peptide (1)..(670): Ceres Seq. ID no. 13646788
  misc_feature (23)..(527): Pfam Name: Glycosyltransferase family 20 Pfam Description: Glycosyltransferase family 20
  misc_feature (1)..(648): Homolog of NCBI NO: 15220891 NR Description: trehalose phosphatase family [Arabidopsis >gi|9369388|gb|AAF87136.1|AC002423_1 T23E23.3 [Arabidopsis
  misc_feature (1)..(646): Homolog of NCBI NO: 15221478 NR Description: trehalose phosphatase family [Arabidopsis
  misc_feature (1)..(645): Homolog of NCBI NO: 19568935 NR Description: putative trehalose synthase [Solanum tuberosum]
  misc_feature (1)..(648): Homolog of NCBI NO: 30698024 NR Description: alpha,alpha-trehalose-phosphate synthase,
  misc_feature (1)..(648): Homolog of NCBI NO: 7488401 NR Description: trehalose-6-phosphate synthase homolog F17O7.18 -
  misc_feature (1)..(646): Homolog of NCBI NO: 15219002 NR Description: trehalose phosphatase family [Arabidopsis
  misc_feature (1)..(458): Homolog of NCBI NO: 7488400 NR Description: trehalose-6-phosphate synthase homolog DL4920W -
  misc_feature (266)..(644): Homolog of NCBI NO: 7488400 NR Description: trehalose-6-phosphate synthase homolog DL4920W -
  misc_feature (22)..(438): Homolog of NCBI NO: 15219969 NR Description: alpha,alpha-trehalose-phosphate synthase,
  misc_feature (1)..(438): Homolog of NCBI NO: 15218422 NR Description: alpha,alpha-trehalose-phosphate synthase,
MAVAGIMSNIDNDSKDTDLSPKDRIIIVANELPIRAQRRVDGNGSGSSSSSTCCSKGWNFSWDENSLLLQLKDGLGDEAIEVIYVGCLKEEIPLNEQEEVYQILLESFKCVPTFLPLDLYTRYYHGFCKQQLWPLFHYMLPLSPDLGGRFDRTLWQAYVSVNKIFADRIMEVINPEDDFVWIHDYHLMVLPTFLRKRFNRVKLGFFLHSPFPSSEIYKTLPIREELLRALLNSDLIGFHTFDYARHFLSCCSRMLGLTYESKRGYIGLEYYGRTVSIKILPVGIHMGQLQSVLSLPETERKVGELIERYGRKGRTMLLGVDDMDIFKGITLKLLAMEQLLMQHPEWQGKVVLVQIANPARGKGKDVKEMQAETYSTVKRINETFGRPGYDPIVLIDAPLKFYERVAYYVVAECCLVTAVRDGMNLIPYEYIVSRQGNEKLDKILKLEANNRNKKSMLVVSEFIGCSPSLSGAIRVNPWNVDAVADAMDSALEVAEPEKQLRHEKHYKYVSTHDVGYWARSFLQDLERSCGEHGRRRCWGIGFGLSFRVVALDQSFRKLSMEHIVSAYKRTKTRAILLDYDDTLMPQGSIDKRPSSKSIDILNTLCRDKGNLVFIVSAKSRETLSDWFSPCEKLGIAAEHGYFLRYSTKTFYFLALPLYLITQAPSNYYTG

SEQ ID NO: 107356 - DNA, 2458 bp, Arabidopsis thaliana
  misc_feature (1)..(2458): Ceres Seq. ID no. 13646820
  misc_feature: MA Experiment ID: 20000438 Result: Up-regulated in Transcription
  misc_feature: MA Experiment 20000438 PARAMETER Experiment Name: At_Shoots__P Parameter: Age (day) Value: 14
  misc_feature: MA Experiment 20000438 PARAMETER Experiment Name: At_Shoots__P Parameter: Tissue Value: Shoots vs. Whole Plant
  misc_feature: MA Experiment ID: 20000794 Result: Up-regulated in Transcription
  misc_feature: MA Experiment 20000794 PARAMETER Experiment Name: At_Petals_P Parameter: Age (day) Value: 23-25 days
  misc_feature: MA Experiment 20000794 PARAMETER Experiment Name: At_Petals_P Parameter: Plant Line Value: WS
  misc_feature: MA Experiment 20000794 PARAMETER Experiment Name: At_Petals_P Parameter: Tissue Value: Petals vs. Whole plant
  misc_feature: MA Experiment ID: 20001248 Result: Down-regulated in Transcription
  misc_feature: MA Experiment 20001248 PARAMETER Experiment Name: At_Far-red-induction_P Parameter: Age (day) Value: 7
  misc_feature: MA Experiment 20001248 PARAMETER Experiment Name: At_Far-red-induction_P Parameter: Light Value: Far-red vs. White
  misc_feature: MA Experiment 20001248 PARAMETER Experiment Name: At_Far-red-induction_P Parameter: Organism Value: A. thaliana
  misc_feature: MA Experiment 20001248 PARAMETER Experiment Name: At_Far-red-induction_P Parameter: Plant Line Value: Columbia
  misc_feature: MA Experiment 20001248 PARAMETER Experiment Name: At_Far-red-induction_P Parameter: Timepoint (hr) Value: 4
  misc_feature: MA Experiment 20001248 PARAMETER Experiment Name: At_Far-red-induction_P Parameter: Tissue Value: Whole Plant
gaagtaagtaaccaaaaacgcttctaatctttcgtttacaacaaatatctctctctctctcgctctctctttcttcttcttcatcttctttcatggctgttactggctgggcaatcacaatctgaattctttcttcctccttgtctctctgattttcgccgagttttgggggctcttgttggtacacgatgagtctggtggttggtcagtctctgggtttaactctagtcggtgatggtctttcgttacgcaattccaaaataaatgtcggaaaatcaaagtttttctcggtaaatcggaggagattggcgcgtgcggccctggtacaagctaggcctaaggaagacggagcggcggcaagtccttccccatcgtcgagaccggcgtcagttgtgcagtaccgacgagctgatctcgcggatgatcttcaagccgaggcacgagctttgggtcgtgctattgatgcttctatttactctccggagctcatcgccaggaaacatggctctcagcctttcaaggctttgcggagaagtttggagatattgggagctttgggtggtttcgctttgaaattggggattgaccagaagcagggcaacttagagaagaacatgaagaagagagcaatcgagctccggcggatcttcactcgtctcggacctacttttgttaaattgggtcaaggtttgtccacccgacccgacctctgtccacccgattaccttgaagaacttgcagagcttcaggatgctttgccaaccttccctgatgcagaggcatttgcttgcattgagagagagttggatttgtcgctagagaccattttctcgtctgtatctcctgagccaatcgcagcagctagtcttggccaggtttacaaagctcagctgaggtattcaggtcaggttgttgctgtcaaagttcaacgccctgggatcgaagaagccattggccttgatttttaccttattagaggagttgggaaactcattaacaagtatgtagacttcatcactaccgatgtccttacccttatcgatgagttcgcctgcagagtttatcaggagctaaactatgtccaggaggcccaaaatgccagaaggtttaaaaaattgtatgcagataaagcagatgttcttgtgcctgatatattctgggattacacgagccgcaaggtgctaacaatggaatgggttgagggaactaaactgaatgagcaacttgccattgagagtcagggattgaaggttctggatctcgtgaatacaggaatccagtgtagcctaaggcaactcttggagtatggctttttccatgctgaccctcatcctggtaatctcttggcaacacctgatggaaaacttgcctttctagactttggcatgatgagtgagacaccagaggaagctagatttgctatcataggccatgttgtccatttagtgaaccgagattatgaagccatggcacgagattactatgctctgaagttcttgtcccctgatgtggatgttactcctatcataccagctctcagagacttctttgacgatgcacttaattataccgtgagcgagctcaatttcaaaactttggttgatggtctaggtgctgtcttctaccagtatccatttaatgtcccgccctactatgctttgattttgaggtcgcttactgtgcttgaaggtttggcactctacgcagatcctaatttcaaagtactagctgcttcatacccatattttgccaaaaggcttctcactgatccaaacccgtatctaagagatgcccttatcgagctactattcaaagacggaaaatttaggtggaatagactcgagaaccttctacaacagggaagtaaagatagagacttctcagcaaaggatgctctacaaccagttttgaagcttttgctggatccaaatggcgaagaacttcgattgttagtaattaaagaagctgtacgagtcagtgaagcaattgcgctgggcactgttgttgatacatacaattcccttcctgagtttctgagatctcttgtcttcaatggaaatgggaatggccctcttacaatgagtaccgcggaacttcaaagtacgcttgagcttcgggatcaggtctccagaatctggggccttcttcaatcttcagaaagctttgatcctgctattttgcaaccaatactacaggtgttacaacaaccagaggcacgaagacttggaggacgtgttgcaggcggtgtaggccaacgtcttgcagctcggtttctgcaacaacttcttcgagccacaacaccatcttctgcaccatcccaataggtcctcttttcttctcagtgaaatggtaaattgtatattaaggcgagacactcgcaaaccacagaattgtttcatgttacagtaatatagtatcattctttctctttgtatgtactagtgaaaaaggaccaaag

SEQ ID NO: 107357 - protein, 711 aa, Arabidopsis thaliana; identical to SEQ ID NO: 45709
  peptide (1)..(711): Ceres Seq. ID no. 13646821
  misc_feature (204)..(323): Pfam Name: ABC1 family Pfam Description: ABC1 family
  misc_feature (143)..(710): Homolog of NCBI NO: 14532490 NR Description: At1g79600/F20B17_3 [Arabidopsis thaliana]
  misc_feature (51)..(700): Homolog of NCBI NO: 23042448 NR Description: hypothetical protein [Trichodesmium erythraeum
  misc_feature (95)..(708): Homolog of NCBI NO: 17232452 NR Description: hypothetical protein [Nostoc sp. PCC 7120]
  misc_feature (96)..(702): Homolog of NCBI NO: 22298493 NR Description: ORF_ID:tll0950~hypothetical protein
  misc_feature (96)..(710): Homolog of NCBI NO: 16331408 NR Description: ABC1-like [Synechocystis sp. PCC 6803]
  misc_feature (96)..(597): Homolog of NCBI NO: 37522693 NR Description: hypothetical protein glr3124 [Gloeobacter
  misc_feature (87)..(697): Homolog of NCBI NO: 33867054 NR Description: possible protein kinase: ABC1 family sp. WH 8102] >gi|33639655|emb|CAE09039.1| possible protein
  misc_feature (87)..(697): Homolog of NCBI NO: 33864536 NR Description: possible protein kinase:ABC1 family marinus str. MIT 9313] >gi|33641316|emb|CAE22446.1| possible
  misc_feature (96)..(697): Homolog of NCBI NO: 33862270 NR Description: possible protein kinase:ABC1 family marinus subsp. pastoris str. CCMP1378] possible protein kinase:ABC1 family [Prochlorococcus marinus
  misc_feature (87)..(697): Homolog of NCBI NO: 33241332 NR Description: Predicted protein kinase [Prochlorococcus marinus marinus str. CCMP1375] >gi|33238862|gb|AAQ00927.1| Predicted

SEQ ID NO: 107358 - protein, 569 aa, Arabidopsis thaliana; identical to SEQ ID NO: 45710
  peptide (1)..(569): Ceres Seq. ID no. 13646822
  misc_feature (62)..(181): Pfam Name: ABC1 family Pfam Description: ABC1 family
  misc_feature (1)..(568): Homolog of NCBI NO: 14532490 NR Description: At1g79600/F20B17_3 [Arabidopsis thaliana]
  misc_feature (1)..(558): Homolog of NCBI NO: 23042448 NR Description: hypothetical protein [Trichodesmium erythraeum
  misc_feature (1)..(566): Homolog of NCBI NO: 17232452 NR Description: hypothetical protein [Nostoc sp. PCC 7120]
  misc_feature (1)..(560): Homolog of NCBI NO: 22298493 NR Description: ORF_ID:tll0950~hypothetical protein
  misc_feature (1)..(568): Homolog of NCBI NO: 16331408 NR Description: ABC1-like [Synechocystis sp. PCC 6803]
  misc_feature (1)..(455): Homolog of NCBI NO: 37522693 NR Description: hypothetical protein glr3124 [Gloeobacter
  misc_feature (1)..(555): Homolog of NCBI NO: 33867054 NR Description: possible protein kinase: ABC1 family sp. WH 8102] >gi|33639655|emb|CAE09039.1| possible protein
  misc_feature (1)..(555): Homolog of NCBI NO: 33864536 NR Description: possible protein kinase:ABC1 family marinus str. MIT 9313] >gi|33641316|emb|CAE22446.1| possible
  misc_feature (1)..(555): Homolog of NCBI NO: 33862270 NR Description: possible protein kinase:ABC1 family marinus subsp. pastoris str. CCMP1378] possible protein kinase:ABC1 family [Prochlorococcus marinus
  misc_feature (1)..(555): Homolog of NCBI NO: 33241332 NR Description: Predicted protein kinase [Prochlorococcus marinus marinus str. CCMP1375] >gi|33238862|gb|AAQ00927.1| Predicted

SEQ ID NO: 107359 - protein, 378 aa, Arabidopsis thaliana; identical to SEQ ID NO: 45711
  peptide (1)..(378): Ceres Seq. ID no. 13646823
  misc_feature (1)..(67): Pfam Name: Protein kinase domain Pfam Description: Protein kinase domain
  misc_feature (1)..(377): Homolog of NCBI NO: 14532490 NR Description: At1g79600/F20B17_3 [Arabidopsis thaliana]
  misc_feature (1)..(367): Homolog of NCBI NO: 23042448 NR Description: hypothetical protein [Trichodesmium erythraeum
  misc_feature (1)..(375): Homolog of NCBI NO: 17232452 NR Description: hypothetical protein [Nostoc sp. PCC 7120]
  misc_feature (1)..(369): Homolog of NCBI NO: 22298493 NR Description: ORF_ID:tll0950~hypothetical protein
  misc_feature (1)..(377): Homolog of NCBI NO: 16331408 NR Description: ABC1-like [Synechocystis sp. PCC 6803]
  misc_feature (1)..(264): Homolog of NCBI NO: 37522693 NR Description: hypothetical protein glr3124 [Gloeobacter
  misc_feature (1)..(364): Homolog of NCBI NO: 33867054 NR Description: possible protein kinase: ABC1 family sp. WH 8102] >gi|33639655|emb|CAE09039.1| possible protein
  misc_feature (1)..(364): Homolog of NCBI NO: 33864536 NR Description: possible protein kinase:ABC1 family marinus str. MIT 9313] >gi|33641316|emb|CAE22446.1| possible
  misc_feature (1)..(364): Homolog of NCBI NO: 33862270 NR Description: possible protein kinase:ABC1 family marinus subsp. pastoris str. CCMP1378] possible protein kinase:ABC1 family [Prochlorococcus marinus
  misc_feature (1)..(364): Homolog of NCBI NO: 33241332 NR Description: Predicted protein kinase [Prochlorococcus marinus marinus str. CCMP1375] >gi|33238862|gb|AAQ00927.1| Predicted

SEQ ID NO: 107360 - DNA, 2335 bp, Arabidopsis thaliana
  misc_feature (1)..(2335): Ceres Seq. ID no. 13646852
  misc_feature: MA Experiment ID: 20000440 Result: Up-regulated in Transcription
  misc_feature: MA Experiment 20000440 PARAMETER Experiment Name: At_Closed-Flower__Sub_P Parameter: Tissue Value: Closed Flower vs. Whole Plant
atctcctttctctttcaatgtccgttggtaaaagacgaaagtttcagacataacatctcttcccatctctctcccctctaagcaattaagcagacaagacactgatgatatgagacgaagagaaagaagtcttatcactcatcctttcctcttatgaatctctccgccgaccaagctcccgtcaccgccgtcgacgaactagctccgccttctcaaccgcatcgcttatctacatcatgtgatctccacccagaagagcgtttctccggtttctgtccttcttgtctttgcgaccgcctctccgtcttagatcacaacgccgctccgccaccgtcttcttcttcccggaaacctccctctatctccgctgtttcgttaaaagctctcttcaagccctcctctagtggtaccaacaactccaacggaaacggtcgggtcagacccggtttcttcccggagctccgacgtacaaagtccttttccgcaaagaacaacgaaggattttccggtgggtttgagccacagcgtcggtcttgtgacgtcagacttcgtgacgacgaaagaaaccttcccatcaatgaagctgcctccgtcgataaaatcgaggaggaggctagggagtctagcgtgagtgagatagttttagaggtgactgaagaagctgaaattgaggaggatgaagaaaacggtgagaacgatcccggcgagatagttgaggaaaaaagcagcgaaattggtgaggaagaagaggaattgaagccaatgaaggattacatggatctctactcacaaacaaagaaaccgtcggtgaaagatttcgccgggagtttcttttcggcggcctctgttttcagcaagaagcttcagaaatggaagcagaagcagaaggtgaagaagccgagaaacggtgtcggcggaggacggccacagtctgaaatcggagtaggccggagatcaagcgacaccgacccgagattctctcttgacgccgggagattctccgtcgatataggtcggatttcaatggacgattctcgctactcattagatgagccaagagcgtcgtgggatggacacttaatcggcaggacaacggcggctagggttcctctgccgccatcgatgttatcagttgtggaaaatgctccgttgaatcgatcagacatgcagattccatcgtctccgtcaattaaaccgattagcggtgactccgacccgattatcataatcccaggcggatccaatcaaactcgagactactacactggacctccgtcgtcacggagacggaagagcctcgacagatccaattctattagaaaaattgtaacggagctagaggatgtcaaatcggtatcaaattcgacaacaacaatagactcaaattccatggaaacagcggagaacaaagggaatcaaaacggcgataagaaatcgagacggtggggaaaatggagcattttagggtttatatacagaaaaggtaaggacgatgaagaagaagataggtacagcagatccaacagcgccggaatggttgagaggtctttatcggaatcatggccggagatgaggaatggagaaggaggaggaccgaagatgaggaggagtaacagcaatgtgagctggcgaagctccggtggaggatcggcgaggaataagagttcgaggtattcgtccaaagatggagagaacggaatgttgaggttttatttgactccgatgaggagaagctggaagaccagcggtggtagtggtggaggcggaggcggtggtggtggtggtgggtgggagaagacggcggctaaggcgaatagtcacggccactctatagcgaggagggttatgaggctgtattgaccaaagtgtccctcttcattttaattattgggagcaatgtgaggttttggtttggggttctctaattatctttgtgaataaattggatatctacttaaccggagttaatcggaccaaattggaaccgggtcgttttcaaaaacctaaacttatagacactcggagttttgagttatgctctctctcactcactccgccgccgtccctgcttccaccacatcctccgatttatgattggatgggatcatcgagctgattcgattgcaagaatgcaagtaagaacaagagactgattgagaattgtaaaaaccggaaatttgggtgatgctttgaaagtgtttgacgaaatgtctaagagagaagaacaacttgaggtatggaacaactgaattagtcaaggctggataatgactaaggtaacatctttatagtctctggctagcttttgttctctctgtttctcgtactttgcatc

SEQ ID NO: 107361 - protein, 568 aa, Arabidopsis thaliana
  peptide (1)..(568): Ceres Seq. ID no. 13646853
  misc_feature (15)..(533): Pfam Name: Protein of unknown function (DUF740) Pfam Description: Protein of unknown function (DUF740)
  misc_feature (1)..(568): Homolog of NCBI NO: 15240904 NR Description: glycine-rich protein [Arabidopsis thaliana]
  misc_feature (1)..(568): Homolog of NCBI NO: 28393630 NR Description: unknown protein [Arabidopsis thaliana]
  misc_feature (1)..(209): Homolog of NCBI NO: 15232012 NR Description: glycine-rich protein [Arabidopsis thaliana]
  misc_feature (259)..(423): Homolog of NCBI NO: 15232012 NR Description: glycine-rich protein [Arabidopsis thaliana]
  misc_feature (412)..(568): Homolog of NCBI NO: 15232012 NR Description: glycine-rich protein [Arabidopsis thaliana]
  misc_feature (144)..(306): Homolog of NCBI NO: 15232012 NR Description: glycine-rich protein [Arabidopsis thaliana]
  misc_feature (1)..(306): Homolog of NCBI NO: 15224439 NR Description: expressed protein [Arabidopsis thaliana]
  misc_feature (1)..(306): Homolog of NCBI NO: 26452998 NR Description: unknown protein [Arabidopsis thaliana]
  misc_feature (134)..(496): Homolog of NCBI NO: 15224439 NR Description: expressed protein [Arabidopsis thaliana]
  misc_feature (134)..(496): Homolog of NCBI NO: 26452998 NR Description: unknown protein [Arabidopsis thaliana]
MNLSADQAPVTAVDELAPPSQPHRLSTSCDLHPEERFSGFCPSCLCDRLSVLDHNAAPPPSSSSRKPPSISAVSLKALFKPSSSGTNNSNGNGRVRPGFFPELRRTKSFSAKNNEGFSGGFEPQRRSCDVRLRDDERNLPINEAASVDKIEEEARESSVSEIVLEVTEEAEIEEDEENGENDPGEIVEEKSSEIGEEEEELKPMKDYMDLYSQTKKPSVKDFAGSFFSAASVFSKKLQKWKQKQKVKKPRNGVGGGRPQSEIGVGRRSSDTDPRFSLDAGRFSVDIGRISMDDSRYSLDEPRASWDGHLIGRTTAARVPLPPSMLSVVENAPLNRSDMQIPSSPSIKPISGDSDPIIIIPGGSNQTRDYYTGPPSSRRRKSLDRSNSIRKIVTELEDVKSVSNSTTTIDSNSMETAENKGNQNGDKKSRRWGKWSILGFIYRKGKDDEEEDRYSRSNSAGMVERSLSESWPEMRNGEGGGPKMRRSNSNVSWRSSGGGSARNKSSRYSSKDGENGMLRFYLTPMRRSWKTSGGSGGGGGGGGGGGWEKTAAKANSHGHSIARRVMRLY

SEQ ID NO: 107362 - protein, 365 aa, Arabidopsis thaliana
  peptide (1)..(365): Ceres Seq. ID no. 13646854
  misc_feature (1)..(330): Pfam Name: Protein of unknown function (DUF740) Pfam Description: Protein of unknown function (DUF740)
  misc_feature (1)..(365): Homolog of NCBI NO: 15240904 NR Description: glycine-rich protein [Arabidopsis thaliana]
  misc_feature (1)..(365): Homolog of NCBI NO: 28393630 NR Description: unknown protein [Arabidopsis thaliana]
  misc_feature (56)..(220): Homolog of NCBI NO: 15232012 NR Description: glycine-rich protein [Arabidopsis thaliana]
  misc_feature (209)..(365): Homolog of NCBI NO: 15232012 NR Description: glycine-rich protein [Arabidopsis thaliana]
  misc_feature (1)..(103): Homolog of NCBI NO: 15232012 NR Description: glycine-rich protein [Arabidopsis thaliana]
  misc_feature (1)..(103): Homolog of NCBI NO: 15224439 NR Description: expressed protein [Arabidopsis thaliana]
  misc_feature (1)..(103): Homolog of NCBI NO: 26452998 NR Description: unknown protein [Arabidopsis thaliana]
  misc_feature (1)..(293): Homolog of NCBI NO: 15224439 NR Description: expressed protein [Arabidopsis thaliana]
  misc_feature (1)..(293): Homolog of NCBI NO: 26452998 NR Description: unknown protein [Arabidopsis thaliana]
  misc_feature (1)..(360): Homolog of NCBI NO: 34908360 NR Description: P0529H11.33 [Oryza sativa (japonica
MKDYMDLYSQTKKPSVKDFAGSFFSAASVFSKKLQKWKQKQKVKKPRNGVGGGRPQSEIGVGRRSSDTDPRFSLDAGRFSVDIGRISMDDSRYSLDEPRASWDGHLIGRTTAARVPLPPSMLSVVENAPLNRSDMQIPSSPSIKPISGDSDPIIIIPGGSNQTRDYYTGPPSSRRRKSLDRSNSIRKIVTELEDVKSVSNSTTTIDSNSMETAENKGNQNGDKKSRRWGKWSILGFIYRKGKDDEEEDRYSRSNSAGMVERSLSESWPEMRNGEGGGPKMRRSNSNVSWRSSGGGSARNKSSRYSSKDGENGMLRFYLTPMRRSWKTSGGSGGGGGGGGGGGWEKTAAKANSHGHSIARRVMRLY

SEQ ID NO: 107363 - protein, 361 aa, Arabidopsis thaliana
  peptide (1)..(361): Ceres Seq. ID no. 13646855
  misc_feature (1)..(326): Pfam Name: Protein of unknown function (DUF740) Pfam Description: Protein of unknown function (DUF740)
  misc_feature (1)..(361): Homolog of NCBI NO: 15240904 NR Description: glycine-rich protein [Arabidopsis thaliana]
  misc_feature (1)..(361): Homolog of NCBI NO: 28393630 NR Description: unknown protein [Arabidopsis thaliana]
  misc_feature (52)..(216): Homolog of NCBI NO: 15232012 NR Description: glycine-rich protein [Arabidopsis thaliana]
  misc_feature (205)..(361): Homolog of NCBI NO: 15232012 NR Description: glycine-rich protein [Arabidopsis thaliana]
  misc_feature (1)..(99): Homolog of NCBI NO: 15232012 NR Description: glycine-rich protein [Arabidopsis thaliana]
  misc_feature (1)..(99): Homolog of NCBI NO: 15224439 NR Description: expressed protein [Arabidopsis thaliana]
  misc_feature (1)..(99): Homolog of NCBI NO: 26452998 NR Description: unknown protein [Arabidopsis thaliana]
  misc_feature (1)..(289): Homolog of NCBI NO: 15224439 NR Description: expressed protein [Arabidopsis thaliana]
  misc_feature (1)..(289): Homolog of NCBI NO: 26452998 NR Description: unknown protein [Arabidopsis thaliana]
  misc_feature (1)..(356): Homolog of NCBI NO: 34908360 NR Description: P0529H11.33 [Oryza sativa (japonica
MDLYSQTKKPSVKDFAGSFFSAASVFSKKLQKWKQKQKVKKPRNGVGGGRPQSEIGVGRRSSDTDPRFSLDAGRFSVDIGRISMDDSRYSLDEPRASWDGHLIGRTTAARVPLPPSMLSVVENAPLNRSDMQIPSSPSIKPISGDSDPIIIIPGGSNQTRDYYTGPPSSRRRKSLDRSNSIRKIVTELEDVKSVSNSTTTIDSNSMETAENKGNQNGDKKSRRWGKWSILGFIYRKGKDDEEEDRYSRSNSAGMVERSLSESWPEMRNGEGGGPKMRRSNSNVSWRSSGGGSARNKSSRYSSKDGENGMLRFYLTPMRRSWKTSGGSGGGGGGGGGGGWEKTAAKANSHGHSIARRVMRLY

SEQ ID NO: 107364 - DNA, 1562 bp, Arabidopsis thaliana
  misc_feature (1)..(1562): Ceres Seq. ID no. 13646902
  misc_feature: MA Experiment ID: 20000184 Result: Up-regulated in Transcription
  misc_feature: MA Experiment 20000184 PARAMETER Experiment Name: At_Shoots__P Parameter: Age (day) Value: 7
  misc_feature: MA Experiment 20000184 PARAMETER Experiment Name: At_Shoots__P Parameter: Tissue Value: Shoots vs. Whole Plant
  misc_feature: MA Experiment ID: 20000265 Result: Up-regulated in Transcription
  misc_feature: MA Experiment 20000265 PARAMETER Experiment Name: At_Open_Flower_P Parameter: Age (day) Value: 21
  misc_feature: MA Experiment 20000265 PARAMETER Experiment Name: At_Open_Flower_P Parameter: Plant Line Value: WS
  misc_feature: MA Experiment 20000265 PARAMETER Experiment Name: At_Open_Flower_P Parameter: Tissue Value: Closed Flower vs. Whole Plant
  misc_feature: MA Experiment ID: 20000438 Result: Up-regulated in Transcription
  misc_feature: MA Experiment 20000438 PARAMETER Experiment Name: At_Shoots__P Parameter: Age (day) Value: 14
  misc_feature: MA Experiment 20000438 PARAMETER Experiment Name: At_Shoots__P Parameter: Tissue Value: Shoots vs. Whole Plant
  misc_feature: MA Experiment ID: 20000496 Result: Up-regulated in Transcription
  misc_feature: MA Experiment 20000496 PARAMETER Experiment Name: At_Guard_Cells_P Parameter: Harvest Date Value: 7/19/2002
  misc_feature: MA Experiment 20000496 PARAMETER Experiment Name: At_Guard_Cells_P Parameter: Organism Value: Canola
  misc_feature: MA Experiment 20000496 PARAMETER Experiment Name: At_Guard_Cells_P Parameter: Tissue Value: Guard Cells vs. Leaves
  misc_feature: MA Experiment ID: 20001247 Result: Up-regulated in Transcription
  misc_feature: MA Experiment 20001247 PARAMETER Experiment Name: At_Far-red-induction_P Parameter: Age (day) Value: 7
  misc_feature: MA Experiment 20001247 PARAMETER Experiment Name: At_Far-red-induction_P Parameter: Light Value: Far-red vs. White
  misc_feature: MA Experiment 20001247 PARAMETER Experiment Name: At_Far-red-induction_P Parameter: Organism Value: A. thaliana
  misc_feature: MA Experiment 20001247 PARAMETER Experiment Name: At_Far-red-induction_P Parameter: Plant Line Value: Columbia
  misc_feature: MA Experiment 20001247 PARAMETER Experiment Name: At_Far-red-induction_P Parameter: Timepoint (hr) Value: 1
  misc_feature: MA Experiment 20001247 PARAMETER Experiment Name: At_Far-red-induction_P Parameter: Tissue Value: Whole Plant
  misc_feature: MA Experiment ID: 20001248 Result: Up-regulated in Transcription
  misc_feature: MA Experiment 20001248 PARAMETER Experiment Name: At_Far-red-induction_P Parameter: Age (day) Value: 7
  misc_feature: MA Experiment 20001248 PARAMETER Experiment Name: At_Far-red-induction_P Parameter: Light Value: Far-red vs. White
  misc_feature: MA Experiment 20001248 PARAMETER Experiment Name: At_Far-red-induction_P Parameter: Organism Value: A. thaliana
  misc_feature: MA Experiment 20001248 PARAMETER Experiment Name: At_Far-red-induction_P Parameter: Plant Line Value: Columbia
  misc_feature: MA Experiment 20001248 PARAMETER Experiment Name: At_Far-red-induction_P Parameter: Timepoint (hr) Value: 4
  misc_feature: MA Experiment 20001248 PARAMETER Experiment Name: At_Far-red-induction_P Parameter: Tissue Value: Whole Plant
  misc_feature: MA Experiment ID: 20001757 Result: Up-regulated in Transcription
  misc_feature: MA Experiment 20001757 PARAMETER Experiment Name: At_50mM_NH4NO3_L-to-H_P Parameter: Timepoint (hr) Value: 6
  misc_feature: MA Experiment 20001757 PARAMETER Experiment Name: At_50mM_NH4NO3_L-to-H_P Parameter: Tissue Value: Leaf
  misc_feature: MA Experiment 20001757 PARAMETER Experiment Name: At_50mM_NH4NO3_L-to-H_P Parameter: Treatment Value: 50mM NH4NO3 vs 100mM Mannitol
gaacacactcttctctctcttcttcttcctcctctgtactctctctttctcacataaccagagcctctctctctctctctgtttctcttcagtctctgtgtatacccctttctctcctcctctgtccctctctctagcggcggactgatgcacatacctttgtattctccgccgtaactaacttacataatggggtgcatgttctctcacctcgccgccaaattcgccttcttcccaccctctcctcccacttaccacctcaccaaaacccccgacggcaaactctccgccgtatcctccgcttcctcctcctcctccacttttccctccgccggagacccatctctcgacgtcaaagtagtaaagacaagacgcggcaacaaagtcacagctttttaccttagaaaccctaacgcaagactcacacttctctactctcatggaaatgctgcagatttgggacaactcttcgatctctttgttcaactcaaagtcaatctccgagtcaatctcatggggtatgattattcaggctatggagcttctactggtaagccgagtgagtacgatacatatgcagatatagaggcggcgtatgagtgtttgcagacggattatggggtagggcaagaagatttgatcttgtatggtcaatctgttggcagcggtccaacgctgcaccttgcctctaagcttccacggcttagaggtgtcgttcttcatagcggcattctctctggtcttcgtgttctatgtcatgtcaagttcaagttttgttgtgacatttattcgaacgtaaacaagatcaagaaggtgaaatgcccggttcttgtcatacacggaacagaggatgatgtggtgaattggttacacggaaacaggctttggaaaatggcaaaggaaccgtatgaaccgctctggattaaaggcggtggacattgcaaccttgagatatatccggactacattagacacctataccggtttatacaagacatggaaaatacaaccactaagtctcgtctcaaaacgatttggcaagaaatccgtcggcgagatgaatccacaggatgttgttgttccggactgtgcagacctagctgcagttgtcccaaacctcggtgtcccaaacctagttgcagttgcggctgcggttgtggcgactgcggttgtttcaagtgttcgtgtccgactttgaagggatgtttctcttgctgcaagaaaccgagctgtgttagtagttgttgctgtcccacgttcaaatgcagcagctgctttgggaagccaaaatgtccgaaatgctcttgttggaaatgtctaaaatgccccgacaccgagtgttgccggagtagttgttgttgttccggttgttttagctggttgtgttgctgcggtggagggaggaggaaagagggggagaggagaggatctactacgttggagaagagtgaagggtgatattggtaatttgtatagattttgttcaaagatttggtaaaaaacattagaagattcatggaaagagactgagattttgaagctaaaagttcatttattattcc

SEQ ID NO: 107365 - protein, 422 aa, Arabidopsis thaliana; identical to SEQ ID NO: 46862
  peptide (1)..(422): Ceres Seq. ID no. 13646903
  misc_feature (295)..(400): Pfam Name: Keratin, high sulfur B2 protein Pfam Description: Keratin, high sulfur B2 protein
  misc_feature (1)..(422): Homolog of NCBI NO: 15222598 NR Description: expressed protein [Arabidopsis thaliana]
  misc_feature (1)..(394): Homolog of NCBI NO: 34905260 NR Description: P0577B11.1 [Oryza sativa (japonica >gi|29170589|dbj|BAC57808.2| putative TPA: Cgi67 serine protease
  misc_feature (1)..(273): Homolog of NCBI NO: 15230760 NR Description: hypothetical protein [Arabidopsis thaliana] contains similarity to unknown
  misc_feature (1)..(271): Homolog of NCBI NO: 28393521 NR Description: unknown protein [Arabidopsis thaliana]
  misc_feature (1)..(218): Homolog of NCBI NO: 30688887 NR Description: expressed protein [Arabidopsis thaliana]
  misc_feature (199)..(271): Homolog of NCBI NO: 30688887 NR Description: expressed protein [Arabidopsis thaliana]
  misc_feature (1)..(200): Homolog of NCBI NO: 15224121 NR Description: hypothetical protein [Arabidopsis thaliana]
  misc_feature (199)..(271): Homolog of NCBI NO: 15224121 NR Description: hypothetical protein [Arabidopsis thaliana]
  misc_feature (1)..(276): Homolog of NCBI NO: 15233975 NR Description: expressed protein [Arabidopsis thaliana]
  misc_feature (1)..(282): Homolog of NCBI NO: 34911338 NR Description: P0519D04.38 [Oryza sativa (japonica

SEQ ID NO: 107366 - protein, 419 aa, Arabidopsis thaliana; identical to SEQ ID NO: 46863
  peptide (1)..(419): Ceres Seq. ID no. 13646904
  misc_feature (292)..(397): Pfam Name: Keratin, high sulfur B2 protein Pfam Description: Keratin, high sulfur B2 protein
  misc_feature (1)..(419): Homolog of NCBI NO: 15222598 NR Description: expressed protein [Arabidopsis thaliana]
  misc_feature (1)..(391): Homolog of NCBI NO: 34905260 NR Description: P0577B11.1 [Oryza sativa (japonica >gi|29170589|dbj|BAC57808.2| putative TPA: Cgi67 serine protease
  misc_feature (1)..(270): Homolog of NCBI NO: 15230760 NR Description: hypothetical protein [Arabidopsis thaliana] contains similarity to unknown
  misc_feature (1)..(268): Homolog of NCBI NO: 28393521 NR Description: unknown protein [Arabidopsis thaliana]
  misc_feature (1)..(215): Homolog of NCBI NO: 30688887 NR Description: expressed protein [Arabidopsis thaliana]
  misc_feature (196)..(268): Homolog of NCBI NO: 30688887 NR Description: expressed protein [Arabidopsis thaliana]
  misc_feature (1)..(197): Homolog of NCBI NO: 15224121 NR Description: hypothetical protein [Arabidopsis thaliana]
  misc_feature (196)..(268): Homolog of NCBI NO: 15224121 NR Description: hypothetical protein [Arabidopsis thaliana]
  misc_feature (1)..(273): Homolog of NCBI NO: 15233975 NR Description: expressed protein [Arabidopsis thaliana]
  misc_feature (1)..(279): Homolog of NCBI NO: 34911338 NR Description: P0519D04.38 [Oryza sativa (japonica

SEQ ID NO: 107367 - protein, 314 aa, Arabidopsis thaliana; identical to SEQ ID NO: 46864
  peptide (1)..(314): Ceres Seq. ID no. 13646905
  misc_feature (187)..(292): Pfam Name: Keratin, high sulfur B2 protein Pfam Description: Keratin, high sulfur B2 protein
  misc_feature (1)..(314): Homolog of NCBI NO: 15222598 NR Description: expressed protein [Arabidopsis thaliana]
  misc_feature (1)..(286): Homolog of NCBI NO: 34905260 NR Description: P0577B11.1 [Oryza sativa (japonica >gi|29170589|dbj|BAC57808.2| putative TPA: Cgi67 serine protease
  misc_feature (1)..(165): Homolog of NCBI NO: 15230760 NR Description: hypothetical protein [Arabidopsis thaliana] contains similarity to unknown
  misc_feature (1)..(163): Homolog of NCBI NO: 28393521 NR Description: unknown protein [Arabidopsis thaliana]
  misc_feature (1)..(110): Homolog of NCBI NO: 30688887 NR Description: expressed protein [Arabidopsis thaliana]
  misc_feature (91)..(163): Homolog of NCBI NO: 30688887 NR Description: expressed protein [Arabidopsis thaliana]
  misc_feature (1)..(92): Homolog of NCBI NO: 15224121 NR Description: hypothetical protein [Arabidopsis thaliana]
  misc_feature (91)..(163): Homolog of NCBI NO: 15224121 NR Description: hypothetical protein [Arabidopsis thaliana]
  misc_feature (1)..(168): Homolog of NCBI NO: 15233975 NR Description: expressed protein [Arabidopsis thaliana]
  misc_feature (1)..(174): Homolog of NCBI NO: 34911338 NR Description: P0519D04.38 [Oryza sativa (japonica

SEQ ID NO: 107368 - DNA, 1942 bp, Arabidopsis thaliana
  misc_feature (1)..(1942): Ceres Seq. ID no. 13646960
  misc_feature: MA Experiment ID: 20000327 Result: Down-regulated in Transcription
  misc_feature: MA Experiment 20000327 PARAMETER Experiment Name: At_42deg_Heat_Sub_P Parameter: Age (day) Value: 14
  misc_feature: MA Experiment 20000327 PARAMETER Experiment Name: At_42deg_Heat_Sub_P Parameter: Organism Value: A. thaliana
  misc_feature: MA Experiment 20000327 PARAMETER Experiment Name: At_42deg_Heat_Sub_P Parameter: Plant Line Value: WS
  misc_feature: MA Experiment 20000327 PARAMETER Experiment Name: At_42deg_Heat_Sub_P Parameter: Temperature (deg C) Value: 42 vs. 22
  misc_feature: MA Experiment 20000327 PARAMETER Experiment Name: At_42deg_Heat_Sub_P Parameter: Timepoint (hr) Value: 1
  misc_feature: MA Experiment 20000327 PARAMETER Experiment Name: At_42deg_Heat_Sub_P Parameter: Tissue Value: Aerial
gatcatttcctgaaaactagaaaacacagtttaaagggaacataaaaagcaactctttgagagatcagagaaaccctaatttgctaagaaccctaatctcaatttccatcttccaaagttcagattctgtatgtaaatgcatctgaagaattctactgtagcagaacggcggtacatcggaaaagaaaccgccggttatttaacttcttcctccgatttggatccgaaacctaagattaaacatcatcgtcctcttcaggtacctgagattttgactccagacattggtgctggtgctggattcagtgtgtataataatcaagttcaagctcagagtcgtcatcatctgacggttgaaatcccagattcatcgtctcacaatcttacatctaagagacctgtggtggttcaatcttctaatccgttcaacgttgacgatttccgaagacaacaacgcgcaagcttgggtccgatttcatcttattgtccgtcgtatcttttatcgtggttttcttcttctcttccatcgatccatcggccactaatcagaagcttctccgtcatgttcttagaattcttccttctctttgtcttctcgattatcgctttttctttcgtcctttcgatctctctcaaattcgctcttcctcacttaccatcgattcgtttgattatcgctcggttactttctctcaagcttacccctaccagatcatcctcttcatctcaggagaacactaaacatgttatttggtcaattgggtctaagcctgtgactgagaagaagaccagctctggctcatgggttcagaagtacagctctggtgatgtatacgagggagagtttcatagggggaagtgttcaggaagtggagtttattactattctatgaagggtaaatacgaaggggattggattgatgggaagtatgatggatatggagttgaaacttgggctaaagggagtaggtaccgaggtcaatacaggcaagggatgagacatggaactggtatctacagattttatacaggggatgtatatgctggtgagtggtctaatggacagagccatggctgtggtgtgtatacctctgaggatggtagtcgttttgttggagagtttaaatggggtgtcaaacatggccttggtcattatcatttcaggatgcatggttttggagtgtatcaatttggaaacgggcatcggtatgaaggagcctggcatgaggggagaaggcaaggacttggtatgtacacgttcaggaatggtgagacacaggcaggccattgggaagacggagttcttaactgtcctaccgagcagaccactcgccctgattcatcgttttccatcagtcattccaaggttgtcgacactgtccagcaagcaaggaaagcagccaagaaagcacgcgaagttgtgaaagttgaagagagagtgaacagagcagtgatggtcgcaaaccgagcagcaaatgctgctagagttgctgctacaaaggctgtccaaacccaaacatttcattgtagtagtggtgacgatcccttgtgaattcctgcggcaaagattttgacataatcgcagtcatgaccttacctcaaacttctacgaagacagaagagtgaaagagagatgtttagagaacagagtcagaattcgcaatctccgttgagattttcttgaaggtgaaccacttggaaccaatatcgagatctcataagtaataagtaagagatctggctatggagcaagtattactggtttactttttcttttctcccacttgttttatgagcaggctggtttaaaactgtacataggttgttgaagagtaagcaatgtgtgttaacaaaagatctttgtaacaagcgtaatccatgtaagagaagtaacaaaacattgttttacttttacaacgtgttgaaaataacaccttttttt

SEQ ID NO: 107369 - protein, 471 aa, Arabidopsis thaliana
  peptide (1)..(471): Ceres Seq. ID no. 13646961
  misc_feature (325)..(347): Pfam Name: MORN repeat Pfam Description: MORN repeat
  misc_feature (1)..(471): Homolog of NCBI NO: 15235967 NR Description: expressed protein [Arabidopsis thaliana]
  misc_feature (135)..(471): Homolog of NCBI NO: 21928129 NR Description: AT4g17080/dl4570w [Arabidopsis thaliana]
  misc_feature (1)..(468): Homolog of NCBI NO: 18403768 NR Description: expressed protein [Arabidopsis thaliana]
  misc_feature (36)..(471): Homolog of NCBI NO: 37536922 NR Description: putative phosphatidylinositol-4-phosphate
  misc_feature (1)..(385): Homolog of NCBI NO: 21928129 NR Description: AT4g17080/dl4570w [Arabidopsis thaliana]
  misc_feature (155)..(460): Homolog of NCBI NO: 15219142 NR Description: phosphatidylinositol-4-phosphate 5-kinase [Arabidopsis thaliana] >gi|6552740|gb|AAF16539.1|AC013482_13 [Arabidopsis thaliana] >gi|13878045|gb|AAK44100.1|AF370285_1
  misc_feature (155)..(460): Homolog of NCBI NO: 21593251 NR Description: phosphatidylinositol-4-phosphate 5-kinase,
  misc_feature (141)..(460): Homolog of NCBI NO: 15217439 NR Description: hypothetical protein [Arabidopsis thaliana]
  misc_feature (206)..(388): Homolog of NCBI NO: 40062709 NR Description: MORN repeat protein [uncultured bacterium 314]
  misc_feature (209)..(388): Homolog of NCBI NO: 40062709 NR Description: MORN repeat protein [uncultured bacterium 314]
MHLKNSTVAERRYIGKETAGYLTSSSDLDPKPKIKHHRPLQVPEILTPDIGAGAGFSVYNNQVQAQSRHHLTVEIPDSSSHNLTSKRPVVVQSSNPFNVDDFRRQQRASLGPISSYCPSYLLSWFSSSLPSIHRPLIRSFSVMFLEFFLLFVFSIIAFSFVLSISLKFALPHLPSIRLIIARLLSLKLTPTRSSSSSQENTKHVIWSIGSKPVTEKKTSSGSWVQKYSSGDVYEGEFHRGKCSGSGVYYYSMKGKYEGDWIDGKYDGYGVETWAKGSRYRGQYRQGMRHGTGIYRFYTGDVYAGEWSNGQSHGCGVYTSEDGSRFVGEFKWGVKHGLGHYHFRMHGFGVYQFGNGHRYEGAWHEGRRQGLGMYTFRNGETQAGHWEDGVLNCPTEQTTRPDSSFSISHSKVVDTVQQARKAAKKAREVVKVEERVNRAVMVANRAANAARVAATKAVQTQTFHCSSGDDPL

SEQ ID NO: 107370 - protein, 329 aa, Arabidopsis thaliana
  peptide (1)..(329): Ceres Seq. ID no. 13646962
  misc_feature (183)..(205): Pfam Name: MORN repeat Pfam Description: MORN repeat
  misc_feature (1)..(329): Homolog of NCBI NO: 15235967 NR Description: expressed protein [Arabidopsis thaliana]
  misc_feature (1)..(329): Homolog of NCBI NO: 21928129 NR Description: AT4g17080/dl4570w [Arabidopsis thaliana]
  misc_feature (1)..(326): Homolog of NCBI NO: 18403768 NR Description: expressed protein [Arabidopsis thaliana]
  misc_feature (1)..(329): Homolog of NCBI NO: 37536922 NR Description: putative phosphatidylinositol-4-phosphate
  misc_feature (1)..(243): Homolog of NCBI NO: 21928129 NR Description: AT4g17080/dl4570w [Arabidopsis thaliana]
  misc_feature (13)..(318): Homolog of NCBI NO: 15219142 NR Description: phosphatidylinositol-4-phosphate 5-kinase [Arabidopsis thaliana] >gi|6552740|gb|AAF16539.1|AC013482_13 [Arabidopsis thaliana] >gi|13878045|gb|AAK44100.1|AF370285_1
  misc_feature (13)..(318): Homolog of NCBI NO: 21593251 NR Description: phosphatidylinositol-4-phosphate 5-kinase,
  misc_feature (1)..(318): Homolog of NCBI NO: 15217439 NR Description: hypothetical protein [Arabidopsis thaliana]
  misc_feature (64)..(246): Homolog of NCBI NO: 40062709 NR Description: MORN repeat protein [uncultured bacterium 314]
  misc_feature (67)..(246): Homolog of NCBI NO: 40062709 NR Description: MORN repeat protein [uncultured bacterium 314]
MFLEFFLLFVFSIIAFSFVLSISLKFALPHLPSIRLIIARLLSLKLTPTRSSSSSQENTKHVIWSIGSKPVTEKKTSSGSWVQKYSSGDVYEGEFHRGKCSGSGVYYYSMKGKYEGDWIDGKYDGYGVETWAKGSRYRGQYRQGMRHGTGIYRFYTGDVYAGEWSNGQSHGCGVYTSEDGSRFVGEFKWGVKHGLGHYHFRMHGFGVYQFGNGHRYEGAWHEGRRQGLGMYTFRNGETQAGHWEDGVLNCPTEQTTRPDSSFSISHSKVVDTVQQARKAAKKAREVVKVEERVNRAVMVANRAANAARVAATKAVQTQTFHCSSGDDPL

SEQ ID NO: 107371 - DNA, 1533 bp, Arabidopsis thaliana
  misc_feature (1)..(1533): Ceres Seq. ID no. 13646978
  misc_feature: MA Experiment ID: 20000185 Result: Down-regulated in Transcription
  misc_feature: MA Experiment 20000185 PARAMETER Experiment Name: At_Roots__P Parameter: Age (day) Value: 7 vs. 21
  misc_feature: MA Experiment 20000185 PARAMETER Experiment Name: At_Roots__P Parameter: Organism Value: A. thaliana
  misc_feature: MA Experiment 20000185 PARAMETER Experiment Name: At_Roots__P Parameter: Tissue Value: Roots vs. Whole Plant
  misc_feature: MA Experiment ID: 20000436 Result: Down-regulated in Transcription
  misc_feature: MA Experiment 20000436 PARAMETER Experiment Name: At_Drought_P Parameter: Age (day) Value: 7
  misc_feature: MA Experiment 20000436 PARAMETER Experiment Name: At_Drought_P Parameter: Organism Value: A. thaliana
  misc_feature: MA Experiment 20000436 PARAMETER Experiment Name: At_Drought_P Parameter: Plant Line Value: WS
  misc_feature: MA Experiment 20000436 PARAMETER Experiment Name: At_Drought_P Parameter: Timepoint (hr) Value: 12
  misc_feature: MA Experiment 20000436 PARAMETER Experiment Name: At_Drought_P Parameter: Tissue Value: Whole Plant
  misc_feature: MA Experiment 20000436 PARAMETER Experiment Name: At_Drought_P Parameter: Treatment Value: Drought vs. No Drought
  misc_feature: MA Experiment ID: 20000437 Result: Down-regulated in Transcription
  misc_feature: MA Experiment 20000437 PARAMETER Experiment Name: At_Drought_P Parameter: Age (day) Value: 8
  misc_feature: MA Experiment 20000437 PARAMETER Experiment Name: At_Drought_P Parameter: Organism Value: A. thaliana
  misc_feature: MA Experiment 20000437 PARAMETER Experiment Name: At_Drought_P Parameter: Plant Line Value: WS
  misc_feature: MA Experiment 20000437 PARAMETER Experiment Name: At_Drought_P Parameter: Timepoint (hr) Value: 24
  misc_feature: MA Experiment 20000437 PARAMETER Experiment Name: At_Drought_P Parameter: Tissue Value: Whole Plant
  misc_feature: MA Experiment 20000437 PARAMETER Experiment Name: At_Drought_P Parameter: Treatment Value: Drought vs. No Drought
  misc_feature: MA Experiment ID: 20000439 Result: Down-regulated in Transcription
  misc_feature: MA Experiment 20000439 PARAMETER Experiment Name: At_Roots__P Parameter: Age (day) Value: 14 vs. 21
  misc_feature: MA Experiment 20000439 PARAMETER Experiment Name: At_Roots__P Parameter: Organism Value: A. thaliana
  misc_feature: MA Experiment 20000439 PARAMETER Experiment Name: At_Roots__P Parameter: Tissue Value: Roots vs. Whole Plant
  misc_feature: MA Experiment ID: 20000527 Result: Up-regulated in Transcription
  misc_feature: MA Experiment 20000527 PARAMETER Experiment Name: At_10percent_PEG_P Parameter: Age (day) Value: 20
  misc_feature: MA Experiment 20000527 PARAMETER Experiment Name: At_10percent_PEG_P Parameter: Organism Value: A. thaliana
  misc_feature: MA Experiment 20000527 PARAMETER Experiment Name: At_10percent_PEG_P Parameter: Plant Line Value: WS
  misc_feature: MA Experiment 20000527 PARAMETER Experiment Name: At_10percent_PEG_P Parameter: Timepoint (day) Value: 20
  misc_feature: MA Experiment 20000527 PARAMETER Experiment Name: At_10percent_PEG_P Parameter: Tissue Value: Whole Plant
  misc_feature: MA Experiment 20000527 PARAMETER Experiment Name: At_10percent_PEG_P Parameter: Treatment Value: 10percent PEG vs. No Treatment
  misc_feature: MA Experiment ID: 20000794 Result: Down-regulated in Transcription
  misc_feature: MA Experiment 20000794 PARAMETER Experiment Name: At_Petals_P Parameter: Age (day) Value: 23-25 days
  misc_feature: MA Experiment 20000794 PARAMETER Experiment Name: At_Petals_P Parameter: Plant Line Value: WS
  misc_feature: MA Experiment 20000794 PARAMETER Experiment Name: At_Petals_P Parameter: Tissue Value: Petals vs. Whole plant
  misc_feature: MA Experiment ID: 20001247 Result: Down-regulated in Transcription
  misc_feature: MA Experiment 20001247 PARAMETER Experiment Name: At_Far-red-induction_P Parameter: Age (day) Value: 7
  misc_feature: MA Experiment 20001247 PARAMETER Experiment Name: At_Far-red-induction_P Parameter: Light Value: Far-red vs. White
  misc_feature: MA Experiment 20001247 PARAMETER Experiment Name: At_Far-red-induction_P Parameter: Organism Value: A. thaliana
  misc_feature: MA Experiment 20001247 PARAMETER Experiment Name: At_Far-red-induction_P Parameter: Plant Line Value: Columbia
  misc_feature: MA Experiment 20001247 PARAMETER Experiment Name: At_Far-red-induction_P Parameter: Timepoint (hr) Value: 1
  misc_feature: MA Experiment 20001247 PARAMETER Experiment Name: At_Far-red-induction_P Parameter: Tissue Value: Whole Plant
  misc_feature: MA Experiment ID: 20001450 Result: Down-regulated in Transcription
  misc_feature: MA Experiment 20001450 PARAMETER Experiment Name: At_Far-red-induction_P Parameter: Age (day) Value: 7
  misc_feature: MA Experiment 20001450 PARAMETER Experiment Name: At_Far-red-induction_P Parameter: Light Value: Far-red vs. White
  misc_feature: MA Experiment 20001450 PARAMETER Experiment Name: At_Far-red-induction_P Parameter: Organism Value: A. thaliana
  misc_feature: MA Experiment 20001450 PARAMETER Experiment Name: At_Far-red-induction_P Parameter: Plant Line Value: Columbia
  misc_feature: MA Experiment 20001450 PARAMETER Experiment Name: At_Far-red-induction_P Parameter: Timepoint (hr) Value: 8
  misc_feature: MA Experiment 20001450 PARAMETER Experiment Name: At_Far-red-induction_P Parameter: Tissue Value: Whole Plant
  misc_feature: MA Experiment ID: 20001451 Result: Down-regulated in Transcription
  misc_feature: MA Experiment 20001451 PARAMETER Experiment Name: At_Far-red-induction_P Parameter: Age (day) Value: 7
  misc_feature: MA Experiment 20001451 PARAMETER Experiment Name: At_Far-red-induction_P Parameter: Light Value: Far-red vs. White
  misc_feature: MA Experiment 20001451 PARAMETER Experiment Name: At_Far-red-induction_P Parameter: Organism Value: A. thaliana
  misc_feature: MA Experiment 20001451 PARAMETER Experiment Name: At_Far-red-induction_P Parameter: Plant Line Value: Columbia
  misc_feature: MA Experiment 20001451 PARAMETER Experiment Name: At_Far-red-induction_P Parameter: Timepoint (hr) Value: 24
  misc_feature: MA Experiment 20001451 PARAMETER Experiment Name: At_Far-red-induction_P Parameter: Tissue Value: Whole Plant
  misc_feature: MA Experiment ID: 20001458 Result: Up-regulated in Transcription
  misc_feature: MA Experiment 20001458 PARAMETER Experiment Name: At_50mM_NH4NO3_L-to-H_P Parameter: Age (day) Value: Undefined
  misc_feature: MA Experiment 20001458 PARAMETER Experiment Name: At_50mM_NH4NO3_L-to-H_P Parameter: Organism Value: Undefined
  misc_feature: MA Experiment 20001458 PARAMETER Experiment Name: At_50mM_NH4NO3_L-to-H_P Parameter: Plant Line Value: Undefined
  misc_feature: MA Experiment 20001458 PARAMETER Experiment Name: At_50mM_NH4NO3_L-to-H_P Parameter: Timepoint (hr) Value: 2
  misc_feature: MA Experiment 20001458 PARAMETER Experiment Name: At_50mM_NH4NO3_L-to-H_P Parameter: Tissue Value: Siliques
  misc_feature: MA Experiment 20001458 PARAMETER Experiment Name: At_50mM_NH4NO3_L-to-H_P Parameter: Treatment Value: 50mM NH4NO3 vs. 100mM Manitol
  misc_feature: MA Experiment ID: 20001555 Result: Up-regulated in Transcription
  misc_feature: MA Experiment 20001555 PARAMETER Experiment Name: At_Drought_Soil_Dry_P Parameter: Age (day) Value: 24
  misc_feature: MA Experiment 20001555 PARAMETER Experiment Name: At_Drought_Soil_Dry_P Parameter: Organism Value: A. thaliana
  misc_feature: MA Experiment 20001555 PARAMETER Experiment Name: At_Drought_Soil_Dry_P Parameter: Plant Line Value: WS
  misc_feature: MA Experiment 20001555 PARAMETER Experiment Name: At_Drought_Soil_Dry_P Parameter: Post Timepoint (hr) Value: None
  misc_feature: MA Experiment 20001555 PARAMETER Experiment Name: At_Drought_Soil_Dry_P Parameter: Post-Treatment Value: None
  misc_feature: MA Experiment 20001555 PARAMETER Experiment Name: At_Drought_Soil_Dry_P Parameter: Timepoint (day) Value: 10
  misc_feature: MA Experiment 20001555 PARAMETER Experiment Name: At_Drought_Soil_Dry_P Parameter: Treatment Value: Drought vs. No Drought
  misc_feature: MA Experiment ID: 20001556 Result: Up-regulated in Transcription
  misc_feature: MA Experiment 20001556 PARAMETER Experiment Name: At_Drought_Soil_Dry_P Parameter: Age (day) Value: 26
  misc_feature: MA Experiment 20001556 PARAMETER Experiment Name: At_Drought_Soil_Dry_P Parameter: Organism Value: A. thaliana
  misc_feature: MA Experiment 20001556 PARAMETER Experiment Name: At_Drought_Soil_Dry_P Parameter: Plant Line Value: WS
  misc_feature: MA Experiment 20001556 PARAMETER Experiment Name: At_Drought_Soil_Dry_P Parameter: Post Timepoint (hr) Value: None
  misc_feature: MA Experiment 20001556 PARAMETER Experiment Name: At_Drought_Soil_Dry_P Parameter: Post-Treatment Value: None
  misc_feature: MA Experiment 20001556 PARAMETER Experiment Name: At_Drought_Soil_Dry_P Parameter: Timepoint (day) Value: 12
  misc_feature: MA Experiment 20001556 PARAMETER Experiment Name: At_Drought_Soil_Dry_P Parameter: Treatment Value: Drought vs. No Drought
  misc_feature: MA Experiment ID: 20001558 Result: Up-regulated in Transcription
  misc_feature: MA Experiment 20001558 PARAMETER Experiment Name: At_Drought_Soil_Dry_P Parameter: Age (day) Value: 27
  misc_feature: MA Experiment 20001558 PARAMETER Experiment Name: At_Drought_Soil_Dry_P Parameter: Organism Value: A. thaliana
  misc_feature: MA Experiment 20001558 PARAMETER Experiment Name: At_Drought_Soil_Dry_P Parameter: Plant Line Value: WS
  misc_feature: MA Experiment 20001558 PARAMETER Experiment Name: At_Drought_Soil_Dry_P Parameter: Post Timepoint (hr) Value: 6
  misc_feature: MA Experiment 20001558 PARAMETER Experiment Name: At_Drought_Soil_Dry_P Parameter: Post-Treatment Value: Re-Water vs. No Drought
  misc_feature: MA Experiment 20001558 PARAMETER Experiment Name: At_Drought_Soil_Dry_P Parameter: Timepoint (day) Value: 13
  misc_feature: MA Experiment 20001558 PARAMETER Experiment Name: At_Drought_Soil_Dry_P Parameter: Treatment Value: Drought vs. No Drought
  misc_feature: MA Experiment ID: 20001560 Result: Up-regulated in Transcription
  misc_feature: MA Experiment 20001560 PARAMETER Experiment Name: At_Drought_Soil_Dry_P Parameter: Age (day) Value: 28
  misc_feature: MA Experiment 20001560 PARAMETER Experiment Name: At_Drought_Soil_Dry_P Parameter: Organism Value: A. thaliana
  misc_feature: MA Experiment 20001560 PARAMETER Experiment Name: At_Drought_Soil_Dry_P Parameter: Plant Line Value: WS
  misc_feature: MA Experiment 20001560 PARAMETER Experiment Name: At_Drought_Soil_Dry_P Parameter: Post Timepoint (hr) Value: None
  misc_feature: MA Experiment 20001560 PARAMETER Experiment Name: At_Drought_Soil_Dry_P Parameter: Post-Treatment Value: None
  misc_feature: MA Experiment 20001560 PARAMETER Experiment Name: At_Drought_Soil_Dry_P Parameter: Timepoint (day) Value: 14
  misc_feature: MA Experiment 20001560 PARAMETER Experiment Name: At_Drought_Soil_Dry_P Parameter: Treatment Value: Drought vs. No Drought
  misc_feature: MA Experiment ID: 20001757 Result: Up-regulated in Transcription
  misc_feature: MA Experiment 20001757 PARAMETER Experiment Name: At_50mM_NH4NO3_L-to-H_P Parameter: Timepoint (hr) Value: 6
  misc_feature: MA Experiment 20001757 PARAMETER Experiment Name: At_50mM_NH4NO3_L-to-H_P Parameter: Tissue Value: Leaf
  misc_feature: MA Experiment 20001757 PARAMETER Experiment Name: At_50mM_NH4NO3_L-to-H_P Parameter: Treatment Value: 50mM NH4NO3 vs 100mM Mannitol
  misc_feature: MA Experiment ID: 20001911 Result: Down-regulated in Transcription
  misc_feature: MA Experiment 20001911 PARAMETER Experiment Name: At_Drought_Reproduction_P Parameter: Age (day) Value: 40
  misc_feature: MA Experiment 20001911 PARAMETER Experiment Name: At_Drought_Reproduction_P Parameter: Organism Value: A. thaliana
  misc_feature: MA Experiment 20001911 PARAMETER Experiment Name: At_Drought_Reproduction_P Parameter: Plant Line Value: WS
  misc_feature: MA Experiment 20001911 PARAMETER Experiment Name: At_Drought_Reproduction_P Parameter: Timepoint (day) Value: 10
  misc_feature: MA Experiment 20001911 PARAMETER Experiment Name: At_Drought_Reproduction_P Parameter: Tissue Value: Flowers
  misc_feature: MA Experiment 20001911 PARAMETER Experiment Name: At_Drought_Reproduction_P Parameter: Treatment Value: Drought vs. No Drought
agtggtgtcaaaaacccatcaatggcttcacttcttattttcccccaccttcaccattttgattcttcactggaccgtagagaggtactagtagttcgccattcacaagcatcaaggcgatttctcactccgaaagcttcaattaatggcagcggaatcacaaacggagctgcagcggaaaccacctctaaacctagtcgcaaagggaggaagaagaagcaaacatcgacggtaattgagaaagataacaccgagactgatcctgaattgaatccggagttagctgattacgacgacgggatcgagtttccgtacgacgatccgcctcttgtgtgttgcttcggagctgtacagaaggagtttgttccggtggtgcgagtccatgataatccgatgcatcctgatatgtactcgcagtggaagatgctacagtgggatccaccggagtttgggagagctccgggaggtccgccgtcgaatgtggcgatctctcatgtacggttaggtgggagagctgcgtttatggggaaagtaggtgaagatgattttggagatgagcttgttctgatgatgaatcaggagagagttcagacgagagctgtgaaattcgatgagaattcgaaaactgcttgtactcgtgtcaagatcaagtttaaggacgggaaaatgatggcggagactgtgaaagaaccacctgaggactcgctatttgcttcagaactcaatttagctgtgcttaaagaggcgaggatttttcatttcaattcagaagtgttgacgtctcctacaatgcaatcaactctttttacggcaatacaatggtctaagaagtttggtgggcttattttctttgacttgaatctcccattaccgctgtggagatcgcgcaatgagactaggaagttgatcaagaaagcatggaatgaagcaaacatcattgaagtttcacagcaagagcttgagtttctacttgatgaagattactacgagaggagaagaaactacacaccacagtacttcgctgaggattttgatcagacgaaaaacagaagagactattaccattacacaccagaggaaatcaagtcattgtggcatgacaagctgaagctattggttgtgactgatggaacacttcggcttcattactatactcctacttttgatggtgttgtgattggaacagaagatgtgcttataactcctttcacctgtgataggaccggttctggtgatgctgttgttgcagggataatgagaaagctaacaacttgtcctgagatgtttgaggatcaggatgtgatggagcgacagctcaggtttgcagttgctgctgggatcatagcgcagtggacaattggtgcagttagaggtttccctactgaaagcgcgacacagaatttgaaagaacaagtttatgttccatcaatgtggtagaatagaagatgaagaactgaacttgtgtactcaatgtttttgaacaatgtgtgagttgtatactgattcagatttgtaatccagagaaatgtacaa

SEQ ID NO: 107372 - protein, 478 aa, Arabidopsis thaliana
  peptide (1)..(478): Ceres Seq. ID no. 13646979
  misc_feature (108)..(462): Pfam Name: pfkB family carbohydrate kinase Pfam Description: pfkB family carbohydrate kinase
  misc_feature (8)..(478): Homolog of NCBI NO: 15232415 NR Description: pfkB type carbohydrate kinase protein family
  misc_feature (85)..(478): Homolog of NCBI NO: 34908334 NR Description: putative fructokinase [Oryza sativa (japonica group)] >gi|20805178|dbj|BAB92847.1| putative fructokinase [Oryza
  misc_feature (74)..(460): Homolog of NCBI NO: 6730638 NR Description: F4N2.16 [Arabidopsis thaliana]
  misc_feature (74)..(460): Homolog of NCBI NO: 15222232 NR Description: pfkB type carbohydrate kinase protein family
  misc_feature (146)..(327): Homolog of NCBI NO: 33329198 NR Description: putative fructokinase; S1 self-incompatibility
  misc_feature (146)..(327): Homolog of NCBI NO: 33329200 NR Description: putative fructokinase 2; S2 self-incompatibility
  misc_feature (359)..(468): Homolog of NCBI NO: 33329198 NR Description: putative fructokinase; S1 self-incompatibility
  misc_feature (359)..(468): Homolog of NCBI NO: 33329200 NR Description: putative fructokinase 2; S2 self-incompatibility
  misc_feature (146)..(327): Homolog of NCBI NO: 21592495 NR Description: fructokinase-like protein [Arabidopsis thaliana]
  misc_feature (359)..(468): Homolog of NCBI NO: 21592495 NR Description: fructokinase-like protein [Arabidopsis thaliana]
SGVKNPSMASLLIFPHLHHFDSSLDRREVLVVRHSQASRRFLTPKASINGSGITNGAAAETTSKPSRKGRKKKQTSTVIEKDNTETDPELNPELADYDDGIEFPYDDPPLVCCFGAVQKEFVPVVRVHDNPMHPDMYSQWKMLQWDPPEFGRAPGGPPSNVAISHVRLGGRAAFMGKVGEDDFGDELVLMMNQERVQTRAVKFDENSKTACTRVKIKFKDGKMMAETVKEPPEDSLFASELNLAVLKEARIFHFNSEVLTSPTMQSTLFTAIQWSKKFGGLIFFDLNLPLPLWRSRNETRKLIKKAWNEANIIEVSQQELEFLLDEDYYERRRNYTPQYFAEDFDQTKNRRDYYHYTPEEIKSLWHDKLKLLVVTDGTLRLHYYTPTFDGVVIGTEDVLITPFTCDRTGSGDAVVAGIMRKLTTCPEMFEDQDVMERQLRFAVAAGIIAQWTIGAVRGFPTESATQNLKEQVYVPSMW

SEQ ID NO: 107373 - protein, 471 aa, Arabidopsis thaliana
  peptide (1)..(471): Ceres Seq. ID no. 13646980
  misc_feature (101)..(455): Pfam Name: pfkB family carbohydrate kinase Pfam Description: pfkB family carbohydrate kinase
  misc_feature (1)..(471): Homolog of NCBI NO: 15232415 NR Description: pfkB type carbohydrate kinase protein family
  misc_feature (78)..(471): Homolog of NCBI NO: 34908334 NR Description: putative fructokinase [Oryza sativa (japonica group)] >gi|20805178|dbj|BAB92847.1| putative fructokinase [Oryza
  misc_feature (67)..(453): Homolog of NCBI NO: 6730638 NR Description: F4N2.16 [Arabidopsis thaliana]
  misc_feature (67)..(453): Homolog of NCBI NO: 15222232 NR Description: pfkB type carbohydrate kinase protein family
  misc_feature (139)..(320): Homolog of NCBI NO: 33329198 NR Description: putative fructokinase; S1 self-incompatibility
  misc_feature (139)..(320): Homolog of NCBI NO: 33329200 NR Description: putative fructokinase 2; S2 self-incompatibility
  misc_feature (352)..(461): Homolog of NCBI NO: 33329198 NR Description: putative fructokinase; S1 self-incompatibility
  misc_feature (352)..(461): Homolog of NCBI NO: 33329200 NR Description: putative fructokinase 2; S2 self-incompatibility
  misc_feature (139)..(320): Homolog of NCBI NO: 21592495 NR Description: fructokinase-like protein [Arabidopsis thaliana]
  misc_feature (352)..(461): Homolog of NCBI NO: 21592495 NR Description: fructokinase-like protein [Arabidopsis thaliana]
MASLLIFPHLHHFDSSLDRREVLVVRHSQASRRFLTPKASINGSGITNGAAAETTSKPSRKGRKKKQTSTVIEKDNTETDPELNPELADYDDGIEFPYDDPPLVCCFGAVQKEFVPVVRVHDNPMHPDMYSQWKMLQWDPPEFGRAPGGPPSNVAISHVRLGGRAAFMGKVGEDDFGDELVLMMNQERVQTRAVKFDENSKTACTRVKIKFKDGKMMAETVKEPPEDSLFASELNLAVLKEARIFHFNSEVLTSPTMQSTLFTAIQWSKKFGGLIFFDLNLPLPLWRSRNETRKLIKKAWNEANIIEVSQQELEFLLDEDYYERRRNYTPQYFAEDFDQTKNRRDYYHYTPEEIKSLWHDKLKLLVVTDGTLRLHYYTPTFDGVVIGTEDVLITPFTCDRTGSGDAVVAGIMRKLTTCPEMFEDQDVMERQLRFAVAAGIIAQWTIGAVRGFPTESATQNLKEQVYVPSMW

SEQ ID NO: 107374 - protein, 347 aa, Arabidopsis thaliana; identical to SEQ ID NO: 46900
  peptide (1)..(347): Ceres Seq. ID no. 13646981
  misc_feature (1)..(331): Pfam Name: pfkB family carbohydrate kinase Pfam Description: pfkB family carbohydrate kinase
  misc_feature (1)..(347): Homolog of NCBI NO: 15232415 NR Description: pfkB type carbohydrate kinase protein family
  misc_feature (1)..(347): Homolog of NCBI NO: 34908334 NR Description: putative fructokinase [Oryza sativa (japonica group)] >gi|20805178|dbj|BAB92847.1| putative fructokinase [Oryza
  misc_feature (1)..(329): Homolog of NCBI NO: 6730638 NR Description: F4N2.16 [Arabidopsis thaliana]
  misc_feature (1)..(329): Homolog of NCBI NO: 15222232 NR Description: pfkB type carbohydrate kinase protein family
  misc_feature (15)..(196): Homolog of NCBI NO: 33329198 NR Description: putative fructokinase; S1 self-incompatibility
  misc_feature (15)..(196): Homolog of NCBI NO: 33329200 NR Description: putative fructokinase 2; S2 self-incompatibility
  misc_feature (228)..(337): Homolog of NCBI NO: 33329198 NR Description: putative fructokinase; S1 self-incompatibility
  misc_feature (228)..(337): Homolog of NCBI NO: 33329200 NR Description: putative fructokinase 2; S2 self-incompatibility
  misc_feature (15)..(196): Homolog of NCBI NO: 21592495 NR Description: fructokinase-like protein [Arabidopsis thaliana]
  misc_feature (228)..(337): Homolog of NCBI NO: 21592495 NR Description: fructokinase-like protein [Arabidopsis thaliana]

SEQ ID NO: 107375 - DNA, 1318 bp, Arabidopsis thaliana
  misc_feature (1)..(1318): Ceres Seq. ID no. 13646999
  misc_feature: MA Experiment ID: 20000184 Result: Down-regulated in Transcription
  misc_feature: MA Experiment 20000184 PARAMETER Experiment Name: At_Shoots__P Parameter: Age (day) Value: 7
  misc_feature: MA Experiment 20000184 PARAMETER Experiment Name: At_Shoots__P Parameter: Tissue Value: Shoots vs. Whole Plant
  misc_feature: MA Experiment ID: 20000185 Result: Up-regulated in Transcription
  misc_feature: MA Experiment 20000185 PARAMETER Experiment Name: At_Roots__P Parameter: Age (day) Value: 7 vs. 21
  misc_feature: MA Experiment 20000185 PARAMETER Experiment Name: At_Roots__P Parameter: Organism Value: A. thaliana
  misc_feature: MA Experiment 20000185 PARAMETER Experiment Name: At_Roots__P Parameter: Tissue Value: Roots vs. Whole Plant
  misc_feature: MA Experiment ID: 20000439 Result: Up-regulated in Transcription
  misc_feature: MA Experiment 20000439 PARAMETER Experiment Name: At_Roots__P Parameter: Age (day) Value: 14 vs. 21
  misc_feature: MA Experiment 20000439 PARAMETER Experiment Name: At_Roots__P Parameter: Organism Value: A. thaliana
  misc_feature: MA Experiment 20000439 PARAMETER Experiment Name: At_Roots__P Parameter: Tissue Value: Roots vs. Whole Plant
  misc_feature: MA Experiment ID: 20000495 Result: Up-regulated in Transcription
  misc_feature: MA Experiment 20000495 PARAMETER Experiment Name: At_Guard_Cells_P Parameter: Harvest Date Value: 8/2/2002
  misc_feature: MA Experiment 20000495 PARAMETER Experiment Name: At_Guard_Cells_P Parameter: Organism Value: A. thaliana
  misc_feature: MA Experiment 20000495 PARAMETER Experiment Name: At_Guard_Cells_P Parameter: Tissue Value: Guard Cells vs. Leaves
  misc_feature: MA Experiment ID: 20001905 Result: Down-regulated in Transcription
  misc_feature: MA Experiment 20001905 PARAMETER Experiment Name: At_Drought_Reproduction_P Parameter: Age (day) Value: 40
  misc_feature: MA Experiment 20001905 PARAMETER Experiment Name: At_Drought_Reproduction_P Parameter: Organism Value: A. thaliana
  misc_feature: MA Experiment 20001905 PARAMETER Experiment Name: At_Drought_Reproduction_P Parameter: Plant Line Value: WS
  misc_feature: MA Experiment 20001905 PARAMETER Experiment Name: At_Drought_Reproduction_P Parameter: Timepoint (day) Value: 10
  misc_feature: MA Experiment 20001905 PARAMETER Experiment Name: At_Drought_Reproduction_P Parameter: Tissue Value: Rosettes
  misc_feature: MA Experiment 20001905 PARAMETER Experiment Name: At_Drought_Reproduction_P Parameter: Treatment Value: Drought vs. No Drought
ggagcaaaacaccaggaggaaaccaaaaagctagaggctttgtggagtgagaagaagagtctcagtgaaaacagaaagcagcatttgagattccactgttaatctttgaatcaaaaatgagtgcagcagctacaatgcctatgccccgagaagcgtctaattacgatgagatctctatgcaacagagcatgctcttctctgatagtctcaaggatctgaagaatctgagaacacagttgtattcagcagctgagtatttcgaactatcctacacaaacgatgaacaaaaacagatagtcgtggagacactgaaagattatgcaataaaggctctggtgaatacagttgaccatttggggtctgttacatataaagtaaatgactttgtagatgaaaaagtcgatgaagtagcaggaaccgaactgcgagtatcttgcattgaacagaggctacggatgtgccaagagtacatggatcatgaaggtcgttcccagcaatcacttgtgatcgacactccaaagttccacaagcggtacttcttgccttctggtgaaatcaaaagaggtggcaacctcgcaaagcttaagaatgttgaaggtagttttgatggagaagatgactggaaccaattcagaaatgctgttcgcgctacaattcgtgaaacgcctccaccacctgttaggtatagtccagtactcataaaaaccgatacttcagtctccctctcaacggaaacctcaacgttcagcaaccttttcgttctcctctatcgccaccgcaccaaagaaagaacaagtgtgcatggtaaaatagataagcgagcagtatcaccacatcggtttccgctgctaagatctggttcggttgctatccgaccgtcatcaatcagccggccaacaaccccgagcaagagtagagcggtaactccaactcctaaacggtatccgtcagaaccaagaagatcggcttcggttcgggttgcgttcgagaaagaagctcagaaagaaccagagcatcaacaacaaccgagcaagagcaaacggctgctaaaggcgctacttagccgacgcaaaacaaagaaggacgatacgctctacacttatttggacgaatattaaaccgaaagctggttttgtatgttgactggtaaaccggaaattacattccagttttaattgcatttacgtaatgtcaaattgtcaaaatatgtgttacaaaatatgtccatgattctatgattttgtgtataccttatgactgtcagagtgtgaatgcagttttgtttacaagcgtagtaaaatttgctgtgaattatttt

SEQ ID NO: 107376 - protein, 333 aa, Arabidopsis thaliana
  peptide (1)..(333): Ceres Seq. ID no. 13647000
  misc_feature (1)..(333): Homolog of NCBI NO: 10177091 NR Description: emb|CAB66408.1~gene_id:MOP9.13~strong similarity
  misc_feature (1)..(333): Homolog of NCBI NO: 30689382 NR Description: expressed protein [Arabidopsis thaliana]
  misc_feature (7)..(333): Homolog of NCBI NO: 15229112 NR Description: expressed protein [Arabidopsis thaliana]
  misc_feature (142)..(333): Homolog of NCBI NO: 26451274 NR Description: unknown protein [Arabidopsis thaliana]
  misc_feature (13)..(146): Homolog of NCBI NO: 34913914 NR Description: OSJNBa0066C06.8 [Oryza sativa (japonica
  misc_feature (271)..(333): Homolog of NCBI NO: 34913914 NR Description: OSJNBa0066C06.8 [Oryza sativa (japonica
  misc_feature (12)..(189): Homolog of NCBI NO: 15238265 NR Description: expressed protein [Arabidopsis thaliana] emb|CAB66408.1~gene_id:MJC20.13~similar to unknown protein
  misc_feature (191)..(321): Homolog of NCBI NO: 15238265 NR Description: expressed protein [Arabidopsis thaliana] emb|CAB66408.1~gene_id:MJC20.13~similar to unknown protein
  misc_feature (12)..(189): Homolog of NCBI NO: 21618229 NR Description: unknown [Arabidopsis thaliana]
  misc_feature (191)..(320): Homolog of NCBI NO: 21618229 NR Description: unknown [Arabidopsis thaliana]
MSAAATMPMPREASNYDEISMQQSMLFSDSLKDLKNLRTQLYSAAEYFELSYTNDEQKQIVVETLKDYAIKALVNTVDHLGSVTYKVNDFVDEKVDEVAGTELRVSCIEQRLRMCQEYMDHEGRSQQSLVIDTPKFHKRYFLPSGEIKRGGNLAKLKNVEGSFDGEDDWNQFRNAVRATIRETPPPPVRYSPVLIKTDTSVSLSTETSTFSNLFVLLYRHRTKERTSVHGKIDKRAVSPHRFPLLRSGSVAIRPSSISRPTTPSKSRAVTPTPKRYPSEPRRSASVRVAFEKEAQKEPEHQQQPSKSKRLLKALLSRRKTKKDDTLYTYLDEY

SEQ ID NO: 107377 - protein, 327 aa, Arabidopsis thaliana
  peptide (1)..(327): Ceres Seq. ID no. 13647001
  misc_feature (1)..(327): Homolog of NCBI NO: 10177091 NR Description: emb|CAB66408.1~gene_id:MOP9.13~strong similarity
  misc_feature (1)..(327): Homolog of NCBI NO: 30689382 NR Description: expressed protein [Arabidopsis thaliana]
  misc_feature (1)..(327): Homolog of NCBI NO: 15229112 NR Description: expressed protein [Arabidopsis thaliana]
  misc_feature (136)..(327): Homolog of NCBI NO: 26451274 NR Description: unknown protein [Arabidopsis thaliana]
  misc_feature (7)..(140): Homolog of NCBI NO: 34913914 NR Description: OSJNBa0066C06.8 [Oryza sativa (japonica
  misc_feature (265)..(327): Homolog of NCBI NO: 34913914 NR Description: OSJNBa0066C06.8 [Oryza sativa (japonica
  misc_feature (6)..(183): Homolog of NCBI NO: 15238265 NR Description: expressed protein [Arabidopsis thaliana] emb|CAB66408.1~gene_id:MJC20.13~similar to unknown protein
  misc_feature (185)..(315): Homolog of NCBI NO: 15238265 NR Description: expressed protein [Arabidopsis thaliana] emb|CAB66408.1~gene_id:MJC20.13~similar to unknown protein
  misc_feature (6)..(183): Homolog of NCBI NO: 21618229 NR Description: unknown [Arabidopsis thaliana]
  misc_feature (185)..(314): Homolog of NCBI NO: 21618229 NR Description: unknown [Arabidopsis thaliana]
MPMPREASNYDEISMQQSMLFSDSLKDLKNLRTQLYSAAEYFELSYTNDEQKQIVVETLKDYAIKALVNTVDHLGSVTYKVNDFVDEKVDEVAGTELRVSCIEQRLRMCQEYMDHEGRSQQSLVIDTPKFHKRYFLPSGEIKRGGNLAKLKNVEGSFDGEDDWNQFRNAVRATIRETPPPPVRYSPVLIKTDTSVSLSTETSTFSNLFVLLYRHRTKERTSVHGKIDKRAVSPHRFPLLRSGSVAIRPSSISRPTTPSKSRAVTPTPKRYPSEPRRSASVRVAFEKEAQKEPEHQQQPSKSKRLLKALLSRRKTKKDDTLYTYLDEY

SEQ ID NO: 107378 - protein, 325 aa, Arabidopsis thaliana
  peptide (1)..(325): Ceres Seq. ID no. 13647002
  misc_feature (1)..(325): Homolog of NCBI NO: 10177091 NR Description: emb|CAB66408.1~gene_id:MOP9.13~strong similarity
  misc_feature (1)..(325): Homolog of NCBI NO: 30689382 NR Description: expressed protein [Arabidopsis thaliana]
  misc_feature (1)..(325): Homolog of NCBI NO: 15229112 NR Description: expressed protein [Arabidopsis thaliana]
  misc_feature (134)..(325): Homolog of NCBI NO: 26451274 NR Description: unknown protein [Arabidopsis thaliana]
  misc_feature (5)..(138): Homolog of NCBI NO: 34913914 NR Description: OSJNBa0066C06.8 [Oryza sativa (japonica
  misc_feature (263)..(325): Homolog of NCBI NO: 34913914 NR Description: OSJNBa0066C06.8 [Oryza sativa (japonica
  misc_feature (4)..(181): Homolog of NCBI NO: 15238265 NR Description: expressed protein [Arabidopsis thaliana] emb|CAB66408.1~gene_id:MJC20.13~similar to unknown protein
  misc_feature (183)..(313): Homolog of NCBI NO: 15238265 NR Description: expressed protein [Arabidopsis thaliana] emb|CAB66408.1~gene_id:MJC20.13~similar to unknown protein
  misc_feature (4)..(181): Homolog of NCBI NO: 21618229 NR Description: unknown [Arabidopsis thaliana]
  misc_feature (183)..(312): Homolog of NCBI NO: 21618229 NR Description: unknown [Arabidopsis thaliana]
MPREASNYDEISMQQSMLFSDSLKDLKNLRTQLYSAAEYFELSYTNDEQKQIVVETLKDYAIKALVNTVDHLGSVTYKVNDFVDEKVDEVAGTELRVSCIEQRLRMCQEYMDHEGRSQQSLVIDTPKFHKRYFLPSGEIKRGGNLAKLKNVEGSFDGEDDWNQFRNAVRATIRETPPPPVRYSPVLIKTDTSVSLSTETSTFSNLFVLLYRHRTKERTSVHGKIDKRAVSPHRFPLLRSGSVAIRPSSISRPTTPSKSRAVTPTPKRYPSEPRRSASVRVAFEKEAQKEPEHQQQPSKSKRLLKALLSRRKTKKDDTLYTYLDEY

SEQ ID NO: 107379 - DNA, 1667 bp, Arabidopsis thaliana
  misc_feature (1)..(1667): Ceres Seq. ID no. 13647244
  misc_feature: MA Experiment ID: 20000184 Result: Down-regulated in Transcription
  misc_feature: MA Experiment 20000184 PARAMETER Experiment Name: At_Shoots__P Parameter: Age (day) Value: 7
  misc_feature: MA Experiment 20000184 PARAMETER Experiment Name: At_Shoots__P Parameter: Tissue Value: Shoots vs. Whole Plant
gacggcaaaggatctctctctttcccagcatcaccatctcttgtaccagtttctgattagattcaacaatgaacggcgcattaggtaactcctccgcctccgttagcggcggagaaggagccggaggaccagcgcctttcttggtgaaaacctacgagatggtcgacgattcatcaacggaccagatcgtatcgtggagcgctaacaacaacagcttcatcgtttggaatcatgccgaattttcacgcctccttcttccaacctacttcaaacacaataacttctcttccttcattcgtcagctcaatacctatgggtttaggaagattgatccagagaggtgggagtttttgaatgatgattttattaaggatcagaagcatcttctcaagaatatacatagaaggaaacctatacacagccacagtcatccacctgcttcgtcgactgatcaagaaagagcagtgttgcaagagcaaatggacaagctttcacgtgagaaagctgcaattgaagctaagcttttaaagttcaaacaacagaaggttgtagcaaagcatcagtttgaagaaatgactgagcatgttgatgatatggagaataggcagaagaagctgctgaattttttggaaactgcgattcggaatcctacttttgttaagaattttggtaagaaagtcgagcagttggatatttcagcttacaacaaaaagcgaaggctccctgaagttgagcaatcaaagccaccttcagaagattctcatctggataatagtagtggtagctcgagacgcgagtctggaaacatttttcatcaaaatttctctaataaattgcgactagagctttctccagctgattcagatatgaacatggtttcacacagtatacaaagttccaatgaagaaggtgcgagtcccaaagggatactgtcaggaggtgatccaaatactacactaacaaaaagagaaggcctaccatttgcacctgaagctctagagcttgcggataccgggacatgcccgaggagattactgttaaatgataatacaagggtggagaccttgcagcagaggctaacttcttcagaggagactgatggtagcttttcatgtcatttaaatctaaccctggcttctgctccgttaccggacaaaacagcttcacagatagctaagacgactcttaaaagtcaggagttaaactttaactcaatagaaacaagtgcaagtgagaaaaatcggggtagacaagagattgcagttggaggtagccaagcaaatgcagctcctccagcaagagtgaatgatgtattctgggaacagttcctaacagaaaggccagggtcttcagataatgaggaggcaagttcgacttatagaggtaacccatacgaagagcaagaggagaaaagaaacgggagtatgatgttacgtaatacaaagaatatcgagcagctgaccttataaactatttggacggttacatcaacgagagtacgaactgtggttttggtaagaagtatgggtgagtaagtaatgaaacattggactgaaaaagcgtaagtagctttgttgtaaacacttgcgtctctgtctacacaagtaatttgactgtaaatgtaagtgtacaggatttaaattgaataagcatttttttcgtgtcgt

SEQ ID NO: 107380 - protein, 466 aa, Arabidopsis thaliana
  peptide (1)..(466): Ceres Seq. ID no. 15218829
  misc_feature (21)..(187): Pfam Name: HSF-type DNA-binding Pfam Description: HSF-type DNA-binding
  misc_feature (1)..(466): Homolog of NCBI NO: 7488121 NR Description: probable heat shock transcription factor - thaliana >gi|2244754|emb|CAB10177.1| heat shock transcription like protein [Arabidopsis thaliana] >gi|7268102|emb|CAB78440.1|
  misc_feature (1)..(466): Homolog of NCBI NO: 18414114 NR Description: heat shock transcription factor family thaliana] >gi|14517387|gb|AAK62584.1| AT4g13980/dl3030c thaliana] >gi|24111373|gb|AAN46810.1| At4g13980/dl3030c
  misc_feature (12)..(219): Homolog of NCBI NO: 34909524 NR Description: putative heat shock factor [Oryza sativa cultivar- group)] >gi|14209551|dbj|BAB56047.1| putative heat
  misc_feature (339)..(466): Homolog of NCBI NO: 34909524 NR Description: putative heat shock factor [Oryza sativa cultivar- group)] >gi|14209551|dbj|BAB56047.1| putative heat
  misc_feature (15)..(276): Homolog of NCBI NO: 3399765 NR Description: heat shock transcription factor 21 [Arabidopsis
  misc_feature (15)..(276): Homolog of NCBI NO: 15234053 NR Description: heat shock transcription factor 21 [Arabidopsis
  misc_feature (400)..(432): Homolog of NCBI NO: 3399765 NR Description: heat shock transcription factor 21 [Arabidopsis
  misc_feature (400)..(432): Homolog of NCBI NO: 15234053 NR Description: heat shock transcription factor 21 [Arabidopsis
  misc_feature (23)..(219): Homolog of NCBI NO: 5821138 NR Description: heat shock factor [Nicotiana tabacum]
  misc_feature (348)..(464): Homolog of NCBI NO: 5821138 NR Description: heat shock factor [Nicotiana tabacum]
MNGALGNSSASVSGGEGAGGPAPFLVKTYEMVDDSSTDQIVSWSANNNSFIVWNHAEFSRLLLPTYFKHNNFSSFIRQLNTYGFRKIDPERWEFLNDDFIKDQKHLLKNIHRRKPIHSHSHPPASSTDQERAVLQEQMDKLSREKAAIEAKLLKFKQQKVVAKHQFEEMTEHVDDMENRQKKLLNFLETAIRNPTFVKNFGKKVEQLDISAYNKKRRLPEVEQSKPPSEDSHLDNSSGSSRRESGNIFHQNFSNKLRLELSPADSDMNMVSHSIQSSNEEGASPKGILSGGDPNTTLTKREGLPFAPEALELADTGTCPRRLLLNDNTRVETLQQRLTSSEETDGSFSCHLNLTLASAPLPDKTASQIAKTTLKSQELNFNSIETSASEKNRGRQEIAVGGSQANAAPPARVNDVFWEQFLTERPGSSDNEEASSTYRGNPYEEQEEKRNGSMMLRNTKNIEQLTL

SEQ ID NO: 107381 - protein, 436 aa, Arabidopsis thaliana
  peptide (1)..(436): Ceres Seq. ID no. 15218830
  misc_feature (1)..(157): Pfam Name: HSF-type DNA-binding Pfam Description: HSF-type DNA-binding
  misc_feature (1)..(436): Homolog of NCBI NO: 7488121 NR Description: probable heat shock transcription factor - thaliana >gi|2244754|emb|CAB10177.1| heat shock transcription like protein [Arabidopsis thaliana] >gi|7268102|emb|CAB78440.1|
  misc_feature (1)..(436): Homolog of NCBI NO: 18414114 NR Description: heat shock transcription factor family thaliana] >gi|14517387|gb|AAK62584.1| AT4g13980/dl3030c thaliana] >gi|24111373|gb|AAN46810.1| At4g13980/dl3030c
  misc_feature (1)..(189): Homolog of NCBI NO: 34909524 NR Description: putative heat shock factor [Oryza sativa cultivar- group)] >gi|14209551|dbj|BAB56047.1| putative heat
  misc_feature (309)..(436): Homolog of NCBI NO: 34909524 NR Description: putative heat shock factor [Oryza sativa cultivar- group)] >gi|14209551|dbj|BAB56047.1| putative heat
  misc_feature (1)..(246): Homolog of NCBI NO: 3399765 NR Description: heat shock transcription factor 21 [Arabidopsis
  misc_feature (1)..(246): Homolog of NCBI NO: 15234053 NR Description: heat shock transcription factor 21 [Arabidopsis
  misc_feature (370)..(402): Homolog of NCBI NO: 3399765 NR Description: heat shock transcription factor 21 [Arabidopsis
  misc_feature (370)..(402): Homolog of NCBI NO: 15234053 NR Description: heat shock transcription factor 21 [Arabidopsis
  misc_feature (1)..(189): Homolog of NCBI NO: 5821138 NR Description: heat shock factor [Nicotiana tabacum]
  misc_feature (318)..(434): Homolog of NCBI NO: 5821138 NR Description: heat shock factor [Nicotiana tabacum]
MVDDSSTDQIVSWSANNNSFIVWNHAEFSRLLLPTYFKHNNFSSFIRQLNTYGFRKIDPERWEFLNDDFIKDQKHLLKNIHRRKPIHSHSHPPASSTDQERAVLQEQMDKLSREKAAIEAKLLKFKQQKVVAKHQFEEMTEHVDDMENRQKKLLNFLETAIRNPTFVKNFGKKVEQLDISAYNKKRRLPEVEQSKPPSEDSHLDNSSGSSRRESGNIFHQNFSNKLRLELSPADSDMNMVSHSIQSSNEEGASPKGILSGGDPNTTLTKREGLPFAPEALELADTGTCPRRLLLNDNTRVETLQQRLTSSEETDGSFSCHLNLTLASAPLPDKTASQIAKTTLKSQELNFNSIETSASEKNRGRQEIAVGGSQANAAPPARVNDVFWEQFLTERPGSSDNEEASSTYRGNPYEEQEEKRNGSMMLRNTKNIEQLTL

SEQ ID NO: 107382 - protein, 329 aa, Arabidopsis thaliana
  peptide (1)..(329): Ceres Seq. ID no. 15218831
  misc_feature (1)..(329): Homolog of NCBI NO: 7488121 NR Description: probable heat shock transcription factor - thaliana >gi|2244754|emb|CAB10177.1| heat shock transcription like protein [Arabidopsis thaliana] >gi|7268102|emb|CAB78440.1|
  misc_feature (1)..(329): Homolog of NCBI NO: 18414114 NR Description: heat shock transcription factor family thaliana] >gi|14517387|gb|AAK62584.1| AT4g13980/dl3030c thaliana] >gi|24111373|gb|AAN46810.1| At4g13980/dl3030c
  misc_feature (1)..(82): Homolog of NCBI NO: 34909524 NR Description: putative heat shock factor [Oryza sativa cultivar- group)] >gi|14209551|dbj|BAB56047.1| putative heat
  misc_feature (202)..(329): Homolog of NCBI NO: 34909524 NR Description: putative heat shock factor [Oryza sativa cultivar- group)] >gi|14209551|dbj|BAB56047.1| putative heat
  misc_feature (1)..(139): Homolog of NCBI NO: 3399765 NR Description: heat shock transcription factor 21 [Arabidopsis
  misc_feature (1)..(139): Homolog of NCBI NO: 15234053 NR Description: heat shock transcription factor 21 [Arabidopsis
  misc_feature (263)..(295): Homolog of NCBI NO: 3399765 NR Description: heat shock transcription factor 21 [Arabidopsis
  misc_feature (263)..(295): Homolog of NCBI NO: 15234053 NR Description: heat shock transcription factor 21 [Arabidopsis
  misc_feature (1)..(82): Homolog of NCBI NO: 5821138 NR Description: heat shock factor [Nicotiana tabacum]
  misc_feature (211)..(327): Homolog of NCBI NO: 5821138 NR Description: heat shock factor [Nicotiana tabacum]
MDKLSREKAAIEAKLLKFKQQKVVAKHQFEEMTEHVDDMENRQKKLLNFLETAIRNPTFVKNFGKKVEQLDISAYNKKRRLPEVEQSKPPSEDSHLDNSSGSSRRESGNIFHQNFSNKLRLELSPADSDMNMVSHSIQSSNEEGASPKGILSGGDPNTTLTKREGLPFAPEALELADTGTCPRRLLLNDNTRVETLQQRLTSSEETDGSFSCHLNLTLASAPLPDKTASQIAKTTLKSQELNFNSIETSASEKNRGRQEIAVGGSQANAAPPARVNDVFWEQFLTERPGSSDNEEASSTYRGNPYEEQEEKRNGSMMLRNTKNIEQLTL

SEQ ID NO: 107383 - DNA, 1285 bp, Arabidopsis thaliana
  misc_feature (1)..(1285): Ceres Seq. ID no. 13647652
  misc_feature: MA Experiment ID: 20000440 Result: Up-regulated in Transcription
  misc_feature: MA Experiment 20000440 PARAMETER Experiment Name: At_Closed-Flower__Sub_P Parameter: Tissue Value: Closed Flower vs. Whole Plant
tcttcatacaacattttagctttactttttctctttactcttctctctctctttctctttctctttctctttcactcgttctctctcactcactctcttcacacacagatccaagatggcctcttcaatggctagcaatgatttccagctccctccacgtttcttcactgttttcgtctcccatttcagctcagagttcatggtgatcccagtttcctactacgatcacattccacatcgtttccccaagactgtgattctccgaggacctggtggatgctcctggaaggtagcgacggagataaaggatgatgaagtgcttttttcacaaggatggcccaaatttgttcgggataatactcttaacgatggagactttttgacctttgcctataatggagctcacatattcgaggtcagtatctttcgcggctacgacgcatgtaaagagattagcgaagtcactgaattggaagaggaagaagaagacagtgttatatctctgagcagtgaagacacagacactggtgctaaatctgagatgaagaatacagtcccggaaggcagagacaaaggaaagtcaaaagtggaagttgtggaggattctgatgacgatgaggaggaggatagtgtttattctgaaagcagtgaagaaacagagacagacactgattctgaattcaaggtggccaagccaacaataccaaaaagccagaagaaaggaaagaagaaagaacaagttgtggagtcctctgatgacgaggaagacgaagaggaggacagtgacagtgattacattgaaacgtttggtcaattggatattgaagagaattccatcagtgaggaggacagttcttatgctcctgataaagaagacacagccactgcctcttttgtcaaaccaaaggttgcaaataaggttgctaatctgaagaggaaagtcgatcccatgatcaagaatcctgagagatacctcgatgatcctaagaatatccatttcgagacaaacgtgaagaataggttatacgagctgttggttcatgcacaactggtgaaagactattgcttgaggtttggagactatgttaactacatcgacaggttcgggaaactaagtgctaaaacagccaaatggaaggatcagcgtgtttgtatcaaaagatggatgcgcatatgcaagaggaacaagttgaagaaagaagaccgcattttgtgtgagctcttgcgcaagggaactttcgtttacgcaatcaaactccatgtcatccgcggtaaggatctgtag

SEQ ID NO: 107384 - protein, 389 aa, Arabidopsis thaliana
  peptide (1)..(389): Ceres Seq. ID no. 13647653
  misc_feature (0)..(0): Pfam Name: Eukaryotic translation initiation factor 3 Pfam Description: Eukaryotic translation initiation factor 3
  misc_feature (1)..(389): Homolog of NCBI NO: 15235362 NR Description: transcriptional factor B3 family [Arabidopsis
  misc_feature (212)..(385): Homolog of NCBI NO: 15230649 NR Description: transcriptional factor B3 family [Arabidopsis >gi|6862920|gb|AAF30309.1|AC018907_9 hypothetical protein
  misc_feature (3)..(206): Homolog of NCBI NO: 15230649 NR Description: transcriptional factor B3 family [Arabidopsis >gi|6862920|gb|AAF30309.1|AC018907_9 hypothetical protein
  misc_feature (5)..(171): Homolog of NCBI NO: 15230669 NR Description: transcriptional factor B3 family [Arabidopsis >gi|6862926|gb|AAF30315.1|AC018907_15 hypothetical protein
  misc_feature (201)..(385): Homolog of NCBI NO: 18409814 NR Description: transcriptional factor B3 family [Arabidopsis
  misc_feature (201)..(385): Homolog of NCBI NO: 11357788 NR Description: hypothetical protein F4P12.10 - Arabidopsis >gi|6729482|emb|CAB67638.1| putative protein [Arabidopsis
  misc_feature (7)..(234): Homolog of NCBI NO: 11357788 NR Description: hypothetical protein F4P12.10 - Arabidopsis >gi|6729482|emb|CAB67638.1| putative protein [Arabidopsis
  misc_feature (7)..(184): Homolog of NCBI NO: 18409814 NR Description: transcriptional factor B3 family [Arabidopsis
  misc_feature (7)..(227): Homolog of NCBI NO: 15238624 NR Description: transcriptional factor B3 family [Arabidopsis
  misc_feature (208)..(385): Homolog of NCBI NO: 15242851 NR Description: transcriptional factor B3 family [Arabidopsis >gi|9759269|dbj|BAB09590.1| gb|AAF30309.1~gene_id:MRI1.8~similar
MASSMASNDFQLPPRFFTVFVSHFSSEFMVIPVSYYDHIPHRFPKTVILRGPGGCSWKVATEIKDDEVLFSQGWPKFVRDNTLNDGDFLTFAYNGAHIFEVSIFRGYDACKEISEVTELEEEEEDSVISLSSEDTDTGAKSEMKNTVPEGRDKGKSKVEVVEDSDDDEEEDSVYSESSEETETDTDSEFKVAKPTIPKSQKKGKKKEQVVESSDDEEDEEEDSDSDYIETFGQLDIEENSISEEDSSYAPDKEDTATASFVKPKVANKVANLKRKVDPMIKNPERYLDDPKNIHFETNVKNRLYELLVHAQLVKDYCLRFGDYVNYIDRFGKLSAKTAKWKDQRVCIKRWMRICKRNKLKKEDRILCELLRKGTFVYAIKLHVIRGKDL

SEQ ID NO: 107385 - protein, 385 aa, Arabidopsis thaliana
  peptide (1)..(385): Ceres Seq. ID no. 13647654
  misc_feature (0)..(0): Pfam Name: Eukaryotic translation initiation factor 3 Pfam Description: Eukaryotic translation initiation factor 3
  misc_feature (1)..(385): Homolog of NCBI NO: 15235362 NR Description: transcriptional factor B3 family [Arabidopsis
  misc_feature (208)..(381): Homolog of NCBI NO: 15230649 NR Description: transcriptional factor B3 family [Arabidopsis >gi|6862920|gb|AAF30309.1|AC018907_9 hypothetical protein
  misc_feature (1)..(202): Homolog of NCBI NO: 15230649 NR Description: transcriptional factor B3 family [Arabidopsis >gi|6862920|gb|AAF30309.1|AC018907_9 hypothetical protein
  misc_feature (1)..(167): Homolog of NCBI NO: 15230669 NR Description: transcriptional factor B3 family [Arabidopsis >gi|6862926|gb|AAF30315.1|AC018907_15 hypothetical protein
  misc_feature (197)..(381): Homolog of NCBI NO: 18409814 NR Description: transcriptional factor B3 family [Arabidopsis
  misc_feature (197)..(381): Homolog of NCBI NO: 11357788 NR Description: hypothetical protein F4P12.10 - Arabidopsis >gi|6729482|emb|CAB67638.1| putative protein [Arabidopsis
  misc_feature (3)..(230): Homolog of NCBI NO: 11357788 NR Description: hypothetical protein F4P12.10 - Arabidopsis >gi|6729482|emb|CAB67638.1| putative protein [Arabidopsis
  misc_feature (3)..(180): Homolog of NCBI NO: 18409814 NR Description: transcriptional factor B3 family [Arabidopsis
  misc_feature (3)..(223): Homolog of NCBI NO: 15238624 NR Description: transcriptional factor B3 family [Arabidopsis
  misc_feature (204)..(381): Homolog of NCBI NO: 15242851 NR Description: transcriptional factor B3 family [Arabidopsis >gi|9759269|dbj|BAB09590.1| gb|AAF30309.1~gene_id:MRI1.8~similar
MASNDFQLPPRFFTVFVSHFSSEFMVIPVSYYDHIPHRFPKTVILRGPGGCSWKVATEIKDDEVLFSQGWPKFVRDNTLNDGDFLTFAYNGAHIFEVSIFRGYDACKEISEVTELEEEEEDSVISLSSEDTDTGAKSEMKNTVPEGRDKGKSKVEVVEDSDDDEEEDSVYSESSEETETDTDSEFKVAKPTIPKSQKKGKKKEQVVESSDDEEDEEEDSDSDYIETFGQLDIEENSISEEDSSYAPDKEDTATASFVKPKVANKVANLKRKVDPMIKNPERYLDDPKNIHFETNVKNRLYELLVHAQLVKDYCLRFGDYVNYIDRFGKLSAKTAKWKDQRVCIKRWMRICKRNKLKKEDRILCELLRKGTFVYAIKLHVIRGKDL

SEQ ID NO: 107386 - protein, 361 aa, Arabidopsis thaliana
  peptide (1)..(361): Ceres Seq. ID no. 13647655
  misc_feature (0)..(0): Pfam Name: Eukaryotic translation initiation factor 3 Pfam Description: Eukaryotic translation initiation factor 3
  misc_feature (1)..(361): Homolog of NCBI NO: 15235362 NR Description: transcriptional factor B3 family [Arabidopsis
  misc_feature (184)..(357): Homolog of NCBI NO: 15230649 NR Description: transcriptional factor B3 family [Arabidopsis >gi|6862920|gb|AAF30309.1|AC018907_9 hypothetical protein
  misc_feature (1)..(178): Homolog of NCBI NO: 15230649 NR Description: transcriptional factor B3 family [Arabidopsis >gi|6862920|gb|AAF30309.1|AC018907_9 hypothetical protein
  misc_feature (1)..(143): Homolog of NCBI NO: 15230669 NR Description: transcriptional factor B3 family [Arabidopsis >gi|6862926|gb|AAF30315.1|AC018907_15 hypothetical protein
  misc_feature (173)..(357): Homolog of NCBI NO: 18409814 NR Description: transcriptional factor B3 family [Arabidopsis
  misc_feature (173)..(357): Homolog of NCBI NO: 11357788 NR Description: hypothetical protein F4P12.10 - Arabidopsis >gi|6729482|emb|CAB67638.1| putative protein [Arabidopsis
  misc_feature (1)..(206): Homolog of NCBI NO: 11357788 NR Description: hypothetical protein F4P12.10 - Arabidopsis >gi|6729482|emb|CAB67638.1| putative protein [Arabidopsis
  misc_feature (1)..(156): Homolog of NCBI NO: 18409814 NR Description: transcriptional factor B3 family [Arabidopsis
  misc_feature (1)..(199): Homolog of NCBI NO: 15238624 NR Description: transcriptional factor B3 family [Arabidopsis
  misc_feature (180)..(357): Homolog of NCBI NO: 15242851 NR Description: transcriptional factor B3 family [Arabidopsis >gi|9759269|dbj|BAB09590.1| gb|AAF30309.1~gene_id:MRI1.8~similar
MVIPVSYYDHIPHRFPKTVILRGPGGCSWKVATEIKDDEVLFSQGWPKFVRDNTLNDGDFLTFAYNGAHIFEVSIFRGYDACKEISEVTELEEEEEDSVISLSSEDTDTGAKSEMKNTVPEGRDKGKSKVEVVEDSDDDEEEDSVYSESSEETETDTDSEFKVAKPTIPKSQKKGKKKEQVVESSDDEEDEEEDSDSDYIETFGQLDIEENSISEEDSSYAPDKEDTATASFVKPKVANKVANLKRKVDPMIKNPERYLDDPKNIHFETNVKNRLYELLVHAQLVKDYCLRFGDYVNYIDRFGKLSAKTAKWKDQRVCIKRWMRICKRNKLKKEDRILCELLRKGTFVYAIKLHVIRGKDL

SEQ ID NO: 107387 - DNA, 960 bp, Arabidopsis thaliana
  misc_feature (1)..(960): Ceres Seq. ID no. 13647665
  misc_feature: MA Experiment ID: 20001451 Result: Down-regulated in Transcription
  misc_feature: MA Experiment 20001451 PARAMETER Experiment Name: At_Far-red-induction_P Parameter: Age (day) Value: 7
  misc_feature: MA Experiment 20001451 PARAMETER Experiment Name: At_Far-red-induction_P Parameter: Light Value: Far-red vs. White
  misc_feature: MA Experiment 20001451 PARAMETER Experiment Name: At_Far-red-induction_P Parameter: Organism Value: A. thaliana
  misc_feature: MA Experiment 20001451 PARAMETER Experiment Name: At_Far-red-induction_P Parameter: Plant Line Value: Columbia
  misc_feature: MA Experiment 20001451 PARAMETER Experiment Name: At_Far-red-induction_P Parameter: Timepoint (hr) Value: 24
  misc_feature: MA Experiment 20001451 PARAMETER Experiment Name: At_Far-red-induction_P Parameter: Tissue Value: Whole Plant
gaaaaaaagcgactaacagaagaaaaaaacgaaaaggattattccgccgtagaatccatattctctccctcatcactttgataaacaagagtctcatttttcgcttttccaaagggaacaacttcttcggattattatctatggcagagaagcttgagccggtgaaggttttgtactgcggagtttgctctcttccagcggaatactgcgaattcggtcccgatttcgctagatgtaagccctggctcgtcgaaaacgccccagatctctatcctgatctcctcaaagaagcaaatgagaaggcagcagataatgtttctgacaaactccagtcggtgggaatctcttcaggtggtgctgatggggcaccatcttcagctcagactggagggacatccaagaaggaggaagtgaagcgcctacctggggggaaagttaaaaagaaagatcgacaggaagttatcattgaaaaggttgtacgcaacaaacgcaagtgtatcaccattgtgaaaggactagaactgtttgggataaaactcagtgatgcctctaaaaagcttggtaagaagtttgccactggagcatcagttgtcaagggaccaactgaaaaggagcaaattgatgttcaaggggatataatctatgatatcgttgaattcattacagacacttggcccgacgtacctgaaagatccattttcttcatcgaagatgggaagaaggttcaggctggttgatgatcacctttgtcctcgttttttggcatggcgggttcatgtagacgagctagttcctgagttttcctatgtgtttggaggaaatcgcatcatgattataactttcaacgtaacgtatagttggatttatcatactattttcttattcgggttgcgatagttccagacatgtttctccaaacatttctctttttgggggtcttaatatttaaaatgtgtcttg

SEQ ID NO: 107388 - protein, 244 aa, Arabidopsis thaliana; identical to SEQ ID NO: 86832
  peptide (1)..(244): Ceres Seq. ID no. 13647666
  misc_feature (47)..(244): Homolog of NCBI NO: 22326739 NR Description: expressed protein [Arabidopsis thaliana] unknown protein [Arabidopsis thaliana]
  misc_feature (129)..(244): Homolog of NCBI NO: 11357422 NR Description: hypothetical protein F14F18.70 - Arabidopsis >gi|7573357|emb|CAB87663.1| putative protein [Arabidopsis
  misc_feature (47)..(128): Homolog of NCBI NO: 11357422 NR Description: hypothetical protein F14F18.70 - Arabidopsis >gi|7573357|emb|CAB87663.1| putative protein [Arabidopsis
  misc_feature (48)..(227): Homolog of NCBI NO: 34903554 NR Description: P0001B06.29 [Oryza sativa (japonica
  misc_feature (47)..(239): Homolog of NCBI NO: 19113595 NR Description: hypothetical protein [Schizosaccharomyces pombe]
  misc_feature (56)..(240): Homolog of NCBI NO: 32419455 NR Description: hypothetical protein ( hypothetical protein
  misc_feature (53)..(240): Homolog of NCBI NO: 4755083 NR Description: density regulated protein drp1 [Homo sapiens]
  misc_feature (36)..(240): Homolog of NCBI NO: 13386092 NR Description: density-regulated protein [Mus musculus]
  misc_feature (53)..(240): Homolog of NCBI NO: 31216194 NR Description: ENSANGP00000017070 [Anopheles gambiae]
  misc_feature (55)..(220): Homolog of NCBI NO: 6322474 NR Description: Hypothetical ORF; Yjr014wp [Saccharomyces

SEQ ID NO: 107389 - protein, 198 aa, Arabidopsis thaliana; identical to SEQ ID NO: 49606
  peptide (1)..(198): Ceres Seq. ID no. 13647667
  misc_feature (1)..(198): Homolog of NCBI NO: 22326739 NR Description: expressed protein [Arabidopsis thaliana] unknown protein [Arabidopsis thaliana]
  misc_feature (83)..(198): Homolog of NCBI NO: 11357422 NR Description: hypothetical protein F14F18.70 - Arabidopsis >gi|7573357|emb|CAB87663.1| putative protein [Arabidopsis
  misc_feature (1)..(82): Homolog of NCBI NO: 11357422 NR Description: hypothetical protein F14F18.70 - Arabidopsis >gi|7573357|emb|CAB87663.1| putative protein [Arabidopsis
  misc_feature (2)..(181): Homolog of NCBI NO: 34903554 NR Description: P0001B06.29 [Oryza sativa (japonica
  misc_feature (1)..(193): Homolog of NCBI NO: 19113595 NR Description: hypothetical protein [Schizosaccharomyces pombe]
  misc_feature (10)..(194): Homolog of NCBI NO: 32419455 NR Description: hypothetical protein ( hypothetical protein
  misc_feature (7)..(194): Homolog of NCBI NO: 4755083 NR Description: density regulated protein drp1 [Homo sapiens]
  misc_feature (1)..(194): Homolog of NCBI NO: 13386092 NR Description: density-regulated protein [Mus musculus]
  misc_feature (7)..(194): Homolog of NCBI NO: 31216194 NR Description: ENSANGP00000017070 [Anopheles gambiae]
  misc_feature (9)..(174): Homolog of NCBI NO: 6322474 NR Description: Hypothetical ORF; Yjr014wp [Saccharomyces

SEQ ID NO: 107390 - DNA, 1128 bp, Arabidopsis thaliana
  misc_feature (1)..(1128): Ceres Seq. ID no. 13647815
  misc_feature: MA Experiment ID: 20000314 Result: Up-regulated in Transcription
  misc_feature: MA Experiment 20000314 PARAMETER Experiment Name: At_14day_Shoots-Roots_Sub_P Parameter: Age (day) Value: 14
  misc_feature: MA Experiment 20000314 PARAMETER Experiment Name: At_14day_Shoots-Roots_Sub_P Parameter: Organism Value: A. thaliana
  misc_feature: MA Experiment 20000314 PARAMETER Experiment Name: At_14day_Shoots-Roots_Sub_P Parameter: Plant Line Value: WS
  misc_feature: MA Experiment 20000314 PARAMETER Experiment Name: At_14day_Shoots-Roots_Sub_P Parameter: Tissue Value: Roots vs. Whole Plant
  misc_feature: MA Experiment ID: 20000315 Result: Down-regulated in Transcription
  misc_feature: MA Experiment 20000315 PARAMETER Experiment Name: At_14day_Shoots-Roots_Sub_P Parameter: Age (day) Value: 14
  misc_feature: MA Experiment 20000315 PARAMETER Experiment Name: At_14day_Shoots-Roots_Sub_P Parameter: Organism Value: A. thaliana
  misc_feature: MA Experiment 20000315 PARAMETER Experiment Name: At_14day_Shoots-Roots_Sub_P Parameter: Plant Line Value: WS
  misc_feature: MA Experiment 20000315 PARAMETER Experiment Name: At_14day_Shoots-Roots_Sub_P Parameter: Tissue Value: Shoots vs. Whole Plant
  misc_feature: MA Experiment ID: 20000327 Result: Down-regulated in Transcription
  misc_feature: MA Experiment 20000327 PARAMETER Experiment Name: At_42deg_Heat_Sub_P Parameter: Age (day) Value: 14
  misc_feature: MA Experiment 20000327 PARAMETER Experiment Name: At_42deg_Heat_Sub_P Parameter: Organism Value: A. thaliana
  misc_feature: MA Experiment 20000327 PARAMETER Experiment Name: At_42deg_Heat_Sub_P Parameter: Plant Line Value: WS
  misc_feature: MA Experiment 20000327 PARAMETER Experiment Name: At_42deg_Heat_Sub_P Parameter: Temperature (deg C) Value: 42 vs. 22
  misc_feature: MA Experiment 20000327 PARAMETER Experiment Name: At_42deg_Heat_Sub_P Parameter: Timepoint (hr) Value: 1
  misc_feature: MA Experiment 20000327 PARAMETER Experiment Name: At_42deg_Heat_Sub_P Parameter: Tissue Value: Aerial
  misc_feature: MA Experiment ID: 20000328 Result: Down-regulated in Transcription
  misc_feature: MA Experiment 20000328 PARAMETER Experiment Name: At_42deg_Heat_Sub_P Parameter: Age (day) Value: 14
  misc_feature: MA Experiment 20000328 PARAMETER Experiment Name: At_42deg_Heat_Sub_P Parameter: Organism Value: A. thaliana
  misc_feature: MA Experiment 20000328 PARAMETER Experiment Name: At_42deg_Heat_Sub_P Parameter: Plant Line Value: WS
  misc_feature: MA Experiment 20000328 PARAMETER Experiment Name: At_42deg_Heat_Sub_P Parameter: Temperature (deg C) Value: 42 vs. 22
  misc_feature: MA Experiment 20000328 PARAMETER Experiment Name: At_42deg_Heat_Sub_P Parameter: Timepoint (hr) Value: 6
  misc_feature: MA Experiment 20000328 PARAMETER Experiment Name: At_42deg_Heat_Sub_P Parameter: Tissue Value: Aerial
  misc_feature: MA Experiment ID: 20000348 Result: Down-regulated in Transcription
  misc_feature: MA Experiment 20000348 PARAMETER Experiment Name: At_100uM_ABA_Sub_P Parameter: Age (day) Value: 14
  misc_feature: MA Experiment 20000348 PARAMETER Experiment Name: At_100uM_ABA_Sub_P Parameter: Organism Value: A. thaliana
  misc_feature: MA Experiment 20000348 PARAMETER Experiment Name: At_100uM_ABA_Sub_P Parameter: Plant Line Value: WS
  misc_feature: MA Experiment 20000348 PARAMETER Experiment Name: At_100uM_ABA_Sub_P Parameter: Timepoint (hr) Value: 1
  misc_feature: MA Experiment 20000348 PARAMETER Experiment Name: At_100uM_ABA_Sub_P Parameter: Tissue Value: Aerial
  misc_feature: MA Experiment 20000348 PARAMETER Experiment Name: At_100uM_ABA_Sub_P Parameter: Treatment Value: 100uM ABA vs. No Treatment
  misc_feature: MA Experiment ID: 20000355 Result: Down-regulated in Transcription
  misc_feature: MA Experiment 20000355 PARAMETER Experiment Name: At_Siliques_Sub_P Parameter: Age (day) Value: 21
  misc_feature: MA Experiment 20000355 PARAMETER Experiment Name: At_Siliques_Sub_P Parameter: Organism Value: A. thaliana
  misc_feature: MA Experiment 20000355 PARAMETER Experiment Name: At_Siliques_Sub_P Parameter: Plant Line Value: WS
  misc_feature: MA Experiment 20000355 PARAMETER Experiment Name: At_Siliques_Sub_P Parameter: Tissue Value: Less Than 5mm Siliques vs. Whole Plant
  misc_feature: MA Experiment ID: 20000440 Result: Down-regulated in Transcription
  misc_feature: MA Experiment 20000440 PARAMETER Experiment Name: At_Closed-Flower__Sub_P Parameter: Tissue Value: Closed Flower vs. Whole Plant
gaaaccagttgagaagtaaaattttctattgcagagagaaagagagttagagaaagagagagagagatgaaacttgtgcaagaagaataccgtaaaggaccgtggacagaacaggaggacatcctcttggtcaactttgtccacttgttcggagatcgaagatgggattttgtagcgaaagtttcaggtttgaaggtggagggagaaacataagaataggtataggtttgttttggaaaaatgggcggtctttggaaaggaccttccatttaaagaaatgacctggttttggttgtaggtttaaacagaacaggaaagagttgcaggytaagrtgggttaattacctrcatcctggtctcaaacgtggyaagatgackccwcaagaagagcgyytmgtccttgagcttcacgcyaartggggaaacaggtggtcraaaatwgcccgraaattrccggggacgaacagataatgagataaagaactactggaggactcatatgaggaagaaggctcaagagaagaagcgacctatgtctcctacttcctcatcttcaaactgttgctcatcatctatgaccactactactactcaagacactggaggctccaacgggaaaatgaatcaagaaggcgaagacgggtactactccatggatgacatatggagagagattgatcagtctggagcaaacgttattaagccggtaaaagacaactactactcagagcaaagttgttacttgaatttccctcctctgggttgtccaacatgggaaagttccttggagtctatatggaacatggatgcagatgaaagtaagatgtcttcttttgctattgatcagtttcctctaagttttgaacatggtaggtggtcgcctttagtctaggatttgattcatttggaatgtttatatgtgcagcatatatatgttrtcaaacgacgactgtagtagttttcctatgacttacatcaaaaarcaccacccactgtastaatctcataagtagtcatcatcctatgcctttgtttagtttgtagagtgagtgaaaagatgtgtaatacaagtcagaactctaattccaaaataaatagactttkgaagcttctgtgaaagttkgtaag

SEQ ID NO: 107391 - protein, 130 aa, Arabidopsis thaliana
  peptide (1)..(130): Ceres Seq. ID no. 15219493
  misc_feature (1)..(124): Homolog of NCBI NO: 15238519 NR Description: myb family transcription factor [Arabidopsis
  misc_feature (1)..(124): Homolog of NCBI NO: 30697277 NR Description: myb family transcription factor [Arabidopsis
  misc_feature (1)..(124): Homolog of NCBI NO: 11358547 NR Description: myb-related transcription factor MYB59 [imported] Arabidopsis thaliana >gi|3941480|gb|AAC83616.1| putative
  misc_feature (1)..(124): Homolog of NCBI NO: 30697275 NR Description: myb family transcription factor [Arabidopsis
  misc_feature (15)..(127): Homolog of NCBI NO: 15231343 NR Description: Myb family transcription factor [Arabidopsis
  misc_feature (1)..(66): Homolog of NCBI NO: 15231343 NR Description: Myb family transcription factor [Arabidopsis
  misc_feature (1)..(106): Homolog of NCBI NO: 15230123 NR Description: myb family transcription factor [Arabidopsis
  misc_feature (1)..(62): Homolog of NCBI NO: 2129646 NR Description: myb-related protein, 28K, leaf-specific -
  misc_feature (1)..(62): Homolog of NCBI NO: 15221419 NR Description: myb family transcription factor [Arabidopsis
  misc_feature (1)..(62): Homolog of NCBI NO: 15224628 NR Description: myb family transcription factor [Arabidopsis
MRKKAQEKKRPMSPTSSSSNCCSSSMTTTTTQDTGGSNGKMNQEGEDGYYSMDDIWREIDQSGANVIKPVKDNYYSEQSCYLNFPPLGCPTWESSLESIWNMDADESKMSSFAIDQFPLSFEHGRWSPLV

SEQ ID NO: 107392 - protein, 119 aa, Arabidopsis thaliana
  peptide (1)..(119): Ceres Seq. ID no. 15219494
  misc_feature (1)..(113): Homolog of NCBI NO: 15238519 NR Description: myb family transcription factor [Arabidopsis
  misc_feature (1)..(113): Homolog of NCBI NO: 30697277 NR Description: myb family transcription factor [Arabidopsis
  misc_feature (1)..(113): Homolog of NCBI NO: 11358547 NR Description: myb-related transcription factor MYB59 [imported] Arabidopsis thaliana >gi|3941480|gb|AAC83616.1| putative
  misc_feature (1)..(113): Homolog of NCBI NO: 30697275 NR Description: myb family transcription factor [Arabidopsis
  misc_feature (4)..(116): Homolog of NCBI NO: 15231343 NR Description: Myb family transcription factor [Arabidopsis
  misc_feature (1)..(55): Homolog of NCBI NO: 15231343 NR Description: Myb family transcription factor [Arabidopsis
  misc_feature (1)..(95): Homolog of NCBI NO: 15230123 NR Description: myb family transcription factor [Arabidopsis
  misc_feature (1)..(51): Homolog of NCBI NO: 2129646 NR Description: myb-related protein, 28K, leaf-specific -
  misc_feature (1)..(51): Homolog of NCBI NO: 15221419 NR Description: myb family transcription factor [Arabidopsis
  misc_feature (1)..(51): Homolog of NCBI NO: 15224628 NR Description: myb family transcription factor [Arabidopsis
MSPTSSSSNCCSSSMTTTTTQDTGGSNGKMNQEGEDGYYSMDDIWREIDQSGANVIKPVKDNYYSEQSCYLNFPPLGCPTWESSLESIWNMDADESKMSSFAIDQFPLSFEHGRWSPLV

SEQ ID NO: 107393 - protein, 105 aa, Arabidopsis thaliana
  peptide (1)..(105): Ceres Seq. ID no. 15219495
  misc_feature (1)..(99): Homolog of NCBI NO: 15238519 NR Description: myb family transcription factor [Arabidopsis
  misc_feature (1)..(99): Homolog of NCBI NO: 30697277 NR Description: myb family transcription factor [Arabidopsis
  misc_feature (1)..(99): Homolog of NCBI NO: 11358547 NR Description: myb-related transcription factor MYB59 [imported] Arabidopsis thaliana >gi|3941480|gb|AAC83616.1| putative
  misc_feature (1)..(99): Homolog of NCBI NO: 30697275 NR Description: myb family transcription factor [Arabidopsis
  misc_feature (1)..(102): Homolog of NCBI NO: 15231343 NR Description: Myb family transcription factor [Arabidopsis
  misc_feature (1)..(41): Homolog of NCBI NO: 15231343 NR Description: Myb family transcription factor [Arabidopsis
  misc_feature (1)..(81): Homolog of NCBI NO: 15230123 NR Description: myb family transcription factor [Arabidopsis
  misc_feature (1)..(37): Homolog of NCBI NO: 2129646 NR Description: myb-related protein, 28K, leaf-specific -
  misc_feature (1)..(37): Homolog of NCBI NO: 15221419 NR Description: myb family transcription factor [Arabidopsis
  misc_feature (1)..(37): Homolog of NCBI NO: 15224628 NR Description: myb family transcription factor [Arabidopsis
MTTTTTQDTGGSNGKMNQEGEDGYYSMDDIWREIDQSGANVIKPVKDNYYSEQSCYLNFPPLGCPTWESSLESIWNMDADESKMSSFAIDQFPLSFEHGRWSPLV

SEQ ID NO: 107394 - DNA, 1447 bp, Arabidopsis thaliana
  misc_feature (1)..(1447): Ceres Seq. ID no. 13647835
  misc_feature: MA Experiment ID: 20000184 Result: Down-regulated in Transcription
  misc_feature: MA Experiment 20000184 PARAMETER Experiment Name: At_Shoots__P Parameter: Age (day) Value: 7
  misc_feature: MA Experiment 20000184 PARAMETER Experiment Name: At_Shoots__P Parameter: Tissue Value: Shoots vs. Whole Plant
  misc_feature: MA Experiment ID: 20000437 Result: Up-regulated in Transcription
  misc_feature: MA Experiment 20000437 PARAMETER Experiment Name: At_Drought_P Parameter: Age (day) Value: 8
  misc_feature: MA Experiment 20000437 PARAMETER Experiment Name: At_Drought_P Parameter: Organism Value: A. thaliana
  misc_feature: MA Experiment 20000437 PARAMETER Experiment Name: At_Drought_P Parameter: Plant Line Value: WS
  misc_feature: MA Experiment 20000437 PARAMETER Experiment Name: At_Drought_P Parameter: Timepoint (hr) Value: 24
  misc_feature: MA Experiment 20000437 PARAMETER Experiment Name: At_Drought_P Parameter: Tissue Value: Whole Plant
  misc_feature: MA Experiment 20000437 PARAMETER Experiment Name: At_Drought_P Parameter: Treatment Value: Drought vs. No Drought
  misc_feature: MA Experiment ID: 20000496 Result: Down-regulated in Transcription
  misc_feature: MA Experiment 20000496 PARAMETER Experiment Name: At_Guard_Cells_P Parameter: Harvest Date Value: 7/19/2002
  misc_feature: MA Experiment 20000496 PARAMETER Experiment Name: At_Guard_Cells_P Parameter: Organism Value: Canola
  misc_feature: MA Experiment 20000496 PARAMETER Experiment Name: At_Guard_Cells_P Parameter: Tissue Value: Guard Cells vs. Leaves
  misc_feature: MA Experiment ID: 20001451 Result: Down-regulated in Transcription
  misc_feature: MA Experiment 20001451 PARAMETER Experiment Name: At_Far-red-induction_P Parameter: Age (day) Value: 7
  misc_feature: MA Experiment 20001451 PARAMETER Experiment Name: At_Far-red-induction_P Parameter: Light Value: Far-red vs. White
  misc_feature: MA Experiment 20001451 PARAMETER Experiment Name: At_Far-red-induction_P Parameter: Organism Value: A. thaliana
  misc_feature: MA Experiment 20001451 PARAMETER Experiment Name: At_Far-red-induction_P Parameter: Plant Line Value: Columbia
  misc_feature: MA Experiment 20001451 PARAMETER Experiment Name: At_Far-red-induction_P Parameter: Timepoint (hr) Value: 24
  misc_feature: MA Experiment 20001451 PARAMETER Experiment Name: At_Far-red-induction_P Parameter: Tissue Value: Whole Plant
gaaattcgtttaccagtcatcaccaccacaacctccggcgaaaatggacgtgcgtgaatcaatctcactgcaaaaccaagtctccatgaatctcgcaaaacacgtaatcaccaccgtctctcaaaactccaacgtcatcttctcaccggcttcaatcaacgtcgtactcagtataatcgccgctggatccgccggcgctaccaaagatcagatcctctcgtttctcaaattctcttccactgatcaacttaattcattctcttccgaaatcgtctccgctgttctcgctgacggtagtgctaacggtggtcctaagctctcggtggctaatggcgcctggatcgataagtctctctcctttaaaccttcctttaaacagctcttggaagattcgtataaagctgcttcgaatcaagctgattttcaatcgaaggctgtggaggtgattgctgaagtgaattcatgggctgaaaaggagacaaatggtctcatcactgaggttcttccagaaggatcagctgatagtatgaccaaactgatatttgcaaatgcattgtacttcaagggaacatggaacgagaaattcgatgagtcgttaacacaagaaggcgagtttcaccttcttgacggtaacaaagtgactgcaccattcatgaccagcaagaagaaacaatacgtaagtgcttacgatggtttcaaagttttgggacttccttacttacaaggacaggataagcgacaattctccatgtacttttatcttcccgatgcaaacaacggactgtctgatcttctggacaaaatagtttccactcctgggttcttagacaaccacatcccacgcagacaagttaaagtccgcgaattcaagattccaaagtttaaattctctttcgggttcgatgcttcaaatgttttaaaaggattgggactgacttcgcctttcagcggtgaagaaggtttaactgagatggttgaatctcctgagatggggaagaatctatgcgtatcgaacattttccataaagcgtgtatcgaagtgaatgaagaaggaacagaagctgcagctgcatcagctggagttataaagctaagaggattgcttatggaggaagatgaaatagattttgttgcagaccatccgtttctattggtggtcacagagaacataacaggagtggttctgttcattggccaagttgttgatccgttgcattaatctaaagctaatgtggaagtttttggttttacttaaaataaatgagtcattggttttgaggactcatctttatgtaacatcctttgtcttgactctttgatgtgtgtaagaataatagtgatacataacagcttttcttctgtatttgggtcacatgtactgaactgatagacatacatacatgtgatgcatcttaatgattcactgtattgggtcattcatggttac

SEQ ID NO: 107395 - protein, 405 aa, Arabidopsis thaliana
  peptide (1)..(405): Ceres Seq. ID no. 13647836
  misc_feature (15)..(405): Homolog of NCBI NO: 15220298 NR Description: serpin, putative [Arabidopsis thaliana]
  misc_feature (17)..(404): Homolog of NCBI NO: 26224736 NR Description: serpin-like protein [Citrus x paradisi]
  misc_feature (16)..(405): Homolog of NCBI NO: 40539102 NR Description: putative serine protease inhibitor [Oryza sativa
  misc_feature (15)..(405): Homolog of NCBI NO: 15230638 NR Description: serpin, putative [Arabidopsis thaliana]
  misc_feature (15)..(403): Homolog of NCBI NO: 15224694 NR Description: serpin, putative [Arabidopsis thaliana]
KFVYQSSPPQPPAKMDVRESISLQNQVSMNLAKHVITTVSQNSNVIFSPASINVVLSIIAAGSAGATKDQILSFLKFSSTDQLNSFSSEIVSAVLADGSANGGPKLSVANGAWIDKSLSFKPSFKQLLEDSYKAASNQADFQSKAVEVIAEVNSWAEKETNGLITEVLPEGSADSMTKLIFANALYFKGTWNEKFDESLTQEGEFHLLDGNKVTAPFMTSKKKQYVSAYDGFKVLGLPYLQGQDKRQFSMYFYLPDANNGLSDLLDKIVSTPGFLDNHIPRRQVKVREFKIPKFKFSFGFDASNVLKGLGLTSPFSGEEGLTEMVESPEMGKNLCVSNIFHKACIEVNEEGTEAAAASAGVIKLRGLLMEEDEIDFVADHPFLLVVTENITGVVLFIGQVVDPLH

SEQ ID NO: 107396 - protein, 391 aa, Arabidopsis thaliana
  peptide (1)..(391): Ceres Seq. ID no. 13647837
  misc_feature (1)..(391): Homolog of NCBI NO: 15220298 NR Description: serpin, putative [Arabidopsis thaliana]
  misc_feature (3)..(390): Homolog of NCBI NO: 26224736 NR Description: serpin-like protein [Citrus x paradisi]
  misc_feature (2)..(391): Homolog of NCBI NO: 40539102 NR Description: putative serine protease inhibitor [Oryza sativa
  misc_feature (1)..(391): Homolog of NCBI NO: 15230638 NR Description: serpin, putative [Arabidopsis thaliana]
  misc_feature (1)..(389): Homolog of NCBI NO: 15224694 NR Description: serpin, putative [Arabidopsis thaliana]
MDVRESISLQNQVSMNLAKHVITTVSQNSNVIFSPASINVVLSIIAAGSAGATKDQILSFLKFSSTDQLNSFSSEIVSAVLADGSANGGPKLSVANGAWIDKSLSFKPSFKQLLEDSYKAASNQADFQSKAVEVIAEVNSWAEKETNGLITEVLPEGSADSMTKLIFANALYFKGTWNEKFDESLTQEGEFHLLDGNKVTAPFMTSKKKQYVSAYDGFKVLGLPYLQGQDKRQFSMYFYLPDANNGLSDLLDKIVSTPGFLDNHIPRRQVKVREFKIPKFKFSFGFDASNVLKGLGLTSPFSGEEGLTEMVESPEMGKNLCVSNIFHKACIEVNEEGTEAAAASAGVIKLRGLLMEEDEIDFVADHPFLLVVTENITGVVLFIGQVVDPLH

SEQ ID NO: 107397 - protein, 377 aa, Arabidopsis thaliana
  peptide (1)..(377): Ceres Seq. ID no. 13647838
  misc_feature (1)..(377): Homolog of NCBI NO: 15220298 NR Description: serpin, putative [Arabidopsis thaliana]
  misc_feature (1)..(376): Homolog of NCBI NO: 26224736 NR Description: serpin-like protein [Citrus x paradisi]
  misc_feature (1)..(377): Homolog of NCBI NO: 40539102 NR Description: putative serine protease inhibitor [Oryza sativa
  misc_feature (1)..(377): Homolog of NCBI NO: 15230638 NR Description: serpin, putative [Arabidopsis thaliana]
  misc_feature (1)..(375): Homolog of NCBI NO: 15224694 NR Description: serpin, putative [Arabidopsis thaliana]
MNLAKHVITTVSQNSNVIFSPASINVVLSIIAAGSAGATKDQILSFLKFSSTDQLNSFSSEIVSAVLADGSANGGPKLSVANGAWIDKSLSFKPSFKQLLEDSYKAASNQADFQSKAVEVIAEVNSWAEKETNGLITEVLPEGSADSMTKLIFANALYFKGTWNEKFDESLTQEGEFHLLDGNKVTAPFMTSKKKQYVSAYDGFKVLGLPYLQGQDKRQFSMYFYLPDANNGLSDLLDKIVSTPGFLDNHIPRRQVKVREFKIPKFKFSFGFDASNVLKGLGLTSPFSGEEGLTEMVESPEMGKNLCVSNIFHKACIEVNEEGTEAAAASAGVIKLRGLLMEEDEIDFVADHPFLLVVTENITGVVLFIGQVVDPLH

SEQ ID NO: 107398 - DNA, 1274 bp, Arabidopsis thaliana
  misc_feature (1)..(1274): Ceres Seq. ID no. 13647883
  misc_feature: MA Experiment ID: 20000184 Result: Down-regulated in Transcription
  misc_feature: MA Experiment 20000184 PARAMETER Experiment Name: At_Shoots__P Parameter: Age (day) Value: 7
  misc_feature: MA Experiment 20000184 PARAMETER Experiment Name: At_Shoots__P Parameter: Tissue Value: Shoots vs. Whole Plant
  misc_feature: MA Experiment ID: 20000227 Result: Up-regulated in Transcription
  misc_feature: MA Experiment 20000227 PARAMETER Experiment Name: At_Root-Tips-vs-Tops_P Parameter: Tissue Value: Root Tips vs. Root Tops
attatcgctckgtagaaaagcttccccattttcgtagaycactctcactgasaagatgaattctcttcatcgtgtagtaggattgatcagcagaacgacgactacatctccaatttctcatacccgtttcaatctcccatcgattctcgtcaatttgatgtccacaaaatctggaaacgatgaagacaaatggaacgacgcttgggaatcagcttggttaccagatgatctcacagataaaatccgagcaccatgggagagagatgtgaacttccctgtaaaagaatcaacggcgacggcgattgaagaaatcgatgtggaagcaaaagcgttcgtagaggatatgaatgagcattgggacgagaggagagggaagagtgggaaagtggagaagagagaagagaagaagaaagagattggagatggagaagatgaatcatcatcatcgctttatagtttggagacgatgaagaaggattataggttgaagaaacaaagagttcatgcttctctgtgggttaaagagattgagaaattggaagaagctaaattggatgattctggatctggtggtggagctgatgatattgataggcttcttgatagttgctcagagattttcgattcggtagaccatgattttgacaaattagaggtttcgagtggatctgaattgaagaataagcctgatggttgggaatcaacagcaaaggaacaagatggaaacctctgggagatgtcacaaagagaagaagacattcttctccaagaatttgatcgtcgcactgccttctgcaaatttcagatagctagttttataaagcaacacatattcagtaggagaagaccgattgatgggtggaaatacatgattgaagtgattggtccaaatgcgaggaaagggaaaggaagtgtttctaggctcccggctttatcggatgtgtcgactcagccgtttaaagaagaaaccagcagtctcactaccttgaagcgtcggtagaagaaactagaggagttcacaatgtttgttagattgttaaatgatcttcaactacttgcacttgttaaaggccggccatgtcctctgttcctacagttctaccatttcgggttttatattagcatcagttcttcaatcatgcaatttcttgttagcttagttttgaaacgttgaaacaatgggtcttgtcttagatgttgatcaagaacagaggacaaatctcacccagtagaaactaacaatgttgaaaattaaagccaaatataatcagatg

SEQ ID NO: 107399 - protein, 314 aa, Arabidopsis thaliana
  peptide (1)..(314): Ceres Seq. ID no. 15220522
  misc_feature (1)..(314): Homolog of NCBI NO: 15227059 NR Description: mucin -related [Arabidopsis thaliana]
  misc_feature (1)..(310): Homolog of NCBI NO: 18071389 NR Description: putative mucin [Oryza sativa]
  misc_feature (82)..(303): Homolog of NCBI NO: 34908962 NR Description: P0003D09.18 [Oryza sativa (japonica
  misc_feature (83)..(303): Homolog of NCBI NO: 8809640 NR Description: gb|AAC32909.1~gene_id:MMI9.10~similar to unknown
  misc_feature (83)..(303): Homolog of NCBI NO: 15241764 NR Description: hypothetical protein [Arabidopsis thaliana]
MNSLHRVVGLISRTTTTSPISHTRFNLPSILVNLMSTKSGNDEDKWNDAWESAWLPDDLTDKIRAPWERDVNFPVKESTATAIEEIDVEAKAFVEDMNEHWDERRGKSGKVEKREEKKKEIGDGEDESSSSLYSLETMKKDYRLKKQRVHASLWVKEIEKLEEAKLDDSGSGGGADDIDRLLDSCSEIFDSVDHDFDKLEVSSGSELKNKPDGWESTAKEQDGNLWEMSQREEDILLQEFDRRTAFCKFQIASFIKQHIFSRRRPIDGWKYMIEVIGPNARKGKGSVSRLPALSDVSTQPFKEETSSLTTLKRR

SEQ ID NO: 107400 - protein, 280 aa, Arabidopsis thaliana; identical to SEQ ID NO: 49984
  peptide (1)..(280): Ceres Seq. ID no. 15220523
  misc_feature (1)..(280): Homolog of NCBI NO: 15227059 NR Description: mucin -related [Arabidopsis thaliana]
  misc_feature (1)..(276): Homolog of NCBI NO: 18071389 NR Description: putative mucin [Oryza sativa]
  misc_feature (48)..(269): Homolog of NCBI NO: 34908962 NR Description: P0003D09.18 [Oryza sativa (japonica
  misc_feature (49)..(269): Homolog of NCBI NO: 8809640 NR Description: gb|AAC32909.1~gene_id:MMI9.10~similar to unknown
  misc_feature (49)..(269): Homolog of NCBI NO: 15241764 NR Description: hypothetical protein [Arabidopsis thaliana]

SEQ ID NO: 107401 - protein, 218 aa, Arabidopsis thaliana; identical to SEQ ID NO: 49985
  peptide (1)..(218): Ceres Seq. ID no. 15220524
  misc_feature (1)..(218): Homolog of NCBI NO: 15227059 NR Description: mucin -related [Arabidopsis thaliana]
  misc_feature (1)..(214): Homolog of NCBI NO: 18071389 NR Description: putative mucin [Oryza sativa]
  misc_feature (1)..(207): Homolog of NCBI NO: 34908962 NR Description: P0003D09.18 [Oryza sativa (japonica
  misc_feature (1)..(207): Homolog of NCBI NO: 8809640 NR Description: gb|AAC32909.1~gene_id:MMI9.10~similar to unknown
  misc_feature (1)..(207): Homolog of NCBI NO: 15241764 NR Description: hypothetical protein [Arabidopsis thaliana]

SEQ ID NO: 107402 - DNA, 1227 bp, Arabidopsis thaliana
  misc_feature (1)..(1227): Ceres Seq. ID no. 13647890
  misc_feature: MA Experiment ID: 20000794 Result: Down-regulated in Transcription
  misc_feature: MA Experiment 20000794 PARAMETER Experiment Name: At_Petals_P Parameter: Age (day) Value: 23-25 days
  misc_feature: MA Experiment 20000794 PARAMETER Experiment Name: At_Petals_P Parameter: Plant Line Value: WS
  misc_feature: MA Experiment 20000794 PARAMETER Experiment Name: At_Petals_P Parameter: Tissue Value: Petals vs. Whole plant
ggttcaatcatcatcatcactcatctgtcaaattaaaccactccactcgaccactccaattcaaaactcgccattgatacacgagagatagagagagagatttgtgtgagagaaatccatggcggaatcttgcagagtgaggaggataaagctaggaagtcaaggcctagaggtatcggcgcaaggccttggttgcatgggactcaccggtcattacggtgcttccaagccggaaactgaagccatcgctctcatccaccacgctattcactccggtgttactttccttgacacttctgacatgtatggtcctgaaaccaatgaaattctcctcggaaaggctcttaaggatggtgtgagggagaaagtggagcttgcgaccaaatttggaatcagttatgcagagggaaacagagagattaagggagatcctgcttatgttagagctgcctgtgaggctagtttaaagagactagatgttacctgcattgatctgtattatcagcatcggattgatactcgtgttcctattgaaatcactatgggagaactgaagaagctaattgaagagggtaaaataaagtacataggtttgtctgaggcctctgcctcaactatcagaagagcgcatactgttcacccaatcaccgccgtgcagttagagtggtccttgtggacaagagacgtggaagaagaaattgtcccaacctgcagggaacttggaattgggattgtttcttacagtcctctaggaagaggtttctttgcatcaggacctaagcttgttgagaacctagacaataatgacttcagaaaggctctaccaagattccaacaggaaaacttggatcacaacaagattctctatgagaaagtttctgcaatgtctgagaagaaagggtgcactcccgcacaactagccctcgcttgggttcaccaccagggagatgatgtttgtcccattccaggaaccactaagattgaaaacctcaaccagaacattagagctttatcagtgaaactcactcctgaagagatgtctgagcttgagaccattgcccaaccagagtctgtgaaaggagaaagatacatggccacagtgccaaccttcaaaaactccgacactccaccattgtcttcttggaatgctgtgtaaaactgtctgagagtttctctggccaaaggatgatttatgtatagaatatttattttcttctacccatctta

SEQ ID NO: 107403 - protein, 345 aa, Arabidopsis thaliana; identical to SEQ ID NO: 50605
  peptide (1)..(345): Ceres Seq. ID no. 13647891
  misc_feature (1)..(345): Homolog of NCBI NO: 15219786 NR Description: aldo/keto reductase family [Arabidopsis thaliana]
  misc_feature (1)..(344): Homolog of NCBI NO: 18406861 NR Description: aldo/keto reductase family [Arabidopsis thaliana]
  misc_feature (1)..(344): Homolog of NCBI NO: 30696459 NR Description: aldo/keto reductase family [Arabidopsis thaliana] At1g60730/F8A5_24 [Arabidopsis thaliana]
  misc_feature (1)..(344): Homolog of NCBI NO: 6562980 NR Description: auxin-induced atb2 [Arabidopsis thaliana]
  misc_feature (1)..(344): Homolog of NCBI NO: 25316216 NR Description: hypothetical protein F8A5.24 [imported] -
  misc_feature (1)..(344): Homolog of NCBI NO: 30102704 NR Description: At1g60680 [Arabidopsis thaliana]
  misc_feature (1)..(344): Homolog of NCBI NO: 30696451 NR Description: aldo/keto reductase family [Arabidopsis thaliana]
  misc_feature (10)..(344): Homolog of NCBI NO: 25316214 NR Description: hypothetical protein F8A5.20 [imported] -
  misc_feature (1)..(344): Homolog of NCBI NO: 15220214 NR Description: aldo/keto reductase family [Arabidopsis thaliana]
  misc_feature (3)..(229): Homolog of NCBI NO: 15219805 NR Description: aldo/keto reductase family [Arabidopsis thaliana]

SEQ ID NO: 107404 - protein, 319 aa, Arabidopsis thaliana; identical to SEQ ID NO: 50606
  peptide (1)..(319): Ceres Seq. ID no. 13647892
  misc_feature (1)..(319): Homolog of NCBI NO: 15219786 NR Description: aldo/keto reductase family [Arabidopsis thaliana]
  misc_feature (1)..(318): Homolog of NCBI NO: 18406861 NR Description: aldo/keto reductase family [Arabidopsis thaliana]
  misc_feature (1)..(318): Homolog of NCBI NO: 30696459 NR Description: aldo/keto reductase family [Arabidopsis thaliana] At1g60730/F8A5_24 [Arabidopsis thaliana]
  misc_feature (1)..(318): Homolog of NCBI NO: 6562980 NR Description: auxin-induced atb2 [Arabidopsis thaliana]
  misc_feature (1)..(318): Homolog of NCBI NO: 25316216 NR Description: hypothetical protein F8A5.24 [imported] -
  misc_feature (1)..(318): Homolog of NCBI NO: 30102704 NR Description: At1g60680 [Arabidopsis thaliana]
  misc_feature (1)..(318): Homolog of NCBI NO: 30696451 NR Description: aldo/keto reductase family [Arabidopsis thaliana]
  misc_feature (1)..(318): Homolog of NCBI NO: 25316214 NR Description: hypothetical protein F8A5.20 [imported] -
  misc_feature (1)..(318): Homolog of NCBI NO: 15220214 NR Description: aldo/keto reductase family [Arabidopsis thaliana]
  misc_feature (1)..(203): Homolog of NCBI NO: 15219805 NR Description: aldo/keto reductase family [Arabidopsis thaliana]

SEQ ID NO: 107405 - protein, 284 aa, Arabidopsis thaliana; identical to SEQ ID NO: 50607
  peptide (1)..(284): Ceres Seq. ID no. 13647893
  misc_feature (1)..(284): Homolog of NCBI NO: 15219786 NR Description: aldo/keto reductase family [Arabidopsis thaliana]
  misc_feature (1)..(283): Homolog of NCBI NO: 18406861 NR Description: aldo/keto reductase family [Arabidopsis thaliana]
  misc_feature (1)..(283): Homolog of NCBI NO: 30696459 NR Description: aldo/keto reductase family [Arabidopsis thaliana] At1g60730/F8A5_24 [Arabidopsis thaliana]
  misc_feature (1)..(283): Homolog of NCBI NO: 6562980 NR Description: auxin-induced atb2 [Arabidopsis thaliana]
  misc_feature (1)..(283): Homolog of NCBI NO: 25316216 NR Description: hypothetical protein F8A5.24 [imported] -
  misc_feature (1)..(283): Homolog of NCBI NO: 30102704 NR Description: At1g60680 [Arabidopsis thaliana]
  misc_feature (1)..(283): Homolog of NCBI NO: 30696451 NR Description: aldo/keto reductase family [Arabidopsis thaliana]
  misc_feature (1)..(283): Homolog of NCBI NO: 25316214 NR Description: hypothetical protein F8A5.20 [imported] -
  misc_feature (1)..(283): Homolog of NCBI NO: 15220214 NR Description: aldo/keto reductase family [Arabidopsis thaliana]
  misc_feature (1)..(168): Homolog of NCBI NO: 15219805 NR Description: aldo/keto reductase family [Arabidopsis thaliana]

SEQ ID NO: 107406 - DNA, 1321 bp, Arabidopsis thaliana
  misc_feature (1)..(1321): Ceres Seq. ID no. 13647913
  misc_feature: MA Experiment ID: 20000179 Result: Up-regulated in Transcription
  misc_feature: MA Experiment 20000179 PARAMETER Experiment Name: At_Germinating_Seeds_P Parameter: Age (hr) Value: 6 vs. 0
  misc_feature: MA Experiment 20000179 PARAMETER Experiment Name: At_Germinating_Seeds_P Parameter: Tissue Value: Germinating Seeds
  misc_feature: MA Experiment ID: 20000184 Result: Down-regulated in Transcription
  misc_feature: MA Experiment 20000184 PARAMETER Experiment Name: At_Shoots__P Parameter: Age (day) Value: 7
  misc_feature: MA Experiment 20000184 PARAMETER Experiment Name: At_Shoots__P Parameter: Tissue Value: Shoots vs. Whole Plant
  misc_feature: MA Experiment ID: 20000234 Result: Up-regulated in Transcription
  misc_feature: MA Experiment 20000234 PARAMETER Experiment Name: At_Siliques_P Parameter: Age (day) Value: 21
  misc_feature: MA Experiment 20000234 PARAMETER Experiment Name: At_Siliques_P Parameter: Organism Value: A. thaliana
  misc_feature: MA Experiment 20000234 PARAMETER Experiment Name: At_Siliques_P Parameter: Plant Line Value: WS
  misc_feature: MA Experiment 20000234 PARAMETER Experiment Name: At_Siliques_P Parameter: Tissue Value: Less Than 5mm Siliques vs. Whole Plant
  misc_feature: MA Experiment ID: 20000265 Result: Up-regulated in Transcription
  misc_feature: MA Experiment 20000265 PARAMETER Experiment Name: At_Open_Flower_P Parameter: Age (day) Value: 21
  misc_feature: MA Experiment 20000265 PARAMETER Experiment Name: At_Open_Flower_P Parameter: Plant Line Value: WS
  misc_feature: MA Experiment 20000265 PARAMETER Experiment Name: At_Open_Flower_P Parameter: Tissue Value: Closed Flower vs. Whole Plant
ttctgttaccgcttttacgttcgactccagattcctcctttgccggaatattccatacgtaagagatattgaaatcgccgatgatggaaagttcgattccgtctgagaacggctccgttacctctgatcgtgatagatcggctctaatattcctaggaactggatgttcaagcgcggtacctaacgcaatgtgcttgatccagcgatctgataatccctgctatgtttgttcccagtctctttcaatcccgcctgagaaaaatcctaattacagggggaatacttcactgctcattgattattgccaaagtgatggcaaacataaatacattcaaatcgatgttggcaagactttcagagaacaagtccttcgttggtttactcttcacaagattcctcaagttgattctataattttgactcatgaacatgctgatgcagtacttggcctggatgatatacgttcagtgcaaccatttagtcctactaatgatattgatcctactccaatttttgtaagccaatacgctatggaaagccttgctgtgaagttcccgtatttggttcagaagaaacttaaagaaggccaagaagttaggcgagtagcacagctagattggagagtaattgaagaagattgtgagaagccatttgtagcttcaggtttatcattcacgccacttccagtgatgcatggagaagactatgtatgtcttggcttcctttttggtgaaaaatcaagagtggcttatatatccgatgtttcacggtttcctccaaacaccgagtatgctatatcaaaatctggtggtggacaattggatctccttattttggatacattatataagacaggatcccacaacactcacttatgtttcccgcagacactagacacaatcaaaagactgagtccaaaaagggctcttctgattggaatgactcacgagtttgatcatcacaaggacaacgagtttcttgaagaatggtctaaaagggaagggatttcagtaaaactcgctcatgatggcttgagagtcccaatagacctatgaagaggtgaaaatgattacttggctttctcattaacgaaactaagatcattgccttattttttatctgacttctgattcactcaatgaggaagcttgtaggtctccttgtgttatagagagatagagagcggagtgaaacggttttgttcaagatgcataatgctcgcatggcttcatatcaacattatcactaatgtttttgtttcttcttcaagttttagctaggatttctgactaaacgacgattttttaatattatcagatat

SEQ ID NO: 107407 - protein, 324 aa, Arabidopsis thaliana; identical to SEQ ID NO: 50633
  peptide (1)..(324): Ceres Seq. ID no. 13647914
  misc_feature (67)..(287): Pfam Name: Metallo-beta-lactamase superfamily Pfam Description: Metallo-beta-lactamase superfamily
  misc_feature (1)..(324): Homolog of NCBI NO: 30691663 NR Description: expressed protein [Arabidopsis thaliana]
  misc_feature (2)..(324): Homolog of NCBI NO: 25513552 NR Description: 36.3K hypothetical protein F12P21.8 - Arabidopsis >gi|12320859|gb|AAG50569.1|AC073506_11 hypothetical protein
  misc_feature (15)..(307): Homolog of NCBI NO: 15236346 NR Description: hydrolase -related [Arabidopsis thaliana]
  misc_feature (6)..(241): Homolog of NCBI NO: 15231379 NR Description: hydrolase, putative [Arabidopsis thaliana]
  misc_feature (279)..(324): Homolog of NCBI NO: 15231379 NR Description: hydrolase, putative [Arabidopsis thaliana]
  misc_feature (84)..(324): Homolog of NCBI NO: 9294602 NR Description: hydrolase-like protein [Arabidopsis thaliana]
  misc_feature (20)..(317): Homolog of NCBI NO: 19075752 NR Description: putative hydrolase [Schizosaccharomyces pombe]
  misc_feature (44)..(186): Homolog of NCBI NO: 23509056 NR Description: hypothetical protein [Plasmodium falciparum 3D7]
  misc_feature (201)..(323): Homolog of NCBI NO: 23509056 NR Description: hypothetical protein [Plasmodium falciparum 3D7]
  misc_feature (43)..(185): Homolog of NCBI NO: 23479436 NR Description: hypothetical protein [Plasmodium yoelii yoelii]

SEQ ID NO: 107408 - protein, 323 aa, Arabidopsis thaliana; identical to SEQ ID NO: 50634
  peptide (1)..(323): Ceres Seq. ID no. 13647915
  misc_feature (66)..(286): Pfam Name: Metallo-beta-lactamase superfamily Pfam Description: Metallo-beta-lactamase superfamily
  misc_feature (1)..(323): Homolog of NCBI NO: 30691663 NR Description: expressed protein [Arabidopsis thaliana]
  misc_feature (1)..(323): Homolog of NCBI NO: 25513552 NR Description: 36.3K hypothetical protein F12P21.8 - Arabidopsis >gi|12320859|gb|AAG50569.1|AC073506_11 hypothetical protein
  misc_feature (14)..(306): Homolog of NCBI NO: 15236346 NR Description: hydrolase -related [Arabidopsis thaliana]
  misc_feature (5)..(240): Homolog of NCBI NO: 15231379 NR Description: hydrolase, putative [Arabidopsis thaliana]
  misc_feature (278)..(323): Homolog of NCBI NO: 15231379 NR Description: hydrolase, putative [Arabidopsis thaliana]
  misc_feature (83)..(323): Homolog of NCBI NO: 9294602 NR Description: hydrolase-like protein [Arabidopsis thaliana]
  misc_feature (19)..(316): Homolog of NCBI NO: 19075752 NR Description: putative hydrolase [Schizosaccharomyces pombe]
  misc_feature (43)..(185): Homolog of NCBI NO: 23509056 NR Description: hypothetical protein [Plasmodium falciparum 3D7]
  misc_feature (200)..(322): Homolog of NCBI NO: 23509056 NR Description: hypothetical protein [Plasmodium falciparum 3D7]
  misc_feature (42)..(184): Homolog of NCBI NO: 23479436 NR Description: hypothetical protein [Plasmodium yoelii yoelii]

SEQ ID NO: 107409 - protein, 288 aa, Arabidopsis thaliana; identical to SEQ ID NO: 50635
  peptide (1)..(288): Ceres Seq. ID no. 13647916
  misc_feature (31)..(251): Pfam Name: Metallo-beta-lactamase superfamily Pfam Description: Metallo-beta-lactamase superfamily
  misc_feature (1)..(288): Homolog of NCBI NO: 30691663 NR Description: expressed protein [Arabidopsis thaliana]
  misc_feature (1)..(288): Homolog of NCBI NO: 25513552 NR Description: 36.3K hypothetical protein F12P21.8 - Arabidopsis >gi|12320859|gb|AAG50569.1|AC073506_11 hypothetical protein
  misc_feature (1)..(271): Homolog of NCBI NO: 15236346 NR Description: hydrolase -related [Arabidopsis thaliana]
  misc_feature (1)..(205): Homolog of NCBI NO: 15231379 NR Description: hydrolase, putative [Arabidopsis thaliana]
  misc_feature (243)..(288): Homolog of NCBI NO: 15231379 NR Description: hydrolase, putative [Arabidopsis thaliana]
  misc_feature (48)..(288): Homolog of NCBI NO: 9294602 NR Description: hydrolase-like protein [Arabidopsis thaliana]
  misc_feature (1)..(281): Homolog of NCBI NO: 19075752 NR Description: putative hydrolase [Schizosaccharomyces pombe]
  misc_feature (8)..(150): Homolog of NCBI NO: 23509056 NR Description: hypothetical protein [Plasmodium falciparum 3D7]
  misc_feature (165)..(287): Homolog of NCBI NO: 23509056 NR Description: hypothetical protein [Plasmodium falciparum 3D7]
  misc_feature (7)..(149): Homolog of NCBI NO: 23479436 NR Description: hypothetical protein [Plasmodium yoelii yoelii]

SEQ ID NO: 107410 - DNA, 1756 bp, Arabidopsis thaliana
  misc_feature (1)..(1756): Ceres Seq. ID no. 13647953
  misc_feature: MA Experiment ID: 20000264 Result: Up-regulated in Transcription
  misc_feature: MA Experiment 20000264 PARAMETER Experiment Name: At_Open_Flower_P Parameter: Age (day) Value: 21
  misc_feature: MA Experiment 20000264 PARAMETER Experiment Name: At_Open_Flower_P Parameter: Plant Line Value: WS
  misc_feature: MA Experiment 20000264 PARAMETER Experiment Name: At_Open_Flower_P Parameter: Tissue Value: Open Flower vs. Whole Plant
  misc_feature: MA Experiment ID: 20000265 Result: Up-regulated in Transcription
  misc_feature: MA Experiment 20000265 PARAMETER Experiment Name: At_Open_Flower_P Parameter: Age (day) Value: 21
  misc_feature: MA Experiment 20000265 PARAMETER Experiment Name: At_Open_Flower_P Parameter: Plant Line Value: WS
  misc_feature: MA Experiment 20000265 PARAMETER Experiment Name: At_Open_Flower_P Parameter: Tissue Value: Closed Flower vs. Whole Plant
  misc_feature: MA Experiment ID: 20000286 Result: Up-regulated in Transcription
  misc_feature: MA Experiment 20000286 PARAMETER Experiment Name: At_Open_Flower_P Parameter: Age (day) Value: 21
  misc_feature: MA Experiment 20000286 PARAMETER Experiment Name: At_Open_Flower_P Parameter: Plant Line Value: WS
  misc_feature: MA Experiment 20000286 PARAMETER Experiment Name: At_Open_Flower_P Parameter: Tissue Value: Half Open vs. Whole Plant
  misc_feature: MA Experiment ID: 20000794 Result: Up-regulated in Transcription
  misc_feature: MA Experiment 20000794 PARAMETER Experiment Name: At_Petals_P Parameter: Age (day) Value: 23-25 days
  misc_feature: MA Experiment 20000794 PARAMETER Experiment Name: At_Petals_P Parameter: Plant Line Value: WS
  misc_feature: MA Experiment 20000794 PARAMETER Experiment Name: At_Petals_P Parameter: Tissue Value: Petals vs. Whole plant
  misc_feature: MA Experiment ID: 20001757 Result: Down-regulated in Transcription
  misc_feature: MA Experiment 20001757 PARAMETER Experiment Name: At_50mM_NH4NO3_L-to-H_P Parameter: Timepoint (hr) Value: 6
  misc_feature: MA Experiment 20001757 PARAMETER Experiment Name: At_50mM_NH4NO3_L-to-H_P Parameter: Tissue Value: Leaf
  misc_feature: MA Experiment 20001757 PARAMETER Experiment Name: At_50mM_NH4NO3_L-to-H_P Parameter: Treatment Value: 50mM NH4NO3 vs 100mM Mannitol
  misc_feature: MA Experiment ID: 20001910 Result: Up-regulated in Transcription
  misc_feature: MA Experiment 20001910 PARAMETER Experiment Name: At_Drought_Reproduction_P Parameter: Age (day) Value: 37
  misc_feature: MA Experiment 20001910 PARAMETER Experiment Name: At_Drought_Reproduction_P Parameter: Organism Value: A. thaliana
  misc_feature: MA Experiment 20001910 PARAMETER Experiment Name: At_Drought_Reproduction_P Parameter: Plant Line Value: WS
  misc_feature: MA Experiment 20001910 PARAMETER Experiment Name: At_Drought_Reproduction_P Parameter: Timepoint (day) Value: 7
  misc_feature: MA Experiment 20001910 PARAMETER Experiment Name: At_Drought_Reproduction_P Parameter: Tissue Value: Flowers
  misc_feature: MA Experiment 20001910 PARAMETER Experiment Name: At_Drought_Reproduction_P Parameter: Treatment Value: Drought vs. No Drought
aaatctaattttaaatctaccttttcttttgtttttttctctcctcacaaattactcaatttatagttgttaattttttgaggagaacaagaaggtggtagtattatttcaaaatgtttacggaagctgatagcattcctagggcaaaatatgccaacatgatgcattctgatccgaatctttcctccacgatgacccaacaaacagaggaagagtacggtatacgcaatagcagtgcatctgcggttggcacggggatgtatgatagaatgagttgcgaaggttctccaatgatgatgtctccttggaaccaagcaactccatttactcaaacacaatggtctactgtagaagaaaacctaccccaaaatggccttattggctcgcttgtccgtgaagaaggtcacatctattcattagcggccacaaaagatcttctttatactggctctgatagcaaaaacatacgtgtgtggaagaatctaaaggagttcagtgcattcaaatgtaacagtggattggttaaggccattgtgatttcaggggagaagattttcacaggtcaccaagacggaaagattcgagtttggaaagtctcccctaagaaccagagcttgcacaaacgttctggaacattaccaactttgaaagatatattcaaggcatctctcaaaccaagaaactatgttgaggtgaagaaacaccgcactgctctctggatcaaacacgccgatgctgtttcatgtttaagcctaaatgatgagcaagggttgttgtattctgcttcatgggaccggaccattaaggtgtggaggattgctgattcaaaatgtctagaatcaatcccagctcatgatgatgctgtaaactcggtggtatcaacaacggaagcgattgttttctctggatcagccgatgggacagtcaaggcatggaagagagaccaacaaggaaaatacacaaagcatacactaatgcaaacattaacaaagcaagaaagcgcagtcacagctttggctgtaagcaagaatggtgcggcagtgtactttggttcgagtgatggtttggtcaatttttgggagagggagaaacagttgaactacggtggtattctcaagggccacaagcttgctgttctttgcctagaagtggcagggagtcttgtttttagcggatctgctgataagacaatatgtgtgtggaagagagatggaaatattcatacatgcctctctgtactaacaggtcacacaggtcctgtgaaatgtttggcagtagaagcagaccgtgaagcctccgaacgtcgggacaaaaaatggattgtatatagtggaagcttggataagtcagtaaaagtatggggagtttcagaatctttcattgacatgaaccagatgagtatgatgcaacagcaacaacagcaacatgttatatcacattctgaaccattcatgtctgatggcagtttctcttcatcagctggtggagctagcagccatcgaagacactaatcatggtttgtgatttgaccatcaaataccaactgtgtctgaattattcatttgtttgttgttaaatttgaatggaaagaaaaagaaagaaaaatctagttatgatgcagtgttgtacaatatggaggtgaatttgaactaattttttctttttcttttttatcataaaggtttgttgtaatttttttatattttgtgatgaaaacctgtaactctatcaaacttcataataattaattttgtgc

SEQ ID NO: 107411 - protein, 465 aa, Arabidopsis thaliana; identical to SEQ ID NO: 50216
  peptide (1)..(465): Ceres Seq. ID no. 13647954
  misc_feature (1)..(465): Homolog of NCBI NO: 15225317 NR Description: transducin / WD-40 repeat protein family
  misc_feature (9)..(454): Homolog of NCBI NO: 15235354 NR Description: transducin / WD-40 repeat protein family
  misc_feature (60)..(421): Homolog of NCBI NO: 15230244 NR Description: transducin / WD-40 repeat protein family
  misc_feature (84)..(424): Homolog of NCBI NO: 31126785 NR Description: putative WD repeat-protein [Oryza sativa
  misc_feature (58)..(420): Homolog of NCBI NO: 15222143 NR Description: transducin / WD-40 repeat protein family
  misc_feature (86)..(418): Homolog of NCBI NO: 15220271 NR Description: transducin / WD-40 repeat protein family
  misc_feature (58)..(420): Homolog of NCBI NO: 17979259 NR Description: At1g49450/F13F21_11 [Arabidopsis thaliana]
  misc_feature (63)..(434): Homolog of NCBI NO: 15229740 NR Description: transducin / WD-40 repeat protein family
  misc_feature (89)..(423): Homolog of NCBI NO: 15221675 NR Description: transducin / WD-40 repeat protein family
  misc_feature (34)..(419): Homolog of NCBI NO: 18395507 NR Description: transducin / WD-40 repeat protein family thaliana] >gi|9743339|gb|AAF97963.1|AC000103_13 F21J9.19 thaliana] >gi|15028341|gb|AAK76647.1| unknown protein

SEQ ID NO: 107412 - protein, 450 aa, Arabidopsis thaliana; identical to SEQ ID NO: 50217
  peptide (1)..(450): Ceres Seq. ID no. 13647955
  misc_feature (1)..(450): Homolog of NCBI NO: 15225317 NR Description: transducin / WD-40 repeat protein family
  misc_feature (1)..(439): Homolog of NCBI NO: 15235354 NR Description: transducin / WD-40 repeat protein family
  misc_feature (45)..(406): Homolog of NCBI NO: 15230244 NR Description: transducin / WD-40 repeat protein family
  misc_feature (69)..(409): Homolog of NCBI NO: 31126785 NR Description: putative WD repeat-protein [Oryza sativa
  misc_feature (43)..(405): Homolog of NCBI NO: 15222143 NR Description: transducin / WD-40 repeat protein family
  misc_feature (71)..(403): Homolog of NCBI NO: 15220271 NR Description: transducin / WD-40 repeat protein family
  misc_feature (43)..(405): Homolog of NCBI NO: 17979259 NR Description: At1g49450/F13F21_11 [Arabidopsis thaliana]
  misc_feature (48)..(419): Homolog of NCBI NO: 15229740 NR Description: transducin / WD-40 repeat protein family
  misc_feature (74)..(408): Homolog of NCBI NO: 15221675 NR Description: transducin / WD-40 repeat protein family
  misc_feature (19)..(404): Homolog of NCBI NO: 18395507 NR Description: transducin / WD-40 repeat protein family thaliana] >gi|9743339|gb|AAF97963.1|AC000103_13 F21J9.19 thaliana] >gi|15028341|gb|AAK76647.1| unknown protein

SEQ ID NO: 107413 - protein, 449 aa, Arabidopsis thaliana; identical to SEQ ID NO: 50218
  peptide (1)..(449): Ceres Seq. ID no. 13647956
  misc_feature (1)..(449): Homolog of NCBI NO: 15225317 NR Description: transducin / WD-40 repeat protein family
  misc_feature (1)..(438): Homolog of NCBI NO: 15235354 NR Description: transducin / WD-40 repeat protein family
  misc_feature (44)..(405): Homolog of NCBI NO: 15230244 NR Description: transducin / WD-40 repeat protein family
  misc_feature (68)..(408): Homolog of NCBI NO: 31126785 NR Description: putative WD repeat-protein [Oryza sativa
  misc_feature (42)..(404): Homolog of NCBI NO: 15222143 NR Description: transducin / WD-40 repeat protein family
  misc_feature (70)..(402): Homolog of NCBI NO: 15220271 NR Description: transducin / WD-40 repeat protein family
  misc_feature (42)..(404): Homolog of NCBI NO: 17979259 NR Description: At1g49450/F13F21_11 [Arabidopsis thaliana]
  misc_feature (47)..(418): Homolog of NCBI NO: 15229740 NR Description: transducin / WD-40 repeat protein family
  misc_feature (73)..(407): Homolog of NCBI NO: 15221675 NR Description: transducin / WD-40 repeat protein family
  misc_feature (18)..(403): Homolog of NCBI NO: 18395507 NR Description: transducin / WD-40 repeat protein family thaliana] >gi|9743339|gb|AAF97963.1|AC000103_13 F21J9.19 thaliana] >gi|15028341|gb|AAK76647.1| unknown protein

SEQ ID NO: 107414 - DNA, 1696 bp, Arabidopsis thaliana
  misc_feature (1)..(1696): Ceres Seq. ID no. 13647998
  misc_feature: MA Experiment ID: 20000315 Result: Down-regulated in Transcription
  misc_feature: MA Experiment 20000315 PARAMETER Experiment Name: At_14day_Shoots-Roots_Sub_P Parameter: Age (day) Value: 14
  misc_feature: MA Experiment 20000315 PARAMETER Experiment Name: At_14day_Shoots-Roots_Sub_P Parameter: Organism Value: A. thaliana
  misc_feature: MA Experiment 20000315 PARAMETER Experiment Name: At_14day_Shoots-Roots_Sub_P Parameter: Plant Line Value: WS
  misc_feature: MA Experiment 20000315 PARAMETER Experiment Name: At_14day_Shoots-Roots_Sub_P Parameter: Tissue Value: Shoots vs. Whole Plant
  misc_feature: MA Experiment ID: 20000347 Result: Up-regulated in Transcription
  misc_feature: MA Experiment 20000347 PARAMETER Experiment Name: At_2mM_SA_Sub_P Parameter: Age (day) Value: 14
  misc_feature: MA Experiment 20000347 PARAMETER Experiment Name: At_2mM_SA_Sub_P Parameter: Organism Value: A. thaliana
  misc_feature: MA Experiment 20000347 PARAMETER Experiment Name: At_2mM_SA_Sub_P Parameter: Plant Line Value: WS
  misc_feature: MA Experiment 20000347 PARAMETER Experiment Name: At_2mM_SA_Sub_P Parameter: Timepoint (hr) Value: 6
  misc_feature: MA Experiment 20000347 PARAMETER Experiment Name: At_2mM_SA_Sub_P Parameter: Tissue Value: Aerial
  misc_feature: MA Experiment 20000347 PARAMETER Experiment Name: At_2mM_SA_Sub_P Parameter: Treatment Value: 2mM SA vs. No Treatment
  misc_feature: MA Experiment ID: 20000355 Result: Down-regulated in Transcription
  misc_feature: MA Experiment 20000355 PARAMETER Experiment Name: At_Siliques_Sub_P Parameter: Age (day) Value: 21
  misc_feature: MA Experiment 20000355 PARAMETER Experiment Name: At_Siliques_Sub_P Parameter: Organism Value: A. thaliana
  misc_feature: MA Experiment 20000355 PARAMETER Experiment Name: At_Siliques_Sub_P Parameter: Plant Line Value: WS
  misc_feature: MA Experiment 20000355 PARAMETER Experiment Name: At_Siliques_Sub_P Parameter: Tissue Value: Less Than 5mm Siliques vs. Whole Plant
gttcttctcttctctcttcttcttttcgcttcgttgctgctctcttctcsgctccgccggagaagtcgtgaaatctctgcgacttcatcaatgaagaaatcgtctcatctctctactgaakctamgcagacctraaatatctctgtataatcyttctttaagattgatttcgtacgatcttcgtgtcttttyttctttaagagatgcgttccaaggacaaaatctcttacttttatgatggggatgtggggagtgtctattttggtccgaatcacccgatgaaacctcacaggctttgtatgacccatcatcttatccttgcatatggcctgcatagcaagatggaagtttatcgtccacacaaagcatatcctatcgagatggctcagttccattctcctgactatgtagagttcctgcaacgaattaatccagaaaaccagaacttgttccccaatgaaatggctagatataatctgggagaggattgtcctgtctttgaagatttgtttgaattttgtcaactttacgccggcggaaccatagatgctgcacgcaggttaaacaacaaactctgtgacattgctataaattgggcgggcgggttgcaccatgccaaaaaatgtgatgcatctgggttttgctacatcaacgatctcgtgctaggaattcttgagttgttaaaacaccatccccgtgttctatacatagatatagatgttcatcatggtgatggggttgaagaagcgttttacttcactgacagagtaatgactgttagctttcataagtttggggataagttctttccagggacaggcgatgttaaggaaataggagaaagagaagggaaattttacgccattaatgtgccgctgaaggatggtatcgatgacagtagtttcaaccgtcttttcaggactataatatccaaggttgttgagatatatcaaccgggtgcaattgttcttcaatgcggggcagattcactagccagggatcgactaggatgctttaatctctctattgatggacatgctgaatgtgttaaattcgtgaagaagttcaatcttcccttactggttacaggaggtggaggatacacaaaggagaatgtagctcgttgttggaccgttgagactggcattcttttggacacagaacttcctaatgagattcctgaaaacgactacataaagtattttgcgccggatttttctttgaagataccgggtggtcacattgagaatcttaataccaaatcgtacatcagttccatcaaagtgcagattttggagaatttgcgatacattcaacacgctccaagcgtacaaatgcaggaggttccaccggatttctacataccggattttgatgaagacgaacaaaacccggatgtacgtgcggatcagcgttcacgggataagcagatccagagggatgatgaatatttcgatggagacaacgataacgatgcgtcataaaacatcgattcttagaaattgttggttaatttttttgtttagttatgagatttgtaatgatatcaacactttaacggctactggggcaccaaaaccacttctgattgattccatcttcttcatsttttcgtcttggtgtatatgaatgaagctttttggttcactttctcatcattgtgacttatatagtgatcaaattcgttatatattgt

SEQ ID NO: 107415 - protein, 426 aa, Arabidopsis thaliana
  peptide (1)..(426): Ceres Seq. ID no. 15219517
  misc_feature (1)..(426): Homolog of NCBI NO: 30692236 NR Description: expressed protein [Arabidopsis thaliana] putative protein [Arabidopsis thaliana]
  misc_feature (7)..(426): Homolog of NCBI NO: 11278171 NR Description: hypothetical protein T18B22.80 - Arabidopsis >gi|6967116|emb|CAB72470.1| putative protein [Arabidopsis
  misc_feature (1)..(424): Homolog of NCBI NO: 17017402 NR Description: histone deacetylase [Zea mays]
  misc_feature (3)..(424): Homolog of NCBI NO: 2827430 NR Description: histone deacetylase 1 [Gallus gallus]
  misc_feature (3)..(424): Homolog of NCBI NO: 3023929 NR Description: Histone deacetylase 1 (HD1)
  misc_feature (3)..(424): Homolog of NCBI NO: 6680193 NR Description: histone deacetylase 1 [Mus musculus] Histone deacetylase 1 (HD1) >gi|1771286|emb|CAA66870.1| histone
  misc_feature (3)..(424): Homolog of NCBI NO: 2347180 NR Description: putative histone deacetylase [Mus musculus]
  misc_feature (3)..(424): Homolog of NCBI NO: 13128860 NR Description: histone deacetylase 1; reduced potassium
  misc_feature (3)..(424): Homolog of NCBI NO: 30583783 NR Description: Homo sapiens histone deacetylase 1 [synthetic
  misc_feature (3)..(422): Homolog of NCBI NO: 27545221 NR Description: histone deacetylase 1 [Danio rerio]
MRSKDKISYFYDGDVGSVYFGPNHPMKPHRLCMTHHLILAYGLHSKMEVYRPHKAYPIEMAQFHSPDYVEFLQRINPENQNLFPNEMARYNLGEDCPVFEDLFEFCQLYAGGTIDAARRLNNKLCDIAINWAGGLHHAKKCDASGFCYINDLVLGILELLKHHPRVLYIDIDVHHGDGVEEAFYFTDRVMTVSFHKFGDKFFPGTGDVKEIGEREGKFYAINVPLKDGIDDSSFNRLFRTIISKVVEIYQPGAIVLQCGADSLARDRLGCFNLSIDGHAECVKFVKKFNLPLLVTGGGGYTKENVARCWTVETGILLDTELPNEIPENDYIKYFAPDFSLKIPGGHIENLNTKSYISSIKVQILENLRYIQHAPSVQMQEVPPDFYIPDFDEDEQNPDVRADQRSRDKQIQRDDEYFDGDNDNDAS

SEQ ID NO: 107416 - protein, 401 aa, Arabidopsis thaliana
  peptide (1)..(401): Ceres Seq. ID no. 15219518
  misc_feature (1)..(401): Homolog of NCBI NO: 30692236 NR Description: expressed protein [Arabidopsis thaliana] putative protein [Arabidopsis thaliana]
  misc_feature (1)..(401): Homolog of NCBI NO: 11278171 NR Description: hypothetical protein T18B22.80 - Arabidopsis >gi|6967116|emb|CAB72470.1| putative protein [Arabidopsis
  misc_feature (1)..(399): Homolog of NCBI NO: 17017402 NR Description: histone deacetylase [Zea mays]
  misc_feature (1)..(399): Homolog of NCBI NO: 2827430 NR Description: histone deacetylase 1 [Gallus gallus]
  misc_feature (1)..(399): Homolog of NCBI NO: 3023929 NR Description: Histone deacetylase 1 (HD1)
  misc_feature (1)..(399): Homolog of NCBI NO: 6680193 NR Description: histone deacetylase 1 [Mus musculus] Histone deacetylase 1 (HD1) >gi|1771286|emb|CAA66870.1| histone
  misc_feature (1)..(399): Homolog of NCBI NO: 2347180 NR Description: putative histone deacetylase [Mus musculus]
  misc_feature (1)..(399): Homolog of NCBI NO: 13128860 NR Description: histone deacetylase 1; reduced potassium
  misc_feature (1)..(399): Homolog of NCBI NO: 30583783 NR Description: Homo sapiens histone deacetylase 1 [synthetic
  misc_feature (1)..(397): Homolog of NCBI NO: 27545221 NR Description: histone deacetylase 1 [Danio rerio]
MKPHRLCMTHHLILAYGLHSKMEVYRPHKAYPIEMAQFHSPDYVEFLQRINPENQNLFPNEMARYNLGEDCPVFEDLFEFCQLYAGGTIDAARRLNNKLCDIAINWAGGLHHAKKCDASGFCYINDLVLGILELLKHHPRVLYIDIDVHHGDGVEEAFYFTDRVMTVSFHKFGDKFFPGTGDVKEIGEREGKFYAINVPLKDGIDDSSFNRLFRTIISKVVEIYQPGAIVLQCGADSLARDRLGCFNLSIDGHAECVKFVKKFNLPLLVTGGGGYTKENVARCWTVETGILLDTELPNEIPENDYIKYFAPDFSLKIPGGHIENLNTKSYISSIKVQILENLRYIQHAPSVQMQEVPPDFYIPDFDEDEQNPDVRADQRSRDKQIQRDDEYFDGDNDNDAS

SEQ ID NO: 107417 - protein, 394 aa, Arabidopsis thaliana
  peptide (1)..(394): Ceres Seq. ID no. 15219519
  misc_feature (1)..(394): Homolog of NCBI NO: 30692236 NR Description: expressed protein [Arabidopsis thaliana] putative protein [Arabidopsis thaliana]
  misc_feature (1)..(394): Homolog of NCBI NO: 11278171 NR Description: hypothetical protein T18B22.80 - Arabidopsis >gi|6967116|emb|CAB72470.1| putative protein [Arabidopsis
  misc_feature (1)..(392): Homolog of NCBI NO: 17017402 NR Description: histone deacetylase [Zea mays]
  misc_feature (1)..(392): Homolog of NCBI NO: 2827430 NR Description: histone deacetylase 1 [Gallus gallus]
  misc_feature (1)..(392): Homolog of NCBI NO: 3023929 NR Description: Histone deacetylase 1 (HD1)
  misc_feature (1)..(392): Homolog of NCBI NO: 6680193 NR Description: histone deacetylase 1 [Mus musculus] Histone deacetylase 1 (HD1) >gi|1771286|emb|CAA66870.1| histone
  misc_feature (1)..(392): Homolog of NCBI NO: 2347180 NR Description: putative histone deacetylase [Mus musculus]
  misc_feature (1)..(392): Homolog of NCBI NO: 13128860 NR Description: histone deacetylase 1; reduced potassium
  misc_feature (1)..(392): Homolog of NCBI NO: 30583783 NR Description: Homo sapiens histone deacetylase 1 [synthetic
  misc_feature (1)..(390): Homolog of NCBI NO: 27545221 NR Description: histone deacetylase 1 [Danio rerio]
MTHHLILAYGLHSKMEVYRPHKAYPIEMAQFHSPDYVEFLQRINPENQNLFPNEMARYNLGEDCPVFEDLFEFCQLYAGGTIDAARRLNNKLCDIAINWAGGLHHAKKCDASGFCYINDLVLGILELLKHHPRVLYIDIDVHHGDGVEEAFYFTDRVMTVSFHKFGDKFFPGTGDVKEIGEREGKFYAINVPLKDGIDDSSFNRLFRTIISKVVEIYQPGAIVLQCGADSLARDRLGCFNLSIDGHAECVKFVKKFNLPLLVTGGGGYTKENVARCWTVETGILLDTELPNEIPENDYIKYFAPDFSLKIPGGHIENLNTKSYISSIKVQILENLRYIQHAPSVQMQEVPPDFYIPDFDEDEQNPDVRADQRSRDKQIQRDDEYFDGDNDNDAS

SEQ ID NO: 107418 - DNA, 785 bp, Arabidopsis thaliana
  misc_feature (1)..(785): Ceres Seq. ID no. 13648289
  misc_feature: MA Experiment ID: 20000496 Result: Down-regulated in Transcription
  misc_feature: MA Experiment 20000496 PARAMETER Experiment Name: At_Guard_Cells_P Parameter: Harvest Date Value: 7/19/2002
  misc_feature: MA Experiment 20000496 PARAMETER Experiment Name: At_Guard_Cells_P Parameter: Organism Value: Canola
  misc_feature: MA Experiment 20000496 PARAMETER Experiment Name: At_Guard_Cells_P Parameter: Tissue Value: Guard Cells vs. Leaves
  misc_feature: MA Experiment ID: 20001557 Result: Down-regulated in Transcription
  misc_feature: MA Experiment 20001557 PARAMETER Experiment Name: At_Drought_Soil_Dry_P Parameter: Age (day) Value: 27
  misc_feature: MA Experiment 20001557 PARAMETER Experiment Name: At_Drought_Soil_Dry_P Parameter: Organism Value: A. thaliana
  misc_feature: MA Experiment 20001557 PARAMETER Experiment Name: At_Drought_Soil_Dry_P Parameter: Plant Line Value: WS
  misc_feature: MA Experiment 20001557 PARAMETER Experiment Name: At_Drought_Soil_Dry_P Parameter: Post Timepoint (hr) Value: 3
  misc_feature: MA Experiment 20001557 PARAMETER Experiment Name: At_Drought_Soil_Dry_P Parameter: Post-Treatment Value: Re-Water vs. No Drought
  misc_feature: MA Experiment 20001557 PARAMETER Experiment Name: At_Drought_Soil_Dry_P Parameter: Timepoint (day) Value: 13
  misc_feature: MA Experiment 20001557 PARAMETER Experiment Name: At_Drought_Soil_Dry_P Parameter: Treatment Value: Drought vs. No Drought
ggcttagatatcatcgaacttgctccaactgctctatctcaggatctctctcagacacagtttcttccatccatggcgtctctttcttctacctctctctctctccccaagaattctcaccaactccatccttcatctggtttttctctgaatccaaatgctcgttgtgtcagtgtttcatttggactgaatcactccaacaaacttcatatttctgctcctagaaccaaaaggatcctaaccattcaatctgcatacagagatgatgatggttcaggcagcacaggcctattcgtcggagggtttattttgggcggacttatagtcggtgccctcggatgtgtatatgcaccacagatcagcaaggctatagctggagcagaccgaaaggatctcatgaggaagttgcctaaattcatatatgacgaggaaaaagctttggagaaaacacgtaaggtactagctgagaaaattgctcagcttaactctgctatcgacgatgtctcctctcagctcaaatcagaagatactccgaatggtgcagctctaagcaccgatgaaatcgaggctacagcctgaaatcatctgtttttaggatttgaaattgaatcatgggagattacttactatgatcccaataattgttttcctttctgtgtaatgttgtacaacttttcgtctactatcttcaaatgactgctttcttccttctttttttttttctcgaaatcgcggtgttgaaggatatatcccagttatatgcgaaaccagacgttatgaaggct

SEQ ID NO: 107419 - protein, 192 aa, Arabidopsis thaliana; identical to SEQ ID NO: 47589
  peptide (1)..(192): Ceres Seq. ID no. 13648290
  misc_feature (25)..(192): Homolog of NCBI NO: 18400762 NR Description: expressed protein [Arabidopsis thaliana]
  misc_feature (25)..(191): Homolog of NCBI NO: 22326856 NR Description: protein; similar to unknown protein -related [Arabidopsis thaliana] >gi|24899755|gb|AAN65092.1|
  misc_feature (25)..(191): Homolog of NCBI NO: 17065406 NR Description: Unknown protein [Arabidopsis thaliana]
  misc_feature (15)..(191): Homolog of NCBI NO: 10176975 NR Description: protein; similar to unknown protein [Arabidopsis
  misc_feature (25)..(192): Homolog of NCBI NO: 15233017 NR Description: expressed protein [Arabidopsis thaliana] unknown protein [Arabidopsis thaliana] unknown protein [Arabidopsis thaliana]

SEQ ID NO: 107420 - protein, 168 aa, Arabidopsis thaliana; identical to SEQ ID NO: 47590
  peptide (1)..(168): Ceres Seq. ID no. 13648291
  misc_feature (1)..(168): Homolog of NCBI NO: 18400762 NR Description: expressed protein [Arabidopsis thaliana]
  misc_feature (1)..(167): Homolog of NCBI NO: 22326856 NR Description: protein; similar to unknown protein -related [Arabidopsis thaliana] >gi|24899755|gb|AAN65092.1|
  misc_feature (1)..(167): Homolog of NCBI NO: 17065406 NR Description: Unknown protein [Arabidopsis thaliana]
  misc_feature (1)..(167): Homolog of NCBI NO: 10176975 NR Description: protein; similar to unknown protein [Arabidopsis
  misc_feature (1)..(168): Homolog of NCBI NO: 15233017 NR Description: expressed protein [Arabidopsis thaliana] unknown protein [Arabidopsis thaliana] unknown protein [Arabidopsis thaliana]

SEQ ID NO: 107421 - DNA, 760 bp, Arabidopsis thaliana
  misc_feature (1)..(760): Ceres Seq. ID no. 13648299
  misc_feature: MA Experiment ID: 108434 Result: Up-regulated in Transcription
  misc_feature: MA Experiment 108434 PARAMETER Experiment Name: At_Root_Tips_cDNA_P Parameter: Tissue Value: Root Tips
  misc_feature: MA Experiment ID: 108569 Result: Down-regulated in Transcription
  misc_feature: MA Experiment 108569 PARAMETER Experiment Name: At_0.001%_MeJA__cDNA_P Parameter: Timepoint (hr) Value: 6
  misc_feature: MA Experiment 108569 PARAMETER Experiment Name: At_0.001%_MeJA__cDNA_P Parameter: Tissue Value: Aerial
  misc_feature: MA Experiment 108569 PARAMETER Experiment Name: At_0.001%_MeJA__cDNA_P Parameter: Treatment Value: 0.001% MeJA vs. No Treatment
  misc_feature: MA Experiment ID: 20000113 Result: Down-regulated in Transcription
  misc_feature: MA Experiment 20000113 PARAMETER Experiment Name: At_42deg_Heat_cDNA_P Parameter: Temperature (deg C) Value: 42 vs. 22
  misc_feature: MA Experiment 20000113 PARAMETER Experiment Name: At_42deg_Heat_cDNA_P Parameter: Timepoint (hr) Value: 8
  misc_feature: MA Experiment 20000113 PARAMETER Experiment Name: At_42deg_Heat_cDNA_P Parameter: Tissue Value: Aerial
  misc_feature: MA Experiment ID: 20000173 Result: Down-regulated in Transcription
  misc_feature: MA Experiment 20000173 PARAMETER Experiment Name: At_42deg_Heat_P Parameter: Age (day) Value: 14
  misc_feature: MA Experiment 20000173 PARAMETER Experiment Name: At_42deg_Heat_P Parameter: Organism Value: A. thaliana
  misc_feature: MA Experiment 20000173 PARAMETER Experiment Name: At_42deg_Heat_P Parameter: Plant Line Value: WS
  misc_feature: MA Experiment 20000173 PARAMETER Experiment Name: At_42deg_Heat_P Parameter: Temperature (deg C) Value: 42 vs. 22
  misc_feature: MA Experiment 20000173 PARAMETER Experiment Name: At_42deg_Heat_P Parameter: Timepoint (hr) Value: 6
  misc_feature: MA Experiment 20000173 PARAMETER Experiment Name: At_42deg_Heat_P Parameter: Tissue Value: Aerial
  misc_feature: MA Experiment ID: 20000224 Result: Down-regulated in Transcription
  misc_feature: MA Experiment ID: 20000234 Result: Up-regulated in Transcription
  misc_feature: MA Experiment 20000234 PARAMETER Experiment Name: At_Siliques_P Parameter: Age (day) Value: 21
  misc_feature: MA Experiment 20000234 PARAMETER Experiment Name: At_Siliques_P Parameter: Organism Value: A. thaliana
  misc_feature: MA Experiment 20000234 PARAMETER Experiment Name: At_Siliques_P Parameter: Plant Line Value: WS
  misc_feature: MA Experiment 20000234 PARAMETER Experiment Name: At_Siliques_P Parameter: Tissue Value: Less Than 5mm Siliques vs. Whole Plant
  misc_feature: MA Experiment ID: 20000264 Result: Up-regulated in Transcription
  misc_feature: MA Experiment 20000264 PARAMETER Experiment Name: At_Open_Flower_P Parameter: Age (day) Value: 21
  misc_feature: MA Experiment 20000264 PARAMETER Experiment Name: At_Open_Flower_P Parameter: Plant Line Value: WS
  misc_feature: MA Experiment 20000264 PARAMETER Experiment Name: At_Open_Flower_P Parameter: Tissue Value: Open Flower vs. Whole Plant
  misc_feature: MA Experiment ID: 20000265 Result: Up-regulated in Transcription
  misc_feature: MA Experiment 20000265 PARAMETER Experiment Name: At_Open_Flower_P Parameter: Age (day) Value: 21
  misc_feature: MA Experiment 20000265 PARAMETER Experiment Name: At_Open_Flower_P Parameter: Plant Line Value: WS
  misc_feature: MA Experiment 20000265 PARAMETER Experiment Name: At_Open_Flower_P Parameter: Tissue Value: Closed Flower vs. Whole Plant
  misc_feature: MA Experiment ID: 20000286 Result: Up-regulated in Transcription
  misc_feature: MA Experiment 20000286 PARAMETER Experiment Name: At_Open_Flower_P Parameter: Age (day) Value: 21
  misc_feature: MA Experiment 20000286 PARAMETER Experiment Name: At_Open_Flower_P Parameter: Plant Line Value: WS
  misc_feature: MA Experiment 20000286 PARAMETER Experiment Name: At_Open_Flower_P Parameter: Tissue Value: Half Open vs. Whole Plant
  misc_feature: MA Experiment ID: 20001905 Result: Down-regulated in Transcription
  misc_feature: MA Experiment 20001905 PARAMETER Experiment Name: At_Drought_Reproduction_P Parameter: Age (day) Value: 40
  misc_feature: MA Experiment 20001905 PARAMETER Experiment Name: At_Drought_Reproduction_P Parameter: Organism Value: A. thaliana
  misc_feature: MA Experiment 20001905 PARAMETER Experiment Name: At_Drought_Reproduction_P Parameter: Plant Line Value: WS
  misc_feature: MA Experiment 20001905 PARAMETER Experiment Name: At_Drought_Reproduction_P Parameter: Timepoint (day) Value: 10
  misc_feature: MA Experiment 20001905 PARAMETER Experiment Name: At_Drought_Reproduction_P Parameter: Tissue Value: Rosettes
  misc_feature: MA Experiment 20001905 PARAMETER Experiment Name: At_Drought_Reproduction_P Parameter: Treatment Value: Drought vs. No Drought
ctctctctcctctaagaaacacgaaaatctctgaaagtctttttgtttgaagaagatgacgcatgttgaagatgataaggaattcaaggagaaacctttggttcaggttctgagcgacgacgacagtgaagtgaaggaagccaaagacggaggaggtgaagaagttaccggcggcgacggtgaaggagaggctaatgtagaagaggaagacgacgaagcagaaaatgaagacgatgatgatgatgatgatgatgatgacgacgacgaggacgaggacgatgaagaaggggaggaggatcttgggacagagtacctagtgaggccggttggtgaggttgaagatgaggatgatgcaagtgattttgaccctgaggagaatggcttggatgaagaagaaggtgatgaagagattgaagaagatgatgttgatgaggacatcagcttgagtgctggcaaatctgagcctctgtccaagaggaagagggttgctaaggaccacagtgagcaaggagatgtcactggtgataacattaggccttctaaacggtagttcttctaacttcgaactgatctcaatccaagaagaaagtcagaaattgattcgaattctcagtattttgaatcattcgttgggttgatatagtttttaatctaatggtagtagtgttgcttagagcttaatggattgttgtttcttctttatgttccttgagactgctttcaaacaagtttaagtattcaacgcttttcttttcaaggg

SEQ ID NO: 107422 - protein, 164 aa, Arabidopsis thaliana; identical to SEQ ID NO: 49656
  peptide (1)..(164): Ceres Seq. ID no. 13648300
  misc_feature (19)..(151): Pfam Name: Chromadorea ALT protein Pfam Description: Chromadorea ALT protein
  misc_feature (1)..(164): Homolog of NCBI NO: 30684391 NR Description: expressed protein [Arabidopsis thaliana]
  misc_feature (1)..(164): Homolog of NCBI NO: 28393370 NR Description: unknown protein [Arabidopsis thaliana]
  misc_feature (5)..(164): Homolog of NCBI NO: 18401985 NR Description: expressed protein [Arabidopsis thaliana]
  misc_feature (21)..(157): Homolog of NCBI NO: 34894890 NR Description: B1140D12.10 [Oryza sativa (japonica
  misc_feature (1)..(128): Homolog of NCBI NO: 18401985 NR Description: expressed protein [Arabidopsis thaliana]
  misc_feature (1)..(135): Homolog of NCBI NO: 23481405 NR Description: hypothetical protein [Plasmodium yoelii yoelii]
  misc_feature (5)..(127): Homolog of NCBI NO: 23509612 NR Description: hypothetical protein [Plasmodium falciparum 3D7]
  misc_feature (5)..(127): Homolog of NCBI NO: 23481405 NR Description: hypothetical protein [Plasmodium yoelii yoelii]
  misc_feature (5)..(127): Homolog of NCBI NO: 23509612 NR Description: hypothetical protein [Plasmodium falciparum 3D7]
  misc_feature (11)..(127): Homolog of NCBI NO: 35210492 NR Description: aspartic acid-rich protein aspolin1 [Theragra

SEQ ID NO: 107423 - DNA, 1411 bp, Arabidopsis thaliana
  misc_feature (1)..(1411): Ceres Seq. ID no. 13648309
  misc_feature: MA Experiment ID: 20000166 Result: Up-regulated in Transcription
  misc_feature: MA Experiment 20000166 PARAMETER Experiment Name: At_100uM_ABA_P Parameter: Age (day) Value: 14
  misc_feature: MA Experiment 20000166 PARAMETER Experiment Name: At_100uM_ABA_P Parameter: Organism Value: A. thaliana
  misc_feature: MA Experiment 20000166 PARAMETER Experiment Name: At_100uM_ABA_P Parameter: Plant Line Value: WS
  misc_feature: MA Experiment 20000166 PARAMETER Experiment Name: At_100uM_ABA_P Parameter: Timepoint (hr) Value: 1
  misc_feature: MA Experiment 20000166 PARAMETER Experiment Name: At_100uM_ABA_P Parameter: Tissue Value: Aerial
  misc_feature: MA Experiment 20000166 PARAMETER Experiment Name: At_100uM_ABA_P Parameter: Treatment Value: 100uM ABA vs. No Treatment
  misc_feature: MA Experiment ID: 20000169 Result: Up-regulated in Transcription
  misc_feature: MA Experiment 20000169 PARAMETER Experiment Name: At_100uM_ABA_P Parameter: Age (day) Value: 14
  misc_feature: MA Experiment 20000169 PARAMETER Experiment Name: At_100uM_ABA_P Parameter: Organism Value: A. thaliana
  misc_feature: MA Experiment 20000169 PARAMETER Experiment Name: At_100uM_ABA_P Parameter: Plant Line Value: WS
  misc_feature: MA Experiment 20000169 PARAMETER Experiment Name: At_100uM_ABA_P Parameter: Timepoint (hr) Value: 6
  misc_feature: MA Experiment 20000169 PARAMETER Experiment Name: At_100uM_ABA_P Parameter: Tissue Value: Aerial
  misc_feature: MA Experiment 20000169 PARAMETER Experiment Name: At_100uM_ABA_P Parameter: Treatment Value: 100uM ABA vs. No Treatment
  misc_feature: MA Experiment ID: 20000171 Result: Down-regulated in Transcription
  misc_feature: MA Experiment 20000171 PARAMETER Experiment Name: At_42deg_Heat_P Parameter: Age (day) Value: 14
  misc_feature: MA Experiment 20000171 PARAMETER Experiment Name: At_42deg_Heat_P Parameter: Organism Value: A. thaliana
  misc_feature: MA Experiment 20000171 PARAMETER Experiment Name: At_42deg_Heat_P Parameter: Plant Line Value: WS
  misc_feature: MA Experiment 20000171 PARAMETER Experiment Name: At_42deg_Heat_P Parameter: Temperature (deg C) Value: 42 vs. 22
  misc_feature: MA Experiment 20000171 PARAMETER Experiment Name: At_42deg_Heat_P Parameter: Timepoint (hr) Value: 1
  misc_feature: MA Experiment 20000171 PARAMETER Experiment Name: At_42deg_Heat_P Parameter: Tissue Value: Aerial
  misc_feature: MA Experiment ID: 20000173 Result: Down-regulated in Transcription
  misc_feature: MA Experiment 20000173 PARAMETER Experiment Name: At_42deg_Heat_P Parameter: Age (day) Value: 14
  misc_feature: MA Experiment 20000173 PARAMETER Experiment Name: At_42deg_Heat_P Parameter: Organism Value: A. thaliana
  misc_feature: MA Experiment 20000173 PARAMETER Experiment Name: At_42deg_Heat_P Parameter: Plant Line Value: WS
  misc_feature: MA Experiment 20000173 PARAMETER Experiment Name: At_42deg_Heat_P Parameter: Temperature (deg C) Value: 42 vs. 22
  misc_feature: MA Experiment 20000173 PARAMETER Experiment Name: At_42deg_Heat_P Parameter: Timepoint (hr) Value: 6
  misc_feature: MA Experiment 20000173 PARAMETER Experiment Name: At_42deg_Heat_P Parameter: Tissue Value: Aerial
  misc_feature: MA Experiment ID: 20000184 Result: Down-regulated in Transcription
  misc_feature: MA Experiment 20000184 PARAMETER Experiment Name: At_Shoots__P Parameter: Age (day) Value: 7
  misc_feature: MA Experiment 20000184 PARAMETER Experiment Name: At_Shoots__P Parameter: Tissue Value: Shoots vs. Whole Plant
  misc_feature: MA Experiment ID: 20000185 Result: Down-regulated in Transcription
  misc_feature: MA Experiment 20000185 PARAMETER Experiment Name: At_Roots__P Parameter: Age (day) Value: 7 vs. 21
  misc_feature: MA Experiment 20000185 PARAMETER Experiment Name: At_Roots__P Parameter: Organism Value: A. thaliana
  misc_feature: MA Experiment 20000185 PARAMETER Experiment Name: At_Roots__P Parameter: Tissue Value: Roots vs. Whole Plant
  misc_feature: MA Experiment ID: 20000227 Result: Down-regulated in Transcription
  misc_feature: MA Experiment 20000227 PARAMETER Experiment Name: At_Root-Tips-vs-Tops_P Parameter: Tissue Value: Root Tips vs. Root Tops
  misc_feature: MA Experiment ID: 20000234 Result: Down-regulated in Transcription
  misc_feature: MA Experiment 20000234 PARAMETER Experiment Name: At_Siliques_P Parameter: Age (day) Value: 21
  misc_feature: MA Experiment 20000234 PARAMETER Experiment Name: At_Siliques_P Parameter: Organism Value: A. thaliana
  misc_feature: MA Experiment 20000234 PARAMETER Experiment Name: At_Siliques_P Parameter: Plant Line Value: WS
  misc_feature: MA Experiment 20000234 PARAMETER Experiment Name: At_Siliques_P Parameter: Tissue Value: Less Than 5mm Siliques vs. Whole Plant
  misc_feature: MA Experiment ID: 20000265 Result: Down-regulated in Transcription
  misc_feature: MA Experiment 20000265 PARAMETER Experiment Name: At_Open_Flower_P Parameter: Age (day) Value: 21
  misc_feature: MA Experiment 20000265 PARAMETER Experiment Name: At_Open_Flower_P Parameter: Plant Line Value: WS
  misc_feature: MA Experiment 20000265 PARAMETER Experiment Name: At_Open_Flower_P Parameter: Tissue Value: Closed Flower vs. Whole Plant
  misc_feature: MA Experiment ID: 20000268 Result: Up-regulated in Transcription
  misc_feature: MA Experiment 20000268 PARAMETER Experiment Name: At_100mM_NaCl__P Parameter: Age (day) Value: 14
  misc_feature: MA Experiment 20000268 PARAMETER Experiment Name: At_100mM_NaCl__P Parameter: Organism Value: A. thaliana
  misc_feature: MA Experiment 20000268 PARAMETER Experiment Name: At_100mM_NaCl__P Parameter: Plant Line Value: WS
  misc_feature: MA Experiment 20000268 PARAMETER Experiment Name: At_100mM_NaCl__P Parameter: Timepoint (hr) Value: 6
  misc_feature: MA Experiment 20000268 PARAMETER Experiment Name: At_100mM_NaCl__P Parameter: Tissue Value: Whole Plant
  misc_feature: MA Experiment 20000268 PARAMETER Experiment Name: At_100mM_NaCl__P Parameter: Treatment Value: 100mM NaCl vs. No Treatment
  misc_feature: MA Experiment ID: 20000438 Result: Down-regulated in Transcription
  misc_feature: MA Experiment 20000438 PARAMETER Experiment Name: At_Shoots__P Parameter: Age (day) Value: 14
  misc_feature: MA Experiment 20000438 PARAMETER Experiment Name: At_Shoots__P Parameter: Tissue Value: Shoots vs. Whole Plant
  misc_feature: MA Experiment ID: 20000453 Result: Up-regulated in Transcription
  misc_feature: MA Experiment 20000453 PARAMETER Experiment Name: At_100uM_ABA_P Parameter: Age (day) Value: 15
  misc_feature: MA Experiment 20000453 PARAMETER Experiment Name: At_100uM_ABA_P Parameter: Organism Value: A. thaliana
  misc_feature: MA Experiment 20000453 PARAMETER Experiment Name: At_100uM_ABA_P Parameter: Plant Line Value: WS
  misc_feature: MA Experiment 20000453 PARAMETER Experiment Name: At_100uM_ABA_P Parameter: Timepoint (hr) Value: 24
  misc_feature: MA Experiment 20000453 PARAMETER Experiment Name: At_100uM_ABA_P Parameter: Tissue Value: Aerial
  misc_feature: MA Experiment 20000453 PARAMETER Experiment Name: At_100uM_ABA_P Parameter: Treatment Value: 100uM ABA vs. No Treatment
  misc_feature: MA Experiment ID: 20000496 Result: Up-regulated in Transcription
  misc_feature: MA Experiment 20000496 PARAMETER Experiment Name: At_Guard_Cells_P Parameter: Harvest Date Value: 7/19/2002
  misc_feature: MA Experiment 20000496 PARAMETER Experiment Name: At_Guard_Cells_P Parameter: Organism Value: Canola
  misc_feature: MA Experiment 20000496 PARAMETER Experiment Name: At_Guard_Cells_P Parameter: Tissue Value: Guard Cells vs. Leaves
  misc_feature: MA Experiment ID: 20000527 Result: Down-regulated in Transcription
  misc_feature: MA Experiment 20000527 PARAMETER Experiment Name: At_10percent_PEG_P Parameter: Age (day) Value: 20
  misc_feature: MA Experiment 20000527 PARAMETER Experiment Name: At_10percent_PEG_P Parameter: Organism Value: A. thaliana
  misc_feature: MA Experiment 20000527 PARAMETER Experiment Name: At_10percent_PEG_P Parameter: Plant Line Value: WS
  misc_feature: MA Experiment 20000527 PARAMETER Experiment Name: At_10percent_PEG_P Parameter: Timepoint (day) Value: 20
  misc_feature: MA Experiment 20000527 PARAMETER Experiment Name: At_10percent_PEG_P Parameter: Tissue Value: Whole Plant
  misc_feature: MA Experiment 20000527 PARAMETER Experiment Name: At_10percent_PEG_P Parameter: Treatment Value: 10percent PEG vs. No Treatment
  misc_feature: MA Experiment ID: 20000794 Result: Up-regulated in Transcription
  misc_feature: MA Experiment 20000794 PARAMETER Experiment Name: At_Petals_P Parameter: Age (day) Value: 23-25 days
  misc_feature: MA Experiment 20000794 PARAMETER Experiment Name: At_Petals_P Parameter: Plant Line Value: WS
  misc_feature: MA Experiment 20000794 PARAMETER Experiment Name: At_Petals_P Parameter: Tissue Value: Petals vs. Whole plant
  misc_feature: MA Experiment ID: 20001772 Result: Up-regulated in Transcription
  misc_feature: MA Experiment 20001772 PARAMETER Experiment Name: At_Far-red-enriched-adult_P Parameter: Age (day) Value: 29
  misc_feature: MA Experiment 20001772 PARAMETER Experiment Name: At_Far-red-enriched-adult_P Parameter: Light Value: Far-red enriched vs. White
  misc_feature: MA Experiment 20001772 PARAMETER Experiment Name: At_Far-red-enriched-adult_P Parameter: Organism Value: A. thaliana
  misc_feature: MA Experiment 20001772 PARAMETER Experiment Name: At_Far-red-enriched-adult_P Parameter: Plant Line Value: Columbia
  misc_feature: MA Experiment 20001772 PARAMETER Experiment Name: At_Far-red-enriched-adult_P Parameter: Timepoint (hr) Value: 24
  misc_feature: MA Experiment 20001772 PARAMETER Experiment Name: At_Far-red-enriched-adult_P Parameter: Tissue Value: Aerial
ggttcatatggaaaacgctcatcaacctcaacaatctctctcctctctctctctgtatatagaagaatctccattgtctttaatttctctccatttctctttctctcttccttcaaagttttctcttttcttgatgggtttaagagagtaaagatcatcaagtactatgcattaaattgagaagttattaaaaatttcgattaattaaagattgttgatgatgaagagattaagtagttcagattcagtgggtggtctcatctctttatgtcctacaacttccacagatgagcagagtccgaggagatacggtgggagagagtttcagtcgatgcttgaaggatacgaggaagaagaagaagctatagtagaagaaagaggacacgtgggcttgtcggagaagaagagaaggttaagcattaaccaagttaaagctttggagaagaattttgagttagagaataagcttgagcctgagaggaaagttaagttagctcaagaacttggtcttcaacctcgtcaagttgctgtttggtttcaaaaccgtcgtgctcggtggaagacaaaacagcttgagaaagattatggtgttcttaaaacccagtacgattctctccgtcataactktgattccctccgccgtgacaatgaatctctccttcaagagattagtaaactgaaaacgaagcttgatggaggaggagaagaagaagaagaagaagagaacaacgcggcggtgacaacggagagtgatatttcggtcaaggaggaagaagtttcgttgccggagaagattacagaggcaccgtcgtctcctccacagtttcttgaacattctgatggtcttaattaccggagtttcacagatctacgtgatcttcttccattaaaggcggcggcttcttcattcgccgccgcagctggatcttcagacagtagcgattcaagcgcactgctgaatgaagaaagcagctctaatgtcactgtggcggctccggtgacggttccaggaggtaatttcttccagtttgtgaaaatggagcagacggaggatcatgaggactttctgagtggagaagaagcttgtgaattcttttccgatgaacagccgccgtctctacactggtactccaccgttgatcattggaattgaagctgaaaacaccaccggaagagattttggattggattagatgctcttttcttctctgtggaaaaaacagaggagggcaaaatgggaataargttaaaaattgaagggtgaaagggcaattaaggaagggttaartctgggcgggaataatgatttagggtgaatttgtaattatgctttttctctagtgrttttcgtgcacttcttgtaattaaggatcatcagatcaaagagaaattsagaaggggttamcatgtc

SEQ ID NO: 107424 - protein, 311 aa, Arabidopsis thaliana
  peptide (1)..(311): Ceres Seq. ID no. 15219541
  misc_feature (62)..(116): Pfam Name: Homeobox domain Pfam Description: Homeobox domain
  misc_feature (1)..(311): Homolog of NCBI NO: 18399966 NR Description: homeobox-leucine zipper protein ATHB-6 (HD-Zip
  misc_feature (2)..(311): Homolog of NCBI NO: 25386231 NR Description: homeodomain transcription factor (ATHB-6)
  misc_feature (1)..(291): Homolog of NCBI NO: 5305602 NR Description: homeobox protein ATHB6 [Arabidopsis thaliana]
  misc_feature (1)..(311): Homolog of NCBI NO: 8133126 NR Description: hb-6-like protein [Brassica rapa subsp.
  misc_feature (2)..(310): Homolog of NCBI NO: 15236109 NR Description: homeodomain-leucine zipper protein ATHB-16 (HD-Zip
  misc_feature (2)..(310): Homolog of NCBI NO: 15450982 NR Description: homeodomain-like protein [Arabidopsis thaliana]
  misc_feature (2)..(310): Homolog of NCBI NO: 7446295 NR Description: homeotic protein T5J17.230 - Arabidopsis thaliana
  misc_feature (2)..(311): Homolog of NCBI NO: 15238405 NR Description: homeobox-leucine zipper protein ATHB-5 (HD-Zip
  misc_feature (48)..(311): Homolog of NCBI NO: 15148916 NR Description: homeodomain leucine zipper protein HDZ1
  misc_feature (137)..(137): Xaa is any aa, unknown or other
MMKRLSSSDSVGGLISLCPTTSTDEQSPRRYGGREFQSMLEGYEEEEEAIVEERGHVGLSEKKRRLSINQVKALEKNFELENKLEPERKVKLAQELGLQPRQVAVWFQNRRARWKTKQLEKDYGVLKTQYDSLRHNXDSLRRDNESLLQEISKLKTKLDGGGEEEEEEENNAAVTTESDISVKEEEVSLPEKITEAPSSPPQFLEHSDGLNYRSFTDLRDLLPLKAAASSFAAAAGSSDSSDSSALLNEESSSNVTVAAPVTVPGGNFFQFVKMEQTEDHEDFLSGEEACEFFSDEQPPSLHWYSTVDHWN

SEQ ID NO: 107425 - protein, 310 aa, Arabidopsis thaliana
  peptide (1)..(310): Ceres Seq. ID no. 15219542
  misc_feature (61)..(115): Pfam Name: Homeobox domain Pfam Description: Homeobox domain
  misc_feature (1)..(310): Homolog of NCBI NO: 18399966 NR Description: homeobox-leucine zipper protein ATHB-6 (HD-Zip
  misc_feature (1)..(310): Homolog of NCBI NO: 25386231 NR Description: homeodomain transcription factor (ATHB-6)
  misc_feature (1)..(290): Homolog of NCBI NO: 5305602 NR Description: homeobox protein ATHB6 [Arabidopsis thaliana]
  misc_feature (1)..(310): Homolog of NCBI NO: 8133126 NR Description: hb-6-like protein [Brassica rapa subsp.
  misc_feature (1)..(309): Homolog of NCBI NO: 15236109 NR Description: homeodomain-leucine zipper protein ATHB-16 (HD-Zip
  misc_feature (1)..(309): Homolog of NCBI NO: 15450982 NR Description: homeodomain-like protein [Arabidopsis thaliana]
  misc_feature (1)..(309): Homolog of NCBI NO: 7446295 NR Description: homeotic protein T5J17.230 - Arabidopsis thaliana
  misc_feature (1)..(310): Homolog of NCBI NO: 15238405 NR Description: homeobox-leucine zipper protein ATHB-5 (HD-Zip
  misc_feature (47)..(310): Homolog of NCBI NO: 15148916 NR Description: homeodomain leucine zipper protein HDZ1
  misc_feature (136)..(136): Xaa is any aa, unknown or other
MKRLSSSDSVGGLISLCPTTSTDEQSPRRYGGREFQSMLEGYEEEEEAIVEERGHVGLSEKKRRLSINQVKALEKNFELENKLEPERKVKLAQELGLQPRQVAVWFQNRRARWKTKQLEKDYGVLKTQYDSLRHNXDSLRRDNESLLQEISKLKTKLDGGGEEEEEEENNAAVTTESDISVKEEEVSLPEKITEAPSSPPQFLEHSDGLNYRSFTDLRDLLPLKAAASSFAAAAGSSDSSDSSALLNEESSSNVTVAAPVTVPGGNFFQFVKMEQTEDHEDFLSGEEACEFFSDEQPPSLHWYSTVDHWN

SEQ ID NO: 107426 - protein, 273 aa, Arabidopsis thaliana
  peptide (1)..(273): Ceres Seq. ID no. 15219543
  misc_feature (24)..(78): Pfam Name: Homeobox domain Pfam Description: Homeobox domain
  misc_feature (1)..(273): Homolog of NCBI NO: 18399966 NR Description: homeobox-leucine zipper protein ATHB-6 (HD-Zip
  misc_feature (1)..(273): Homolog of NCBI NO: 25386231 NR Description: homeodomain transcription factor (ATHB-6)
  misc_feature (1)..(253): Homolog of NCBI NO: 5305602 NR Description: homeobox protein ATHB6 [Arabidopsis thaliana]
  misc_feature (1)..(273): Homolog of NCBI NO: 8133126 NR Description: hb-6-like protein [Brassica rapa subsp.
  misc_feature (1)..(272): Homolog of NCBI NO: 15236109 NR Description: homeodomain-leucine zipper protein ATHB-16 (HD-Zip
  misc_feature (1)..(272): Homolog of NCBI NO: 15450982 NR Description: homeodomain-like protein [Arabidopsis thaliana]
  misc_feature (1)..(272): Homolog of NCBI NO: 7446295 NR Description: homeotic protein T5J17.230 - Arabidopsis thaliana
  misc_feature (1)..(273): Homolog of NCBI NO: 15238405 NR Description: homeobox-leucine zipper protein ATHB-5 (HD-Zip
  misc_feature (10)..(273): Homolog of NCBI NO: 15148916 NR Description: homeodomain leucine zipper protein HDZ1
  misc_feature (99)..(99): Xaa is any aa, unknown or other
MLEGYEEEEEAIVEERGHVGLSEKKRRLSINQVKALEKNFELENKLEPERKVKLAQELGLQPRQVAVWFQNRRARWKTKQLEKDYGVLKTQYDSLRHNXDSLRRDNESLLQEISKLKTKLDGGGEEEEEEENNAAVTTESDISVKEEEVSLPEKITEAPSSPPQFLEHSDGLNYRSFTDLRDLLPLKAAASSFAAAAGSSDSSDSSALLNEESSSNVTVAAPVTVPGGNFFQFVKMEQTEDHEDFLSGEEACEFFSDEQPPSLHWYSTVDHWN

SEQ ID NO: 107427 - DNA, 1404 bp, Arabidopsis thaliana
  misc_feature (1)..(1404): Ceres Seq. ID no. 13648336
  misc_feature: MA Experiment ID: 20000438 Result: Down-regulated in Transcription
  misc_feature: MA Experiment 20000438 PARAMETER Experiment Name: At_Shoots__P Parameter: Age (day) Value: 14
  misc_feature: MA Experiment 20000438 PARAMETER Experiment Name: At_Shoots__P Parameter: Tissue Value: Shoots vs. Whole Plant
gaaggaaagagcgagagagagagagagagagagagaaaaaagaagaagaagaatttgaggcgattgggtaagcgatgcacatcgtcttctctgtcgatgatttgaccgaatccttctggcctgttcccgctccggcgccgtcgccgggatcgtcatcgactccgtcaccgacgcagaacgtggcggatgggatgactcgaagtcaatcggagtgggcgttccacaggcttatcaatgagttgtctggttccgattcgagccctacgactaacacaatcgagagatcacctccaccggttcagtctctttcgagattagaagaaaccgttgacgaaaccgaagatgttgttgagattcagaaaccgcagaatcatcgacggctccctgttgatgatcaagggaagaatcggaatcgtgctccgtcgtctgatccggttgattcttcagctcctgttgttgttgatcctaatcagtatcatgcgattcttaagagcaagctcgagcttgcttgcgctgctgttgctcgtcgtgtgggaactgtgaaaccggaagattcgagtgcttcagctagcaatcaaaaacaagctcaaggctccattgtggcacaaacctcacctggtgcttcatctgttagattttctcccacaacaagcacgcaaaagaaacctgatgttccagccagacaaactagtatttcatcacgagatgattctgatgacgatgatcttgatggagacgcagataatggagatcctactgatgtgaagcgtgctaggaggatgctctcaaaccgagaatccgctaggcgctctaggagaagaaagcaagaacaaatgaatgaatttgatacacaggccaattaagagccgagcattcaactttaattaatcgtcttagtgacatgaatcataagtatgatgcagctgctgttgacaacagaattctaagagctgatatcgaaactttgagaacaaaggttaagatggcagaggaaactgtgaaaagagtgacaggagtgaaccctttgcattggtcaagaccaaacatgggcataccattcagcaacacaccgagtgcttcctctagtattccgccaaactctaaccacattttgaaaccagcaaattcaagtaccaacaccagtgctggtttagcacaaaatcagagagtggagacggcaaatttcttgccggaacaggtgaaccgtgaaggcatgcagaatccatttgctcctgattctaatctgtacgaaaccctaccccattggaatcacaagcattaaccagaaaaagagtcattggttttgtgattttgattgaggtaactattgtctgtatttttatttactgtatgactcagcgacggtaaactcttaatattatatatatgattggacatgatgga

SEQ ID NO: 107428 - protein, 262 aa, Arabidopsis thaliana
  peptide (1)..(262): Ceres Seq. ID no. 13648337
  misc_feature (1)..(260): Homolog of NCBI NO: 30694089 NR Description: bZIP transcription factor-related protein
  misc_feature (1)..(262): Homolog of NCBI NO: 15451130 NR Description: bZIP transcription factor-like protein thaliana] >gi|20148331|gb|AAM10056.1| unknown protein
  misc_feature (1)..(262): Homolog of NCBI NO: 30679226 NR Description: bZIP protein [Arabidopsis thaliana]
  misc_feature (1)..(262): Homolog of NCBI NO: 15235433 NR Description: bZIP protein [Arabidopsis thaliana]
  misc_feature (8)..(262): Homolog of NCBI NO: 19423919 NR Description: unknown protein [Arabidopsis thaliana]
  misc_feature (1)..(262): Homolog of NCBI NO: 16797791 NR Description: bZIP transcription factor [Nicotiana tabacum]
  misc_feature (1)..(260): Homolog of NCBI NO: 542188 NR Description: OHP2 protein - maize >gi|168428|gb|AAA33439.1|
  misc_feature (123)..(262): Homolog of NCBI NO: 30691978 NR Description: bZIP family transcription factor [Arabidopsis
  misc_feature (123)..(262): Homolog of NCBI NO: 7682779 NR Description: Hypothetical protein T32B20.c [Arabidopsis
  misc_feature (17)..(260): Homolog of NCBI NO: 542187 NR Description: OHP1 protein - maize >gi|168530|gb|AAA33488.1|
MHIVFSVDDLTESFWPVPAPAPSPGSSSTPSPTQNVADGMTRSQSEWAFHRLINELSGSDSSPTTNTIERSPPPVQSLSRLEETVDETEDVVEIQKPQNHRRLPVDDQGKNRNRAPSSDPVDSSAPVVVDPNQYHAILKSKLELACAAVARRVGTVKPEDSSASASNQKQAQGSIVAQTSPGASSVRFSPTTSTQKKPDVPARQTSISSRDDSDDDDLDGDADNGDPTDVKRARRMLSNRESARRSRRRKQEQMNEFDTQAN

SEQ ID NO: 107429 - protein, 223 aa, Arabidopsis thaliana
  peptide (1)..(223): Ceres Seq. ID no. 13648338
  misc_feature (1)..(221): Homolog of NCBI NO: 30694089 NR Description: bZIP transcription factor-related protein
  misc_feature (1)..(223): Homolog of NCBI NO: 15451130 NR Description: bZIP transcription factor-like protein thaliana] >gi|20148331|gb|AAM10056.1| unknown protein
  misc_feature (1)..(223): Homolog of NCBI NO: 30679226 NR Description: bZIP protein [Arabidopsis thaliana]
  misc_feature (1)..(223): Homolog of NCBI NO: 15235433 NR Description: bZIP protein [Arabidopsis thaliana]
  misc_feature (1)..(223): Homolog of NCBI NO: 19423919 NR Description: unknown protein [Arabidopsis thaliana]
  misc_feature (1)..(223): Homolog of NCBI NO: 16797791 NR Description: bZIP transcription factor [Nicotiana tabacum]
  misc_feature (1)..(221): Homolog of NCBI NO: 542188 NR Description: OHP2 protein - maize >gi|168428|gb|AAA33439.1|
  misc_feature (84)..(223): Homolog of NCBI NO: 30691978 NR Description: bZIP family transcription factor [Arabidopsis
  misc_feature (84)..(223): Homolog of NCBI NO: 7682779 NR Description: Hypothetical protein T32B20.c [Arabidopsis
  misc_feature (1)..(221): Homolog of NCBI NO: 542187 NR Description: OHP1 protein - maize >gi|168530|gb|AAA33488.1|
MTRSQSEWAFHRLINELSGSDSSPTTNTIERSPPPVQSLSRLEETVDETEDVVEIQKPQNHRRLPVDDQGKNRNRAPSSDPVDSSAPVVVDPNQYHAILKSKLELACAAVARRVGTVKPEDSSASASNQKQAQGSIVAQTSPGASSVRFSPTTSTQKKPDVPARQTSISSRDDSDDDDLDGDADNGDPTDVKRARRMLSNRESARRSRRRKQEQMNEFDTQAN

SEQ ID NO: 107430 - DNA, 485 bp, Arabidopsis thaliana
  misc_feature (1)..(485): Ceres Seq. ID no. 13650139
  misc_feature: MA Experiment ID: 20000173 Result: Down-regulated in Transcription
  misc_feature: MA Experiment 20000173 PARAMETER Experiment Name: At_42deg_Heat_P Parameter: Age (day) Value: 14
  misc_feature: MA Experiment 20000173 PARAMETER Experiment Name: At_42deg_Heat_P Parameter: Organism Value: A. thaliana
  misc_feature: MA Experiment 20000173 PARAMETER Experiment Name: At_42deg_Heat_P Parameter: Plant Line Value: WS
  misc_feature: MA Experiment 20000173 PARAMETER Experiment Name: At_42deg_Heat_P Parameter: Temperature (deg C) Value: 42 vs. 22
  misc_feature: MA Experiment 20000173 PARAMETER Experiment Name: At_42deg_Heat_P Parameter: Timepoint (hr) Value: 6
  misc_feature: MA Experiment 20000173 PARAMETER Experiment Name: At_42deg_Heat_P Parameter: Tissue Value: Aerial
  misc_feature: MA Experiment ID: 20000182 Result: Up-regulated in Transcription
  misc_feature: MA Experiment 20000182 PARAMETER Experiment Name: At_2mM_SA_P Parameter: Age (day) Value: 14
  misc_feature: MA Experiment 20000182 PARAMETER Experiment Name: At_2mM_SA_P Parameter: Organism Value: A. thaliana
  misc_feature: MA Experiment 20000182 PARAMETER Experiment Name: At_2mM_SA_P Parameter: Plant Line Value: WS
  misc_feature: MA Experiment 20000182 PARAMETER Experiment Name: At_2mM_SA_P Parameter: Timepoint (hr) Value: 6
  misc_feature: MA Experiment 20000182 PARAMETER Experiment Name: At_2mM_SA_P Parameter: Tissue Value: Aerial
  misc_feature: MA Experiment 20000182 PARAMETER Experiment Name: At_2mM_SA_P Parameter: Treatment Value: 2mM SA vs. No Treatment
  misc_feature: MA Experiment ID: 20000184 Result: Down-regulated in Transcription
  misc_feature: MA Experiment 20000184 PARAMETER Experiment Name: At_Shoots__P Parameter: Age (day) Value: 7
  misc_feature: MA Experiment 20000184 PARAMETER Experiment Name: At_Shoots__P Parameter: Tissue Value: Shoots vs. Whole Plant
  misc_feature: MA Experiment ID: 20000234 Result: Down-regulated in Transcription
  misc_feature: MA Experiment 20000234 PARAMETER Experiment Name: At_Siliques_P Parameter: Age (day) Value: 21
  misc_feature: MA Experiment 20000234 PARAMETER Experiment Name: At_Siliques_P Parameter: Organism Value: A. thaliana
  misc_feature: MA Experiment 20000234 PARAMETER Experiment Name: At_Siliques_P Parameter: Plant Line Value: WS
  misc_feature: MA Experiment 20000234 PARAMETER Experiment Name: At_Siliques_P Parameter: Tissue Value: Less Than 5mm Siliques vs. Whole Plant
  misc_feature: MA Experiment ID: 20000235 Result: Down-regulated in Transcription
  misc_feature: MA Experiment 20000235 PARAMETER Experiment Name: At_Siliques_P Parameter: Age (day) Value: 21
  misc_feature: MA Experiment 20000235 PARAMETER Experiment Name: At_Siliques_P Parameter: Organism Value: A. thaliana
  misc_feature: MA Experiment 20000235 PARAMETER Experiment Name: At_Siliques_P Parameter: Plant Line Value: WS
  misc_feature: MA Experiment 20000235 PARAMETER Experiment Name: At_Siliques_P Parameter: Tissue Value: 5-10mm Siliques vs. Whole Plant
  misc_feature: MA Experiment ID: 20000264 Result: Down-regulated in Transcription
  misc_feature: MA Experiment 20000264 PARAMETER Experiment Name: At_Open_Flower_P Parameter: Age (day) Value: 21
  misc_feature: MA Experiment 20000264 PARAMETER Experiment Name: At_Open_Flower_P Parameter: Plant Line Value: WS
  misc_feature: MA Experiment 20000264 PARAMETER Experiment Name: At_Open_Flower_P Parameter: Tissue Value: Open Flower vs. Whole Plant
  misc_feature: MA Experiment ID: 20000265 Result: Down-regulated in Transcription
  misc_feature: MA Experiment 20000265 PARAMETER Experiment Name: At_Open_Flower_P Parameter: Age (day) Value: 21
  misc_feature: MA Experiment 20000265 PARAMETER Experiment Name: At_Open_Flower_P Parameter: Plant Line Value: WS
  misc_feature: MA Experiment 20000265 PARAMETER Experiment Name: At_Open_Flower_P Parameter: Tissue Value: Closed Flower vs. Whole Plant
  misc_feature: MA Experiment ID: 20000286 Result: Down-regulated in Transcription
  misc_feature: MA Experiment 20000286 PARAMETER Experiment Name: At_Open_Flower_P Parameter: Age (day) Value: 21
  misc_feature: MA Experiment 20000286 PARAMETER Experiment Name: At_Open_Flower_P Parameter: Plant Line Value: WS
  misc_feature: MA Experiment 20000286 PARAMETER Experiment Name: At_Open_Flower_P Parameter: Tissue Value: Half Open vs. Whole Plant
  misc_feature: MA Experiment ID: 20000438 Result: Down-regulated in Transcription
  misc_feature: MA Experiment 20000438 PARAMETER Experiment Name: At_Shoots__P Parameter: Age (day) Value: 14
  misc_feature: MA Experiment 20000438 PARAMETER Experiment Name: At_Shoots__P Parameter: Tissue Value: Shoots vs. Whole Plant
  misc_feature: MA Experiment ID: 20000794 Result: Down-regulated in Transcription
  misc_feature: MA Experiment 20000794 PARAMETER Experiment Name: At_Petals_P Parameter: Age (day) Value: 23-25 days
  misc_feature: MA Experiment 20000794 PARAMETER Experiment Name: At_Petals_P Parameter: Plant Line Value: WS
  misc_feature: MA Experiment 20000794 PARAMETER Experiment Name: At_Petals_P Parameter: Tissue Value: Petals vs. Whole plant
  misc_feature: MA Experiment ID: 20001248 Result: Up-regulated in Transcription
  misc_feature: MA Experiment 20001248 PARAMETER Experiment Name: At_Far-red-induction_P Parameter: Age (day) Value: 7
  misc_feature: MA Experiment 20001248 PARAMETER Experiment Name: At_Far-red-induction_P Parameter: Light Value: Far-red vs. White
  misc_feature: MA Experiment 20001248 PARAMETER Experiment Name: At_Far-red-induction_P Parameter: Organism Value: A. thaliana
  misc_feature: MA Experiment 20001248 PARAMETER Experiment Name: At_Far-red-induction_P Parameter: Plant Line Value: Columbia
  misc_feature: MA Experiment 20001248 PARAMETER Experiment Name: At_Far-red-induction_P Parameter: Timepoint (hr) Value: 4
  misc_feature: MA Experiment 20001248 PARAMETER Experiment Name: At_Far-red-induction_P Parameter: Tissue Value: Whole Plant
  misc_feature: MA Experiment ID: 20001557 Result: Down-regulated in Transcription
  misc_feature: MA Experiment 20001557 PARAMETER Experiment Name: At_Drought_Soil_Dry_P Parameter: Age (day) Value: 27
  misc_feature: MA Experiment 20001557 PARAMETER Experiment Name: At_Drought_Soil_Dry_P Parameter: Organism Value: A. thaliana
  misc_feature: MA Experiment 20001557 PARAMETER Experiment Name: At_Drought_Soil_Dry_P Parameter: Plant Line Value: WS
  misc_feature: MA Experiment 20001557 PARAMETER Experiment Name: At_Drought_Soil_Dry_P Parameter: Post Timepoint (hr) Value: 3
  misc_feature: MA Experiment 20001557 PARAMETER Experiment Name: At_Drought_Soil_Dry_P Parameter: Post-Treatment Value: Re-Water vs. No Drought
  misc_feature: MA Experiment 20001557 PARAMETER Experiment Name: At_Drought_Soil_Dry_P Parameter: Timepoint (day) Value: 13
  misc_feature: MA Experiment 20001557 PARAMETER Experiment Name: At_Drought_Soil_Dry_P Parameter: Treatment Value: Drought vs. No Drought
  misc_feature: MA Experiment ID: 20001560 Result: Down-regulated in Transcription
  misc_feature: MA Experiment 20001560 PARAMETER Experiment Name: At_Drought_Soil_Dry_P Parameter: Age (day) Value: 28
  misc_feature: MA Experiment 20001560 PARAMETER Experiment Name: At_Drought_Soil_Dry_P Parameter: Organism Value: A. thaliana
  misc_feature: MA Experiment 20001560 PARAMETER Experiment Name: At_Drought_Soil_Dry_P Parameter: Plant Line Value: WS
  misc_feature: MA Experiment 20001560 PARAMETER Experiment Name: At_Drought_Soil_Dry_P Parameter: Post Timepoint (hr) Value: None
  misc_feature: MA Experiment 20001560 PARAMETER Experiment Name: At_Drought_Soil_Dry_P Parameter: Post-Treatment Value: None
  misc_feature: MA Experiment 20001560 PARAMETER Experiment Name: At_Drought_Soil_Dry_P Parameter: Timepoint (day) Value: 14
  misc_feature: MA Experiment 20001560 PARAMETER Experiment Name: At_Drought_Soil_Dry_P Parameter: Treatment Value: Drought vs. No Drought
  misc_feature: MA Experiment ID: 20001904 Result: Down-regulated in Transcription
  misc_feature: MA Experiment 20001904 PARAMETER Experiment Name: At_Drought_Reproduction_P Parameter: Age (day) Value: 37
  misc_feature: MA Experiment 20001904 PARAMETER Experiment Name: At_Drought_Reproduction_P Parameter: Organism Value: A. thaliana
  misc_feature: MA Experiment 20001904 PARAMETER Experiment Name: At_Drought_Reproduction_P Parameter: Plant Line Value: WS
  misc_feature: MA Experiment 20001904 PARAMETER Experiment Name: At_Drought_Reproduction_P Parameter: Timepoint (day) Value: 7
  misc_feature: MA Experiment 20001904 PARAMETER Experiment Name: At_Drought_Reproduction_P Parameter: Tissue Value: Rosettes
  misc_feature: MA Experiment 20001904 PARAMETER Experiment Name: At_Drought_Reproduction_P Parameter: Treatment Value: Drought vs. No Drought
ttttggctcttcagggaaaggatatgtaagagggggtttagagtgtagccattccatgaaaacctatgatgtgggtcatgtacctgggaggtttccaagggcaaaacggctccttgccggtattaacaagaatttgttctctctagccttatgcagacgttatttggaccgccggggtgaggcaagatccttgatgcctttaaagaatcttggtgattctggcataattgaaccatgtcctaccagtgtgtgatgtcaaaggaagctatatttctcagtttgagcatgcgatcctgttgcgatcgacttgcaaagagattatttccacaggnnnnngttnnnnaaatagggattttcgcagagcttgaagcagttgttcttcctgagttcgtataatagttttggaaggctttttaagtcttgtgctcaactatttgtatgttcttcgaagacgattctaagtataagagcttagggggtccttc

SEQ ID NO: 107431 - protein, 83 aa, Arabidopsis thaliana
  peptide (1)..(83): Ceres Seq. ID no. 13650140
  misc_feature (1)..(80): Homolog of NCBI NO: 7435570 NR Description: methionyl aminopeptidase (EC 3.4.11.18) F6E13.31
  misc_feature (1)..(80): Homolog of NCBI NO: 11320962 NR Description: methionine aminopeptidase-like protein
  misc_feature (1)..(80): Homolog of NCBI NO: 18406472 NR Description: methionine aminopeptidase -related [Arabidopsis >gi|20197077|gb|AAC23422.2| putative methionine aminopeptidase thaliana] >gi|30102732|gb|AAP21284.1| At2g44180 [Arabidopsis
  misc_feature (1)..(80): Homolog of NCBI NO: 11264654 NR Description: hypothetical protein F24G16.260 - Arabidopsis >gi|7019693|emb|CAB75818.1| putative protein [Arabidopsis
  misc_feature (1)..(80): Homolog of NCBI NO: 17473819 NR Description: putative protein [Arabidopsis thaliana]
  misc_feature (1)..(80): Homolog of NCBI NO: 18411408 NR Description: methionine aminopeptidase 2 -related [Arabidopsis
  misc_feature (1)..(80): Homolog of NCBI NO: 38636687 NR Description: putative methionyl aminopeptidase (EC 3.4.11.18)
  misc_feature (1)..(80): Homolog of NCBI NO: 6980558 NR Description: Chain A, Complex Of Human Methionine
  misc_feature (1)..(80): Homolog of NCBI NO: 16359088 NR Description: Similar to methionyl aminopeptidase 2 [Homo
  misc_feature (1)..(80): Homolog of NCBI NO: 1703275 NR Description: Methionine aminopeptidase 2 (MetAP 2) (Peptidase
FGSSGKGYVRGGLECSHSMKTYDVGHVPGRFPRAKRLLAGINKNLFSLALCRRYLDRRGEARSLMPLKNLGDSGIIEPCPTSV

SEQ ID NO: 107432 - protein, 65 aa, Arabidopsis thaliana
  peptide (1)..(65): Ceres Seq. ID no. 13650141
  misc_feature (1)..(62): Homolog of NCBI NO: 7435570 NR Description: methionyl aminopeptidase (EC 3.4.11.18) F6E13.31
  misc_feature (1)..(62): Homolog of NCBI NO: 11320962 NR Description: methionine aminopeptidase-like protein
  misc_feature (1)..(62): Homolog of NCBI NO: 18406472 NR Description: methionine aminopeptidase -related [Arabidopsis >gi|20197077|gb|AAC23422.2| putative methionine aminopeptidase thaliana] >gi|30102732|gb|AAP21284.1| At2g44180 [Arabidopsis
  misc_feature (1)..(62): Homolog of NCBI NO: 11264654 NR Description: hypothetical protein F24G16.260 - Arabidopsis >gi|7019693|emb|CAB75818.1| putative protein [Arabidopsis
  misc_feature (1)..(62): Homolog of NCBI NO: 17473819 NR Description: putative protein [Arabidopsis thaliana]
  misc_feature (1)..(62): Homolog of NCBI NO: 18411408 NR Description: methionine aminopeptidase 2 -related [Arabidopsis
  misc_feature (1)..(62): Homolog of NCBI NO: 38636687 NR Description: putative methionyl aminopeptidase (EC 3.4.11.18)
  misc_feature (1)..(62): Homolog of NCBI NO: 6980558 NR Description: Chain A, Complex Of Human Methionine
  misc_feature (1)..(62): Homolog of NCBI NO: 16359088 NR Description: Similar to methionyl aminopeptidase 2 [Homo
  misc_feature (1)..(62): Homolog of NCBI NO: 1703275 NR Description: Methionine aminopeptidase 2 (MetAP 2) (Peptidase
MKTYDVGHVPGRFPRAKRLLAGINKNLFSLALCRRYLDRRGEARSLMPLKNLGDSGIIEPCPTSV

SEQ ID NO: 107433 - protein, 53 aa, Arabidopsis thaliana
  peptide (1)..(53): Ceres Seq. ID no. 13650142
  misc_feature (33)..(33): Xaa is any aa, unknown or other
  misc_feature (34)..(34): Xaa is any aa, unknown or other
  misc_feature (36)..(36): Xaa is any aa, unknown or other
  misc_feature (37)..(37): Xaa is any aa, unknown or other
MSYQCVMSKEAIFLSLSMRSCCDRLAKRLFPQXXVXXIGIFAELEAVVLPEFV

SEQ ID NO: 107434 - DNA, 772 bp, Arabidopsis thaliana
  misc_feature (1)..(772): Ceres Seq. ID no. 13650164
  misc_feature: MA Experiment ID: 20000180 Result: Up-regulated in Transcription
  misc_feature: MA Experiment 20000180 PARAMETER Experiment Name: At_Germinating_Seeds_P Parameter: Age (hr) Value: 24 vs. 0
  misc_feature: MA Experiment 20000180 PARAMETER Experiment Name: At_Germinating_Seeds_P Parameter: Tissue Value: Germinating Seeds
  misc_feature: MA Experiment ID: 20000184 Result: Up-regulated in Transcription
  misc_feature: MA Experiment 20000184 PARAMETER Experiment Name: At_Shoots__P Parameter: Age (day) Value: 7
  misc_feature: MA Experiment 20000184 PARAMETER Experiment Name: At_Shoots__P Parameter: Tissue Value: Shoots vs. Whole Plant
  misc_feature: MA Experiment ID: 20000185 Result: Down-regulated in Transcription
  misc_feature: MA Experiment 20000185 PARAMETER Experiment Name: At_Roots__P Parameter: Age (day) Value: 7 vs. 21
  misc_feature: MA Experiment 20000185 PARAMETER Experiment Name: At_Roots__P Parameter: Organism Value: A. thaliana
  misc_feature: MA Experiment 20000185 PARAMETER Experiment Name: At_Roots__P Parameter: Tissue Value: Roots vs. Whole Plant
  misc_feature: MA Experiment ID: 20000264 Result: Down-regulated in Transcription
  misc_feature: MA Experiment 20000264 PARAMETER Experiment Name: At_Open_Flower_P Parameter: Age (day) Value: 21
  misc_feature: MA Experiment 20000264 PARAMETER Experiment Name: At_Open_Flower_P Parameter: Plant Line Value: WS
  misc_feature: MA Experiment 20000264 PARAMETER Experiment Name: At_Open_Flower_P Parameter: Tissue Value: Open Flower vs. Whole Plant
  misc_feature: MA Experiment ID: 20000437 Result: Down-regulated in Transcription
  misc_feature: MA Experiment 20000437 PARAMETER Experiment Name: At_Drought_P Parameter: Age (day) Value: 8
  misc_feature: MA Experiment 20000437 PARAMETER Experiment Name: At_Drought_P Parameter: Organism Value: A. thaliana
  misc_feature: MA Experiment 20000437 PARAMETER Experiment Name: At_Drought_P Parameter: Plant Line Value: WS
  misc_feature: MA Experiment 20000437 PARAMETER Experiment Name: At_Drought_P Parameter: Timepoint (hr) Value: 24
  misc_feature: MA Experiment 20000437 PARAMETER Experiment Name: At_Drought_P Parameter: Tissue Value: Whole Plant
  misc_feature: MA Experiment 20000437 PARAMETER Experiment Name: At_Drought_P Parameter: Treatment Value: Drought vs. No Drought
  misc_feature: MA Experiment ID: 20000438 Result: Up-regulated in Transcription
  misc_feature: MA Experiment 20000438 PARAMETER Experiment Name: At_Shoots__P Parameter: Age (day) Value: 14
  misc_feature: MA Experiment 20000438 PARAMETER Experiment Name: At_Shoots__P Parameter: Tissue Value: Shoots vs. Whole Plant
  misc_feature: MA Experiment ID: 20000439 Result: Down-regulated in Transcription
  misc_feature: MA Experiment 20000439 PARAMETER Experiment Name: At_Roots__P Parameter: Age (day) Value: 14 vs. 21
  misc_feature: MA Experiment 20000439 PARAMETER Experiment Name: At_Roots__P Parameter: Organism Value: A. thaliana
  misc_feature: MA Experiment 20000439 PARAMETER Experiment Name: At_Roots__P Parameter: Tissue Value: Roots vs. Whole Plant
  misc_feature: MA Experiment ID: 20000495 Result: Down-regulated in Transcription
  misc_feature: MA Experiment 20000495 PARAMETER Experiment Name: At_Guard_Cells_P Parameter: Harvest Date Value: 8/2/2002
  misc_feature: MA Experiment 20000495 PARAMETER Experiment Name: At_Guard_Cells_P Parameter: Organism Value: A. thaliana
  misc_feature: MA Experiment 20000495 PARAMETER Experiment Name: At_Guard_Cells_P Parameter: Tissue Value: Guard Cells vs. Leaves
  misc_feature: MA Experiment ID: 20000496 Result: Down-regulated in Transcription
  misc_feature: MA Experiment 20000496 PARAMETER Experiment Name: At_Guard_Cells_P Parameter: Harvest Date Value: 7/19/2002
  misc_feature: MA Experiment 20000496 PARAMETER Experiment Name: At_Guard_Cells_P Parameter: Organism Value: Canola
  misc_feature: MA Experiment 20000496 PARAMETER Experiment Name: At_Guard_Cells_P Parameter: Tissue Value: Guard Cells vs. Leaves
  misc_feature: MA Experiment ID: 20000794 Result: Down-regulated in Transcription
  misc_feature: MA Experiment 20000794 PARAMETER Experiment Name: At_Petals_P Parameter: Age (day) Value: 23-25 days
  misc_feature: MA Experiment 20000794 PARAMETER Experiment Name: At_Petals_P Parameter: Plant Line Value: WS
  misc_feature: MA Experiment 20000794 PARAMETER Experiment Name: At_Petals_P Parameter: Tissue Value: Petals vs. Whole plant
  misc_feature: MA Experiment ID: 20001248 Result: Down-regulated in Transcription
  misc_feature: MA Experiment 20001248 PARAMETER Experiment Name: At_Far-red-induction_P Parameter: Age (day) Value: 7
  misc_feature: MA Experiment 20001248 PARAMETER Experiment Name: At_Far-red-induction_P Parameter: Light Value: Far-red vs. White
  misc_feature: MA Experiment 20001248 PARAMETER Experiment Name: At_Far-red-induction_P Parameter: Organism Value: A. thaliana
  misc_feature: MA Experiment 20001248 PARAMETER Experiment Name: At_Far-red-induction_P Parameter: Plant Line Value: Columbia
  misc_feature: MA Experiment 20001248 PARAMETER Experiment Name: At_Far-red-induction_P Parameter: Timepoint (hr) Value: 4
  misc_feature: MA Experiment 20001248 PARAMETER Experiment Name: At_Far-red-induction_P Parameter: Tissue Value: Whole Plant
  misc_feature: MA Experiment ID: 20001450 Result: Down-regulated in Transcription
  misc_feature: MA Experiment 20001450 PARAMETER Experiment Name: At_Far-red-induction_P Parameter: Age (day) Value: 7
  misc_feature: MA Experiment 20001450 PARAMETER Experiment Name: At_Far-red-induction_P Parameter: Light Value: Far-red vs. White
  misc_feature: MA Experiment 20001450 PARAMETER Experiment Name: At_Far-red-induction_P Parameter: Organism Value: A. thaliana
  misc_feature: MA Experiment 20001450 PARAMETER Experiment Name: At_Far-red-induction_P Parameter: Plant Line Value: Columbia
  misc_feature: MA Experiment 20001450 PARAMETER Experiment Name: At_Far-red-induction_P Parameter: Timepoint (hr) Value: 8
  misc_feature: MA Experiment 20001450 PARAMETER Experiment Name: At_Far-red-induction_P Parameter: Tissue Value: Whole Plant
  misc_feature: MA Experiment ID: 20001451 Result: Down-regulated in Transcription
  misc_feature: MA Experiment 20001451 PARAMETER Experiment Name: At_Far-red-induction_P Parameter: Age (day) Value: 7
  misc_feature: MA Experiment 20001451 PARAMETER Experiment Name: At_Far-red-induction_P Parameter: Light Value: Far-red vs. White
  misc_feature: MA Experiment 20001451 PARAMETER Experiment Name: At_Far-red-induction_P Parameter: Organism Value: A. thaliana
  misc_feature: MA Experiment 20001451 PARAMETER Experiment Name: At_Far-red-induction_P Parameter: Plant Line Value: Columbia
  misc_feature: MA Experiment 20001451 PARAMETER Experiment Name: At_Far-red-induction_P Parameter: Timepoint (hr) Value: 24
  misc_feature: MA Experiment 20001451 PARAMETER Experiment Name: At_Far-red-induction_P Parameter: Tissue Value: Whole Plant
  misc_feature: MA Experiment ID: 20001555 Result: Down-regulated in Transcription
  misc_feature: MA Experiment 20001555 PARAMETER Experiment Name: At_Drought_Soil_Dry_P Parameter: Age (day) Value: 24
  misc_feature: MA Experiment 20001555 PARAMETER Experiment Name: At_Drought_Soil_Dry_P Parameter: Organism Value: A. thaliana
  misc_feature: MA Experiment 20001555 PARAMETER Experiment Name: At_Drought_Soil_Dry_P Parameter: Plant Line Value: WS
  misc_feature: MA Experiment 20001555 PARAMETER Experiment Name: At_Drought_Soil_Dry_P Parameter: Post Timepoint (hr) Value: None
  misc_feature: MA Experiment 20001555 PARAMETER Experiment Name: At_Drought_Soil_Dry_P Parameter: Post-Treatment Value: None
  misc_feature: MA Experiment 20001555 PARAMETER Experiment Name: At_Drought_Soil_Dry_P Parameter: Timepoint (day) Value: 10
  misc_feature: MA Experiment 20001555 PARAMETER Experiment Name: At_Drought_Soil_Dry_P Parameter: Treatment Value: Drought vs. No Drought
  misc_feature: MA Experiment ID: 20001757 Result: Up-regulated in Transcription
  misc_feature: MA Experiment 20001757 PARAMETER Experiment Name: At_50mM_NH4NO3_L-to-H_P Parameter: Timepoint (hr) Value: 6
  misc_feature: MA Experiment 20001757 PARAMETER Experiment Name: At_50mM_NH4NO3_L-to-H_P Parameter: Tissue Value: Leaf
  misc_feature: MA Experiment 20001757 PARAMETER Experiment Name: At_50mM_NH4NO3_L-to-H_P Parameter: Treatment Value: 50mM NH4NO3 vs 100mM Mannitol
  misc_feature: MA Experiment ID: 20001904 Result: Down-regulated in Transcription
  misc_feature: MA Experiment 20001904 PARAMETER Experiment Name: At_Drought_Reproduction_P Parameter: Age (day) Value: 37
  misc_feature: MA Experiment 20001904 PARAMETER Experiment Name: At_Drought_Reproduction_P Parameter: Organism Value: A. thaliana
  misc_feature: MA Experiment 20001904 PARAMETER Experiment Name: At_Drought_Reproduction_P Parameter: Plant Line Value: WS
  misc_feature: MA Experiment 20001904 PARAMETER Experiment Name: At_Drought_Reproduction_P Parameter: Timepoint (day) Value: 7
  misc_feature: MA Experiment 20001904 PARAMETER Experiment Name: At_Drought_Reproduction_P Parameter: Tissue Value: Rosettes
  misc_feature: MA Experiment 20001904 PARAMETER Experiment Name: At_Drought_Reproduction_P Parameter: Treatment Value: Drought vs. No Drought
  misc_feature: MA Experiment ID: 20001905 Result: Down-regulated in Transcription
  misc_feature: MA Experiment 20001905 PARAMETER Experiment Name: At_Drought_Reproduction_P Parameter: Age (day) Value: 40
  misc_feature: MA Experiment 20001905 PARAMETER Experiment Name: At_Drought_Reproduction_P Parameter: Organism Value: A. thaliana
  misc_feature: MA Experiment 20001905 PARAMETER Experiment Name: At_Drought_Reproduction_P Parameter: Plant Line Value: WS
  misc_feature: MA Experiment 20001905 PARAMETER Experiment Name: At_Drought_Reproduction_P Parameter: Timepoint (day) Value: 10
  misc_feature: MA Experiment 20001905 PARAMETER Experiment Name: At_Drought_Reproduction_P Parameter: Tissue Value: Rosettes
  misc_feature: MA Experiment 20001905 PARAMETER Experiment Name: At_Drought_Reproduction_P Parameter: Treatment Value: Drought vs. No Drought
  misc_feature: MA Experiment ID: 20001906 Result: Down-regulated in Transcription
  misc_feature: MA Experiment 20001906 PARAMETER Experiment Name: At_Drought_Reproduction_P Parameter: Age (day) Value: 35
  misc_feature: MA Experiment 20001906 PARAMETER Experiment Name: At_Drought_Reproduction_P Parameter: Organism Value: A. thaliana
  misc_feature: MA Experiment 20001906 PARAMETER Experiment Name: At_Drought_Reproduction_P Parameter: Plant Line Value: WS
  misc_feature: MA Experiment 20001906 PARAMETER Experiment Name: At_Drought_Reproduction_P Parameter: Timepoint (day) Value: 5
  misc_feature: MA Experiment 20001906 PARAMETER Experiment Name: At_Drought_Reproduction_P Parameter: Tissue Value: Siliques
  misc_feature: MA Experiment 20001906 PARAMETER Experiment Name: At_Drought_Reproduction_P Parameter: Treatment Value: Drought vs. No Drought
  misc_feature: MA Experiment ID: 20001907 Result: Down-regulated in Transcription
  misc_feature: MA Experiment 20001907 PARAMETER Experiment Name: At_Drought_Reproduction_P Parameter: Age (day) Value: 37
  misc_feature: MA Experiment 20001907 PARAMETER Experiment Name: At_Drought_Reproduction_P Parameter: Organism Value: A. thaliana
  misc_feature: MA Experiment 20001907 PARAMETER Experiment Name: At_Drought_Reproduction_P Parameter: Plant Line Value: WS
  misc_feature: MA Experiment 20001907 PARAMETER Experiment Name: At_Drought_Reproduction_P Parameter: Timepoint (day) Value: 7
  misc_feature: MA Experiment 20001907 PARAMETER Experiment Name: At_Drought_Reproduction_P Parameter: Tissue Value: Siliques
  misc_feature: MA Experiment 20001907 PARAMETER Experiment Name: At_Drought_Reproduction_P Parameter: Treatment Value: Drought vs. No Drought
aagtaaacgagcaaaagaagaagagaaacaacaagaagtagtaatggcttcctctatgctctcctccgccgctgtggttacatccccggctcaggccaccatggtcgctccattcaccggcttgaagtcatccgctgcattcccggtcacccgcaagaccaacaaggacatcacttccatcgcaagcaacgggggaagagttagctgcatgaaggtgtggccaccaattggaaagaagaagtttgagactctatcttacctccctgaccttagtgacgtcgaattggctaaggaagttgactaccttctccgcaacaagtggattccttgtgttgaattcgagttagagcacggatttgtgtaccgtgagcacggaaacactcccggatactacgatggacggtactggacaatgtggaagcttccattgttcggatgcaccgactccgctcaagtgttgaaggaagttgaagaatgcaagaaggagtacccgggcgccttcattaggatcatcggattcgacaacacccgtcaagtccaatgcatcagtttcattgcctacaagcccccaagcttcaccgaagcttaatttcttttctaaaacattcttatgaattatctctgctcatttcatttcctattgtctgtgttctttttctctttatgagacaatttctatcggattgtcaaatgtctgatttatgaatatgtaatttatatatccgtgcgtcttgattttttccgatggttaactagtttgaaaatttccgat

SEQ ID NO: 107435 - protein, 195 aa, Arabidopsis thaliana
  peptide (1)..(195): Ceres Seq. ID no. 13650165
  misc_feature (15)..(195): Homolog of NCBI NO: 15240901 NR Description: ribulose bisphosphate carboxylase small chain 3b (RuBisCO small subunit 3b) (sp|P10798) [Arabidopsis thaliana] Ribulose bisphosphate carboxylase subunit precursor [Arabidopsis
  misc_feature (15)..(195): Homolog of NCBI NO: 68060 NR Description: ribulose-bisphosphate carboxylase (EC 4.1.1.39)
  misc_feature (15)..(195): Homolog of NCBI NO: 68061 NR Description: ribulose-bisphosphate carboxylase (EC 4.1.1.39)
  misc_feature (15)..(195): Homolog of NCBI NO: 15240912 NR Description: ribulose bisphosphate carboxylase small chain 1b (RuBisCO small subunit 1b) (sp|P10796) [Arabidopsis thaliana] Ribulose bisphosphate carboxylase subunit 1b) [Arabidopsis
  misc_feature (15)..(195): Homolog of NCBI NO: 15240903 NR Description: ribulose bisphosphate carboxylase small chain 2b (RuBisCO small subunit 2b) (sp|P10797) [Arabidopsis thaliana] Ribulose bisphosphate carboxylase small subunit 2b) [Arabidopsis
  misc_feature (15)..(195): Homolog of NCBI NO: 132154 NR Description: Ribulose bisphosphate carboxylase small chain,
  misc_feature (15)..(195): Homolog of NCBI NO: 132091 NR Description: Ribulose bisphosphate carboxylase small chain F1,
  misc_feature (15)..(195): Homolog of NCBI NO: 266891 NR Description: Ribulose bisphosphate carboxylase small chain,
  misc_feature (15)..(195): Homolog of NCBI NO: 480983 NR Description: ribulose-bisphosphate carboxylase (EC 4.1.1.39)
  misc_feature (15)..(193): Homolog of NCBI NO: 15219826 NR Description: ribulose-bisphosphate carboxylase small unit [Arabidopsis thaliana] >gi|27735223|sp|P10795|RBS1_ARATH Ribulose
SKRAKEEEKQQEVVMASSMLSSAAVVTSPAQATMVAPFTGLKSSAAFPVTRKTNKDITSIASNGGRVSCMKVWPPIGKKKFETLSYLPDLSDVELAKEVDYLLRNKWIPCVEFELEHGFVYREHGNTPGYYDGRYWTMWKLPLFGCTDSAQVLKEVEECKKEYPGAFIRIIGFDNTRQVQCISFIAYKPPSFTEA

SEQ ID NO: 107436 - protein, 181 aa, Arabidopsis thaliana; identical to SEQ ID NO: 36039
  peptide (1)..(181): Ceres Seq. ID no. 13650166
  misc_feature (1)..(181): Homolog of NCBI NO: 15240901 NR Description: ribulose bisphosphate carboxylase small chain 3b (RuBisCO small subunit 3b) (sp|P10798) [Arabidopsis thaliana] Ribulose bisphosphate carboxylase subunit precursor [Arabidopsis
  misc_feature (1)..(181): Homolog of NCBI NO: 68060 NR Description: ribulose-bisphosphate carboxylase (EC 4.1.1.39)
  misc_feature (1)..(181): Homolog of NCBI NO: 68061 NR Description: ribulose-bisphosphate carboxylase (EC 4.1.1.39)
  misc_feature (1)..(181): Homolog of NCBI NO: 15240912 NR Description: ribulose bisphosphate carboxylase small chain 1b (RuBisCO small subunit 1b) (sp|P10796) [Arabidopsis thaliana] Ribulose bisphosphate carboxylase subunit 1b) [Arabidopsis
  misc_feature (1)..(181): Homolog of NCBI NO: 15240903 NR Description: ribulose bisphosphate carboxylase small chain 2b (RuBisCO small subunit 2b) (sp|P10797) [Arabidopsis thaliana] Ribulose bisphosphate carboxylase small subunit 2b) [Arabidopsis
  misc_feature (1)..(181): Homolog of NCBI NO: 132154 NR Description: Ribulose bisphosphate carboxylase small chain,
  misc_feature (1)..(181): Homolog of NCBI NO: 132091 NR Description: Ribulose bisphosphate carboxylase small chain F1,
  misc_feature (1)..(181): Homolog of NCBI NO: 266891 NR Description: Ribulose bisphosphate carboxylase small chain,
  misc_feature (1)..(181): Homolog of NCBI NO: 480983 NR Description: ribulose-bisphosphate carboxylase (EC 4.1.1.39)
  misc_feature (1)..(179): Homolog of NCBI NO: 15219826 NR Description: ribulose-bisphosphate carboxylase small unit [Arabidopsis thaliana] >gi|27735223|sp|P10795|RBS1_ARATH Ribulose

SEQ ID NO: 107437 - protein, 177 aa, Arabidopsis thaliana; identical to SEQ ID NO: 36040
  peptide (1)..(177): Ceres Seq. ID no. 13650167
  misc_feature (1)..(177): Homolog of NCBI NO: 15240901 NR Description: ribulose bisphosphate carboxylase small chain 3b (RuBisCO small subunit 3b) (sp|P10798) [Arabidopsis thaliana] Ribulose bisphosphate carboxylase subunit precursor [Arabidopsis
  misc_feature (1)..(177): Homolog of NCBI NO: 68060 NR Description: ribulose-bisphosphate carboxylase (EC 4.1.1.39)
  misc_feature (1)..(177): Homolog of NCBI NO: 68061 NR Description: ribulose-bisphosphate carboxylase (EC 4.1.1.39)
  misc_feature (1)..(177): Homolog of NCBI NO: 15240912 NR Description: ribulose bisphosphate carboxylase small chain 1b (RuBisCO small subunit 1b) (sp|P10796) [Arabidopsis thaliana] Ribulose bisphosphate carboxylase subunit 1b) [Arabidopsis
  misc_feature (1)..(177): Homolog of NCBI NO: 15240903 NR Description: ribulose bisphosphate carboxylase small chain 2b (RuBisCO small subunit 2b) (sp|P10797) [Arabidopsis thaliana] Ribulose bisphosphate carboxylase small subunit 2b) [Arabidopsis
  misc_feature (1)..(177): Homolog of NCBI NO: 132154 NR Description: Ribulose bisphosphate carboxylase small chain,
  misc_feature (1)..(177): Homolog of NCBI NO: 132091 NR Description: Ribulose bisphosphate carboxylase small chain F1,
  misc_feature (1)..(177): Homolog of NCBI NO: 266891 NR Description: Ribulose bisphosphate carboxylase small chain,
  misc_feature (1)..(177): Homolog of NCBI NO: 480983 NR Description: ribulose-bisphosphate carboxylase (EC 4.1.1.39)
  misc_feature (1)..(175): Homolog of NCBI NO: 15219826 NR Description: ribulose-bisphosphate carboxylase small unit [Arabidopsis thaliana] >gi|27735223|sp|P10795|RBS1_ARATH Ribulose

SEQ ID NO: 107438 - DNA, 2142 bp, Arabidopsis thaliana
  misc_feature (1)..(2142): Ceres Seq. ID no. 13650190
  misc_feature: MA Experiment ID: 20000171 Result: Down-regulated in Transcription
  misc_feature: MA Experiment 20000171 PARAMETER Experiment Name: At_42deg_Heat_P Parameter: Age (day) Value: 14
  misc_feature: MA Experiment 20000171 PARAMETER Experiment Name: At_42deg_Heat_P Parameter: Organism Value: A. thaliana
  misc_feature: MA Experiment 20000171 PARAMETER Experiment Name: At_42deg_Heat_P Parameter: Plant Line Value: WS
  misc_feature: MA Experiment 20000171 PARAMETER Experiment Name: At_42deg_Heat_P Parameter: Temperature (deg C) Value: 42 vs. 22
  misc_feature: MA Experiment 20000171 PARAMETER Experiment Name: At_42deg_Heat_P Parameter: Timepoint (hr) Value: 1
  misc_feature: MA Experiment 20000171 PARAMETER Experiment Name: At_42deg_Heat_P Parameter: Tissue Value: Aerial
  misc_feature: MA Experiment ID: 20000173 Result: Down-regulated in Transcription
  misc_feature: MA Experiment 20000173 PARAMETER Experiment Name: At_42deg_Heat_P Parameter: Age (day) Value: 14
  misc_feature: MA Experiment 20000173 PARAMETER Experiment Name: At_42deg_Heat_P Parameter: Organism Value: A. thaliana
  misc_feature: MA Experiment 20000173 PARAMETER Experiment Name: At_42deg_Heat_P Parameter: Plant Line Value: WS
  misc_feature: MA Experiment 20000173 PARAMETER Experiment Name: At_42deg_Heat_P Parameter: Temperature (deg C) Value: 42 vs. 22
  misc_feature: MA Experiment 20000173 PARAMETER Experiment Name: At_42deg_Heat_P Parameter: Timepoint (hr) Value: 6
  misc_feature: MA Experiment 20000173 PARAMETER Experiment Name: At_42deg_Heat_P Parameter: Tissue Value: Aerial
  misc_feature: MA Experiment ID: 20000180 Result: Down-regulated in Transcription
  misc_feature: MA Experiment 20000180 PARAMETER Experiment Name: At_Germinating_Seeds_P Parameter: Age (hr) Value: 24 vs. 0
  misc_feature: MA Experiment 20000180 PARAMETER Experiment Name: At_Germinating_Seeds_P Parameter: Tissue Value: Germinating Seeds
  misc_feature: MA Experiment ID: 20000227 Result: Up-regulated in Transcription
  misc_feature: MA Experiment 20000227 PARAMETER Experiment Name: At_Root-Tips-vs-Tops_P Parameter: Tissue Value: Root Tips vs. Root Tops
  misc_feature: MA Experiment ID: 20000437 Result: Down-regulated in Transcription
  misc_feature: MA Experiment 20000437 PARAMETER Experiment Name: At_Drought_P Parameter: Age (day) Value: 8
  misc_feature: MA Experiment 20000437 PARAMETER Experiment Name: At_Drought_P Parameter: Organism Value: A. thaliana
  misc_feature: MA Experiment 20000437 PARAMETER Experiment Name: At_Drought_P Parameter: Plant Line Value: WS
  misc_feature: MA Experiment 20000437 PARAMETER Experiment Name: At_Drought_P Parameter: Timepoint (hr) Value: 24
  misc_feature: MA Experiment 20000437 PARAMETER Experiment Name: At_Drought_P Parameter: Tissue Value: Whole Plant
  misc_feature: MA Experiment 20000437 PARAMETER Experiment Name: At_Drought_P Parameter: Treatment Value: Drought vs. No Drought
  misc_feature: MA Experiment ID: 20000794 Result: Down-regulated in Transcription
  misc_feature: MA Experiment 20000794 PARAMETER Experiment Name: At_Petals_P Parameter: Age (day) Value: 23-25 days
  misc_feature: MA Experiment 20000794 PARAMETER Experiment Name: At_Petals_P Parameter: Plant Line Value: WS
  misc_feature: MA Experiment 20000794 PARAMETER Experiment Name: At_Petals_P Parameter: Tissue Value: Petals vs. Whole plant
  misc_feature: MA Experiment ID: 20001247 Result: Up-regulated in Transcription
  misc_feature: MA Experiment 20001247 PARAMETER Experiment Name: At_Far-red-induction_P Parameter: Age (day) Value: 7
  misc_feature: MA Experiment 20001247 PARAMETER Experiment Name: At_Far-red-induction_P Parameter: Light Value: Far-red vs. White
  misc_feature: MA Experiment 20001247 PARAMETER Experiment Name: At_Far-red-induction_P Parameter: Organism Value: A. thaliana
  misc_feature: MA Experiment 20001247 PARAMETER Experiment Name: At_Far-red-induction_P Parameter: Plant Line Value: Columbia
  misc_feature: MA Experiment 20001247 PARAMETER Experiment Name: At_Far-red-induction_P Parameter: Timepoint (hr) Value: 1
  misc_feature: MA Experiment 20001247 PARAMETER Experiment Name: At_Far-red-induction_P Parameter: Tissue Value: Whole Plant
  misc_feature: MA Experiment ID: 20001554 Result: Down-regulated in Transcription
  misc_feature: MA Experiment 20001554 PARAMETER Experiment Name: At_Drought_Soil_Dry_P Parameter: Age (day) Value: 21
  misc_feature: MA Experiment 20001554 PARAMETER Experiment Name: At_Drought_Soil_Dry_P Parameter: Organism Value: A. thaliana
  misc_feature: MA Experiment 20001554 PARAMETER Experiment Name: At_Drought_Soil_Dry_P Parameter: Plant Line Value: WS
  misc_feature: MA Experiment 20001554 PARAMETER Experiment Name: At_Drought_Soil_Dry_P Parameter: Post Timepoint (hr) Value: None
  misc_feature: MA Experiment 20001554 PARAMETER Experiment Name: At_Drought_Soil_Dry_P Parameter: Post-Treatment Value: None
  misc_feature: MA Experiment 20001554 PARAMETER Experiment Name: At_Drought_Soil_Dry_P Parameter: Timepoint (day) Value: 7
  misc_feature: MA Experiment 20001554 PARAMETER Experiment Name: At_Drought_Soil_Dry_P Parameter: Treatment Value: Drought vs. No Drought
  misc_feature: MA Experiment ID: 20001555 Result: Down-regulated in Transcription
  misc_feature: MA Experiment 20001555 PARAMETER Experiment Name: At_Drought_Soil_Dry_P Parameter: Age (day) Value: 24
  misc_feature: MA Experiment 20001555 PARAMETER Experiment Name: At_Drought_Soil_Dry_P Parameter: Organism Value: A. thaliana
  misc_feature: MA Experiment 20001555 PARAMETER Experiment Name: At_Drought_Soil_Dry_P Parameter: Plant Line Value: WS
  misc_feature: MA Experiment 20001555 PARAMETER Experiment Name: At_Drought_Soil_Dry_P Parameter: Post Timepoint (hr) Value: None
  misc_feature: MA Experiment 20001555 PARAMETER Experiment Name: At_Drought_Soil_Dry_P Parameter: Post-Treatment Value: None
  misc_feature: MA Experiment 20001555 PARAMETER Experiment Name: At_Drought_Soil_Dry_P Parameter: Timepoint (day) Value: 10
  misc_feature: MA Experiment 20001555 PARAMETER Experiment Name: At_Drought_Soil_Dry_P Parameter: Treatment Value: Drought vs. No Drought
  misc_feature: MA Experiment ID: 20001556 Result: Down-regulated in Transcription
  misc_feature: MA Experiment 20001556 PARAMETER Experiment Name: At_Drought_Soil_Dry_P Parameter: Age (day) Value: 26
  misc_feature: MA Experiment 20001556 PARAMETER Experiment Name: At_Drought_Soil_Dry_P Parameter: Organism Value: A. thaliana
  misc_feature: MA Experiment 20001556 PARAMETER Experiment Name: At_Drought_Soil_Dry_P Parameter: Plant Line Value: WS
  misc_feature: MA Experiment 20001556 PARAMETER Experiment Name: At_Drought_Soil_Dry_P Parameter: Post Timepoint (hr) Value: None
  misc_feature: MA Experiment 20001556 PARAMETER Experiment Name: At_Drought_Soil_Dry_P Parameter: Post-Treatment Value: None
  misc_feature: MA Experiment 20001556 PARAMETER Experiment Name: At_Drought_Soil_Dry_P Parameter: Timepoint (day) Value: 12
  misc_feature: MA Experiment 20001556 PARAMETER Experiment Name: At_Drought_Soil_Dry_P Parameter: Treatment Value: Drought vs. No Drought
  misc_feature: MA Experiment ID: 20001557 Result: Up-regulated in Transcription
  misc_feature: MA Experiment 20001557 PARAMETER Experiment Name: At_Drought_Soil_Dry_P Parameter: Age (day) Value: 27
  misc_feature: MA Experiment 20001557 PARAMETER Experiment Name: At_Drought_Soil_Dry_P Parameter: Organism Value: A. thaliana
  misc_feature: MA Experiment 20001557 PARAMETER Experiment Name: At_Drought_Soil_Dry_P Parameter: Plant Line Value: WS
  misc_feature: MA Experiment 20001557 PARAMETER Experiment Name: At_Drought_Soil_Dry_P Parameter: Post Timepoint (hr) Value: 3
  misc_feature: MA Experiment 20001557 PARAMETER Experiment Name: At_Drought_Soil_Dry_P Parameter: Post-Treatment Value: Re-Water vs. No Drought
  misc_feature: MA Experiment 20001557 PARAMETER Experiment Name: At_Drought_Soil_Dry_P Parameter: Timepoint (day) Value: 13
  misc_feature: MA Experiment 20001557 PARAMETER Experiment Name: At_Drought_Soil_Dry_P Parameter: Treatment Value: Drought vs. No Drought
  misc_feature: MA Experiment ID: 20001558 Result: Up-regulated in Transcription
  misc_feature: MA Experiment 20001558 PARAMETER Experiment Name: At_Drought_Soil_Dry_P Parameter: Age (day) Value: 27
  misc_feature: MA Experiment 20001558 PARAMETER Experiment Name: At_Drought_Soil_Dry_P Parameter: Organism Value: A. thaliana
  misc_feature: MA Experiment 20001558 PARAMETER Experiment Name: At_Drought_Soil_Dry_P Parameter: Plant Line Value: WS
  misc_feature: MA Experiment 20001558 PARAMETER Experiment Name: At_Drought_Soil_Dry_P Parameter: Post Timepoint (hr) Value: 6
  misc_feature: MA Experiment 20001558 PARAMETER Experiment Name: At_Drought_Soil_Dry_P Parameter: Post-Treatment Value: Re-Water vs. No Drought
  misc_feature: MA Experiment 20001558 PARAMETER Experiment Name: At_Drought_Soil_Dry_P Parameter: Timepoint (day) Value: 13
  misc_feature: MA Experiment 20001558 PARAMETER Experiment Name: At_Drought_Soil_Dry_P Parameter: Treatment Value: Drought vs. No Drought
  misc_feature: MA Experiment ID: 20001904 Result: Down-regulated in Transcription
  misc_feature: MA Experiment 20001904 PARAMETER Experiment Name: At_Drought_Reproduction_P Parameter: Age (day) Value: 37
  misc_feature: MA Experiment 20001904 PARAMETER Experiment Name: At_Drought_Reproduction_P Parameter: Organism Value: A. thaliana
  misc_feature: MA Experiment 20001904 PARAMETER Experiment Name: At_Drought_Reproduction_P Parameter: Plant Line Value: WS
  misc_feature: MA Experiment 20001904 PARAMETER Experiment Name: At_Drought_Reproduction_P Parameter: Timepoint (day) Value: 7
  misc_feature: MA Experiment 20001904 PARAMETER Experiment Name: At_Drought_Reproduction_P Parameter: Tissue Value: Rosettes
  misc_feature: MA Experiment 20001904 PARAMETER Experiment Name: At_Drought_Reproduction_P Parameter: Treatment Value: Drought vs. No Drought
atgtctcaagattctgcaactactactccgccgccacctttaacctccgacgtttcaatgccttccggtgaagaagatgagccaaagcatgtaacatcggaagaagaggcaccggtgacttcggagacaaatctgaagctacctttgatgccggagctagaggagtcaaatcatacggcggaggttgtttcagagaaggtgacgccggagacgatgactttggagtcagaaggtctcaaccacgcggcggaggattcagagcagacacatgaagtgacgccggagacagagactgcgaagctagaggttctcaaccacacggcggaggattcagagcagacacatgaagtgacgccggagaaagagactgtgaaatcagagtttctcaaccacgtggcggaggattcagagcagacacatgaagtgacgccggagacagagactgtgaagtcagaggttctcaaccatgcggcggaggattcagagcagccacgtggagtgacaccgacgccggagacagaaacatcggaggcagacacgtcattgcttgtaacttccgagacagaagagcctaaccatgcggcggaggattattcagagacagagccatcacagaaactaatgttggagcagaggagaaagtacatggaagtagaagattggacagagccagaactaccagatgaagcggtgttagaagctgcagcgtcagtccctgagccaaagcaaccagagcctcagacaccaccaccaccaccatctactactacttccactgttgcatctagatctttagccgaaatgatgaacagagaagaagcagaagtagaagagaaacaaaagattcagattcctcgtagtctcggttcattcaaagaagaaacaaacaaaatctccgatctttcagaaacagagttaaacgcacttcaagagcttcgtcaccttcttcaagtatcacaagattcaagcaaaacctctatatggggtgtgccacttctcaaagacgacagaaccgacgtcgttttgttaaagtttctaagagcaagagactttaaacctcaagaagcttactcaatgctaaacaagacactccaatggagaatcgacttcaacatcgaagagcttctagacgaaaacctcggtgacgatttagacaaagttgtgttcatgcaaggacaagacaaggagaatcatcctgtctgttacaatgtctacggtgagtttcagaacaaagatctttatcagaaaacgttttcagatgaagagaagagagaacggttcttgagatggaggattcagtttcttgaaaagagtatcaggaatcttgattttgtagctggtggtgtttccacgatatgtcaagtaaatgatcttaagaattctccaggacctggtaagactgagcttaggttagctactaagcaagctcttcatcttcttcaagacaattaccctgagtttgtctctaaacagatattcatcaatgttccatggtggtaccttgcgttctatagaattattagtccttttatgtcacaaaggtcaaagagcaaactagttttcgcaggtccttcaagatctgcagaaacccttctcaagtacatatcacccgaacatgtcccggttcagtatggtggactaagtgtggataattgcgagtgtaactcggatttcacacacgatgatatcgctaccgagattactgttaaaccaactactaaacaaaccgtcgagattattgtttacgagaaatgtacaatcgtgtgggagataagagtagtgggatgggaggtttcgtatggagcggagtttgtgccggagaacaaagaagggtatacagtgatcattcagaaaccgaggaagatgactgcgaaaaatgaactggtggtgtctcatagcttcaaagttggagaagttggcaggattttgctaactgttgataacccgacttcgaccaagaaaatgcttatctacaggttcaaggttaagcctttagcttgtgagtaacaaaagtgcgcatctttcttcgagtgtttcttagtttagaacttgatcatatgattgttgattgtgttttgtttttctctcttttaccgacttatatgtttgtgtggttctgtttgctaaattcttttgttttat

SEQ ID NO: 107439 - protein, 668 aa, Arabidopsis thaliana
  peptide (1)..(668): Ceres Seq. ID no. 15220544
  misc_feature (389)..(555): Pfam Name: CRAL/TRIO domain Pfam Description: CRAL/TRIO domain
  misc_feature (177)..(665): Homolog of NCBI NO: 15218383 NR Description: cytosolic factor -related [Arabidopsis thaliana]
  misc_feature (284)..(665): Homolog of NCBI NO: 15081614 NR Description: At1g72160/T9N14_8 [Arabidopsis thaliana]
  misc_feature (196)..(666): Homolog of NCBI NO: 8894548 NR Description: hypothetical protein [Cicer arietinum]
  misc_feature (54)..(663): Homolog of NCBI NO: 34907288 NR Description: contains ESTs
  misc_feature (13)..(663): Homolog of NCBI NO: 15219901 NR Description: expressed protein [Arabidopsis thaliana]
  misc_feature (114)..(663): Homolog of NCBI NO: 18397616 NR Description: expressed protein [Arabidopsis thaliana]
  misc_feature (114)..(663): Homolog of NCBI NO: 14334978 NR Description: unknown protein [Arabidopsis thaliana]
  misc_feature (91)..(663): Homolog of NCBI NO: 15218382 NR Description: cytosolic factor -related [Arabidopsis thaliana]
  misc_feature (295)..(578): Homolog of NCBI NO: 21542233 NR Description: SEC14-like protein 2 (Alpha-tocopherol associated
  misc_feature (295)..(578): Homolog of NCBI NO: 29336071 NR Description: SEC14-like 2 [Bos taurus]
MSQDSATTTPPPPLTSDVSMPSGEEDEPKHVTSEEEAPVTSETNLKLPLMPELEESNHTAEVVSEKVTPETMTLESEGLNHAAEDSEQTHEVTPETETAKLEVLNHTAEDSEQTHEVTPEKETVKSEFLNHVAEDSEQTHEVTPETETVKSEVLNHAAEDSEQPRGVTPTPETETSEADTSLLVTSETEEPNHAAEDYSETEPSQKLMLEQRRKYMEVEDWTEPELPDEAVLEAAASVPEPKQPEPQTPPPPPSTTTSTVASRSLAEMMNREEAEVEEKQKIQIPRSLGSFKEETNKISDLSETELNALQELRHLLQVSQDSSKTSIWGVPLLKDDRTDVVLLKFLRARDFKPQEAYSMLNKTLQWRIDFNIEELLDENLGDDLDKVVFMQGQDKENHPVCYNVYGEFQNKDLYQKTFSDEEKRERFLRWRIQFLEKSIRNLDFVAGGVSTICQVNDLKNSPGPGKTELRLATKQALHLLQDNYPEFVSKQIFINVPWWYLAFYRIISPFMSQRSKSKLVFAGPSRSAETLLKYISPEHVPVQYGGLSVDNCECNSDFTHDDIATEITVKPTTKQTVEIIVYEKCTIVWEIRVVGWEVSYGAEFVPENKEGYTVIIQKPRKMTAKNELVVSHSFKVGEVGRILLTVDNPTSTKKMLIYRFKVKPLACE

SEQ ID NO: 107440 - protein, 649 aa, Arabidopsis thaliana
  peptide (1)..(649): Ceres Seq. ID no. 15220545
  misc_feature (370)..(536): Pfam Name: CRAL/TRIO domain Pfam Description: CRAL/TRIO domain
  misc_feature (158)..(646): Homolog of NCBI NO: 15218383 NR Description: cytosolic factor -related [Arabidopsis thaliana]
  misc_feature (265)..(646): Homolog of NCBI NO: 15081614 NR Description: At1g72160/T9N14_8 [Arabidopsis thaliana]
  misc_feature (177)..(647): Homolog of NCBI NO: 8894548 NR Description: hypothetical protein [Cicer arietinum]
  misc_feature (35)..(644): Homolog of NCBI NO: 34907288 NR Description: contains ESTs
  misc_feature (1)..(644): Homolog of NCBI NO: 15219901 NR Description: expressed protein [Arabidopsis thaliana]
  misc_feature (95)..(644): Homolog of NCBI NO: 18397616 NR Description: expressed protein [Arabidopsis thaliana]
  misc_feature (95)..(644): Homolog of NCBI NO: 14334978 NR Description: unknown protein [Arabidopsis thaliana]
  misc_feature (72)..(644): Homolog of NCBI NO: 15218382 NR Description: cytosolic factor -related [Arabidopsis thaliana]
  misc_feature (276)..(559): Homolog of NCBI NO: 21542233 NR Description: SEC14-like protein 2 (Alpha-tocopherol associated
  misc_feature (276)..(559): Homolog of NCBI NO: 29336071 NR Description: SEC14-like 2 [Bos taurus]
MPSGEEDEPKHVTSEEEAPVTSETNLKLPLMPELEESNHTAEVVSEKVTPETMTLESEGLNHAAEDSEQTHEVTPETETAKLEVLNHTAEDSEQTHEVTPEKETVKSEFLNHVAEDSEQTHEVTPETETVKSEVLNHAAEDSEQPRGVTPTPETETSEADTSLLVTSETEEPNHAAEDYSETEPSQKLMLEQRRKYMEVEDWTEPELPDEAVLEAAASVPEPKQPEPQTPPPPPSTTTSTVASRSLAEMMNREEAEVEEKQKIQIPRSLGSFKEETNKISDLSETELNALQELRHLLQVSQDSSKTSIWGVPLLKDDRTDVVLLKFLRARDFKPQEAYSMLNKTLQWRIDFNIEELLDENLGDDLDKVVFMQGQDKENHPVCYNVYGEFQNKDLYQKTFSDEEKRERFLRWRIQFLEKSIRNLDFVAGGVSTICQVNDLKNSPGPGKTELRLATKQALHLLQDNYPEFVSKQIFINVPWWYLAFYRIISPFMSQRSKSKLVFAGPSRSAETLLKYISPEHVPVQYGGLSVDNCECNSDFTHDDIATEITVKPTTKQTVEIIVYEKCTIVWEIRVVGWEVSYGAEFVPENKEGYTVIIQKPRKMTAKNELVVSHSFKVGEVGRILLTVDNPTSTKKMLIYRFKVKPLACE

SEQ ID NO: 107441 - protein, 619 aa, Arabidopsis thaliana
  peptide (1)..(619): Ceres Seq. ID no. 15220546
  misc_feature (340)..(506): Pfam Name: CRAL/TRIO domain Pfam Description: CRAL/TRIO domain
  misc_feature (128)..(616): Homolog of NCBI NO: 15218383 NR Description: cytosolic factor -related [Arabidopsis thaliana]
  misc_feature (235)..(616): Homolog of NCBI NO: 15081614 NR Description: At1g72160/T9N14_8 [Arabidopsis thaliana]
  misc_feature (147)..(617): Homolog of NCBI NO: 8894548 NR Description: hypothetical protein [Cicer arietinum]
  misc_feature (5)..(614): Homolog of NCBI NO: 34907288 NR Description: contains ESTs
  misc_feature (1)..(614): Homolog of NCBI NO: 15219901 NR Description: expressed protein [Arabidopsis thaliana]
  misc_feature (65)..(614): Homolog of NCBI NO: 18397616 NR Description: expressed protein [Arabidopsis thaliana]
  misc_feature (65)..(614): Homolog of NCBI NO: 14334978 NR Description: unknown protein [Arabidopsis thaliana]
  misc_feature (42)..(614): Homolog of NCBI NO: 15218382 NR Description: cytosolic factor -related [Arabidopsis thaliana]
  misc_feature (246)..(529): Homolog of NCBI NO: 21542233 NR Description: SEC14-like protein 2 (Alpha-tocopherol associated
  misc_feature (246)..(529): Homolog of NCBI NO: 29336071 NR Description: SEC14-like 2 [Bos taurus]
MPELEESNHTAEVVSEKVTPETMTLESEGLNHAAEDSEQTHEVTPETETAKLEVLNHTAEDSEQTHEVTPEKETVKSEFLNHVAEDSEQTHEVTPETETVKSEVLNHAAEDSEQPRGVTPTPETETSEADTSLLVTSETEEPNHAAEDYSETEPSQKLMLEQRRKYMEVEDWTEPELPDEAVLEAAASVPEPKQPEPQTPPPPPSTTTSTVASRSLAEMMNREEAEVEEKQKIQIPRSLGSFKEETNKISDLSETELNALQELRHLLQVSQDSSKTSIWGVPLLKDDRTDVVLLKFLRARDFKPQEAYSMLNKTLQWRIDFNIEELLDENLGDDLDKVVFMQGQDKENHPVCYNVYGEFQNKDLYQKTFSDEEKRERFLRWRIQFLEKSIRNLDFVAGGVSTICQVNDLKNSPGPGKTELRLATKQALHLLQDNYPEFVSKQIFINVPWWYLAFYRIISPFMSQRSKSKLVFAGPSRSAETLLKYISPEHVPVQYGGLSVDNCECNSDFTHDDIATEITVKPTTKQTVEIIVYEKCTIVWEIRVVGWEVSYGAEFVPENKEGYTVIIQKPRKMTAKNELVVSHSFKVGEVGRILLTVDNPTSTKKMLIYRFKVKPLACE

SEQ ID NO: 107442 - DNA, 1711 bp, Arabidopsis thaliana
  misc_feature (1)..(1711): Ceres Seq. ID no. 13650221
  misc_feature: MA Experiment ID: 108434 Result: Up-regulated in Transcription
  misc_feature: MA Experiment 108434 PARAMETER Experiment Name: At_Root_Tips_cDNA_P Parameter: Tissue Value: Root Tips
  misc_feature: MA Experiment ID: 108435 Result: Up-regulated in Transcription
  misc_feature: MA Experiment 108435 PARAMETER Experiment Name: At_stm_Mutants_cDNA_P Parameter: Plant Line Value: wt Landsburg vs stm
  misc_feature: MA Experiment 108435 PARAMETER Experiment Name: At_stm_Mutants_cDNA_P Parameter: Tissue Value: Shoot Apical Meristem Region
  misc_feature: MA Experiment ID: 108461 Result: Down-regulated in Transcription
  misc_feature: MA Experiment 108461 PARAMETER Experiment Name: At_Germinating_Seeds_cDNA_P Parameter: Age (day) Value: 1 vs. 0
  misc_feature: MA Experiment 108461 PARAMETER Experiment Name: At_Germinating_Seeds_cDNA_P Parameter: Tissue Value: Germinating Seeds
  misc_feature: MA Experiment ID: 108462 Result: Down-regulated in Transcription
  misc_feature: MA Experiment 108462 PARAMETER Experiment Name: At_Germinating_Seeds_cDNA_P Parameter: Age (day) Value: 2 vs. 0
  misc_feature: MA Experiment 108462 PARAMETER Experiment Name: At_Germinating_Seeds_cDNA_P Parameter: Tissue Value: Germinating Seeds
  misc_feature: MA Experiment ID: 108463 Result: Down-regulated in Transcription
  misc_feature: MA Experiment 108463 PARAMETER Experiment Name: At_Germinating_Seeds_cDNA_P Parameter: Age (day) Value: 3 vs. 0
  misc_feature: MA Experiment 108463 PARAMETER Experiment Name: At_Germinating_Seeds_cDNA_P Parameter: Tissue Value: Germinating Seeds
  misc_feature: MA Experiment ID: 108464 Result: Down-regulated in Transcription
  misc_feature: MA Experiment 108464 PARAMETER Experiment Name: At_Germinating_Seeds_cDNA_P Parameter: Age (day) Value: 4 vs. 0
  misc_feature: MA Experiment 108464 PARAMETER Experiment Name: At_Germinating_Seeds_cDNA_P Parameter: Tissue Value: Germinating Seeds
  misc_feature: MA Experiment ID: 20000307 Result: Down-regulated in Transcription
  misc_feature: MA Experiment 20000307 PARAMETER Experiment Name: At_Germinating_Seeds_Sub_P Parameter: Age (hr) Value: 24 vs. 0
  misc_feature: MA Experiment 20000307 PARAMETER Experiment Name: At_Germinating_Seeds_Sub_P Parameter: Organism Value: A. thaliana
  misc_feature: MA Experiment 20000307 PARAMETER Experiment Name: At_Germinating_Seeds_Sub_P Parameter: Plant Line Value: WS
  misc_feature: MA Experiment 20000307 PARAMETER Experiment Name: At_Germinating_Seeds_Sub_P Parameter: Tissue Value: Germinating Seeds
  misc_feature: MA Experiment ID: 20000355 Result: Up-regulated in Transcription
  misc_feature: MA Experiment 20000355 PARAMETER Experiment Name: At_Siliques_Sub_P Parameter: Age (day) Value: 21
  misc_feature: MA Experiment 20000355 PARAMETER Experiment Name: At_Siliques_Sub_P Parameter: Organism Value: A. thaliana
  misc_feature: MA Experiment 20000355 PARAMETER Experiment Name: At_Siliques_Sub_P Parameter: Plant Line Value: WS
  misc_feature: MA Experiment 20000355 PARAMETER Experiment Name: At_Siliques_Sub_P Parameter: Tissue Value: Less Than 5mm Siliques vs. Whole Plant
  misc_feature: MA Experiment ID: 20000440 Result: Up-regulated in Transcription
  misc_feature: MA Experiment 20000440 PARAMETER Experiment Name: At_Closed-Flower__Sub_P Parameter: Tissue Value: Closed Flower vs. Whole Plant
atgattcataaacatatcataaataagatcaatattaataaaataaatagttttttttacgggacggattgtcagagatttcgaaaccctagtcgatttcgagatccaactaactctgctccttatctcagcttgttgaatttgcgaagtatgggagacgctagagacaacgaagcctacgaggaggagctcttggactatgaagaagaagacgagaaggtcccagattctggaaacaaagttaacggcgaagctgtgaaaaaagggtacgtgggaatacacagttctggattcagagacttccttttgaaaccggagcttctcagagctattgttgactcaggatttgaacatccatctgaagtgcaacacgaatgtatccctcaagctatcttgggtatggatgttatctgccaagcaaagtctggtatggggaagactgctgtgtttgtcctgtctactctacaacagattgaaccatctcctggccaggtttctgcacttgtcttgtgccatacaagagagctagcttaccagatctgcaatgagtttgtgcgattcagtacctatctgcctgatacaaaagtttcggtgttctatggtggagtcaacattaaaattcacaaagacttgctgaagaatgaatgtcctcacattgttgttggtacccctggtcgagtgcttgcacttgccagggagaaagatctctctttgaagaatgtgaggcattttattcttgatgagtgtgataaaatgctcgagtcacttgacatgcgaagggatgtgcaggagattttcaagatgactcctcatgacaaacaagtaatgatgttctcagcaacgctcagcaaagagatacgcccagtctgcaagaagtttatgcaagatccaatggaaatatatgttgatgatgaagccaagttgactcttcatggacttgtccagcactacatcaaactgagcgagatggagaaaaatcgcaagttgaatgaccttcttgatgcgttggacttcaatcaagttgtcatttttgtgaagagcgtgagcagggctgcggagctgaacaagttactggtggaatgcaatttcccctcaatatgcatacactctggcatgtctcaagaagagaggttgactcgatacaaaagtttcaaggaagggcacaagaggatccttgtggcgactgacttggtaggaagagggattgacatagagcgtgtcaacattgttatcaactatgacatgccagattctgcggatacctatcttcatagggttgggagagctggtagatttggaaccaagggtcttgcaatcacatttgttgcatctgcttcagattcagaggtccttaatcaggttcaagagaggtttgaggtcgatataaaggagcttcctgagcagattgatacatcgacttacatgccgtcttaaacaagtagcatcatctctgaggaacgaacctcttcagatttcaaccttttaggtgttcaaaggggtcatggaggtccacaactatctctcacaccgtttgttgcttcgctattttagacttttctatgaggacaagtttttccatatatttagaccgttttgtaactcttgaaaaatgagattgagctactctccaaatcgcgcacagttgagagctctcctgttttttgtactagtgatggttatctttaaaatattaagatttcaggatttattc

SEQ ID NO: 107443 - protein, 477 aa, Arabidopsis thaliana
  peptide (1)..(477): Ceres Seq. ID no. 13650222
  misc_feature (109)..(316): Pfam Name: DEAD/DEAH box helicase Pfam Description: DEAD/DEAH box helicase
  misc_feature (27)..(477): Homolog of NCBI NO: 11358797 NR Description: RNA helicase RH15 [imported] - Arabidopsis (fragment) >gi|3776005|emb|CAA09205.1| RNA helicase [Arabidopsis
  misc_feature (51)..(477): Homolog of NCBI NO: 18416493 NR Description: DEAD/DEAH box helicase, putative [Arabidopsis >gi|14190381|gb|AAK55671.1|AF378868_1 AT5g11200/F2I11_90 thaliana] >gi|15450405|gb|AAK96496.1| AT5g11170/F2I11_60
  misc_feature (51)..(477): Homolog of NCBI NO: 18416486 NR Description: DEAD/DEAH box helicase, putative [Arabidopsis
  misc_feature (51)..(474): Homolog of NCBI NO: 8953382 NR Description: DEAD BOX RNA helicase RH15 [Arabidopsis thaliana]
  misc_feature (51)..(474): Homolog of NCBI NO: 8953379 NR Description: DEAD BOX RNA helicase RH15-like protein
  misc_feature (53)..(477): Homolog of NCBI NO: 34913862 NR Description: putative DEAD BOX RNA helicase [Oryza sativa
  misc_feature (134)..(477): Homolog of NCBI NO: 30683509 NR Description: DEAD/DEAH box helicase, putative [Arabidopsis
  misc_feature (56)..(475): Homolog of NCBI NO: 28278325 NR Description: Unknown (protein for MGC:55433) [Danio rerio]
  misc_feature (61)..(475): Homolog of NCBI NO: 16758334 NR Description: nuclear RNA helicase, DECD variant of DEAD box [Rattus norvegicus] >gi|3132829|gb|AAC16391.1| nuclear RNA
  misc_feature (61)..(296): Homolog of NCBI NO: 21040373 NR Description: DEAD/H (Asp-Glu-Ala-Asp/His) box polypeptide 39 >gi|14714632|gb|AAH10455.1|AAH10455 Unknown (protein for
MIHKHIINKININKINSFFYGTDCQRFRNPSRFRDPTNSAPYLSLLNLRSMGDARDNEAYEEELLDYEEEDEKVPDSGNKVNGEAVKKGYVGIHSSGFRDFLLKPELLRAIVDSGFEHPSEVQHECIPQAILGMDVICQAKSGMGKTAVFVLSTLQQIEPSPGQVSALVLCHTRELAYQICNEFVRFSTYLPDTKVSVFYGGVNIKIHKDLLKNECPHIVVGTPGRVLALAREKDLSLKNVRHFILDECDKMLESLDMRRDVQEIFKMTPHDKQVMMFSATLSKEIRPVCKKFMQDPMEIYVDDEAKLTLHGLVQHYIKLSEMEKNRKLNDLLDALDFNQVVIFVKSVSRAAELNKLLVECNFPSICIHSGMSQEERLTRYKSFKEGHKRILVATDLVGRGIDIERVNIVINYDMPDSADTYLHRVGRAGRFGTKGLAITFVASASDSEVLNQVQERFEVDIKELPEQIDTSTYMPS

SEQ ID NO: 107444 - protein, 427 aa, Arabidopsis thaliana; identical to SEQ ID NO: 20810
  peptide (1)..(427): Ceres Seq. ID no. 13650223
  misc_feature (59)..(266): Pfam Name: DEAD/DEAH box helicase Pfam Description: DEAD/DEAH box helicase
  misc_feature (1)..(427): Homolog of NCBI NO: 11358797 NR Description: RNA helicase RH15 [imported] - Arabidopsis (fragment) >gi|3776005|emb|CAA09205.1| RNA helicase [Arabidopsis
  misc_feature (1)..(427): Homolog of NCBI NO: 18416493 NR Description: DEAD/DEAH box helicase, putative [Arabidopsis >gi|14190381|gb|AAK55671.1|AF378868_1 AT5g11200/F2I11_90 thaliana] >gi|15450405|gb|AAK96496.1| AT5g11170/F2I11_60
  misc_feature (1)..(427): Homolog of NCBI NO: 18416486 NR Description: DEAD/DEAH box helicase, putative [Arabidopsis
  misc_feature (1)..(424): Homolog of NCBI NO: 8953382 NR Description: DEAD BOX RNA helicase RH15 [Arabidopsis thaliana]
  misc_feature (1)..(424): Homolog of NCBI NO: 8953379 NR Description: DEAD BOX RNA helicase RH15-like protein
  misc_feature (3)..(427): Homolog of NCBI NO: 34913862 NR Description: putative DEAD BOX RNA helicase [Oryza sativa
  misc_feature (84)..(427): Homolog of NCBI NO: 30683509 NR Description: DEAD/DEAH box helicase, putative [Arabidopsis
  misc_feature (6)..(425): Homolog of NCBI NO: 28278325 NR Description: Unknown (protein for MGC:55433) [Danio rerio]
  misc_feature (11)..(425): Homolog of NCBI NO: 16758334 NR Description: nuclear RNA helicase, DECD variant of DEAD box [Rattus norvegicus] >gi|3132829|gb|AAC16391.1| nuclear RNA
  misc_feature (11)..(246): Homolog of NCBI NO: 21040373 NR Description: DEAD/H (Asp-Glu-Ala-Asp/His) box polypeptide 39 >gi|14714632|gb|AAH10455.1|AAH10455 Unknown (protein for

SEQ ID NO: 107445 - protein, 344 aa, Arabidopsis thaliana; identical to SEQ ID NO: 20811
  peptide (1)..(344): Ceres Seq. ID no. 13650224
  misc_feature (1)..(183): Pfam Name: DEAD/DEAH box helicase Pfam Description: DEAD/DEAH box helicase
  misc_feature (1)..(344): Homolog of NCBI NO: 11358797 NR Description: RNA helicase RH15 [imported] - Arabidopsis (fragment) >gi|3776005|emb|CAA09205.1| RNA helicase [Arabidopsis
  misc_feature (1)..(344): Homolog of NCBI NO: 18416493 NR Description: DEAD/DEAH box helicase, putative [Arabidopsis >gi|14190381|gb|AAK55671.1|AF378868_1 AT5g11200/F2I11_90 thaliana] >gi|15450405|gb|AAK96496.1| AT5g11170/F2I11_60
  misc_feature (1)..(344): Homolog of NCBI NO: 18416486 NR Description: DEAD/DEAH box helicase, putative [Arabidopsis
  misc_feature (1)..(341): Homolog of NCBI NO: 8953382 NR Description: DEAD BOX RNA helicase RH15 [Arabidopsis thaliana]
  misc_feature (1)..(341): Homolog of NCBI NO: 8953379 NR Description: DEAD BOX RNA helicase RH15-like protein
  misc_feature (1)..(344): Homolog of NCBI NO: 34913862 NR Description: putative DEAD BOX RNA helicase [Oryza sativa
  misc_feature (1)..(344): Homolog of NCBI NO: 30683509 NR Description: DEAD/DEAH box helicase, putative [Arabidopsis
  misc_feature (1)..(342): Homolog of NCBI NO: 28278325 NR Description: Unknown (protein for MGC:55433) [Danio rerio]
  misc_feature (1)..(342): Homolog of NCBI NO: 16758334 NR Description: nuclear RNA helicase, DECD variant of DEAD box [Rattus norvegicus] >gi|3132829|gb|AAC16391.1| nuclear RNA
  misc_feature (1)..(163): Homolog of NCBI NO: 21040373 NR Description: DEAD/H (Asp-Glu-Ala-Asp/His) box polypeptide 39 >gi|14714632|gb|AAH10455.1|AAH10455 Unknown (protein for

SEQ ID NO: 107446 - DNA, 1371 bp, Arabidopsis thaliana
  misc_feature (1)..(1371): Ceres Seq. ID no. 13650244
  misc_feature: MA Experiment ID: 20000440 Result: Up-regulated in Transcription
  misc_feature: MA Experiment 20000440 PARAMETER Experiment Name: At_Closed-Flower__Sub_P Parameter: Tissue Value: Closed Flower vs. Whole Plant
atggcctcttcaatggctagcaatgatttccagctccctccacgtttcttcactgttttcgtctcccatttcagctcagagttcatggtgatcccagtttcctactacgatcacattccacatcgtttccccaagactgtgattctccgaggacctggtggatgctcctggaaggtagcgacggagataaaggatgatgaagtgcttttttcacaaggatggcccaaatttgttcgggataatactcttaacgatggagactttttgacctttgcctataatggagctcacatattcgaggtcagtatctttcgcggctacgacgcatgtaaagagattagcgaagtcactgaattggaagaggaagaagaagacagtgttatatctctgagcagtgaagacacagacactggtgctaaatctgagatgaagaatacagtcccggaaggcagagacaaaggaaagtcaaaagtggaagttgtggaggattctgatgacgatgaggaggaggatagtgtttattctgaaagcagtgaagaaacagagacagacactgattctgaattcaaggtggccaagccaacaataccaaaaagccagaagaaaggaaagaagaaagaacaagttgtggagtcctctgatgacgaggaagacgaagaggaggacagtgacagtgattacattgaaacgtttggtcaattggatattgaagagaattccatcagtgaggaggacagttcttatgctcctgataaagaagacacagccactgcctcttttgtcaaaccaaaggttgcaaataaggttgctaatctgaagaggaaagaggcggcaaagaagaggaagaaagtcgatcccatgatcaagaatcctgagagatacctcgatgatcctaagaatatccatttcgagacaaacgtgaagaataggttatacgagctgttggttcatgcacaactggtgaaagactattgcttgaggtttggagactatgttaactacatcgacaggttcgggaaactaagtgctaaaacagccaaatggaaggatcagcgtgtttgtatcaaaagatggatgcgcatatgcaagaggaacaagttgaagaaagaagaccgcattttgtgtgagctcttgcgcaagggaactttcgtttacgcaatcaaactccatgtcatccgcggtaaggatctgtagacgctagcagtatgagtagaggaagagatttggctacttaattatctctctgatttccatcttgttgtgtgatcaagcaaacttatgtgtttcattattgtctacttcagattgtatgaccttctctcttgttctctcatgaatctatttctgaatacaatatctaatctttgagct

SEQ ID NO: 107447 - protein, 397 aa, Arabidopsis thaliana; identical to SEQ ID NO: 20351
  peptide (1)..(397): Ceres Seq. ID no. 13650245
  misc_feature (0)..(0): Pfam Name: Eukaryotic translation initiation factor 3 Pfam Description: Eukaryotic translation initiation factor 3
  misc_feature (1)..(397): Homolog of NCBI NO: 15235362 NR Description: transcriptional factor B3 family [Arabidopsis
  misc_feature (212)..(393): Homolog of NCBI NO: 15230649 NR Description: transcriptional factor B3 family [Arabidopsis >gi|6862920|gb|AAF30309.1|AC018907_9 hypothetical protein
  misc_feature (3)..(206): Homolog of NCBI NO: 15230649 NR Description: transcriptional factor B3 family [Arabidopsis >gi|6862920|gb|AAF30309.1|AC018907_9 hypothetical protein
  misc_feature (5)..(171): Homolog of NCBI NO: 15230669 NR Description: transcriptional factor B3 family [Arabidopsis >gi|6862926|gb|AAF30315.1|AC018907_15 hypothetical protein
  misc_feature (7)..(234): Homolog of NCBI NO: 11357788 NR Description: hypothetical protein F4P12.10 - Arabidopsis >gi|6729482|emb|CAB67638.1| putative protein [Arabidopsis
  misc_feature (222)..(393): Homolog of NCBI NO: 18409814 NR Description: transcriptional factor B3 family [Arabidopsis
  misc_feature (222)..(393): Homolog of NCBI NO: 11357788 NR Description: hypothetical protein F4P12.10 - Arabidopsis >gi|6729482|emb|CAB67638.1| putative protein [Arabidopsis
  misc_feature (208)..(393): Homolog of NCBI NO: 15242851 NR Description: transcriptional factor B3 family [Arabidopsis >gi|9759269|dbj|BAB09590.1| gb|AAF30309.1~gene_id:MRI1.8~similar
  misc_feature (7)..(184): Homolog of NCBI NO: 18409814 NR Description: transcriptional factor B3 family [Arabidopsis
  misc_feature (7)..(227): Homolog of NCBI NO: 15238624 NR Description: transcriptional factor B3 family [Arabidopsis

SEQ ID NO: 107448 - protein, 393 aa, Arabidopsis thaliana; identical to SEQ ID NO: 20352
  peptide (1)..(393): Ceres Seq. ID no. 13650246
  misc_feature (0)..(0): Pfam Name: Eukaryotic translation initiation factor 3 Pfam Description: Eukaryotic translation initiation factor 3
  misc_feature (1)..(393): Homolog of NCBI NO: 15235362 NR Description: transcriptional factor B3 family [Arabidopsis
  misc_feature (208)..(389): Homolog of NCBI NO: 15230649 NR Description: transcriptional factor B3 family [Arabidopsis >gi|6862920|gb|AAF30309.1|AC018907_9 hypothetical protein
  misc_feature (1)..(202): Homolog of NCBI NO: 15230649 NR Description: transcriptional factor B3 family [Arabidopsis >gi|6862920|gb|AAF30309.1|AC018907_9 hypothetical protein
  misc_feature (1)..(167): Homolog of NCBI NO: 15230669 NR Description: transcriptional factor B3 family [Arabidopsis >gi|6862926|gb|AAF30315.1|AC018907_15 hypothetical protein
  misc_feature (3)..(230): Homolog of NCBI NO: 11357788 NR Description: hypothetical protein F4P12.10 - Arabidopsis >gi|6729482|emb|CAB67638.1| putative protein [Arabidopsis
  misc_feature (218)..(389): Homolog of NCBI NO: 18409814 NR Description: transcriptional factor B3 family [Arabidopsis
  misc_feature (218)..(389): Homolog of NCBI NO: 11357788 NR Description: hypothetical protein F4P12.10 - Arabidopsis >gi|6729482|emb|CAB67638.1| putative protein [Arabidopsis
  misc_feature (204)..(389): Homolog of NCBI NO: 15242851 NR Description: transcriptional factor B3 family [Arabidopsis >gi|9759269|dbj|BAB09590.1| gb|AAF30309.1~gene_id:MRI1.8~similar
  misc_feature (3)..(180): Homolog of NCBI NO: 18409814 NR Description: transcriptional factor B3 family [Arabidopsis
  misc_feature (3)..(223): Homolog of NCBI NO: 15238624 NR Description: transcriptional factor B3 family [Arabidopsis

SEQ ID NO: 107449 - protein, 369 aa, Arabidopsis thaliana; identical to SEQ ID NO: 20353
  peptide (1)..(369): Ceres Seq. ID no. 13650247
  misc_feature (0)..(0): Pfam Name: Eukaryotic translation initiation factor 3 Pfam Description: Eukaryotic translation initiation factor 3
  misc_feature (1)..(369): Homolog of NCBI NO: 15235362 NR Description: transcriptional factor B3 family [Arabidopsis
  misc_feature (184)..(365): Homolog of NCBI NO: 15230649 NR Description: transcriptional factor B3 family [Arabidopsis >gi|6862920|gb|AAF30309.1|AC018907_9 hypothetical protein
  misc_feature (1)..(178): Homolog of NCBI NO: 15230649 NR Description: transcriptional factor B3 family [Arabidopsis >gi|6862920|gb|AAF30309.1|AC018907_9 hypothetical protein
  misc_feature (1)..(143): Homolog of NCBI NO: 15230669 NR Description: transcriptional factor B3 family [Arabidopsis >gi|6862926|gb|AAF30315.1|AC018907_15 hypothetical protein
  misc_feature (1)..(206): Homolog of NCBI NO: 11357788 NR Description: hypothetical protein F4P12.10 - Arabidopsis >gi|6729482|emb|CAB67638.1| putative protein [Arabidopsis
  misc_feature (194)..(365): Homolog of NCBI NO: 18409814 NR Description: transcriptional factor B3 family [Arabidopsis
  misc_feature (194)..(365): Homolog of NCBI NO: 11357788 NR Description: hypothetical protein F4P12.10 - Arabidopsis >gi|6729482|emb|CAB67638.1| putative protein [Arabidopsis
  misc_feature (180)..(365): Homolog of NCBI NO: 15242851 NR Description: transcriptional factor B3 family [Arabidopsis >gi|9759269|dbj|BAB09590.1| gb|AAF30309.1~gene_id:MRI1.8~similar
  misc_feature (1)..(156): Homolog of NCBI NO: 18409814 NR Description: transcriptional factor B3 family [Arabidopsis
  misc_feature (1)..(199): Homolog of NCBI NO: 15238624 NR Description: transcriptional factor B3 family [Arabidopsis

SEQ ID NO: 107450 - DNA, 1527 bp, Arabidopsis thaliana
  misc_feature (1)..(1527): Ceres Seq. ID no. 13650280
  misc_feature: MA Experiment ID: 20000169 Result: Down-regulated in Transcription
  misc_feature: MA Experiment 20000169 PARAMETER Experiment Name: At_100uM_ABA_P Parameter: Age (day) Value: 14
  misc_feature: MA Experiment 20000169 PARAMETER Experiment Name: At_100uM_ABA_P Parameter: Organism Value: A. thaliana
  misc_feature: MA Experiment 20000169 PARAMETER Experiment Name: At_100uM_ABA_P Parameter: Plant Line Value: WS
  misc_feature: MA Experiment 20000169 PARAMETER Experiment Name: At_100uM_ABA_P Parameter: Timepoint (hr) Value: 6
  misc_feature: MA Experiment 20000169 PARAMETER Experiment Name: At_100uM_ABA_P Parameter: Tissue Value: Aerial
  misc_feature: MA Experiment 20000169 PARAMETER Experiment Name: At_100uM_ABA_P Parameter: Treatment Value: 100uM ABA vs. No Treatment
  misc_feature: MA Experiment ID: 20000308 Result: Up-regulated in Transcription
  misc_feature: MA Experiment 20000308 PARAMETER Experiment Name: At_100mM_NaCl__P Parameter: Age (day) Value: 17
  misc_feature: MA Experiment 20000308 PARAMETER Experiment Name: At_100mM_NaCl__P Parameter: Organism Value: A. thaliana
  misc_feature: MA Experiment 20000308 PARAMETER Experiment Name: At_100mM_NaCl__P Parameter: Plant Line Value: WS
  misc_feature: MA Experiment 20000308 PARAMETER Experiment Name: At_100mM_NaCl__P Parameter: Timepoint (hr) Value: 72
  misc_feature: MA Experiment 20000308 PARAMETER Experiment Name: At_100mM_NaCl__P Parameter: Tissue Value: Whole Plant
  misc_feature: MA Experiment 20000308 PARAMETER Experiment Name: At_100mM_NaCl__P Parameter: Treatment Value: 100mM NaCl vs. No Treatment
  misc_feature: MA Experiment ID: 20000436 Result: Down-regulated in Transcription
  misc_feature: MA Experiment 20000436 PARAMETER Experiment Name: At_Drought_P Parameter: Age (day) Value: 7
  misc_feature: MA Experiment 20000436 PARAMETER Experiment Name: At_Drought_P Parameter: Organism Value: A. thaliana
  misc_feature: MA Experiment 20000436 PARAMETER Experiment Name: At_Drought_P Parameter: Plant Line Value: WS
  misc_feature: MA Experiment 20000436 PARAMETER Experiment Name: At_Drought_P Parameter: Timepoint (hr) Value: 12
  misc_feature: MA Experiment 20000436 PARAMETER Experiment Name: At_Drought_P Parameter: Tissue Value: Whole Plant
  misc_feature: MA Experiment 20000436 PARAMETER Experiment Name: At_Drought_P Parameter: Treatment Value: Drought vs. No Drought
  misc_feature: MA Experiment ID: 20000437 Result: Down-regulated in Transcription
  misc_feature: MA Experiment 20000437 PARAMETER Experiment Name: At_Drought_P Parameter: Age (day) Value: 8
  misc_feature: MA Experiment 20000437 PARAMETER Experiment Name: At_Drought_P Parameter: Organism Value: A. thaliana
  misc_feature: MA Experiment 20000437 PARAMETER Experiment Name: At_Drought_P Parameter: Plant Line Value: WS
  misc_feature: MA Experiment 20000437 PARAMETER Experiment Name: At_Drought_P Parameter: Timepoint (hr) Value: 24
  misc_feature: MA Experiment 20000437 PARAMETER Experiment Name: At_Drought_P Parameter: Tissue Value: Whole Plant
  misc_feature: MA Experiment 20000437 PARAMETER Experiment Name: At_Drought_P Parameter: Treatment Value: Drought vs. No Drought
  misc_feature: MA Experiment ID: 20000453 Result: Down-regulated in Transcription
  misc_feature: MA Experiment 20000453 PARAMETER Experiment Name: At_100uM_ABA_P Parameter: Age (day) Value: 15
  misc_feature: MA Experiment 20000453 PARAMETER Experiment Name: At_100uM_ABA_P Parameter: Organism Value: A. thaliana
  misc_feature: MA Experiment 20000453 PARAMETER Experiment Name: At_100uM_ABA_P Parameter: Plant Line Value: WS
  misc_feature: MA Experiment 20000453 PARAMETER Experiment Name: At_100uM_ABA_P Parameter: Timepoint (hr) Value: 24
  misc_feature: MA Experiment 20000453 PARAMETER Experiment Name: At_100uM_ABA_P Parameter: Tissue Value: Aerial
  misc_feature: MA Experiment 20000453 PARAMETER Experiment Name: At_100uM_ABA_P Parameter: Treatment Value: 100uM ABA vs. No Treatment
  misc_feature: MA Experiment ID: 20000527 Result: Down-regulated in Transcription
  misc_feature: MA Experiment 20000527 PARAMETER Experiment Name: At_10percent_PEG_P Parameter: Age (day) Value: 20
  misc_feature: MA Experiment 20000527 PARAMETER Experiment Name: At_10percent_PEG_P Parameter: Organism Value: A. thaliana
  misc_feature: MA Experiment 20000527 PARAMETER Experiment Name: At_10percent_PEG_P Parameter: Plant Line Value: WS
  misc_feature: MA Experiment 20000527 PARAMETER Experiment Name: At_10percent_PEG_P Parameter: Timepoint (day) Value: 20
  misc_feature: MA Experiment 20000527 PARAMETER Experiment Name: At_10percent_PEG_P Parameter: Tissue Value: Whole Plant
  misc_feature: MA Experiment 20000527 PARAMETER Experiment Name: At_10percent_PEG_P Parameter: Treatment Value: 10percent PEG vs. No Treatment
  misc_feature: MA Experiment ID: 20000573 Result: Down-regulated in Transcription
  misc_feature: MA Experiment 20000573 PARAMETER Experiment Name: At_100uM_ABA_Mutants__P Parameter: Organism Value: A. thaliana
  misc_feature: MA Experiment 20000573 PARAMETER Experiment Name: At_100uM_ABA_Mutants__P Parameter: Plant Line Value: CS22 vs. Ler wt
  misc_feature: MA Experiment 20000573 PARAMETER Experiment Name: At_100uM_ABA_Mutants__P Parameter: Timepoint (hr) Value: N/A
  misc_feature: MA Experiment 20000573 PARAMETER Experiment Name: At_100uM_ABA_Mutants__P Parameter: Tissue Value: Whole Plant
  misc_feature: MA Experiment 20000573 PARAMETER Experiment Name: At_100uM_ABA_Mutants__P Parameter: Treatment Value: None
  misc_feature: MA Experiment ID: 20001756 Result: Up-regulated in Transcription
  misc_feature: MA Experiment 20001756 PARAMETER Experiment Name: At_50mM_NH4NO3_L-to-H_P Parameter: Timepoint (hr) Value: 4
  misc_feature: MA Experiment 20001756 PARAMETER Experiment Name: At_50mM_NH4NO3_L-to-H_P Parameter: Tissue Value: Leaf
  misc_feature: MA Experiment 20001756 PARAMETER Experiment Name: At_50mM_NH4NO3_L-to-H_P Parameter: Treatment Value: 50mM NH4NO3 vs 100mM Mannitol
  misc_feature: MA Experiment ID: 20001761 Result: Down-regulated in Transcription
  misc_feature: MA Experiment 20001761 PARAMETER Experiment Name: At_50mM_NH4NO3_L-to-H_P Parameter: Timepoint (hr) Value: 4
  misc_feature: MA Experiment 20001761 PARAMETER Experiment Name: At_50mM_NH4NO3_L-to-H_P Parameter: Tissue Value: Siliques
  misc_feature: MA Experiment 20001761 PARAMETER Experiment Name: At_50mM_NH4NO3_L-to-H_P Parameter: Treatment Value: 50mM NH4NO3 vs 100mM Mannitol
ctccagtttcatagtcactaacctaaaagaattaatggaggaaactcggaggaggtttgtcatatcctctgttctaagtgtttctttgatctacttatgtctttcgacatgtcacgtttccgccttcgacttcggtagaaggcagctccggtttaatactgatggtcggttcaagatactgcaagtgtcagatatgcactacggttttggcaaagagacgcaatgctcagacgtttcacctgcagaatttccttactgctccgatctcaatactacctcctttttacagcgaactatcgcttccgagaagcccgatctcatcgtcttctctggagacaatgtatatggattgtgcgagacaagtgacgtggcaaaatcgatggacatggcatttgctcctgcgatcgaatcggggattccatgggtggctattttggggaatcacgaccaagaatccgacatgactagagaaacaatgatgaaatacatcatgaaactcccaaactcgttgtctcaagtaaaccctcccgatgcttggctataccaaatcgacggttttggtaattacaatctacaaatcgagggtccttttggctcccctctcttcttcaaatccattctcaatctctatctactagacggtggatcttacacgaagcttgatggttttggttacaaatatgattgggtcaaaacctctcaacagaattggtatgaacacacttctaaatggcttgagatggaacacaagaggtggccatttccacagaatagtacggcaccaggattggtttacctccacattccgatgccggaatttgcattgttcaacaaatcgacggagatgactggagtaagacaagaatctacttgttctccacctatcaactctggtttctttaccaaacttgtcgaaagaggtgaagtcaaaggtgttttcagtggtcacgaccacgtcaacgacttctgtgccgaactccatgggatcaacctttgttacgcaggcggagccgggtaaattgtaccacacgctacttttctcataaaagccttacttgtaacacacgcttcttttaattgttttaggtatcatgggtacggacgggttggttgggcaaggagagtaagagtagttgaggctcagcttgagaagactatgtagggacgttggggagctgttgatacaatcaaaacttggaaacggctcgatgataagaatcattctttgattgatactcaacttctctggaccaagaacacaactcttgagccaaattttgggtttagttgctctactataccacaacactgatcattaagcagagttgttgtacaatgatatgatattttcattttctttatttatgctttactatctattattttgtttagaataagaattaaggaagacaatgtcagcttataattgtctgctttgtttagaataagaaggaagacaatgtcagcttataattgtctgctttgttacgttcgttttatttttctcaatagagtatcattttatct

SEQ ID NO: 107451 - protein, 338 aa, Arabidopsis thaliana
  peptide (1)..(338): Ceres Seq. ID no. 13650281
  misc_feature (57)..(320): Pfam Name: Calcineurin-like phosphoesterase Pfam Description: Calcineurin-like phosphoesterase
  misc_feature (12)..(338): Homolog of NCBI NO: 30267807 NR Description: hypothetical protein [Arabidopsis thaliana]
  misc_feature (12)..(338): Homolog of NCBI NO: 25763519 NR Description: probable phosphoesterase (EC 3.1.-.-) At2g46880 -
  misc_feature (12)..(338): Homolog of NCBI NO: 15226455 NR Description: calcineurin-like phosphoesterase family
  misc_feature (12)..(338): Homolog of NCBI NO: 30267809 NR Description: hypothetical protein [Arabidopsis thaliana]
  misc_feature (12)..(338): Homolog of NCBI NO: 15242654 NR Description: calcineurin-like phosphoesterase family thaliana] >gi|10177295|dbj|BAB10556.1|
  misc_feature (19)..(338): Homolog of NCBI NO: 7208777 NR Description: putative PTS protein [Cicer arietinum]
  misc_feature (49)..(338): Homolog of NCBI NO: 15242042 NR Description: Calcineurin-like phosphoesterase family thaliana] >gi|8843816|dbj|BAA97364.1| to unknown protein [Arabidopsis thaliana]
  misc_feature (50)..(338): Homolog of NCBI NO: 40740622 NR Description: hypothetical protein AN3604.2 [Aspergillus
  misc_feature (49)..(338): Homolog of NCBI NO: 32405676 NR Description: hypothetical protein [Neurospora crassa] conserved hypothetical protein [Neurospora crassa]
  misc_feature (31)..(338): Homolog of NCBI NO: 6323393 NR Description: Dose-Dependent Cell cycle Regulator; Ylr361cp
SSFIVTNLKELMEETRRRFVISSVLSVSLIYLCLSTCHVSAFDFGRRQLRFNTDGRFKILQVSDMHYGFGKETQCSDVSPAEFPYCSDLNTTSFLQRTIASEKPDLIVFSGDNVYGLCETSDVAKSMDMAFAPAIESGIPWVAILGNHDQESDMTRETMMKYIMKLPNSLSQVNPPDAWLYQIDGFGNYNLQIEGPFGSPLFFKSILNLYLLDGGSYTKLDGFGYKYDWVKTSQQNWYEHTSKWLEMEHKRWPFPQNSTAPGLVYLHIPMPEFALFNKSTEMTGVRQESTCSPPINSGFFTKLVERGEVKGVFSGHDHVNDFCAELHGINLCYAGGAG

SEQ ID NO: 107452 - protein, 327 aa, Arabidopsis thaliana
  peptide (1)..(327): Ceres Seq. ID no. 13650282
  misc_feature (46)..(309): Pfam Name: Calcineurin-like phosphoesterase Pfam Description: Calcineurin-like phosphoesterase
  misc_feature (1)..(327): Homolog of NCBI NO: 30267807 NR Description: hypothetical protein [Arabidopsis thaliana]
  misc_feature (1)..(327): Homolog of NCBI NO: 25763519 NR Description: probable phosphoesterase (EC 3.1.-.-) At2g46880 -
  misc_feature (1)..(327): Homolog of NCBI NO: 15226455 NR Description: calcineurin-like phosphoesterase family
  misc_feature (1)..(327): Homolog of NCBI NO: 30267809 NR Description: hypothetical protein [Arabidopsis thaliana]
  misc_feature (1)..(327): Homolog of NCBI NO: 15242654 NR Description: calcineurin-like phosphoesterase family thaliana] >gi|10177295|dbj|BAB10556.1|
  misc_feature (8)..(327): Homolog of NCBI NO: 7208777 NR Description: putative PTS protein [Cicer arietinum]
  misc_feature (38)..(327): Homolog of NCBI NO: 15242042 NR Description: Calcineurin-like phosphoesterase family thaliana] >gi|8843816|dbj|BAA97364.1| to unknown protein [Arabidopsis thaliana]
  misc_feature (39)..(327): Homolog of NCBI NO: 40740622 NR Description: hypothetical protein AN3604.2 [Aspergillus
  misc_feature (38)..(327): Homolog of NCBI NO: 32405676 NR Description: hypothetical protein [Neurospora crassa] conserved hypothetical protein [Neurospora crassa]
  misc_feature (20)..(327): Homolog of NCBI NO: 6323393 NR Description: Dose-Dependent Cell cycle Regulator; Ylr361cp
MEETRRRFVISSVLSVSLIYLCLSTCHVSAFDFGRRQLRFNTDGRFKILQVSDMHYGFGKETQCSDVSPAEFPYCSDLNTTSFLQRTIASEKPDLIVFSGDNVYGLCETSDVAKSMDMAFAPAIESGIPWVAILGNHDQESDMTRETMMKYIMKLPNSLSQVNPPDAWLYQIDGFGNYNLQIEGPFGSPLFFKSILNLYLLDGGSYTKLDGFGYKYDWVKTSQQNWYEHTSKWLEMEHKRWPFPQNSTAPGLVYLHIPMPEFALFNKSTEMTGVRQESTCSPPINSGFFTKLVERGEVKGVFSGHDHVNDFCAELHGINLCYAGGAG

SEQ ID NO: 107453 - protein, 274 aa, Arabidopsis thaliana
  peptide (1)..(274): Ceres Seq. ID no. 13650283
  misc_feature (1)..(256): Pfam Name: Calcineurin-like phosphoesterase Pfam Description: Calcineurin-like phosphoesterase
  misc_feature (1)..(274): Homolog of NCBI NO: 30267807 NR Description: hypothetical protein [Arabidopsis thaliana]
  misc_feature (1)..(274): Homolog of NCBI NO: 25763519 NR Description: probable phosphoesterase (EC 3.1.-.-) At2g46880 -
  misc_feature (1)..(274): Homolog of NCBI NO: 15226455 NR Description: calcineurin-like phosphoesterase family
  misc_feature (1)..(274): Homolog of NCBI NO: 30267809 NR Description: hypothetical protein [Arabidopsis thaliana]
  misc_feature (1)..(274): Homolog of NCBI NO: 15242654 NR Description: calcineurin-like phosphoesterase family thaliana] >gi|10177295|dbj|BAB10556.1|
  misc_feature (1)..(274): Homolog of NCBI NO: 7208777 NR Description: putative PTS protein [Cicer arietinum]
  misc_feature (1)..(274): Homolog of NCBI NO: 15242042 NR Description: Calcineurin-like phosphoesterase family thaliana] >gi|8843816|dbj|BAA97364.1| to unknown protein [Arabidopsis thaliana]
  misc_feature (1)..(274): Homolog of NCBI NO: 40740622 NR Description: hypothetical protein AN3604.2 [Aspergillus
  misc_feature (1)..(274): Homolog of NCBI NO: 32405676 NR Description: hypothetical protein [Neurospora crassa] conserved hypothetical protein [Neurospora crassa]
  misc_feature (1)..(274): Homolog of NCBI NO: 6323393 NR Description: Dose-Dependent Cell cycle Regulator; Ylr361cp
MHYGFGKETQCSDVSPAEFPYCSDLNTTSFLQRTIASEKPDLIVFSGDNVYGLCETSDVAKSMDMAFAPAIESGIPWVAILGNHDQESDMTRETMMKYIMKLPNSLSQVNPPDAWLYQIDGFGNYNLQIEGPFGSPLFFKSILNLYLLDGGSYTKLDGFGYKYDWVKTSQQNWYEHTSKWLEMEHKRWPFPQNSTAPGLVYLHIPMPEFALFNKSTEMTGVRQESTCSPPINSGFFTKLVERGEVKGVFSGHDHVNDFCAELHGINLCYAGGAG

SEQ ID NO: 107454 - DNA, 1649 bp, Arabidopsis thaliana
  misc_feature (1)..(1649): Ceres Seq. ID no. 13650284
  misc_feature: MA Experiment ID: 20000327 Result: Up-regulated in Transcription
  misc_feature: MA Experiment 20000327 PARAMETER Experiment Name: At_42deg_Heat_Sub_P Parameter: Age (day) Value: 14
  misc_feature: MA Experiment 20000327 PARAMETER Experiment Name: At_42deg_Heat_Sub_P Parameter: Organism Value: A. thaliana
  misc_feature: MA Experiment 20000327 PARAMETER Experiment Name: At_42deg_Heat_Sub_P Parameter: Plant Line Value: WS
  misc_feature: MA Experiment 20000327 PARAMETER Experiment Name: At_42deg_Heat_Sub_P Parameter: Temperature (deg C) Value: 42 vs. 22
  misc_feature: MA Experiment 20000327 PARAMETER Experiment Name: At_42deg_Heat_Sub_P Parameter: Timepoint (hr) Value: 1
  misc_feature: MA Experiment 20000327 PARAMETER Experiment Name: At_42deg_Heat_Sub_P Parameter: Tissue Value: Aerial
  misc_feature: MA Experiment ID: 20000328 Result: Up-regulated in Transcription
  misc_feature: MA Experiment 20000328 PARAMETER Experiment Name: At_42deg_Heat_Sub_P Parameter: Age (day) Value: 14
  misc_feature: MA Experiment 20000328 PARAMETER Experiment Name: At_42deg_Heat_Sub_P Parameter: Organism Value: A. thaliana
  misc_feature: MA Experiment 20000328 PARAMETER Experiment Name: At_42deg_Heat_Sub_P Parameter: Plant Line Value: WS
  misc_feature: MA Experiment 20000328 PARAMETER Experiment Name: At_42deg_Heat_Sub_P Parameter: Temperature (deg C) Value: 42 vs. 22
  misc_feature: MA Experiment 20000328 PARAMETER Experiment Name: At_42deg_Heat_Sub_P Parameter: Timepoint (hr) Value: 6
  misc_feature: MA Experiment 20000328 PARAMETER Experiment Name: At_42deg_Heat_Sub_P Parameter: Tissue Value: Aerial
  misc_feature: MA Experiment ID: 20000355 Result: Up-regulated in Transcription
  misc_feature: MA Experiment 20000355 PARAMETER Experiment Name: At_Siliques_Sub_P Parameter: Age (day) Value: 21
  misc_feature: MA Experiment 20000355 PARAMETER Experiment Name: At_Siliques_Sub_P Parameter: Organism Value: A. thaliana
  misc_feature: MA Experiment 20000355 PARAMETER Experiment Name: At_Siliques_Sub_P Parameter: Plant Line Value: WS
  misc_feature: MA Experiment 20000355 PARAMETER Experiment Name: At_Siliques_Sub_P Parameter: Tissue Value: Less Than 5mm Siliques vs. Whole Plant
tacataattattcattacaatctattagtaactcaaatgggtttccctcaaaaattgttctttcttacatagtttttaatcggtggaggtagaatcaaagtgacaccaatatttacaagaaacaccaacgcaactatccccaaggaaaaactcactacaccactgaacttcacattgcaatgctcactagaccagaacatagcaacccagacgtgtcctgcaagcaacccggagaaatcacaacctagtaaggacgagccagagacttgtccagactacttcaggtggatccacaaggatcttgaagcatggcgtgagactggaatcactcgagagacgttagagagagcaagtgataaagctcacttccggctgataataaaaggaggaagagtgtatgtgcatcaatacaagaaatcttttcagacaagagatgttttcactatatggggaatagtacagctgctaaggatgtatcctggtcaagtccctgatcttgagcttctcttcatgtgccatgactcacctgaaatctggagaagagactataggccaagaccaggagtcaatgtgacgtggccacctcctccactcttccactattgtggacattccggtgctttcgacattgtcttccctgactggagcttttggggctggccggagattaacataaaggagtggaataaacagtcggagttgataagtgaagggataaagaaggtgaagtgggaagagagagagccttacgcatattggaaggggaatcctggagttgccatggtcagaagagacctcatgcattgtcatgaccctatggttcatctctatcgccaggattggagcagagagggcaggattgggtataggacatcaaacctagaagatcaatgcacccacaggtacaagatttatgtagaaggaagggcttggtcagtgagtgagaagtatatattagcttgtgacagcatgactcttcttgtgaagccattttactttgacttcttcactagaagcttagttccaatggagcattattggcccataagacctcaagaaaaatgtagtgacattgtctttgctgtccattggggcaacaacaataccaaaaaggccagagctatagggagaaatggaagtgggtatgtgcgaaagaatctaaagatgaagtatgtgtatgattacatgttgcatctactgcaaagctatgggaagttgatgaagatgaatgtagaagtgcctcaaggagccaaggaagtgtgtccggagacaatggcttgtccaatcaatggaggccgaatgagacaatctatggatgactcattggttatgtctccgagcgttaaggctacttgtgagatgcctccaccttttgaagaagatgagctcaaaaagtttcttgagaagaaagaaagtgttgagaaagaagttgagaagtggactaatgagtattggcaggaacagaagaagattyttaaacattgagctattataaaaaacaaaattaattatgtactaatacaaatttgatgaaaataaattggatcatatgaaggcccawgaaatgcccaattttcaggttcccatgtaaacttctacacaatgtactgaatttaagctgtagaatcagaattgcaagcaaattcccc

SEQ ID NO: 107455 - protein, 337 aa, Arabidopsis thaliana
  peptide (1)..(337): Ceres Seq. ID no. 13650285
  misc_feature (1)..(329): Pfam Name: Arabidopsis thaliana protein of unknown function Pfam Description: Arabidopsis thaliana protein of unknown
  misc_feature (1)..(106): Homolog of NCBI NO: 15225901 NR Description: expressed protein [Arabidopsis thaliana]
  misc_feature (206)..(337): Homolog of NCBI NO: 15225901 NR Description: expressed protein [Arabidopsis thaliana]
  misc_feature (1)..(337): Homolog of NCBI NO: 30267795 NR Description: hypothetical protein [Arabidopsis thaliana]
  misc_feature (1)..(333): Homolog of NCBI NO: 15233074 NR Description: hypothetical protein [Arabidopsis thaliana]
  misc_feature (1)..(328): Homolog of NCBI NO: 15233072 NR Description: hypothetical protein [Arabidopsis thaliana]
  misc_feature (1)..(336): Homolog of NCBI NO: 7486461 NR Description: hypothetical protein At2g45830 [imported] - thaliana >gi|3386611|gb|AAC28541.1| unknown protein [Arabidopsis
  misc_feature (1)..(333): Homolog of NCBI NO: 15229061 NR Description: expressed protein [Arabidopsis thaliana]
  misc_feature (1)..(333): Homolog of NCBI NO: 15237842 NR Description: expressed protein [Arabidopsis thaliana] contains similarity to unknown
  misc_feature (1)..(329): Homolog of NCBI NO: 15233070 NR Description: expressed protein [Arabidopsis thaliana]
  misc_feature (1)..(330): Homolog of NCBI NO: 15222413 NR Description: expressed protein [Arabidopsis thaliana]
  misc_feature (335)..(335): Xaa is any aa, unknown or other
MYPGQVPDLELLFMCHDSPEIWRRDYRPRPGVNVTWPPPPLFHYCGHSGAFDIVFPDWSFWGWPEINIKEWNKQSELISEGIKKVKWEEREPYAYWKGNPGVAMVRRDLMHCHDPMVHLYRQDWSREGRIGYRTSNLEDQCTHRYKIYVEGRAWSVSEKYILACDSMTLLVKPFYFDFFTRSLVPMEHYWPIRPQEKCSDIVFAVHWGNNNTKKARAIGRNGSGYVRKNLKMKYVYDYMLHLLQSYGKLMKMNVEVPQGAKEVCPETMACPINGGRMRQSMDDSLVMSPSVKATCEMPPPFEEDELKKFLEKKESVEKEVEKWTNEYWQEQKKIXKH

SEQ ID NO: 107456 - protein, 324 aa, Arabidopsis thaliana
  peptide (1)..(324): Ceres Seq. ID no. 13650286
  misc_feature (1)..(316): Pfam Name: Arabidopsis thaliana protein of unknown function Pfam Description: Arabidopsis thaliana protein of unknown
  misc_feature (1)..(93): Homolog of NCBI NO: 15225901 NR Description: expressed protein [Arabidopsis thaliana]
  misc_feature (193)..(324): Homolog of NCBI NO: 15225901 NR Description: expressed protein [Arabidopsis thaliana]
  misc_feature (1)..(324): Homolog of NCBI NO: 30267795 NR Description: hypothetical protein [Arabidopsis thaliana]
  misc_feature (1)..(320): Homolog of NCBI NO: 15233074 NR Description: hypothetical protein [Arabidopsis thaliana]
  misc_feature (1)..(315): Homolog of NCBI NO: 15233072 NR Description: hypothetical protein [Arabidopsis thaliana]
  misc_feature (1)..(323): Homolog of NCBI NO: 7486461 NR Description: hypothetical protein At2g45830 [imported] - thaliana >gi|3386611|gb|AAC28541.1| unknown protein [Arabidopsis
  misc_feature (1)..(320): Homolog of NCBI NO: 15229061 NR Description: expressed protein [Arabidopsis thaliana]
  misc_feature (1)..(320): Homolog of NCBI NO: 15237842 NR Description: expressed protein [Arabidopsis thaliana] contains similarity to unknown
  misc_feature (1)..(316): Homolog of NCBI NO: 15233070 NR Description: expressed protein [Arabidopsis thaliana]
  misc_feature (1)..(317): Homolog of NCBI NO: 15222413 NR Description: expressed protein [Arabidopsis thaliana]
  misc_feature (322)..(322): Xaa is any aa, unknown or other
MCHDSPEIWRRDYRPRPGVNVTWPPPPLFHYCGHSGAFDIVFPDWSFWGWPEINIKEWNKQSELISEGIKKVKWEEREPYAYWKGNPGVAMVRRDLMHCHDPMVHLYRQDWSREGRIGYRTSNLEDQCTHRYKIYVEGRAWSVSEKYILACDSMTLLVKPFYFDFFTRSLVPMEHYWPIRPQEKCSDIVFAVHWGNNNTKKARAIGRNGSGYVRKNLKMKYVYDYMLHLLQSYGKLMKMNVEVPQGAKEVCPETMACPINGGRMRQSMDDSLVMSPSVKATCEMPPPFEEDELKKFLEKKESVEKEVEKWTNEYWQEQKKIXKH

SEQ ID NO: 107457 - protein, 234 aa, Arabidopsis thaliana
  peptide (1)..(234): Ceres Seq. ID no. 13650287
  misc_feature (1)..(226): Pfam Name: Arabidopsis thaliana protein of unknown function Pfam Description: Arabidopsis thaliana protein of unknown
  misc_feature (103)..(234): Homolog of NCBI NO: 15225901 NR Description: expressed protein [Arabidopsis thaliana]
  misc_feature (1)..(234): Homolog of NCBI NO: 30267795 NR Description: hypothetical protein [Arabidopsis thaliana]
  misc_feature (1)..(230): Homolog of NCBI NO: 15233074 NR Description: hypothetical protein [Arabidopsis thaliana]
  misc_feature (1)..(225): Homolog of NCBI NO: 15233072 NR Description: hypothetical protein [Arabidopsis thaliana]
  misc_feature (1)..(233): Homolog of NCBI NO: 7486461 NR Description: hypothetical protein At2g45830 [imported] - thaliana >gi|3386611|gb|AAC28541.1| unknown protein [Arabidopsis
  misc_feature (1)..(230): Homolog of NCBI NO: 15229061 NR Description: expressed protein [Arabidopsis thaliana]
  misc_feature (1)..(230): Homolog of NCBI NO: 15237842 NR Description: expressed protein [Arabidopsis thaliana] contains similarity to unknown
  misc_feature (1)..(226): Homolog of NCBI NO: 15233070 NR Description: expressed protein [Arabidopsis thaliana]
  misc_feature (1)..(227): Homolog of NCBI NO: 15222413 NR Description: expressed protein [Arabidopsis thaliana]
  misc_feature (1)..(22): Homolog of NCBI NO: 25404907 NR Description: protein F2K11.20 [imported] - Arabidopsis >gi|6633846|gb|AAF19705.1|AC008047_12 F2K11.20 [Arabidopsis
  misc_feature (232)..(232): Xaa is any aa, unknown or other
MVRRDLMHCHDPMVHLYRQDWSREGRIGYRTSNLEDQCTHRYKIYVEGRAWSVSEKYILACDSMTLLVKPFYFDFFTRSLVPMEHYWPIRPQEKCSDIVFAVHWGNNNTKKARAIGRNGSGYVRKNLKMKYVYDYMLHLLQSYGKLMKMNVEVPQGAKEVCPETMACPINGGRMRQSMDDSLVMSPSVKATCEMPPPFEEDELKKFLEKKESVEKEVEKWTNEYWQEQKKIXKH

SEQ ID NO: 107458 - DNA, 1597 bp, Arabidopsis thaliana
  misc_feature (1)..(1597): Ceres Seq. ID no. 13650290
  misc_feature: MA Experiment ID: 20000355 Result: Up-regulated in Transcription
  misc_feature: MA Experiment 20000355 PARAMETER Experiment Name: At_Siliques_Sub_P Parameter: Age (day) Value: 21
  misc_feature: MA Experiment 20000355 PARAMETER Experiment Name: At_Siliques_Sub_P Parameter: Organism Value: A. thaliana
  misc_feature: MA Experiment 20000355 PARAMETER Experiment Name: At_Siliques_Sub_P Parameter: Plant Line Value: WS
  misc_feature: MA Experiment 20000355 PARAMETER Experiment Name: At_Siliques_Sub_P Parameter: Tissue Value: Less Than 5mm Siliques vs. Whole Plant
  misc_feature: MA Experiment ID: 20000440 Result: Up-regulated in Transcription
  misc_feature: MA Experiment 20000440 PARAMETER Experiment Name: At_Closed-Flower__Sub_P Parameter: Tissue Value: Closed Flower vs. Whole Plant
atgcgacccaagaattattctcagatggagaaacccatctccatcacgacggggaagtttcggaccaacaacaacaacaatcataacaatgtctggttcgttgttccactcttctttatcctctgtttcgttctcctctgtttcgactactctgctctcttcaccgacacagacgaaaccgctttctcaattcccgacgttacccagaaatcaacatcctctgaattcacgaaagatgacaacttttctcgatttcccgacgacccatctcctgattcttcctgctccggtcggtatatttacgttcatgaacttccgtatagattcaatggtgatttgcttgataattgctttaagattactagaggaaccgagaaagatatttgtccttacatcgaaaactatggttttggtcctgtcattaagaattacgagaatgtgttgttgaaacaaagttggtttacgaccaatcagttcatgctcgaggtgatattccacaacaagatgataaattacagatgtttgactaatgattcgtcactagcgtctgcggttttcgtgccgttttacgcaggtcttgatatgagtaggtatctttggggtttcaacattacggttagagattcttcgtctcatgagctgatggattggcttgtggtacagaaagagtggggtcgaatgtctggtagagaccatttcttggtttcaggaaggattgcttgggatttcaggagacagactgataacgaatctgattggggaagcaagcttcggttcttacccgagtcgcggaacatgtcgatgttgtccatcgaatcgagttcttggaagaatgattacgctattccgtatccgacttgtttccatccaagatcagtggatgagattgtggagtggcaggagctaatgaggtctcgaaaacgcgagtatctattcacctttgcgggtgctccaaggcctgaatataaagactcggttcgagggaagattatagatgagtgtttggagtcaaagaagcaatgttacttgctagactgtaactatgggaatgtgaattgtgacaaccctgtcaatgtgatgaaggttttcaggaactcggtgttttgtcttcagccaccgggtgattcttacactagaaggtcaatgtttgattcaatattggcaggctgcattccggtgttcttccatccagggacagcgtacgctcaatacaagtggcatttgcccaagaatcactcgagttactcggtttatctaccggttaaggatgtgaaggagtggaatatcaaaatcaaggagaggttgattgagattccagaggaaagagtggtgaggttgagagaagaggttataaggttgataccgaaggttgtctacgctgatccgaagtacggatcggatgggagtgaagatgcatttgagttggctgtgaagggaatgttggagaggattgaagaagtgagagagatgatgagacaagggaaagatggtagtgatgggtttgatgatagagatgattataagtatactttttctccatatgaagaacctcaagttttggcttaaagtggaaaatatgtcattatagtggcctttt

SEQ ID NO: 107459 - protein, 521 aa, Arabidopsis thaliana
  peptide (1)..(521): Ceres Seq. ID no. 13650291
  misc_feature (100)..(450): Pfam Name: Exostosin family Pfam Description: Exostosin family
  misc_feature (1)..(521): Homolog of NCBI NO: 29824391 NR Description: unknown protein [Arabidopsis thaliana]
  misc_feature (9)..(374): Homolog of NCBI NO: 15236381 NR Description: hypothetical protein [Arabidopsis thaliana]
  misc_feature (220)..(521): Homolog of NCBI NO: 15236381 NR Description: hypothetical protein [Arabidopsis thaliana]
  misc_feature (60)..(518): Homolog of NCBI NO: 25411977 NR Description: hypothetical protein At2g20370 [imported] - thaliana >gi|4512698|gb|AAD21751.1| unknown protein [Arabidopsis
  misc_feature (60)..(518): Homolog of NCBI NO: 30680972 NR Description: expressed protein [Arabidopsis thaliana]
  misc_feature (95)..(509): Homolog of NCBI NO: 27497206 NR Description: Unknown protein [Oryza sativa (japonica
  misc_feature (86)..(509): Homolog of NCBI NO: 15227020 NR Description: hypothetical protein [Arabidopsis thaliana]
  misc_feature (94)..(508): Homolog of NCBI NO: 15225735 NR Description: hypothetical protein [Arabidopsis thaliana]
  misc_feature (23)..(488): Homolog of NCBI NO: 15225165 NR Description: Exostosin family [Arabidopsis thaliana]
  misc_feature (95)..(488): Homolog of NCBI NO: 27497203 NR Description: Hypothetical protein [Oryza sativa (japonica
MRPKNYSQMEKPISITTGKFRTNNNNNHNNVWFVVPLFFILCFVLLCFDYSALFTDTDETAFSIPDVTQKSTSSEFTKDDNFSRFPDDPSPDSSCSGRYIYVHELPYRFNGDLLDNCFKITRGTEKDICPYIENYGFGPVIKNYENVLLKQSWFTTNQFMLEVIFHNKMINYRCLTNDSSLASAVFVPFYAGLDMSRYLWGFNITVRDSSSHELMDWLVVQKEWGRMSGRDHFLVSGRIAWDFRRQTDNESDWGSKLRFLPESRNMSMLSIESSSWKNDYAIPYPTCFHPRSVDEIVEWQELMRSRKREYLFTFAGAPRPEYKDSVRGKIIDECLESKKQCYLLDCNYGNVNCDNPVNVMKVFRNSVFCLQPPGDSYTRRSMFDSILAGCIPVFFHPGTAYAQYKWHLPKNHSSYSVYLPVKDVKEWNIKIKERLIEIPEERVVRLREEVIRLIPKVVYADPKYGSDGSEDAFELAVKGMLERIEEVREMMRQGKDGSDGFDDRDDYKYTFSPYEEPQVLA

SEQ ID NO: 107460 - protein, 513 aa, Arabidopsis thaliana
  peptide (1)..(513): Ceres Seq. ID no. 13650292
  misc_feature (92)..(442): Pfam Name: Exostosin family Pfam Description: Exostosin family
  misc_feature (1)..(513): Homolog of NCBI NO: 29824391 NR Description: unknown protein [Arabidopsis thaliana]
  misc_feature (1)..(366): Homolog of NCBI NO: 15236381 NR Description: hypothetical protein [Arabidopsis thaliana]
  misc_feature (212)..(513): Homolog of NCBI NO: 15236381 NR Description: hypothetical protein [Arabidopsis thaliana]
  misc_feature (52)..(510): Homolog of NCBI NO: 25411977 NR Description: hypothetical protein At2g20370 [imported] - thaliana >gi|4512698|gb|AAD21751.1| unknown protein [Arabidopsis
  misc_feature (52)..(510): Homolog of NCBI NO: 30680972 NR Description: expressed protein [Arabidopsis thaliana]
  misc_feature (87)..(501): Homolog of NCBI NO: 27497206 NR Description: Unknown protein [Oryza sativa (japonica
  misc_feature (78)..(501): Homolog of NCBI NO: 15227020 NR Description: hypothetical protein [Arabidopsis thaliana]
  misc_feature (86)..(500): Homolog of NCBI NO: 15225735 NR Description: hypothetical protein [Arabidopsis thaliana]
  misc_feature (15)..(480): Homolog of NCBI NO: 15225165 NR Description: Exostosin family [Arabidopsis thaliana]
  misc_feature (87)..(480): Homolog of NCBI NO: 27497203 NR Description: Hypothetical protein [Oryza sativa (japonica
MEKPISITTGKFRTNNNNNHNNVWFVVPLFFILCFVLLCFDYSALFTDTDETAFSIPDVTQKSTSSEFTKDDNFSRFPDDPSPDSSCSGRYIYVHELPYRFNGDLLDNCFKITRGTEKDICPYIENYGFGPVIKNYENVLLKQSWFTTNQFMLEVIFHNKMINYRCLTNDSSLASAVFVPFYAGLDMSRYLWGFNITVRDSSSHELMDWLVVQKEWGRMSGRDHFLVSGRIAWDFRRQTDNESDWGSKLRFLPESRNMSMLSIESSSWKNDYAIPYPTCFHPRSVDEIVEWQELMRSRKREYLFTFAGAPRPEYKDSVRGKIIDECLESKKQCYLLDCNYGNVNCDNPVNVMKVFRNSVFCLQPPGDSYTRRSMFDSILAGCIPVFFHPGTAYAQYKWHLPKNHSSYSVYLPVKDVKEWNIKIKERLIEIPEERVVRLREEVIRLIPKVVYADPKYGSDGSEDAFELAVKGMLERIEEVREMMRQGKDGSDGFDDRDDYKYTFSPYEEPQVLA

SEQ ID NO: 107461 - protein, 362 aa, Arabidopsis thaliana
  peptide (1)..(362): Ceres Seq. ID no. 13650293
  misc_feature (1)..(291): Pfam Name: Exostosin family Pfam Description: Exostosin family
  misc_feature (1)..(362): Homolog of NCBI NO: 29824391 NR Description: unknown protein [Arabidopsis thaliana]
  misc_feature (1)..(215): Homolog of NCBI NO: 15236381 NR Description: hypothetical protein [Arabidopsis thaliana]
  misc_feature (61)..(362): Homolog of NCBI NO: 15236381 NR Description: hypothetical protein [Arabidopsis thaliana]
  misc_feature (1)..(359): Homolog of NCBI NO: 25411977 NR Description: hypothetical protein At2g20370 [imported] - thaliana >gi|4512698|gb|AAD21751.1| unknown protein [Arabidopsis
  misc_feature (1)..(359): Homolog of NCBI NO: 30680972 NR Description: expressed protein [Arabidopsis thaliana]
  misc_feature (1)..(350): Homolog of NCBI NO: 27497206 NR Description: Unknown protein [Oryza sativa (japonica
  misc_feature (1)..(350): Homolog of NCBI NO: 15227020 NR Description: hypothetical protein [Arabidopsis thaliana]
  misc_feature (1)..(349): Homolog of NCBI NO: 15225735 NR Description: hypothetical protein [Arabidopsis thaliana]
  misc_feature (1)..(329): Homolog of NCBI NO: 15225165 NR Description: Exostosin family [Arabidopsis thaliana]
  misc_feature (1)..(329): Homolog of NCBI NO: 27497203 NR Description: Hypothetical protein [Oryza sativa (japonica
MLEVIFHNKMINYRCLTNDSSLASAVFVPFYAGLDMSRYLWGFNITVRDSSSHELMDWLVVQKEWGRMSGRDHFLVSGRIAWDFRRQTDNESDWGSKLRFLPESRNMSMLSIESSSWKNDYAIPYPTCFHPRSVDEIVEWQELMRSRKREYLFTFAGAPRPEYKDSVRGKIIDECLESKKQCYLLDCNYGNVNCDNPVNVMKVFRNSVFCLQPPGDSYTRRSMFDSILAGCIPVFFHPGTAYAQYKWHLPKNHSSYSVYLPVKDVKEWNIKIKERLIEIPEERVVRLREEVIRLIPKVVYADPKYGSDGSEDAFELAVKGMLERIEEVREMMRQGKDGSDGFDDRDDYKYTFSPYEEPQVLA

SEQ ID NO: 107462 - DNA, 1248 bp, Arabidopsis thaliana
  misc_feature (1)..(1248): Ceres Seq. ID no. 13650328
  misc_feature: MA Experiment ID: 20000314 Result: Up-regulated in Transcription
  misc_feature: MA Experiment 20000314 PARAMETER Experiment Name: At_14day_Shoots-Roots_Sub_P Parameter: Age (day) Value: 14
  misc_feature: MA Experiment 20000314 PARAMETER Experiment Name: At_14day_Shoots-Roots_Sub_P Parameter: Organism Value: A. thaliana
  misc_feature: MA Experiment 20000314 PARAMETER Experiment Name: At_14day_Shoots-Roots_Sub_P Parameter: Plant Line Value: WS
  misc_feature: MA Experiment 20000314 PARAMETER Experiment Name: At_14day_Shoots-Roots_Sub_P Parameter: Tissue Value: Roots vs. Whole Plant
  misc_feature: MA Experiment ID: 20000352 Result: Down-regulated in Transcription
  misc_feature: MA Experiment 20000352 PARAMETER Experiment Name: At_Drought_Sub_P Parameter: Age (day) Value: 7
  misc_feature: MA Experiment 20000352 PARAMETER Experiment Name: At_Drought_Sub_P Parameter: Organism Value: A. thaliana
  misc_feature: MA Experiment 20000352 PARAMETER Experiment Name: At_Drought_Sub_P Parameter: Plant Line Value: WS
  misc_feature: MA Experiment 20000352 PARAMETER Experiment Name: At_Drought_Sub_P Parameter: Timepoint (hr) Value: 6
  misc_feature: MA Experiment 20000352 PARAMETER Experiment Name: At_Drought_Sub_P Parameter: Tissue Value: Whole Plant
  misc_feature: MA Experiment 20000352 PARAMETER Experiment Name: At_Drought_Sub_P Parameter: Treatment Value: Drought vs. No Drought
gttcacttaacaaaacaagaaccaaaaaaaatggatgagaaagatattctaaggaacttgagggaagaagaagaagaagaagaagaaaatcaaagcgaagaaaccaaaattttgatctcttcacttccttgggagatagattaccttgggaacaagcttttcaagtaccaaggatattggtactacgaagacgttctccaatcaatccccaatatacactcgagttttcagccacaagaaaccgatatagttgttgcttctttctacaaatcgggcacgacttggctcaaagcactcacatttgcactcgttcaacgatcaaaacactcgttagaagatcatcatcatcctctgctatctcataaccctcatgagatagtaccgtacctcgagctagatctgtatctcaacagctcaaaaccggacttgaccaagttcttatcatcatcatcatcatcatcatctccgagattgttctcaactcatatgtccttggacgcgcttaaactacccttgaagaagtctccttgcaaggtagtgtacgtgtgcaggaacgtgaaagacgtgttggtgtcactttggtgtttcctcaatgccaacaagggagtagaatggggagattttagccaaaatgaaaagatcattcgagcggagaattattctttcaaggctatatttgagtcattctgcaacggagttaccctacacggtcccttttgggaccatgcacagagctattggcgaggcagcttggaagatcctaagcattttcttttcatgaggtacgaggagttgaaagcggagcctcgtactcaggtcaagagacttgcagagttcttggattgtccattcactaaggaagaggaagatagcggaactgtagacaagatcttggaactttgctctctaagtaatttaagcagtttggagatcaacaaaactggatccttgggtggagtagattacaagacttatttccgtaaaggacaagttggtgactggaagagttatatgacctctgaaatggtaaataaaatcgatatgatcgtcgaggagaaactcaaaggttccggtttgaaattctagaattatgcgtgtgctttgtgaagaactgcagaaaaagtgttcttgaatgcgttatttaataataaaagttacattgtcatatatataactttgatgtatcattacaactgatgtgtggtttttgttctctttgatgttgcaataaaaaccttctttacttct

SEQ ID NO: 107463 - protein, 361 aa, Arabidopsis thaliana
  peptide (1)..(361): Ceres Seq. ID no. 13650329
  misc_feature (80)..(358): Pfam Name: Sulfotransferase domain Pfam Description: Sulfotransferase domain
  misc_feature (11)..(361): Homolog of NCBI NO: 30683286 NR Description: sulfotransferase family [Arabidopsis thaliana] Similar to steroid sulfotransferases [Arabidopsis thaliana]
  misc_feature (26)..(361): Homolog of NCBI NO: 15226028 NR Description: sulfotransferase family [Arabidopsis thaliana]
  misc_feature (28)..(361): Homolog of NCBI NO: 15239947 NR Description: sulfotransferase family [Arabidopsis thaliana]
  misc_feature (139)..(355): Homolog of NCBI NO: 15236162 NR Description: sulfotransferase family [Arabidopsis thaliana]
  misc_feature (28)..(127): Homolog of NCBI NO: 15236162 NR Description: sulfotransferase family [Arabidopsis thaliana]
  misc_feature (226)..(361): Homolog of NCBI NO: 15225893 NR Description: sulfotransferase family [Arabidopsis thaliana] putative flavonol sulfotransferase [Arabidopsis thaliana]
  misc_feature (11)..(124): Homolog of NCBI NO: 15225893 NR Description: sulfotransferase family [Arabidopsis thaliana] putative flavonol sulfotransferase [Arabidopsis thaliana]
  misc_feature (153)..(208): Homolog of NCBI NO: 15225893 NR Description: sulfotransferase family [Arabidopsis thaliana] putative flavonol sulfotransferase [Arabidopsis thaliana]
  misc_feature (153)..(360): Homolog of NCBI NO: 15222843 NR Description: sulfotransferase family [Arabidopsis thaliana]
  misc_feature (153)..(360): Homolog of NCBI NO: 21553545 NR Description: steroid sulfotransferase, putative [Arabidopsis
VHLTKQEPKKMDEKDILRNLREEEEEEEENQSEETKILISSLPWEIDYLGNKLFKYQGYWYYEDVLQSIPNIHSSFQPQETDIVVASFYKSGTTWLKALTFALVQRSKHSLEDHHHPLLSHNPHEIVPYLELDLYLNSSKPDLTKFLSSSSSSSSPRLFSTHMSLDALKLPLKKSPCKVVYVCRNVKDVLVSLWCFLNANKGVEWGDFSQNEKIIRAENYSFKAIFESFCNGVTLHGPFWDHAQSYWRGSLEDPKHFLFMRYEELKAEPRTQVKRLAEFLDCPFTKEEEDSGTVDKILELCSLSNLSSLEINKTGSLGGVDYKTYFRKGQVGDWKSYMTSEMVNKIDMIVEEKLKGSGLKF

SEQ ID NO: 107464 - protein, 351 aa, Arabidopsis thaliana
  peptide (1)..(351): Ceres Seq. ID no. 13650330
  misc_feature (70)..(348): Pfam Name: Sulfotransferase domain Pfam Description: Sulfotransferase domain
  misc_feature (1)..(351): Homolog of NCBI NO: 30683286 NR Description: sulfotransferase family [Arabidopsis thaliana] Similar to steroid sulfotransferases [Arabidopsis thaliana]
  misc_feature (16)..(351): Homolog of NCBI NO: 15226028 NR Description: sulfotransferase family [Arabidopsis thaliana]
  misc_feature (18)..(351): Homolog of NCBI NO: 15239947 NR Description: sulfotransferase family [Arabidopsis thaliana]
  misc_feature (129)..(345): Homolog of NCBI NO: 15236162 NR Description: sulfotransferase family [Arabidopsis thaliana]
  misc_feature (18)..(117): Homolog of NCBI NO: 15236162 NR Description: sulfotransferase family [Arabidopsis thaliana]
  misc_feature (216)..(351): Homolog of NCBI NO: 15225893 NR Description: sulfotransferase family [Arabidopsis thaliana] putative flavonol sulfotransferase [Arabidopsis thaliana]
  misc_feature (1)..(114): Homolog of NCBI NO: 15225893 NR Description: sulfotransferase family [Arabidopsis thaliana] putative flavonol sulfotransferase [Arabidopsis thaliana]
  misc_feature (143)..(198): Homolog of NCBI NO: 15225893 NR Description: sulfotransferase family [Arabidopsis thaliana] putative flavonol sulfotransferase [Arabidopsis thaliana]
  misc_feature (143)..(350): Homolog of NCBI NO: 15222843 NR Description: sulfotransferase family [Arabidopsis thaliana]
  misc_feature (143)..(350): Homolog of NCBI NO: 21553545 NR Description: steroid sulfotransferase, putative [Arabidopsis
MDEKDILRNLREEEEEEEENQSEETKILISSLPWEIDYLGNKLFKYQGYWYYEDVLQSIPNIHSSFQPQETDIVVASFYKSGTTWLKALTFALVQRSKHSLEDHHHPLLSHNPHEIVPYLELDLYLNSSKPDLTKFLSSSSSSSSPRLFSTHMSLDALKLPLKKSPCKVVYVCRNVKDVLVSLWCFLNANKGVEWGDFSQNEKIIRAENYSFKAIFESFCNGVTLHGPFWDHAQSYWRGSLEDPKHFLFMRYEELKAEPRTQVKRLAEFLDCPFTKEEEDSGTVDKILELCSLSNLSSLEINKTGSLGGVDYKTYFRKGQVGDWKSYMTSEMVNKIDMIVEEKLKGSGLKF

SEQ ID NO: 107465 - protein, 199 aa, Arabidopsis thaliana
  peptide (1)..(199): Ceres Seq. ID no. 13650331
  misc_feature (1)..(196): Pfam Name: Sulfotransferase domain Pfam Description: Sulfotransferase domain
  misc_feature (1)..(199): Homolog of NCBI NO: 30683286 NR Description: sulfotransferase family [Arabidopsis thaliana] Similar to steroid sulfotransferases [Arabidopsis thaliana]
  misc_feature (1)..(199): Homolog of NCBI NO: 15226028 NR Description: sulfotransferase family [Arabidopsis thaliana]
  misc_feature (1)..(199): Homolog of NCBI NO: 15239947 NR Description: sulfotransferase family [Arabidopsis thaliana]
  misc_feature (1)..(193): Homolog of NCBI NO: 15236162 NR Description: sulfotransferase family [Arabidopsis thaliana]
  misc_feature (64)..(199): Homolog of NCBI NO: 15225893 NR Description: sulfotransferase family [Arabidopsis thaliana] putative flavonol sulfotransferase [Arabidopsis thaliana]
  misc_feature (1)..(46): Homolog of NCBI NO: 15225893 NR Description: sulfotransferase family [Arabidopsis thaliana] putative flavonol sulfotransferase [Arabidopsis thaliana]
  misc_feature (1)..(198): Homolog of NCBI NO: 15222843 NR Description: sulfotransferase family [Arabidopsis thaliana]
  misc_feature (1)..(198): Homolog of NCBI NO: 21553545 NR Description: steroid sulfotransferase, putative [Arabidopsis
  misc_feature (1)..(40): Homolog of NCBI NO: 15222843 NR Description: sulfotransferase family [Arabidopsis thaliana]
  misc_feature (1)..(40): Homolog of NCBI NO: 21553545 NR Description: steroid sulfotransferase, putative [Arabidopsis
MSLDALKLPLKKSPCKVVYVCRNVKDVLVSLWCFLNANKGVEWGDFSQNEKIIRAENYSFKAIFESFCNGVTLHGPFWDHAQSYWRGSLEDPKHFLFMRYEELKAEPRTQVKRLAEFLDCPFTKEEEDSGTVDKILELCSLSNLSSLEINKTGSLGGVDYKTYFRKGQVGDWKSYMTSEMVNKIDMIVEEKLKGSGLKF

SEQ ID NO: 107466 - DNA, 2224 bp, Arabidopsis thaliana
  misc_feature (1)..(2224): Ceres Seq. ID no. 13650348
  misc_feature: MA Experiment ID: 20000171 Result: Down-regulated in Transcription
  misc_feature: MA Experiment 20000171 PARAMETER Experiment Name: At_42deg_Heat_P Parameter: Age (day) Value: 14
  misc_feature: MA Experiment 20000171 PARAMETER Experiment Name: At_42deg_Heat_P Parameter: Organism Value: A. thaliana
  misc_feature: MA Experiment 20000171 PARAMETER Experiment Name: At_42deg_Heat_P Parameter: Plant Line Value: WS
  misc_feature: MA Experiment 20000171 PARAMETER Experiment Name: At_42deg_Heat_P Parameter: Temperature (deg C) Value: 42 vs. 22
  misc_feature: MA Experiment 20000171 PARAMETER Experiment Name: At_42deg_Heat_P Parameter: Timepoint (hr) Value: 1
  misc_feature: MA Experiment 20000171 PARAMETER Experiment Name: At_42deg_Heat_P Parameter: Tissue Value: Aerial
  misc_feature: MA Experiment ID: 20000173 Result: Down-regulated in Transcription
  misc_feature: MA Experiment 20000173 PARAMETER Experiment Name: At_42deg_Heat_P Parameter: Age (day) Value: 14
  misc_feature: MA Experiment 20000173 PARAMETER Experiment Name: At_42deg_Heat_P Parameter: Organism Value: A. thaliana
  misc_feature: MA Experiment 20000173 PARAMETER Experiment Name: At_42deg_Heat_P Parameter: Plant Line Value: WS
  misc_feature: MA Experiment 20000173 PARAMETER Experiment Name: At_42deg_Heat_P Parameter: Temperature (deg C) Value: 42 vs. 22
  misc_feature: MA Experiment 20000173 PARAMETER Experiment Name: At_42deg_Heat_P Parameter: Timepoint (hr) Value: 6
  misc_feature: MA Experiment 20000173 PARAMETER Experiment Name: At_42deg_Heat_P Parameter: Tissue Value: Aerial
  misc_feature: MA Experiment ID: 20000184 Result: Down-regulated in Transcription
  misc_feature: MA Experiment 20000184 PARAMETER Experiment Name: At_Shoots__P Parameter: Age (day) Value: 7
  misc_feature: MA Experiment 20000184 PARAMETER Experiment Name: At_Shoots__P Parameter: Tissue Value: Shoots vs. Whole Plant
  misc_feature: MA Experiment ID: 20000227 Result: Down-regulated in Transcription
  misc_feature: MA Experiment 20000227 PARAMETER Experiment Name: At_Root-Tips-vs-Tops_P Parameter: Tissue Value: Root Tips vs. Root Tops
  misc_feature: MA Experiment ID: 20000439 Result: Up-regulated in Transcription
  misc_feature: MA Experiment 20000439 PARAMETER Experiment Name: At_Roots__P Parameter: Age (day) Value: 14 vs. 21
  misc_feature: MA Experiment 20000439 PARAMETER Experiment Name: At_Roots__P Parameter: Organism Value: A. thaliana
  misc_feature: MA Experiment 20000439 PARAMETER Experiment Name: At_Roots__P Parameter: Tissue Value: Roots vs. Whole Plant
  misc_feature: MA Experiment ID: 20001558 Result: Down-regulated in Transcription
  misc_feature: MA Experiment 20001558 PARAMETER Experiment Name: At_Drought_Soil_Dry_P Parameter: Age (day) Value: 27
  misc_feature: MA Experiment 20001558 PARAMETER Experiment Name: At_Drought_Soil_Dry_P Parameter: Organism Value: A. thaliana
  misc_feature: MA Experiment 20001558 PARAMETER Experiment Name: At_Drought_Soil_Dry_P Parameter: Plant Line Value: WS
  misc_feature: MA Experiment 20001558 PARAMETER Experiment Name: At_Drought_Soil_Dry_P Parameter: Post Timepoint (hr) Value: 6
  misc_feature: MA Experiment 20001558 PARAMETER Experiment Name: At_Drought_Soil_Dry_P Parameter: Post-Treatment Value: Re-Water vs. No Drought
  misc_feature: MA Experiment 20001558 PARAMETER Experiment Name: At_Drought_Soil_Dry_P Parameter: Timepoint (day) Value: 13
  misc_feature: MA Experiment 20001558 PARAMETER Experiment Name: At_Drought_Soil_Dry_P Parameter: Treatment Value: Drought vs. No Drought
  misc_feature: MA Experiment ID: 20001560 Result: Down-regulated in Transcription
  misc_feature: MA Experiment 20001560 PARAMETER Experiment Name: At_Drought_Soil_Dry_P Parameter: Age (day) Value: 28
  misc_feature: MA Experiment 20001560 PARAMETER Experiment Name: At_Drought_Soil_Dry_P Parameter: Organism Value: A. thaliana
  misc_feature: MA Experiment 20001560 PARAMETER Experiment Name: At_Drought_Soil_Dry_P Parameter: Plant Line Value: WS
  misc_feature: MA Experiment 20001560 PARAMETER Experiment Name: At_Drought_Soil_Dry_P Parameter: Post Timepoint (hr) Value: None
  misc_feature: MA Experiment 20001560 PARAMETER Experiment Name: At_Drought_Soil_Dry_P Parameter: Post-Treatment Value: None
  misc_feature: MA Experiment 20001560 PARAMETER Experiment Name: At_Drought_Soil_Dry_P Parameter: Timepoint (day) Value: 14
  misc_feature: MA Experiment 20001560 PARAMETER Experiment Name: At_Drought_Soil_Dry_P Parameter: Treatment Value: Drought vs. No Drought
  misc_feature: Pfam Name: U-box Pfam Description: U-box domain
catcgctgtctggaacagacaaagcctttaacacaaactcaaaaccagagtctactacattagaaattttcacaattacaattctccggcgaatccaacgtttccggcacaattctccactatattgacggcgatatacccttatacggcgtttcgtggttacaatttgtaacctaactactcatcgtctacccaattcaaaccagtcaggtttccgtacagtagtaaaatcacaattcctctctgtaacaacgatctcaacgacttcaacgagacacgttactattccaatccatttttccgacgccggcaactgaatcagaatcggaaaactctagagacatatggttgattggagtggcgatgcaccggcagggctcgtctccgattacgccttcaaactataacgccgccgtttcaattgcttctgatgtacctactggtttaaccaagtctcctttatctcacgcgattccagtttcgccgatttctgctgcttacccttccggtgatcctattttgatgatgtctgggactcctctcgctagggttcgattatctgaaattttgccttatgaaggagctccttctccggtgtatgcaaaagctgtggaggctttgtctgtgtctttgatgaggtataatgcgtctgtgatcgagatagggagtgaagacactgcactgatgcgatgtggccttgaagctgctcgtttgtattttagaactagaagccttactgtttctggtaaaggcaatcgtggcctctctatgtatagagccggaaggtctgttgaagatttagattcttcacctccatgcatggctgagattttcaggtgtttgggtaaagtagcacgagctgctttatctgcaatagcaaggcatctacgtttaagaagcgatgtttttaaccatatgcttgatgactttccactagctccgaacgaggtttcctcctcggtgctactggcttcctatgctcatgcatcgatacaaaatggaaaacatgcttctggaggtgggaacctatctgctaagattgaagttgagaagggtttgttgacactgttctgctcagatggcactggcattcaggtatgtgacccaaatggtcgttggtacacagcagataatggatgtggggtgggtgatctcttactgattaccggcaaagcgcttagtcatgctactgcaggtctccgtccagctgcctcttacagaactactaccgatcatttgtctgccactgacactcgaggaagggcatcattagcttttaggcttatgccgaaaagtaatgctatattagattgttccccaatagaagcagccggccatgtaattcctcaaagctatgtgccagtatctgttagtcagtttatggataacctcttagccgagaatgacactctagttaatccgcctgtgaaaaccaatgttccacgggatgatgtttgcaaagagccttccttaagaagtgttctctcggatccaatttctggtgcttttcttgaagatgcaatggttgtctcttgtggacattcatttggtggccttatgcttagaagagtccttgaaatgtctagatgtacgctctgcaatacagagatcgagtctgggtctctggttcctaaccatgcacttagagctgccgcttcagctatcaagcaacaggatgataaacgacttttccacaacgcagccatgagaaggcgtagaaaagaaatgagtgatcaaatggatgtggaaaatggagatccagctacggatgatggtatgcatcgagtggtgcattatccatttgctgtaaatgagaaagttcttatcaagggaaaccggcgaactccagaaaagtttgttggaaaagaagcaatcgtgacatctcagtgtctcaatggctggtatctattaaagattgtcgaaagcggagacaatgtacggctgcaataccgatccctaaaaaagatggtgaacgatgacagaggaggaggcctacaggctcaaccggttgagagcaatagcttgtagaatgtaatcatatttaacccttttcttttcttcttattctgtatctctagagctagagagaaaagaaaagataatgtggtttggggttttgagattctgcataaatttaaatcgtttggttagaaaaagaaagtagtggaagactattattgtaaactatattagcctcctaagtattagaggttttgtacagaac

SEQ ID NO: 107467 - protein, 554 aa, Arabidopsis thaliana
  peptide (1)..(554): Ceres Seq. ID no. 13650349
  misc_feature: Pfam Name: U-box Pfam Description: U-box domain
  misc_feature (1)..(554): Homolog of NCBI NO: 30685540 NR Description: expressed protein [Arabidopsis thaliana]
  misc_feature (1)..(379): Homolog of NCBI NO: 11994201 NR Description: gb|AAF35943.1~gene_id:MPN9.14~similar to unknown
  misc_feature (348)..(554): Homolog of NCBI NO: 11994201 NR Description: gb|AAF35943.1~gene_id:MPN9.14~similar to unknown
  misc_feature (1)..(461): Homolog of NCBI NO: 20453175 NR Description: At3g19895 [Arabidopsis thaliana]
  misc_feature (137)..(352): Homolog of NCBI NO: 15230647 NR Description: expressed protein [Arabidopsis thaliana]
  misc_feature (56)..(122): Homolog of NCBI NO: 15230647 NR Description: expressed protein [Arabidopsis thaliana]
  misc_feature (137)..(352): Homolog of NCBI NO: 15795123 NR Description: gb|AAF35943.1~gene_id:MGH6.5~strong similarity to
  misc_feature (56)..(122): Homolog of NCBI NO: 15795123 NR Description: gb|AAF35943.1~gene_id:MGH6.5~strong similarity to
  misc_feature (370)..(551): Homolog of NCBI NO: 28876015 NR Description: hypothetical protein [Oryza sativa (japonica
  misc_feature (150)..(374): Homolog of NCBI NO: 33146537 NR Description: unknown protein [Oryza sativa (japonica
MHRQGSSPITPSNYNAAVSIASDVPTGLTKSPLSHAIPVSPISAAYPSGDPILMMSGTPLARVRLSEILPYEGAPSPVYAKAVEALSVSLMRYNASVIEIGSEDTALMRCGLEAARLYFRTRSLTVSGKGNRGLSMYRAGRSVEDLDSSPPCMAEIFRCLGKVARAALSAIARHLRLRSDVFNHMLDDFPLAPNEVSSSVLLASYAHASIQNGKHASGGGNLSAKIEVEKGLLTLFCSDGTGIQVCDPNGRWYTADNGCGVGDLLLITGKALSHATAGLRPAASYRTTTDHLSATDTRGRASLAFRLMPKSNAILDCSPIEAAGHVIPQSYVPVSVSQFMDNLLAENDTLVNPPVKTNVPRDDVCKEPSLRSVLSDPISGAFLEDAMVVSCGHSFGGLMLRRVLEMSRCTLCNTEIESGSLVPNHALRAAASAIKQQDDKRLFHNAAMRRRRKEMSDQMDVENGDPATDDGMHRVVHYPFAVNEKVLIKGNRRTPEKFVGKEAIVTSQCLNGWYLLKIVESGDNVRLQYRSLKKMVNDDRGGGLQAQPVESNSL

SEQ ID NO: 107468 - protein, 501 aa, Arabidopsis thaliana
  peptide (1)..(501): Ceres Seq. ID no. 13650350
  misc_feature: Pfam Name: U-box Pfam Description: U-box domain
  misc_feature (1)..(501): Homolog of NCBI NO: 30685540 NR Description: expressed protein [Arabidopsis thaliana]
  misc_feature (1)..(326): Homolog of NCBI NO: 11994201 NR Description: gb|AAF35943.1~gene_id:MPN9.14~similar to unknown
  misc_feature (295)..(501): Homolog of NCBI NO: 11994201 NR Description: gb|AAF35943.1~gene_id:MPN9.14~similar to unknown
  misc_feature (1)..(408): Homolog of NCBI NO: 20453175 NR Description: At3g19895 [Arabidopsis thaliana]
  misc_feature (84)..(299): Homolog of NCBI NO: 15230647 NR Description: expressed protein [Arabidopsis thaliana]
  misc_feature (3)..(69): Homolog of NCBI NO: 15230647 NR Description: expressed protein [Arabidopsis thaliana]
  misc_feature (84)..(299): Homolog of NCBI NO: 15795123 NR Description: gb|AAF35943.1~gene_id:MGH6.5~strong similarity to
  misc_feature (3)..(69): Homolog of NCBI NO: 15795123 NR Description: gb|AAF35943.1~gene_id:MGH6.5~strong similarity to
  misc_feature (317)..(498): Homolog of NCBI NO: 28876015 NR Description: hypothetical protein [Oryza sativa (japonica
  misc_feature (97)..(321): Homolog of NCBI NO: 33146537 NR Description: unknown protein [Oryza sativa (japonica
MMSGTPLARVRLSEILPYEGAPSPVYAKAVEALSVSLMRYNASVIEIGSEDTALMRCGLEAARLYFRTRSLTVSGKGNRGLSMYRAGRSVEDLDSSPPCMAEIFRCLGKVARAALSAIARHLRLRSDVFNHMLDDFPLAPNEVSSSVLLASYAHASIQNGKHASGGGNLSAKIEVEKGLLTLFCSDGTGIQVCDPNGRWYTADNGCGVGDLLLITGKALSHATAGLRPAASYRTTTDHLSATDTRGRASLAFRLMPKSNAILDCSPIEAAGHVIPQSYVPVSVSQFMDNLLAENDTLVNPPVKTNVPRDDVCKEPSLRSVLSDPISGAFLEDAMVVSCGHSFGGLMLRRVLEMSRCTLCNTEIESGSLVPNHALRAAASAIKQQDDKRLFHNAAMRRRRKEMSDQMDVENGDPATDDGMHRVVHYPFAVNEKVLIKGNRRTPEKFVGKEAIVTSQCLNGWYLLKIVESGDNVRLQYRSLKKMVNDDRGGGLQAQPVESNSL

SEQ ID NO: 107469 - protein, 500 aa, Arabidopsis thaliana
  peptide (1)..(500): Ceres Seq. ID no. 13650351
  misc_feature: Pfam Name: U-box Pfam Description: U-box domain
  misc_feature (1)..(500): Homolog of NCBI NO: 30685540 NR Description: expressed protein [Arabidopsis thaliana]
  misc_feature (1)..(325): Homolog of NCBI NO: 11994201 NR Description: gb|AAF35943.1~gene_id:MPN9.14~similar to unknown
  misc_feature (294)..(500): Homolog of NCBI NO: 11994201 NR Description: gb|AAF35943.1~gene_id:MPN9.14~similar to unknown
  misc_feature (1)..(407): Homolog of NCBI NO: 20453175 NR Description: At3g19895 [Arabidopsis thaliana]
  misc_feature (83)..(298): Homolog of NCBI NO: 15230647 NR Description: expressed protein [Arabidopsis thaliana]
  misc_feature (2)..(68): Homolog of NCBI NO: 15230647 NR Description: expressed protein [Arabidopsis thaliana]
  misc_feature (83)..(298): Homolog of NCBI NO: 15795123 NR Description: gb|AAF35943.1~gene_id:MGH6.5~strong similarity to
  misc_feature (2)..(68): Homolog of NCBI NO: 15795123 NR Description: gb|AAF35943.1~gene_id:MGH6.5~strong similarity to
  misc_feature (316)..(497): Homolog of NCBI NO: 28876015 NR Description: hypothetical protein [Oryza sativa (japonica
  misc_feature (96)..(320): Homolog of NCBI NO: 33146537 NR Description: unknown protein [Oryza sativa (japonica
MSGTPLARVRLSEILPYEGAPSPVYAKAVEALSVSLMRYNASVIEIGSEDTALMRCGLEAARLYFRTRSLTVSGKGNRGLSMYRAGRSVEDLDSSPPCMAEIFRCLGKVARAALSAIARHLRLRSDVFNHMLDDFPLAPNEVSSSVLLASYAHASIQNGKHASGGGNLSAKIEVEKGLLTLFCSDGTGIQVCDPNGRWYTADNGCGVGDLLLITGKALSHATAGLRPAASYRTTTDHLSATDTRGRASLAFRLMPKSNAILDCSPIEAAGHVIPQSYVPVSVSQFMDNLLAENDTLVNPPVKTNVPRDDVCKEPSLRSVLSDPISGAFLEDAMVVSCGHSFGGLMLRRVLEMSRCTLCNTEIESGSLVPNHALRAAASAIKQQDDKRLFHNAAMRRRRKEMSDQMDVENGDPATDDGMHRVVHYPFAVNEKVLIKGNRRTPEKFVGKEAIVTSQCLNGWYLLKIVESGDNVRLQYRSLKKMVNDDRGGGLQAQPVESNSL

SEQ ID NO: 107470 - DNA, 1258 bp, Arabidopsis thaliana
  misc_feature (1)..(1258): Ceres Seq. ID no. 13650383
  misc_feature: MA Experiment ID: 20000173 Result: Down-regulated in Transcription
  misc_feature: MA Experiment 20000173 PARAMETER Experiment Name: At_42deg_Heat_P Parameter: Age (day) Value: 14
  misc_feature: MA Experiment 20000173 PARAMETER Experiment Name: At_42deg_Heat_P Parameter: Organism Value: A. thaliana
  misc_feature: MA Experiment 20000173 PARAMETER Experiment Name: At_42deg_Heat_P Parameter: Plant Line Value: WS
  misc_feature: MA Experiment 20000173 PARAMETER Experiment Name: At_42deg_Heat_P Parameter: Temperature (deg C) Value: 42 vs. 22
  misc_feature: MA Experiment 20000173 PARAMETER Experiment Name: At_42deg_Heat_P Parameter: Timepoint (hr) Value: 6
  misc_feature: MA Experiment 20000173 PARAMETER Experiment Name: At_42deg_Heat_P Parameter: Tissue Value: Aerial
  misc_feature: MA Experiment ID: 20000179 Result: Down-regulated in Transcription
  misc_feature: MA Experiment 20000179 PARAMETER Experiment Name: At_Germinating_Seeds_P Parameter: Age (hr) Value: 6 vs. 0
  misc_feature: MA Experiment 20000179 PARAMETER Experiment Name: At_Germinating_Seeds_P Parameter: Tissue Value: Germinating Seeds
  misc_feature: MA Experiment ID: 20000180 Result: Down-regulated in Transcription
  misc_feature: MA Experiment 20000180 PARAMETER Experiment Name: At_Germinating_Seeds_P Parameter: Age (hr) Value: 24 vs. 0
  misc_feature: MA Experiment 20000180 PARAMETER Experiment Name: At_Germinating_Seeds_P Parameter: Tissue Value: Germinating Seeds
  misc_feature: MA Experiment ID: 20000182 Result: Up-regulated in Transcription
  misc_feature: MA Experiment 20000182 PARAMETER Experiment Name: At_2mM_SA_P Parameter: Age (day) Value: 14
  misc_feature: MA Experiment 20000182 PARAMETER Experiment Name: At_2mM_SA_P Parameter: Organism Value: A. thaliana
  misc_feature: MA Experiment 20000182 PARAMETER Experiment Name: At_2mM_SA_P Parameter: Plant Line Value: WS
  misc_feature: MA Experiment 20000182 PARAMETER Experiment Name: At_2mM_SA_P Parameter: Timepoint (hr) Value: 6
  misc_feature: MA Experiment 20000182 PARAMETER Experiment Name: At_2mM_SA_P Parameter: Tissue Value: Aerial
  misc_feature: MA Experiment 20000182 PARAMETER Experiment Name: At_2mM_SA_P Parameter: Treatment Value: 2mM SA vs. No Treatment
  misc_feature: MA Experiment ID: 20000184 Result: Down-regulated in Transcription
  misc_feature: MA Experiment 20000184 PARAMETER Experiment Name: At_Shoots__P Parameter: Age (day) Value: 7
  misc_feature: MA Experiment 20000184 PARAMETER Experiment Name: At_Shoots__P Parameter: Tissue Value: Shoots vs. Whole Plant
  misc_feature: MA Experiment ID: 20000234 Result: Down-regulated in Transcription
  misc_feature: MA Experiment 20000234 PARAMETER Experiment Name: At_Siliques_P Parameter: Age (day) Value: 21
  misc_feature: MA Experiment 20000234 PARAMETER Experiment Name: At_Siliques_P Parameter: Organism Value: A. thaliana
  misc_feature: MA Experiment 20000234 PARAMETER Experiment Name: At_Siliques_P Parameter: Plant Line Value: WS
  misc_feature: MA Experiment 20000234 PARAMETER Experiment Name: At_Siliques_P Parameter: Tissue Value: Less Than 5mm Siliques vs. Whole Plant
  misc_feature: MA Experiment ID: 20000264 Result: Down-regulated in Transcription
  misc_feature: MA Experiment 20000264 PARAMETER Experiment Name: At_Open_Flower_P Parameter: Age (day) Value: 21
  misc_feature: MA Experiment 20000264 PARAMETER Experiment Name: At_Open_Flower_P Parameter: Plant Line Value: WS
  misc_feature: MA Experiment 20000264 PARAMETER Experiment Name: At_Open_Flower_P Parameter: Tissue Value: Open Flower vs. Whole Plant
  misc_feature: MA Experiment ID: 20000265 Result: Down-regulated in Transcription
  misc_feature: MA Experiment 20000265 PARAMETER Experiment Name: At_Open_Flower_P Parameter: Age (day) Value: 21
  misc_feature: MA Experiment 20000265 PARAMETER Experiment Name: At_Open_Flower_P Parameter: Plant Line Value: WS
  misc_feature: MA Experiment 20000265 PARAMETER Experiment Name: At_Open_Flower_P Parameter: Tissue Value: Closed Flower vs. Whole Plant
  misc_feature: MA Experiment ID: 20000286 Result: Down-regulated in Transcription
  misc_feature: MA Experiment 20000286 PARAMETER Experiment Name: At_Open_Flower_P Parameter: Age (day) Value: 21
  misc_feature: MA Experiment 20000286 PARAMETER Experiment Name: At_Open_Flower_P Parameter: Plant Line Value: WS
  misc_feature: MA Experiment 20000286 PARAMETER Experiment Name: At_Open_Flower_P Parameter: Tissue Value: Half Open vs. Whole Plant
  misc_feature: MA Experiment ID: 20000438 Result: Down-regulated in Transcription
  misc_feature: MA Experiment 20000438 PARAMETER Experiment Name: At_Shoots__P Parameter: Age (day) Value: 14
  misc_feature: MA Experiment 20000438 PARAMETER Experiment Name: At_Shoots__P Parameter: Tissue Value: Shoots vs. Whole Plant
  misc_feature: MA Experiment ID: 20000441 Result: Up-regulated in Transcription
  misc_feature: MA Experiment 20000441 PARAMETER Experiment Name: At_1uM_BR-BRZ__P Parameter: Tissue Value: Shoot Apices
  misc_feature: MA Experiment 20000441 PARAMETER Experiment Name: At_1uM_BR-BRZ__P Parameter: Treatment Value: 1uM BR vs. No Treatment
  misc_feature: MA Experiment ID: 20000443 Result: Up-regulated in Transcription
  misc_feature: MA Experiment 20000443 PARAMETER Experiment Name: At_1uM_BR-BRZ__P Parameter: Tissue Value: Shoot Apices
  misc_feature: MA Experiment 20000443 PARAMETER Experiment Name: At_1uM_BR-BRZ__P Parameter: Treatment Value: 1uM BRZ vs. No Treatment
  misc_feature: MA Experiment ID: 20000445 Result: Up-regulated in Transcription
  misc_feature: MA Experiment 20000445 PARAMETER Experiment Name: At_100uM_NAA__P Parameter: Age (day) Value: 14
  misc_feature: MA Experiment 20000445 PARAMETER Experiment Name: At_100uM_NAA__P Parameter: Organism Value: A. thaliana
  misc_feature: MA Experiment 20000445 PARAMETER Experiment Name: At_100uM_NAA__P Parameter: Plant Line Value: WS
  misc_feature: MA Experiment 20000445 PARAMETER Experiment Name: At_100uM_NAA__P Parameter: Timepoint (hr) Value: 6
  misc_feature: MA Experiment 20000445 PARAMETER Experiment Name: At_100uM_NAA__P Parameter: Tissue Value: Aerial
  misc_feature: MA Experiment 20000445 PARAMETER Experiment Name: At_100uM_NAA__P Parameter: Treatment Value: 100uM NAA vs. No Treatment
  misc_feature: MA Experiment ID: 20000452 Result: Up-regulated in Transcription
  misc_feature: MA Experiment 20000452 PARAMETER Experiment Name: At_CS6879_Shoots-Roots_P Parameter: Age (day) Value: 14
  misc_feature: MA Experiment 20000452 PARAMETER Experiment Name: At_CS6879_Shoots-Roots_P Parameter: Organism Value: A. thaliana
  misc_feature: MA Experiment 20000452 PARAMETER Experiment Name: At_CS6879_Shoots-Roots_P Parameter: Plant Line Value: CS6879 vs. WS
  misc_feature: MA Experiment 20000452 PARAMETER Experiment Name: At_CS6879_Shoots-Roots_P Parameter: Tissue Value: Shoots
  misc_feature: MA Experiment ID: 20000709 Result: Up-regulated in Transcription
  misc_feature: MA Experiment 20000709 PARAMETER Experiment Name: At_15mM_NH4NO3_L-to-H_P Parameter: Age (hr) Value: 14
  misc_feature: MA Experiment 20000709 PARAMETER Experiment Name: At_15mM_NH4NO3_L-to-H_P Parameter: Organism Value: A. thaliana
  misc_feature: MA Experiment 20000709 PARAMETER Experiment Name: At_15mM_NH4NO3_L-to-H_P Parameter: Plant Line Value: WS
  misc_feature: MA Experiment 20000709 PARAMETER Experiment Name: At_15mM_NH4NO3_L-to-H_P Parameter: Timepoint (hr) Value: 4
  misc_feature: MA Experiment 20000709 PARAMETER Experiment Name: At_15mM_NH4NO3_L-to-H_P Parameter: Tissue Value: Aerial
  misc_feature: MA Experiment 20000709 PARAMETER Experiment Name: At_15mM_NH4NO3_L-to-H_P Parameter: Treatment Value: 15mM NH4NO3 vs. 30mM Mannitol
  misc_feature: MA Experiment ID: 20001554 Result: Down-regulated in Transcription
  misc_feature: MA Experiment 20001554 PARAMETER Experiment Name: At_Drought_Soil_Dry_P Parameter: Age (day) Value: 21
  misc_feature: MA Experiment 20001554 PARAMETER Experiment Name: At_Drought_Soil_Dry_P Parameter: Organism Value: A. thaliana
  misc_feature: MA Experiment 20001554 PARAMETER Experiment Name: At_Drought_Soil_Dry_P Parameter: Plant Line Value: WS
  misc_feature: MA Experiment 20001554 PARAMETER Experiment Name: At_Drought_Soil_Dry_P Parameter: Post Timepoint (hr) Value: None
  misc_feature: MA Experiment 20001554 PARAMETER Experiment Name: At_Drought_Soil_Dry_P Parameter: Post-Treatment Value: None
  misc_feature: MA Experiment 20001554 PARAMETER Experiment Name: At_Drought_Soil_Dry_P Parameter: Timepoint (day) Value: 7
  misc_feature: MA Experiment 20001554 PARAMETER Experiment Name: At_Drought_Soil_Dry_P Parameter: Treatment Value: Drought vs. No Drought
  misc_feature: MA Experiment ID: 20001555 Result: Down-regulated in Transcription
  misc_feature: MA Experiment 20001555 PARAMETER Experiment Name: At_Drought_Soil_Dry_P Parameter: Age (day) Value: 24
  misc_feature: MA Experiment 20001555 PARAMETER Experiment Name: At_Drought_Soil_Dry_P Parameter: Organism Value: A. thaliana
  misc_feature: MA Experiment 20001555 PARAMETER Experiment Name: At_Drought_Soil_Dry_P Parameter: Plant Line Value: WS
  misc_feature: MA Experiment 20001555 PARAMETER Experiment Name: At_Drought_Soil_Dry_P Parameter: Post Timepoint (hr) Value: None
  misc_feature: MA Experiment 20001555 PARAMETER Experiment Name: At_Drought_Soil_Dry_P Parameter: Post-Treatment Value: None
  misc_feature: MA Experiment 20001555 PARAMETER Experiment Name: At_Drought_Soil_Dry_P Parameter: Timepoint (day) Value: 10
  misc_feature: MA Experiment 20001555 PARAMETER Experiment Name: At_Drought_Soil_Dry_P Parameter: Treatment Value: Drought vs. No Drought
  misc_feature: MA Experiment ID: 20001557 Result: Up-regulated in Transcription
  misc_feature: MA Experiment 20001557 PARAMETER Experiment Name: At_Drought_Soil_Dry_P Parameter: Age (day) Value: 27
  misc_feature: MA Experiment 20001557 PARAMETER Experiment Name: At_Drought_Soil_Dry_P Parameter: Organism Value: A. thaliana
  misc_feature: MA Experiment 20001557 PARAMETER Experiment Name: At_Drought_Soil_Dry_P Parameter: Plant Line Value: WS
  misc_feature: MA Experiment 20001557 PARAMETER Experiment Name: At_Drought_Soil_Dry_P Parameter: Post Timepoint (hr) Value: 3
  misc_feature: MA Experiment 20001557 PARAMETER Experiment Name: At_Drought_Soil_Dry_P Parameter: Post-Treatment Value: Re-Water vs. No Drought
  misc_feature: MA Experiment 20001557 PARAMETER Experiment Name: At_Drought_Soil_Dry_P Parameter: Timepoint (day) Value: 13
  misc_feature: MA Experiment 20001557 PARAMETER Experiment Name: At_Drought_Soil_Dry_P Parameter: Treatment Value: Drought vs. No Drought
gattacaatcttgagcagacgaagaaaacccaaaaaaaatccagatccagctgaaattgaattttcaaccaacgaagaagagatttttccaagagcaacagacaagaagaagagaatgaagtcggagctaaatttaccagctgggttccgattccatccaacggacgaggagcttgtgaaattctacttgtgccggaaatgtgcttccgagcagatctcggctccggttatcgccgagattgatctctacaagttcaatccttgggagcttccagagatgtctctgtacggagagaaagagtggtacttcttctcacctagagatcggaaatacccaaacggttcgcgtcctaaccgggcagcaggaaccggttattggaaagctaccggagcagataaaccgattggtaaaccgaagacgttgggtatcaagaaagcactcgtcttctacgcagggaaagctccaaaagggattaagaccaattggataatgcatgagtatcgtctcgctaatgttgatagatcagcttctgttaacaaaaagaacaacctacgagtaagttctgtttcttattaacttatgtatcatcttttcgtgaatgatgatttagattattaactttgttgtggtgggttttgctgtacagcttgatgattgggttttatgtcgaatatacaacaagaaaggaaccatggagaagtatttccccgcggatgagaagccgaggaccacgacaatggctgaacagtcatcatcaccttttgatacatcagactcgacttacccgacattgcaagaggatgattccagcagctcaggtggtcacggtcacgtggtgtcaccggatgttttggaggttcagagcgagcctaaatggggagagcttgaggatgctttggaagcttttgatacttcaatgtttggtagttccatggagttgttgcagcctgacgcttttgtccctcagttcttgtatcagtctgattatttcacttccttccaggatccgcctgagcagaaaccattcttgaattggagttttgctccacaggggtaaaaacggaagagaccaaaaaaggtgtttgctagtagtactgtgatgtgccagagagaagagtctcatctcaactcatccctggctcttagtagtaaaagaagattgtagaatgttaatagcttttagcatcaatgtctcattagcaggcacattcttgttctttcatgagaagtttatatgaaaactaaaaatttatatcc

SEQ ID NO: 107471 - protein, 191 aa, Arabidopsis thaliana
  peptide (1)..(191): Ceres Seq. ID no. 13650384
  misc_feature (45)..(170): Pfam Name: No apical meristem (NAM) protein Pfam Description: No apical meristem (NAM) protein
  misc_feature (39)..(186): Homolog of NCBI NO: 22326685 NR Description: No apical meristem (NAM) protein family thaliana] >gi|13548337|emb|CAC35884.1| ATAF2 protein [Arabidopsis >gi|19424091|gb|AAL87335.1| unknown protein [Arabidopsis
  misc_feature (93)..(186): Homolog of NCBI NO: 1076294 NR Description: ATAF2 protein - Arabidopsis thaliana
  misc_feature (99)..(186): Homolog of NCBI NO: 1345504 NR Description: ATAF2 [Arabidopsis thaliana]
  misc_feature (38)..(186): Homolog of NCBI NO: 30697896 NR Description: No apical meristem (NAM) protein family thaliana] >gi|24030239|gb|AAN41296.1| unknown protein
  misc_feature (39)..(186): Homolog of NCBI NO: 10177060 NR Description: contains similarity to NAC-domain [Arabidopsis thaliana] >gi|21594049|gb|AAM65967.1| ATAF2 protein
  misc_feature (38)..(186): Homolog of NCBI NO: 23397338 NR Description: unknown protein [Arabidopsis thaliana]
  misc_feature (39)..(191): Homolog of NCBI NO: 26452827 NR Description: putative ATAF2 protein [Arabidopsis thaliana]
  misc_feature (42)..(186): Homolog of NCBI NO: 40647397 NR Description: NAC domain protein [Lycopersicon esculentum]
  misc_feature (39)..(186): Homolog of NCBI NO: 15223456 NR Description: No apical meristem (NAM) protein family
  misc_feature (42)..(186): Homolog of NCBI NO: 14485513 NR Description: putative NAC domain protein [Solanum tuberosum]
ITILSRRRKPKKNPDPAEIEFSTNEEEIFPRATDKKKRMKSELNLPAGFRFHPTDEELVKFYLCRKCASEQISAPVIAEIDLYKFNPWELPEMSLYGEKEWYFFSPRDRKYPNGSRPNRAAGTGYWKATGADKPIGKPKTLGIKKALVFYAGKAPKGIKTNWIMHEYRLANVDRSASVNKKNNLRVSSVSY

SEQ ID NO: 107472 - protein, 153 aa, Arabidopsis thaliana
  peptide (1)..(153): Ceres Seq. ID no. 13650385
  misc_feature (7)..(132): Pfam Name: No apical meristem (NAM) protein Pfam Description: No apical meristem (NAM) protein
  misc_feature (1)..(148): Homolog of NCBI NO: 22326685 NR Description: No apical meristem (NAM) protein family thaliana] >gi|13548337|emb|CAC35884.1| ATAF2 protein [Arabidopsis >gi|19424091|gb|AAL87335.1| unknown protein [Arabidopsis
  misc_feature (55)..(148): Homolog of NCBI NO: 1076294 NR Description: ATAF2 protein - Arabidopsis thaliana
  misc_feature (61)..(148): Homolog of NCBI NO: 1345504 NR Description: ATAF2 [Arabidopsis thaliana]
  misc_feature (1)..(148): Homolog of NCBI NO: 30697896 NR Description: No apical meristem (NAM) protein family thaliana] >gi|24030239|gb|AAN41296.1| unknown protein
  misc_feature (1)..(148): Homolog of NCBI NO: 10177060 NR Description: contains similarity to NAC-domain [Arabidopsis thaliana] >gi|21594049|gb|AAM65967.1| ATAF2 protein
  misc_feature (1)..(148): Homolog of NCBI NO: 23397338 NR Description: unknown protein [Arabidopsis thaliana]
  misc_feature (1)..(153): Homolog of NCBI NO: 26452827 NR Description: putative ATAF2 protein [Arabidopsis thaliana]
  misc_feature (4)..(148): Homolog of NCBI NO: 40647397 NR Description: NAC domain protein [Lycopersicon esculentum]
  misc_feature (1)..(148): Homolog of NCBI NO: 15223456 NR Description: No apical meristem (NAM) protein family
  misc_feature (4)..(148): Homolog of NCBI NO: 14485513 NR Description: putative NAC domain protein [Solanum tuberosum]
MKSELNLPAGFRFHPTDEELVKFYLCRKCASEQISAPVIAEIDLYKFNPWELPEMSLYGEKEWYFFSPRDRKYPNGSRPNRAAGTGYWKATGADKPIGKPKTLGIKKALVFYAGKAPKGIKTNWIMHEYRLANVDRSASVNKKNNLRVSSVSY

SEQ ID NO: 107473 - protein, 126 aa, Arabidopsis thaliana
  peptide (1)..(126): Ceres Seq. ID no. 13650386
  misc_feature (91)..(126): Homolog of NCBI NO: 1076294 NR Description: ATAF2 protein - Arabidopsis thaliana
  misc_feature (91)..(126): Homolog of NCBI NO: 1345504 NR Description: ATAF2 [Arabidopsis thaliana]
MIGFYVEYTTRKEPWRSISPRMRSRGPRQWLNSHHHLLIHQTRLTRHCKRMIPAAQVVTVTWCHRMFWRFRASLNGESLRMLWKLLILQCLVVPWSCCSLTLLSLSSCISLIISLPSRIRLSRNHS

SEQ ID NO: 107474 - DNA, 1694 bp, Arabidopsis thaliana
  misc_feature (1)..(1694): Ceres Seq. ID no. 13650395
  misc_feature: MA Experiment ID: 20000355 Result: Down-regulated in Transcription
  misc_feature: MA Experiment 20000355 PARAMETER Experiment Name: At_Siliques_Sub_P Parameter: Age (day) Value: 21
  misc_feature: MA Experiment 20000355 PARAMETER Experiment Name: At_Siliques_Sub_P Parameter: Organism Value: A. thaliana
  misc_feature: MA Experiment 20000355 PARAMETER Experiment Name: At_Siliques_Sub_P Parameter: Plant Line Value: WS
  misc_feature: MA Experiment 20000355 PARAMETER Experiment Name: At_Siliques_Sub_P Parameter: Tissue Value: Less Than 5mm Siliques vs. Whole Plant
  misc_feature: MA Experiment ID: 20001807 Result: Up-regulated in Transcription
  misc_feature: MA Experiment 20001807 PARAMETER Experiment Name: At_50mM_NH4NO3_L-to-H_Sub_P Parameter: Timepoint (hr) Value: 6
  misc_feature: MA Experiment 20001807 PARAMETER Experiment Name: At_50mM_NH4NO3_L-to-H_Sub_P Parameter: Tissue Value: Leaf
  misc_feature: MA Experiment 20001807 PARAMETER Experiment Name: At_50mM_NH4NO3_L-to-H_Sub_P Parameter: Treatment Value: 50mM NH4NO3 vs 100mM Mannitol
acattggcattgccattgacaatcaataaaacatcttgtgagacaagaacgggtaagtgataagatcatggagcatcctcacgtgcttttagtcgctagccctggcttggggcaccttatccctgccctcgaactcggaaaccgtctctccttcgtcctcaacgtccacgtcaccattcttgcaatcacctccggctcctcttccctcacagaaaccgagaccatacatacagccgcggctagagggacctgtgaaattatcgaattaccctctgtcgatatagaccacctagtggagccagatgcgacagtggtcactaaatagtgagcaagatgcgagaaatgaagtccacggttcgtgatgccgtgaaatcaatgaagcaaaaaccgacggtcatgattgttgacttttttggtacagcgttgttgtccataaccgatgtaggtgtgacgagtaagtatgtgtacataccgtctcacgcgtggttcttggcattaattgtctacttgccggtattggataaggtaatggaaggtgagtatgttgatattaaggagcctatgaaaataccaggttgtaaaccggtcggaccaaaagagcttttggacacaatgttagaccggtccgaccaacaataccgtgattgtgtacagattgggttggagatacctatgagcgatggagttttggtaaatacttggggggagttacaagggaagactctagctgcgctaagagaggacatagatttgaaccgggttataaaagtaccggtttatcctattggacctattgttaggactaatgtgcttattgaaaaaccaaacagtacattcgagtggctagacaaacaagaggaaagatctgttgtatatgtgtgtttagggagtggtggaacattgtcgtttgagcaaacgatggaactagcttgggggttagagttaagttgtcaaagtttcttatgggttctacgtaagcctccttcttaccttggagcaagctcaaaagatgatgatcaagtaagtgacggtctaccagaaggtttcttggaccgcacacgtggtgtagggcttgtggtaacgcaatgggcaccgcaagttgagatcttaagccatagatcaatcggtgggtttttgtcacattgtggttggagctcggtgttggagagtttaactaaaggagttccgatcatcgcttggcctctttatgcggagcaatggatgaatgccacgttgctgacggaggagattggtatggctattcgtacgtcagagttaccgtcgaagaaagtgatcagccgggaagaagtggcgtctttggtgaagaagattgtagcggaagaggataaagaaggacgaaagataaagactaaagctgaagaggtgagggttagctccgaacgagcttggactcatggtgggtcgtctcatagttctctctttgaatgggcaaaacgatgtgggcttgtatcttaatttgagaatacatttataatatcctgaccaacaatttgcttaaaagatcaaactctctagtataacatatattttgctaaccagcaatttgcttaaaagatcaaagttctctagtatgaaatattaatgtatgttgtaatttgctatgcatgcatacaagatacatatgtagtttaatcatctttatgtacacaatgagataatcaatggattgtgtt

SEQ ID NO: 107475 - protein, 380 aa, Arabidopsis thaliana; identical to SEQ ID NO: 89780
  peptide (1)..(380): Ceres Seq. ID no. 13650396
  misc_feature (1)..(380): Pfam Name: UDP-glucoronosyl and UDP-glucosyl transferase Pfam Description: UDP-glucoronosyl and UDP-glucosyl transferase
  misc_feature (1)..(380): Homolog of NCBI NO: 25286815 NR Description: probable flavonol 3-O-glucosyltransferase
  misc_feature (1)..(380): Homolog of NCBI NO: 30680413 NR Description: UDP-glucosyltransferase family [Arabidopsis
  misc_feature (1)..(380): Homolog of NCBI NO: 39104603 NR Description: putative flavonol 3-O-glucosyltransferase
  misc_feature (1)..(379): Homolog of NCBI NO: 25286819 NR Description: probable flavonol 3-O-glucosyltransferase
  misc_feature (1)..(374): Homolog of NCBI NO: 2501494 NR Description: Flavonol 3-O-glucosyltransferase 5 (UDP-glucose
  misc_feature (114)..(379): Homolog of NCBI NO: 30680415 NR Description: glycosyltransferase family [Arabidopsis thaliana]
  misc_feature (1)..(369): Homolog of NCBI NO: 18409172 NR Description: UDP-glycosyltransferase family [Arabidopsis >gi|15146272|gb|AAK83619.1| AT3g50740/T3A5_120 [Arabidopsis
  misc_feature (1)..(369): Homolog of NCBI NO: 7433913 NR Description: UTP-glucose glucosyltransferase-like protein -
  misc_feature (1)..(376): Homolog of NCBI NO: 15240051 NR Description: UDP-glycosyltransferase family [Arabidopsis
  misc_feature (1)..(376): Homolog of NCBI NO: 15240305 NR Description: UDP-glycosyltransferase family [Arabidopsis

SEQ ID NO: 107476 - protein, 377 aa, Arabidopsis thaliana; identical to SEQ ID NO: 89781
  peptide (1)..(377): Ceres Seq. ID no. 13650397
  misc_feature (1)..(377): Pfam Name: UDP-glucoronosyl and UDP-glucosyl transferase Pfam Description: UDP-glucoronosyl and UDP-glucosyl transferase
  misc_feature (1)..(377): Homolog of NCBI NO: 25286815 NR Description: probable flavonol 3-O-glucosyltransferase
  misc_feature (1)..(377): Homolog of NCBI NO: 30680413 NR Description: UDP-glucosyltransferase family [Arabidopsis
  misc_feature (1)..(377): Homolog of NCBI NO: 39104603 NR Description: putative flavonol 3-O-glucosyltransferase
  misc_feature (1)..(376): Homolog of NCBI NO: 25286819 NR Description: probable flavonol 3-O-glucosyltransferase
  misc_feature (1)..(371): Homolog of NCBI NO: 2501494 NR Description: Flavonol 3-O-glucosyltransferase 5 (UDP-glucose
  misc_feature (111)..(376): Homolog of NCBI NO: 30680415 NR Description: glycosyltransferase family [Arabidopsis thaliana]
  misc_feature (1)..(366): Homolog of NCBI NO: 18409172 NR Description: UDP-glycosyltransferase family [Arabidopsis >gi|15146272|gb|AAK83619.1| AT3g50740/T3A5_120 [Arabidopsis
  misc_feature (1)..(366): Homolog of NCBI NO: 7433913 NR Description: UTP-glucose glucosyltransferase-like protein -
  misc_feature (1)..(373): Homolog of NCBI NO: 15240051 NR Description: UDP-glycosyltransferase family [Arabidopsis
  misc_feature (1)..(373): Homolog of NCBI NO: 15240305 NR Description: UDP-glycosyltransferase family [Arabidopsis

SEQ ID NO: 107477 - protein, 366 aa, Arabidopsis thaliana
  peptide (1)..(366): Ceres Seq. ID no. 13650398
  misc_feature (1)..(366): Pfam Name: UDP-glucoronosyl and UDP-glucosyl transferase Pfam Description: UDP-glucoronosyl and UDP-glucosyl transferase
  misc_feature (1)..(366): Homolog of NCBI NO: 25286815 NR Description: probable flavonol 3-O-glucosyltransferase
  misc_feature (1)..(366): Homolog of NCBI NO: 30680413 NR Description: UDP-glucosyltransferase family [Arabidopsis
  misc_feature (1)..(366): Homolog of NCBI NO: 39104603 NR Description: putative flavonol 3-O-glucosyltransferase
  misc_feature (1)..(365): Homolog of NCBI NO: 25286819 NR Description: probable flavonol 3-O-glucosyltransferase
  misc_feature (1)..(360): Homolog of NCBI NO: 2501494 NR Description: Flavonol 3-O-glucosyltransferase 5 (UDP-glucose
  misc_feature (100)..(365): Homolog of NCBI NO: 30680415 NR Description: glycosyltransferase family [Arabidopsis thaliana]
  misc_feature (1)..(355): Homolog of NCBI NO: 18409172 NR Description: UDP-glycosyltransferase family [Arabidopsis >gi|15146272|gb|AAK83619.1| AT3g50740/T3A5_120 [Arabidopsis
  misc_feature (1)..(355): Homolog of NCBI NO: 7433913 NR Description: UTP-glucose glucosyltransferase-like protein -
  misc_feature (1)..(362): Homolog of NCBI NO: 15240051 NR Description: UDP-glycosyltransferase family [Arabidopsis
  misc_feature (1)..(362): Homolog of NCBI NO: 15240305 NR Description: UDP-glycosyltransferase family [Arabidopsis
MKQKPTVMIVDFFGTALLSITDVGVTSKYVYIPSHAWFLALIVYLPVLDKVMEGEYVDIKEPMKIPGCKPVGPKELLDTMLDRSDQQYRDCVQIGLEIPMSDGVLVNTWGELQGKTLAALREDIDLNRVIKVPVYPIGPIVRTNVLIEKPNSTFEWLDKQEERSVVYVCLGSGGTLSFEQTMELAWGLELSCQSFLWVLRKPPSYLGASSKDDDQVSDGLPEGFLDRTRGVGLVVTQWAPQVEILSHRSIGGFLSHCGWSSVLESLTKGVPIIAWPLYAEQWMNATLLTEEIGMAIRTSELPSKKVISREEVASLVKKIVAEEDKEGRKIKTKAEEVRVSSERAWTHGGSSHSSLFEWAKRCGLVS

SEQ ID NO: 107478 - DNA, 1421 bp, Arabidopsis thaliana
  misc_feature (1)..(1421): Ceres Seq. ID no. 13650399
  misc_feature: MA Experiment ID: 20000171 Result: Up-regulated in Transcription
  misc_feature: MA Experiment 20000171 PARAMETER Experiment Name: At_42deg_Heat_P Parameter: Age (day) Value: 14
  misc_feature: MA Experiment 20000171 PARAMETER Experiment Name: At_42deg_Heat_P Parameter: Organism Value: A. thaliana
  misc_feature: MA Experiment 20000171 PARAMETER Experiment Name: At_42deg_Heat_P Parameter: Plant Line Value: WS
  misc_feature: MA Experiment 20000171 PARAMETER Experiment Name: At_42deg_Heat_P Parameter: Temperature (deg C) Value: 42 vs. 22
  misc_feature: MA Experiment 20000171 PARAMETER Experiment Name: At_42deg_Heat_P Parameter: Timepoint (hr) Value: 1
  misc_feature: MA Experiment 20000171 PARAMETER Experiment Name: At_42deg_Heat_P Parameter: Tissue Value: Aerial
  misc_feature: MA Experiment ID: 20000173 Result: Up-regulated in Transcription
  misc_feature: MA Experiment 20000173 PARAMETER Experiment Name: At_42deg_Heat_P Parameter: Age (day) Value: 14
  misc_feature: MA Experiment 20000173 PARAMETER Experiment Name: At_42deg_Heat_P Parameter: Organism Value: A. thaliana
  misc_feature: MA Experiment 20000173 PARAMETER Experiment Name: At_42deg_Heat_P Parameter: Plant Line Value: WS
  misc_feature: MA Experiment 20000173 PARAMETER Experiment Name: At_42deg_Heat_P Parameter: Temperature (deg C) Value: 42 vs. 22
  misc_feature: MA Experiment 20000173 PARAMETER Experiment Name: At_42deg_Heat_P Parameter: Timepoint (hr) Value: 6
  misc_feature: MA Experiment 20000173 PARAMETER Experiment Name: At_42deg_Heat_P Parameter: Tissue Value: Aerial
  misc_feature: MA Experiment ID: 20000184 Result: Down-regulated in Transcription
  misc_feature: MA Experiment 20000184 PARAMETER Experiment Name: At_Shoots__P Parameter: Age (day) Value: 7
  misc_feature: MA Experiment 20000184 PARAMETER Experiment Name: At_Shoots__P Parameter: Tissue Value: Shoots vs. Whole Plant
cgtgtctctctcaaagaataaggaagacgcagacgaagaaggtgacaatggcgtacgttagtatgggtgaagctcaccggagaatcactgaatacctaaaccgattctgcgacgccgtttcgtaccaagactcttctacactttgccgtctcctctctttctcttccaattctccacctcttctctcactcgccgacgcactcaacgtcttccaggattctagcagtttgattagacagtctgatagattctctgaatatggcgagattctggctcatgtgtttcgttctctacaaagttaccgagttgggaatctagtcgaagcataccttgctttcgataagtttgccaatgcatttgttcaggagtttcgtaattgggaatctgcttgggcattggaagctctgtatgtagtttgttatgaaattcgagttcttgcggaaaaggctgataaagatttaacttctaatggaaagtctccagagaaattaaaagcagctgggtctcttctcatgaaagtttttggagttcttgctgggaaaggtccaaaacgagtcggagcattatatgtgacttgccaattgttcaagacctactttaagcttggaaccgtcaatctttgtcgaagtgtaataagaagtatcgaaactgctcggatatttgactttgaggagtttccaagaagagataaggttacatacatgtattataccggccgattagaagtcttcaacgaaaattttcctgctgatacaaagctatcatatgccttgcaaaattgcaaccccaaaagagaacgaaatataaggatgatattaaagtatttggtaccggtgaagctttctttaggaattataccaaaagatgagctcctgcgaaattataatctgcatgagtacacaaagattgtgcaagctctgagaaagggtgatctaaggcttctccggcatgctcttcaagaacatgaagatcggttcttgaggtcgggtgtgtatcttgtcttggaaaagctagagctccaagtctaccagagactcatgaagaaaatttatataaaccagaagctgagtgatccagcgagagctcaccagctgaagcttgaagggattgccaaagcactaagatggctagatatggacatggatctggacgaggtggaatgtataatgacgatattgatatacaaaaaccttgtgaaaggttatttagctcacaagagcaaagtggtagttctaagcaagcaagatcctttccctaaactaaacgggaagcctgttagctcataagtcttcacgtgttattttttttgttgtatcaacaaacactttttattttctaattgtgtgtaaaattcattcaaacaaaaaacaaaaactgtttttacaatagaaatgtgactttaaaactgtggagttttcacc

SEQ ID NO: 107479 - protein, 427 aa, Arabidopsis thaliana
  peptide (1)..(427): Ceres Seq. ID no. 13650400
  misc_feature (297)..(413): Pfam Name: PCI domain Pfam Description: PCI domain
  misc_feature (16)..(427): Homolog of NCBI NO: 30680717 NR Description: expressed protein [Arabidopsis thaliana]
  misc_feature (16)..(178): Homolog of NCBI NO: 25371289 NR Description: hypothetical protein At2g19560 [imported] - thaliana >gi|4191786|gb|AAD10155.1| unknown protein [Arabidopsis
  misc_feature (278)..(349): Homolog of NCBI NO: 25371289 NR Description: hypothetical protein At2g19560 [imported] - thaliana >gi|4191786|gb|AAD10155.1| unknown protein [Arabidopsis
  misc_feature (179)..(284): Homolog of NCBI NO: 25371289 NR Description: hypothetical protein At2g19560 [imported] - thaliana >gi|4191786|gb|AAD10155.1| unknown protein [Arabidopsis
  misc_feature (24)..(421): Homolog of NCBI NO: 26335427 NR Description: unnamed protein product [Mus musculus]
  misc_feature (24)..(421): Homolog of NCBI NO: 26337617 NR Description: unnamed protein product [Mus musculus]
  misc_feature (24)..(421): Homolog of NCBI NO: 7022282 NR Description: unnamed protein product [Homo sapiens] unnamed protein product [Homo sapiens]
  misc_feature (24)..(421): Homolog of NCBI NO: 7022473 NR Description: unnamed protein product [Homo sapiens]
  misc_feature (86)..(421): Homolog of NCBI NO: 30520125 NR Description: RIKEN cDNA A730042J05 gene [Mus musculus]
  misc_feature (27)..(357): Homolog of NCBI NO: 34879449 NR Description: similar to hypothetical protein FLJ11305 [Rattus
CLSQRIRKTQTKKVTMAYVSMGEAHRRITEYLNRFCDAVSYQDSSTLCRLLSFSSNSPPLLSLADALNVFQDSSSLIRQSDRFSEYGEILAHVFRSLQSYRVGNLVEAYLAFDKFANAFVQEFRNWESAWALEALYVVCYEIRVLAEKADKDLTSNGKSPEKLKAAGSLLMKVFGVLAGKGPKRVGALYVTCQLFKTYFKLGTVNLCRSVIRSIETARIFDFEEFPRRDKVTYMYYTGRLEVFNENFPADTKLSYALQNCNPKRERNIRMILKYLVPVKLSLGIIPKDELLRNYNLHEYTKIVQALRKGDLRLLRHALQEHEDRFLRSGVYLVLEKLELQVYQRLMKKIYINQKLSDPARAHQLKLEGIAKALRWLDMDMDLDEVECIMTILIYKNLVKGYLAHKSKVVVLSKQDPFPKLNGKPVSS

SEQ ID NO: 107480 - protein, 412 aa, Arabidopsis thaliana
  peptide (1)..(412): Ceres Seq. ID no. 13650401
  misc_feature (282)..(398): Pfam Name: PCI domain Pfam Description: PCI domain
  misc_feature (1)..(412): Homolog of NCBI NO: 30680717 NR Description: expressed protein [Arabidopsis thaliana]
  misc_feature (1)..(163): Homolog of NCBI NO: 25371289 NR Description: hypothetical protein At2g19560 [imported] - thaliana >gi|4191786|gb|AAD10155.1| unknown protein [Arabidopsis
  misc_feature (263)..(334): Homolog of NCBI NO: 25371289 NR Description: hypothetical protein At2g19560 [imported] - thaliana >gi|4191786|gb|AAD10155.1| unknown protein [Arabidopsis
  misc_feature (164)..(269): Homolog of NCBI NO: 25371289 NR Description: hypothetical protein At2g19560 [imported] - thaliana >gi|4191786|gb|AAD10155.1| unknown protein [Arabidopsis
  misc_feature (9)..(406): Homolog of NCBI NO: 26335427 NR Description: unnamed protein product [Mus musculus]
  misc_feature (9)..(406): Homolog of NCBI NO: 26337617 NR Description: unnamed protein product [Mus musculus]
  misc_feature (9)..(406): Homolog of NCBI NO: 7022282 NR Description: unnamed protein product [Homo sapiens] unnamed protein product [Homo sapiens]
  misc_feature (9)..(406): Homolog of NCBI NO: 7022473 NR Description: unnamed protein product [Homo sapiens]
  misc_feature (71)..(406): Homolog of NCBI NO: 30520125 NR Description: RIKEN cDNA A730042J05 gene [Mus musculus]
  misc_feature (12)..(342): Homolog of NCBI NO: 34879449 NR Description: similar to hypothetical protein FLJ11305 [Rattus
MAYVSMGEAHRRITEYLNRFCDAVSYQDSSTLCRLLSFSSNSPPLLSLADALNVFQDSSSLIRQSDRFSEYGEILAHVFRSLQSYRVGNLVEAYLAFDKFANAFVQEFRNWESAWALEALYVVCYEIRVLAEKADKDLTSNGKSPEKLKAAGSLLMKVFGVLAGKGPKRVGALYVTCQLFKTYFKLGTVNLCRSVIRSIETARIFDFEEFPRRDKVTYMYYTGRLEVFNENFPADTKLSYALQNCNPKRERNIRMILKYLVPVKLSLGIIPKDELLRNYNLHEYTKIVQALRKGDLRLLRHALQEHEDRFLRSGVYLVLEKLELQVYQRLMKKIYINQKLSDPARAHQLKLEGIAKALRWLDMDMDLDEVECIMTILIYKNLVKGYLAHKSKVVVLSKQDPFPKLNGKPVSS

SEQ ID NO: 107481 - protein, 407 aa, Arabidopsis thaliana
  peptide (1)..(407): Ceres Seq. ID no. 13650402
  misc_feature (277)..(393): Pfam Name: PCI domain Pfam Description: PCI domain
  misc_feature (1)..(407): Homolog of NCBI NO: 30680717 NR Description: expressed protein [Arabidopsis thaliana]
  misc_feature (1)..(158): Homolog of NCBI NO: 25371289 NR Description: hypothetical protein At2g19560 [imported] - thaliana >gi|4191786|gb|AAD10155.1| unknown protein [Arabidopsis
  misc_feature (258)..(329): Homolog of NCBI NO: 25371289 NR Description: hypothetical protein At2g19560 [imported] - thaliana >gi|4191786|gb|AAD10155.1| unknown protein [Arabidopsis
  misc_feature (159)..(264): Homolog of NCBI NO: 25371289 NR Description: hypothetical protein At2g19560 [imported] - thaliana >gi|4191786|gb|AAD10155.1| unknown protein [Arabidopsis
  misc_feature (4)..(401): Homolog of NCBI NO: 26335427 NR Description: unnamed protein product [Mus musculus]
  misc_feature (4)..(401): Homolog of NCBI NO: 26337617 NR Description: unnamed protein product [Mus musculus]
  misc_feature (4)..(401): Homolog of NCBI NO: 7022282 NR Description: unnamed protein product [Homo sapiens] unnamed protein product [Homo sapiens]
  misc_feature (4)..(401): Homolog of NCBI NO: 7022473 NR Description: unnamed protein product [Homo sapiens]
  misc_feature (66)..(401): Homolog of NCBI NO: 30520125 NR Description: RIKEN cDNA A730042J05 gene [Mus musculus]
  misc_feature (7)..(337): Homolog of NCBI NO: 34879449 NR Description: similar to hypothetical protein FLJ11305 [Rattus
MGEAHRRITEYLNRFCDAVSYQDSSTLCRLLSFSSNSPPLLSLADALNVFQDSSSLIRQSDRFSEYGEILAHVFRSLQSYRVGNLVEAYLAFDKFANAFVQEFRNWESAWALEALYVVCYEIRVLAEKADKDLTSNGKSPEKLKAAGSLLMKVFGVLAGKGPKRVGALYVTCQLFKTYFKLGTVNLCRSVIRSIETARIFDFEEFPRRDKVTYMYYTGRLEVFNENFPADTKLSYALQNCNPKRERNIRMILKYLVPVKLSLGIIPKDELLRNYNLHEYTKIVQALRKGDLRLLRHALQEHEDRFLRSGVYLVLEKLELQVYQRLMKKIYINQKLSDPARAHQLKLEGIAKALRWLDMDMDLDEVECIMTILIYKNLVKGYLAHKSKVVVLSKQDPFPKLNGKPVSS

SEQ ID NO: 107482 - DNA, 767 bp, Arabidopsis thaliana
  misc_feature (1)..(767): Ceres Seq. ID no. 13650411
  misc_feature: MA Experiment ID: 20000180 Result: Down-regulated in Transcription
  misc_feature: MA Experiment 20000180 PARAMETER Experiment Name: At_Germinating_Seeds_P Parameter: Age (hr) Value: 24 vs. 0
  misc_feature: MA Experiment 20000180 PARAMETER Experiment Name: At_Germinating_Seeds_P Parameter: Tissue Value: Germinating Seeds
  misc_feature: MA Experiment ID: 20000496 Result: Up-regulated in Transcription
  misc_feature: MA Experiment 20000496 PARAMETER Experiment Name: At_Guard_Cells_P Parameter: Harvest Date Value: 7/19/2002
  misc_feature: MA Experiment 20000496 PARAMETER Experiment Name: At_Guard_Cells_P Parameter: Organism Value: Canola
  misc_feature: MA Experiment 20000496 PARAMETER Experiment Name: At_Guard_Cells_P Parameter: Tissue Value: Guard Cells vs. Leaves
gcccgtttcaaccttggcagccattgcgaagcacctaacctatttcgtttactgaatcttaattttagtttcttctatctccgtgggtgggttttcagctttctttgagtgtagtatcctctgcaatatcaacccgtcgtgctctagccatcgatttccaggtggttgcagatataatgttgaagcaagtggttgccaagtattctataggtaaagcggcgatttatggaagtaacagagaaaagcttagacctttcatgtgccaaaccagttgtcgattccacaatggacggactgtttttgcaccaagaagcttctttggtgtagaagactacgtggatgacgacacaagccggccatacacataccaaaaagagaaaaagtcgaagaatccagacaagcatgtgtcgttcaagcaacgaacagttgcatacatggagccgttcactctagatgtcttcatctcaaagcgctttgtttcggcatctctcacgcaccgtgttacatgtaggcaagttgctgttgcgggaacaaactctaaagacgtaaaagctgttctgaggtcaagatgtgatatcccggcatgtatgtccatagggaggatcttgtctgagcgtgcaaaagaagctgatgtgtacacggcttcttatacgccaagggaccaagacaagtttgaagggaaaatcagagctgttgtccagtcccttattgataacggaattgatgttaaaatttatctcgattagaaaacaaatgtttgttgtgtc

SEQ ID NO: 107483 - protein, 189 aa, Arabidopsis thaliana; identical to SEQ ID NO: 82054
  peptide (1)..(189): Ceres Seq. ID no. 13650412
  misc_feature (66)..(182): Pfam Name: Ribosomal L18p/L5e family Pfam Description: Ribosomal L18p/L5e family
  misc_feature (1)..(189): Homolog of NCBI NO: 30680844 NR Description: expressed protein [Arabidopsis thaliana] unknown protein [Arabidopsis thaliana]
  misc_feature (34)..(189): Homolog of NCBI NO: 37536826 NR Description: hypothetical protein [Oryza sativa (japonica group)] >gi|18873848|gb|AAL79794.1| hypothetical protein [Oryza >gi|31433497|gb|AAP55002.1| hypothetical protein [Oryza sativa
  misc_feature (71)..(188): Homolog of NCBI NO: 15229493 NR Description: hypothetical protein [Arabidopsis thaliana]
  misc_feature (62)..(188): Homolog of NCBI NO: 22094358 NR Description: hypothetical protein [Oryza sativa (japonica
  misc_feature (70)..(182): Homolog of NCBI NO: 18402538 NR Description: expressed protein [Arabidopsis thaliana] gene_id:MAL21.25~unknown protein [Arabidopsis thaliana] unknown [Arabidopsis thaliana] >gi|24030337|gb|AAN41334.1|
  misc_feature (82)..(182): Homolog of NCBI NO: 15241056 NR Description: ribosomal protein L18p family [Arabidopsis

SEQ ID NO: 107484 - protein, 162 aa, Arabidopsis thaliana; identical to SEQ ID NO: 82055
  peptide (1)..(162): Ceres Seq. ID no. 13650413
  misc_feature (39)..(155): Pfam Name: Ribosomal L18p/L5e family Pfam Description: Ribosomal L18p/L5e family
  misc_feature (1)..(162): Homolog of NCBI NO: 30680844 NR Description: expressed protein [Arabidopsis thaliana] unknown protein [Arabidopsis thaliana]
  misc_feature (7)..(162): Homolog of NCBI NO: 37536826 NR Description: hypothetical protein [Oryza sativa (japonica group)] >gi|18873848|gb|AAL79794.1| hypothetical protein [Oryza >gi|31433497|gb|AAP55002.1| hypothetical protein [Oryza sativa
  misc_feature (44)..(161): Homolog of NCBI NO: 15229493 NR Description: hypothetical protein [Arabidopsis thaliana]
  misc_feature (35)..(161): Homolog of NCBI NO: 22094358 NR Description: hypothetical protein [Oryza sativa (japonica
  misc_feature (43)..(155): Homolog of NCBI NO: 18402538 NR Description: expressed protein [Arabidopsis thaliana] gene_id:MAL21.25~unknown protein [Arabidopsis thaliana] unknown [Arabidopsis thaliana] >gi|24030337|gb|AAN41334.1|
  misc_feature (55)..(155): Homolog of NCBI NO: 15241056 NR Description: ribosomal protein L18p family [Arabidopsis

SEQ ID NO: 107485 - protein, 103 aa, Arabidopsis thaliana
  peptide (1)..(103): Ceres Seq. ID no. 13650414
  misc_feature (1)..(96): Pfam Name: Ribosomal L18p/L5e family Pfam Description: Ribosomal L18p/L5e family
  misc_feature (1)..(103): Homolog of NCBI NO: 30680844 NR Description: expressed protein [Arabidopsis thaliana] unknown protein [Arabidopsis thaliana]
  misc_feature (1)..(103): Homolog of NCBI NO: 37536826 NR Description: hypothetical protein [Oryza sativa (japonica group)] >gi|18873848|gb|AAL79794.1| hypothetical protein [Oryza >gi|31433497|gb|AAP55002.1| hypothetical protein [Oryza sativa
  misc_feature (1)..(102): Homolog of NCBI NO: 15229493 NR Description: hypothetical protein [Arabidopsis thaliana]
  misc_feature (1)..(102): Homolog of NCBI NO: 22094358 NR Description: hypothetical protein [Oryza sativa (japonica
  misc_feature (1)..(96): Homolog of NCBI NO: 18402538 NR Description: expressed protein [Arabidopsis thaliana] gene_id:MAL21.25~unknown protein [Arabidopsis thaliana] unknown [Arabidopsis thaliana] >gi|24030337|gb|AAN41334.1|
  misc_feature (1)..(96): Homolog of NCBI NO: 15241056 NR Description: ribosomal protein L18p family [Arabidopsis
MEPFTLDVFISKRFVSASLTHRVTCRQVAVAGTNSKDVKAVLRSRCDIPACMSIGRILSERAKEADVYTASYTPRDQDKFEGKIRAVVQSLIDNGIDVKIYLD

SEQ ID NO: 107486 - DNA, 868 bp, Arabidopsis thaliana
  misc_feature (1)..(868): Ceres Seq. ID no. 13650415
  misc_feature: MA Experiment ID: 20001248 Result: Down-regulated in Transcription
  misc_feature: MA Experiment 20001248 PARAMETER Experiment Name: At_Far-red-induction_P Parameter: Age (day) Value: 7
  misc_feature: MA Experiment 20001248 PARAMETER Experiment Name: At_Far-red-induction_P Parameter: Light Value: Far-red vs. White
  misc_feature: MA Experiment 20001248 PARAMETER Experiment Name: At_Far-red-induction_P Parameter: Organism Value: A. thaliana
  misc_feature: MA Experiment 20001248 PARAMETER Experiment Name: At_Far-red-induction_P Parameter: Plant Line Value: Columbia
  misc_feature: MA Experiment 20001248 PARAMETER Experiment Name: At_Far-red-induction_P Parameter: Timepoint (hr) Value: 4
  misc_feature: MA Experiment 20001248 PARAMETER Experiment Name: At_Far-red-induction_P Parameter: Tissue Value: Whole Plant
ataaatgctattcagacgaagcagccaccaaccactactcgagccgccgtagatccagattccttaacagtagatgtcgccgtttgtgaagttttatctcttcagttacaattttctccaagcttctgcatgggcgatttcgcttctgattattcttaacagctttttatcgaacaagacgatcatttctgcttacgcttctgctggattcctgattagtctgtttcaaactgctgctattcttgaagttcttcatggagctattggaattgtcccgagtggattcttgtctccactgatgcaatggagtggaaggactcacttcatattggctattgttggacagatcaaggaggtccaggattcgccgtggctgtctataacacttgtggcttggtgtatcggtgagatgatcagatatcctcattatgcttttacttgcctcggtagatgtccctattggctaacctacctcaggtacacgggattcatcgtgatttatccaacgggactagtgggtgaattgttgatcatgtacaaagcacttccatatgttaaagaaaggaatctttacgctaatttcttctctgttttccccttcagttactacgatttcctttgggccgtcctcttggtctacccattcctttggttgaagctttatctccagcttttcaaacaaagaaagtctaagcttggaaaatcgaagaagcttcacggcaagagaaagagaatgtgaactccattcaatcttacatatatgtatctcatctgtgattcacaatattctggtctaaacaaccataacaactgaaaataaaaatttggcccaaagctttttaaatggagtaattataatgggttgatt

SEQ ID NO: 107487 - protein, 221 aa, Arabidopsis thaliana
  peptide (1)..(221): Ceres Seq. ID no. 13650416
  misc_feature (52)..(212): Pfam Name: Protein tyrosine phosphatase-like protein, PTPLA Pfam Description: Protein tyrosine phosphatase-like protein, PTPLA
  misc_feature (1)..(221): Homolog of NCBI NO: 26453242 NR Description: unknown protein [Arabidopsis thaliana]
  misc_feature (117)..(221): Homolog of NCBI NO: 9758842 NR Description: gene_id:MTH12.2~unknown protein [Arabidopsis
  misc_feature (21)..(71): Homolog of NCBI NO: 9758842 NR Description: gene_id:MTH12.2~unknown protein [Arabidopsis
  misc_feature (21)..(117): Homolog of NCBI NO: 15238517 NR Description: expressed protein [Arabidopsis thaliana]
  misc_feature (184)..(221): Homolog of NCBI NO: 15238517 NR Description: expressed protein [Arabidopsis thaliana]
  misc_feature (3)..(217): Homolog of NCBI NO: 34869216 NR Description: similar to protein tyrosine phosphatase-like
  misc_feature (3)..(217): Homolog of NCBI NO: 20892371 NR Description: similar to protein tyrosine phosphatase-like PTPLB [Mus musculus] >gi|12857727|dbj|BAB31092.1| unnamed protein [Mus musculus] >gi|20070640|gb|AAH27289.1| RIKEN cDNA 6330408J20
  misc_feature (8)..(209): Homolog of NCBI NO: 27882121 NR Description: Similar to RIKEN cDNA 6330408J20 gene [Danio
  misc_feature (3)..(217): Homolog of NCBI NO: 12963741 NR Description: protein tyrosine phosphatase-like protein PTPLB
  misc_feature (2)..(209): Homolog of NCBI NO: 31202853 NR Description: ENSANGP00000018910 [Anopheles gambiae]
MSPFVKFYLFSYNFLQASAWAISLLIILNSFLSNKTIISAYASAGFLISLFQTAAILEVLHGAIGIVPSGFLSPLMQWSGRTHFILAIVGQIKEVQDSPWLSITLVAWCIGEMIRYPHYAFTCLGRCPYWLTYLRYTGFIVIYPTGLVGELLIMYKALPYVKERNLYANFFSVFPFSYYDFLWAVLLVYPFLWLKLYLQLFKQRKSKLGKSKKLHGKRKRM

SEQ ID NO: 107488 - protein, 146 aa, Arabidopsis thaliana
  peptide (1)..(146): Ceres Seq. ID no. 13650417
  misc_feature (1)..(137): Pfam Name: Protein tyrosine phosphatase-like protein, PTPLA Pfam Description: Protein tyrosine phosphatase-like protein, PTPLA
  misc_feature (1)..(146): Homolog of NCBI NO: 26453242 NR Description: unknown protein [Arabidopsis thaliana]
  misc_feature (42)..(146): Homolog of NCBI NO: 9758842 NR Description: gene_id:MTH12.2~unknown protein [Arabidopsis
  misc_feature (1)..(42): Homolog of NCBI NO: 15238517 NR Description: expressed protein [Arabidopsis thaliana]
  misc_feature (109)..(146): Homolog of NCBI NO: 15238517 NR Description: expressed protein [Arabidopsis thaliana]
  misc_feature (1)..(142): Homolog of NCBI NO: 34869216 NR Description: similar to protein tyrosine phosphatase-like
  misc_feature (1)..(142): Homolog of NCBI NO: 20892371 NR Description: similar to protein tyrosine phosphatase-like PTPLB [Mus musculus] >gi|12857727|dbj|BAB31092.1| unnamed protein [Mus musculus] >gi|20070640|gb|AAH27289.1| RIKEN cDNA 6330408J20
  misc_feature (1)..(134): Homolog of NCBI NO: 27882121 NR Description: Similar to RIKEN cDNA 6330408J20 gene [Danio
  misc_feature (1)..(142): Homolog of NCBI NO: 12963741 NR Description: protein tyrosine phosphatase-like protein PTPLB
  misc_feature (1)..(134): Homolog of NCBI NO: 31202853 NR Description: ENSANGP00000018910 [Anopheles gambiae]
  misc_feature (1)..(142): Homolog of NCBI NO: 6851207 NR Description: protein tyrosine phosphatase-like protein PTPLA
MQWSGRTHFILAIVGQIKEVQDSPWLSITLVAWCIGEMIRYPHYAFTCLGRCPYWLTYLRYTGFIVIYPTGLVGELLIMYKALPYVKERNLYANFFSVFPFSYYDFLWAVLLVYPFLWLKLYLQLFKQRKSKLGKSKKLHGKRKRM

SEQ ID NO: 107489 - DNA, 908 bp, Arabidopsis thaliana
  misc_feature (1)..(908): Ceres Seq. ID no. 13650422
  misc_feature: MA Experiment ID: 20000185 Result: Down-regulated in Transcription
  misc_feature: MA Experiment 20000185 PARAMETER Experiment Name: At_Roots__P Parameter: Age (day) Value: 7 vs. 21
  misc_feature: MA Experiment 20000185 PARAMETER Experiment Name: At_Roots__P Parameter: Organism Value: A. thaliana
  misc_feature: MA Experiment 20000185 PARAMETER Experiment Name: At_Roots__P Parameter: Tissue Value: Roots vs. Whole Plant
  misc_feature: MA Experiment ID: 20000234 Result: Down-regulated in Transcription
  misc_feature: MA Experiment 20000234 PARAMETER Experiment Name: At_Siliques_P Parameter: Age (day) Value: 21
  misc_feature: MA Experiment 20000234 PARAMETER Experiment Name: At_Siliques_P Parameter: Organism Value: A. thaliana
  misc_feature: MA Experiment 20000234 PARAMETER Experiment Name: At_Siliques_P Parameter: Plant Line Value: WS
  misc_feature: MA Experiment 20000234 PARAMETER Experiment Name: At_Siliques_P Parameter: Tissue Value: Less Than 5mm Siliques vs. Whole Plant
  misc_feature: MA Experiment ID: 20000265 Result: Down-regulated in Transcription
  misc_feature: MA Experiment 20000265 PARAMETER Experiment Name: At_Open_Flower_P Parameter: Age (day) Value: 21
  misc_feature: MA Experiment 20000265 PARAMETER Experiment Name: At_Open_Flower_P Parameter: Plant Line Value: WS
  misc_feature: MA Experiment 20000265 PARAMETER Experiment Name: At_Open_Flower_P Parameter: Tissue Value: Closed Flower vs. Whole Plant
  misc_feature: MA Experiment ID: 20000436 Result: Down-regulated in Transcription
  misc_feature: MA Experiment 20000436 PARAMETER Experiment Name: At_Drought_P Parameter: Age (day) Value: 7
  misc_feature: MA Experiment 20000436 PARAMETER Experiment Name: At_Drought_P Parameter: Organism Value: A. thaliana
  misc_feature: MA Experiment 20000436 PARAMETER Experiment Name: At_Drought_P Parameter: Plant Line Value: WS
  misc_feature: MA Experiment 20000436 PARAMETER Experiment Name: At_Drought_P Parameter: Timepoint (hr) Value: 12
  misc_feature: MA Experiment 20000436 PARAMETER Experiment Name: At_Drought_P Parameter: Tissue Value: Whole Plant
  misc_feature: MA Experiment 20000436 PARAMETER Experiment Name: At_Drought_P Parameter: Treatment Value: Drought vs. No Drought
  misc_feature: MA Experiment ID: 20000437 Result: Down-regulated in Transcription
  misc_feature: MA Experiment 20000437 PARAMETER Experiment Name: At_Drought_P Parameter: Age (day) Value: 8
  misc_feature: MA Experiment 20000437 PARAMETER Experiment Name: At_Drought_P Parameter: Organism Value: A. thaliana
  misc_feature: MA Experiment 20000437 PARAMETER Experiment Name: At_Drought_P Parameter: Plant Line Value: WS
  misc_feature: MA Experiment 20000437 PARAMETER Experiment Name: At_Drought_P Parameter: Timepoint (hr) Value: 24
  misc_feature: MA Experiment 20000437 PARAMETER Experiment Name: At_Drought_P Parameter: Tissue Value: Whole Plant
  misc_feature: MA Experiment 20000437 PARAMETER Experiment Name: At_Drought_P Parameter: Treatment Value: Drought vs. No Drought
  misc_feature: MA Experiment ID: 20000439 Result: Down-regulated in Transcription
  misc_feature: MA Experiment 20000439 PARAMETER Experiment Name: At_Roots__P Parameter: Age (day) Value: 14 vs. 21
  misc_feature: MA Experiment 20000439 PARAMETER Experiment Name: At_Roots__P Parameter: Organism Value: A. thaliana
  misc_feature: MA Experiment 20000439 PARAMETER Experiment Name: At_Roots__P Parameter: Tissue Value: Roots vs. Whole Plant
attacataattcttcagatccataaaacaaattgatcccttaaccttcttcaccaacatctctcttacactcaacaagagatcatatcatgtcctctccaagagaaagaggaaagagtttgatggaatcatcaggatcagagccaccggtgacaccaagccgttacgagtcgcagaagagacgtgactggaacactttcggacagtacttgaagaatcagagaccgcctgtgccgatgtctcactgcagctgtaaccacgtgcttgatttcctcaggtacttagaccagttcggtaagacaaaggtgcacgtgcctggctgtatgttctacggccagcctgagccaccagctccttgcacgtgccctctcagacaagcttggggaagtcttgacgctttgatcggacggctgagagcggcttacgaggagaacggtggacctccggagactaaccctttcgctagcggagcgataagggtttatctgagggaggttagggagtgtcaggctaaggctagagggattccttacaagaagaagaagaagaagaagccaacgccggagatgggaggtgggagagaggactcttcttcctcctcctcttccttcagcttctcttaagagattctccatcgtcgtgaaagactttgtggatcagtaagtctcaaagagggatcaaatgtaaaagagacctcaaatctatctactggtatcttcaacatatctttcgggaccatttttgcagctcttcgtcccctcctcttcatttccgcagatctccgtcgtcataaatatcttcatctattctcttattaagctctattcatatttattctcttattaagcacttttcttttgaataaagtaagtgtaaagagtttatatattgaattcaggtgtgttttgc

SEQ ID NO: 107490 - protein, 177 aa, Arabidopsis thaliana; identical to SEQ ID NO: 106285
  peptide (1)..(177): Ceres Seq. ID no. 13650423
  misc_feature (7)..(139): Pfam Name: Protein of unknown function (DUF640) Pfam Description: Protein of unknown function (DUF640)
  misc_feature (1)..(177): Homolog of NCBI NO: 18406012 NR Description: expressed protein [Arabidopsis thaliana]
  misc_feature (14)..(173): Homolog of NCBI NO: 34907938 NR Description: B1088C09.17 [Oryza sativa (japonica
  misc_feature (17)..(173): Homolog of NCBI NO: 18390725 NR Description: expressed protein [Arabidopsis thaliana]
  misc_feature (14)..(174): Homolog of NCBI NO: 18402578 NR Description: expressed protein [Arabidopsis thaliana]
  misc_feature (8)..(172): Homolog of NCBI NO: 37535384 NR Description: hypothetical protein [Oryza sativa (japonica group)] >gi|10140752|gb|AAG13584.1| hypothetical protein [Oryza >gi|31432676|gb|AAP54281.1| hypothetical protein [Oryza sativa
  misc_feature (1)..(175): Homolog of NCBI NO: 21592379 NR Description: unknown [Arabidopsis thaliana]
  misc_feature (14)..(168): Homolog of NCBI NO: 38344650 NR Description: OSJNBb0072M01.12 [Oryza sativa (japonica
  misc_feature (2)..(175): Homolog of NCBI NO: 18412120 NR Description: expressed protein [Arabidopsis thaliana]
  misc_feature (1)..(177): Homolog of NCBI NO: 15233942 NR Description: expressed protein [Arabidopsis thaliana]
  misc_feature (8)..(173): Homolog of NCBI NO: 15237680 NR Description: hypothetical protein [Arabidopsis thaliana] gb|AAC63835.1~gene_id:MQJ2.11~similar to unknown protein

SEQ ID NO: 107491 - protein, 166 aa, Arabidopsis thaliana; identical to SEQ ID NO: 106286
  peptide (1)..(166): Ceres Seq. ID no. 13650424
  misc_feature (1)..(128): Pfam Name: Protein of unknown function (DUF640) Pfam Description: Protein of unknown function (DUF640)
  misc_feature (1)..(166): Homolog of NCBI NO: 18406012 NR Description: expressed protein [Arabidopsis thaliana]
  misc_feature (3)..(162): Homolog of NCBI NO: 34907938 NR Description: B1088C09.17 [Oryza sativa (japonica
  misc_feature (6)..(162): Homolog of NCBI NO: 18390725 NR Description: expressed protein [Arabidopsis thaliana]
  misc_feature (3)..(163): Homolog of NCBI NO: 18402578 NR Description: expressed protein [Arabidopsis thaliana]
  misc_feature (1)..(161): Homolog of NCBI NO: 37535384 NR Description: hypothetical protein [Oryza sativa (japonica group)] >gi|10140752|gb|AAG13584.1| hypothetical protein [Oryza >gi|31432676|gb|AAP54281.1| hypothetical protein [Oryza sativa
  misc_feature (1)..(164): Homolog of NCBI NO: 21592379 NR Description: unknown [Arabidopsis thaliana]
  misc_feature (3)..(157): Homolog of NCBI NO: 38344650 NR Description: OSJNBb0072M01.12 [Oryza sativa (japonica
  misc_feature (1)..(164): Homolog of NCBI NO: 18412120 NR Description: expressed protein [Arabidopsis thaliana]
  misc_feature (1)..(166): Homolog of NCBI NO: 15233942 NR Description: expressed protein [Arabidopsis thaliana]
  misc_feature (1)..(162): Homolog of NCBI NO: 15237680 NR Description: hypothetical protein [Arabidopsis thaliana] gb|AAC63835.1~gene_id:MQJ2.11~similar to unknown protein

SEQ ID NO: 107492 - protein, 128 aa, Arabidopsis thaliana; identical to SEQ ID NO: 106287
  peptide (1)..(128): Ceres Seq. ID no. 13650425
  misc_feature (1)..(90): Pfam Name: Protein of unknown function (DUF640) Pfam Description: Protein of unknown function (DUF640)
  misc_feature (1)..(128): Homolog of NCBI NO: 18406012 NR Description: expressed protein [Arabidopsis thaliana]
  misc_feature (1)..(124): Homolog of NCBI NO: 34907938 NR Description: B1088C09.17 [Oryza sativa (japonica
  misc_feature (1)..(124): Homolog of NCBI NO: 18390725 NR Description: expressed protein [Arabidopsis thaliana]
  misc_feature (1)..(125): Homolog of NCBI NO: 18402578 NR Description: expressed protein [Arabidopsis thaliana]
  misc_feature (1)..(123): Homolog of NCBI NO: 37535384 NR Description: hypothetical protein [Oryza sativa (japonica group)] >gi|10140752|gb|AAG13584.1| hypothetical protein [Oryza >gi|31432676|gb|AAP54281.1| hypothetical protein [Oryza sativa
  misc_feature (1)..(126): Homolog of NCBI NO: 21592379 NR Description: unknown [Arabidopsis thaliana]
  misc_feature (1)..(119): Homolog of NCBI NO: 38344650 NR Description: OSJNBb0072M01.12 [Oryza sativa (japonica
  misc_feature (1)..(126): Homolog of NCBI NO: 18412120 NR Description: expressed protein [Arabidopsis thaliana]
  misc_feature (1)..(128): Homolog of NCBI NO: 15233942 NR Description: expressed protein [Arabidopsis thaliana]
  misc_feature (1)..(124): Homolog of NCBI NO: 15237680 NR Description: hypothetical protein [Arabidopsis thaliana] gb|AAC63835.1~gene_id:MQJ2.11~similar to unknown protein

SEQ ID NO: 107493 - DNA, 1333 bp, Arabidopsis thaliana
  misc_feature (1)..(1333): Ceres Seq. ID no. 13650443
  misc_feature: MA Experiment ID: 20000182 Result: Up-regulated in Transcription
  misc_feature: MA Experiment 20000182 PARAMETER Experiment Name: At_2mM_SA_P Parameter: Age (day) Value: 14
  misc_feature: MA Experiment 20000182 PARAMETER Experiment Name: At_2mM_SA_P Parameter: Organism Value: A. thaliana
  misc_feature: MA Experiment 20000182 PARAMETER Experiment Name: At_2mM_SA_P Parameter: Plant Line Value: WS
  misc_feature: MA Experiment 20000182 PARAMETER Experiment Name: At_2mM_SA_P Parameter: Timepoint (hr) Value: 6
  misc_feature: MA Experiment 20000182 PARAMETER Experiment Name: At_2mM_SA_P Parameter: Tissue Value: Aerial
  misc_feature: MA Experiment 20000182 PARAMETER Experiment Name: At_2mM_SA_P Parameter: Treatment Value: 2mM SA vs. No Treatment
  misc_feature: MA Experiment ID: 20000227 Result: Down-regulated in Transcription
  misc_feature: MA Experiment 20000227 PARAMETER Experiment Name: At_Root-Tips-vs-Tops_P Parameter: Tissue Value: Root Tips vs. Root Tops
tgggaacgaaaaaacagagaagttagaattacaatttacagagcaaatcaaaggatctcaatttctttagtcaacaggtgttccttctcttcttcctcgattcggaggtagagaagaaaaatggcagctccggcgatcctaaacggcggcgatgcgacggagagagaaacacgaatggctcactctgcaatgacattggttcaggtcataaatggaggataccatgtggttacgaaagtagctcttaacgttggtgtaaatcagctcgttttttgtgtctttcgcgatcttcttgctctctccattctcgcacctctcgcttttttccgtgaaagaacgatcagacctcctatgaatagaagcatcttcttttcactcttctttcttggtttagcagggatatttgggaaccagttactatttcttatgggtttatcttacacgaatccaacttatgctgctgctatacaaccatcaatccctgtctttacatttctcttggctgtcttgatgggtacagaaaaagtgaacttgttgaaagtcgagggccaaacgaaagttggaggtactcttgtttgtgtttcgggtgctatagcgatggctttgtttcgtggtccagccttgtttggagtctctagttttcttggtcttgggtttgatcaatggcacattggagttttatgtttgattggaaactgtatgtgtatggctgcttttctcgctgtccaagcaccggttttgaagaagtatcctgcctacctttcggttgctgcgtattcatacttcttcggtgcatcaataatgatcacaacagctatcttgtttgttagagagcctaaagattggagcttaacacaatctgaggttcttgctgttatattcgcaggagtgtttgcctcagctctaaactatggactcttgacttggtccaataaaattcttggagctgctttggtttccctatacaatcctcttcagcctgcaacatcggcctttttatcgacaattttcctcggcagcccgatctatcttggaagcgttttgggtggaatcctcatcatttgcgggctttatatggttacttgggcatcttacagagagcaacaaacaacatcagctgggaatgagattgcttcttctagtgatgtaagaatctcggaacctttcatttacagagatgagactggtaaataaataagaaaaggtaaagaaaggatacttgtaccgttgtacgtagttaatatcagacaaaaacttgacaaatcatacaattttttcgagttcaaacattgattctttaaacggtaaataattcaaaataattacttcgccc

SEQ ID NO: 107494 - protein, 357 aa, Arabidopsis thaliana
  peptide (1)..(357): Ceres Seq. ID no. 13650444
  misc_feature (195)..(322): Pfam Name: Integral membrane protein DUF6 Pfam Description: Integral membrane protein DUF6
  misc_feature (1)..(357): Homolog of NCBI NO: 30694751 NR Description: nodulin N21 family protein [Arabidopsis thaliana]
  misc_feature (171)..(351): Homolog of NCBI NO: 18415262 NR Description: nodulin-related protein [Arabidopsis thaliana] AT4g19180/T18B16_150 [Arabidopsis thaliana] At4g19180/T18B16_150 [Arabidopsis thaliana]
  misc_feature (1)..(170): Homolog of NCBI NO: 18415262 NR Description: nodulin-related protein [Arabidopsis thaliana] AT4g19180/T18B16_150 [Arabidopsis thaliana] At4g19180/T18B16_150 [Arabidopsis thaliana]
  misc_feature (171)..(351): Homolog of NCBI NO: 21593145 NR Description: unknown [Arabidopsis thaliana]
  misc_feature (24)..(170): Homolog of NCBI NO: 21593145 NR Description: unknown [Arabidopsis thaliana]
  misc_feature (1)..(357): Homolog of NCBI NO: 9758727 NR Description: nodulin-like protein [Arabidopsis thaliana]
  misc_feature (14)..(357): Homolog of NCBI NO: 15231274 NR Description: notdulin N21 family protein [Arabidopsis thaliana]
  misc_feature (1)..(170): Homolog of NCBI NO: 7487133 NR Description: hypothetical protein T18B16.150 - Arabidopsis >gi|2828293|emb|CAA16707.1| putative protein [Arabidopsis >gi|7268713|emb|CAB78920.1| putative protein [Arabidopsis
  misc_feature (202)..(305): Homolog of NCBI NO: 7487133 NR Description: hypothetical protein T18B16.150 - Arabidopsis >gi|2828293|emb|CAA16707.1| putative protein [Arabidopsis >gi|7268713|emb|CAB78920.1| putative protein [Arabidopsis
  misc_feature (171)..(196): Homolog of NCBI NO: 7487133 NR Description: hypothetical protein T18B16.150 - Arabidopsis >gi|2828293|emb|CAA16707.1| putative protein [Arabidopsis >gi|7268713|emb|CAB78920.1| putative protein [Arabidopsis
MAAPAILNGGDATERETRMAHSAMTLVQVINGGYHVVTKVALNVGVNQLVFCVFRDLLALSILAPLAFFRERTIRPPMNRSIFFSLFFLGLAGIFGNQLLFLMGLSYTNPTYAAAIQPSIPVFTFLLAVLMGTEKVNLLKVEGQTKVGGTLVCVSGAIAMALFRGPALFGVSSFLGLGFDQWHIGVLCLIGNCMCMAAFLAVQAPVLKKYPAYLSVAAYSYFFGASIMITTAILFVREPKDWSLTQSEVLAVIFAGVFASALNYGLLTWSNKILGAALVSLYNPLQPATSAFLSTIFLGSPIYLGSVLGGILIICGLYMVTWASYREQQTTSAGNEIASSSDVRISEPFIYRDETGK

SEQ ID NO: 107495 - protein, 339 aa, Arabidopsis thaliana
  peptide (1)..(339): Ceres Seq. ID no. 13650445
  misc_feature (177)..(304): Pfam Name: Integral membrane protein DUF6 Pfam Description: Integral membrane protein DUF6
  misc_feature (1)..(339): Homolog of NCBI NO: 30694751 NR Description: nodulin N21 family protein [Arabidopsis thaliana]
  misc_feature (153)..(333): Homolog of NCBI NO: 18415262 NR Description: nodulin-related protein [Arabidopsis thaliana] AT4g19180/T18B16_150 [Arabidopsis thaliana] At4g19180/T18B16_150 [Arabidopsis thaliana]
  misc_feature (1)..(152): Homolog of NCBI NO: 18415262 NR Description: nodulin-related protein [Arabidopsis thaliana] AT4g19180/T18B16_150 [Arabidopsis thaliana] At4g19180/T18B16_150 [Arabidopsis thaliana]
  misc_feature (153)..(333): Homolog of NCBI NO: 21593145 NR Description: unknown [Arabidopsis thaliana]
  misc_feature (6)..(152): Homolog of NCBI NO: 21593145 NR Description: unknown [Arabidopsis thaliana]
  misc_feature (1)..(339): Homolog of NCBI NO: 9758727 NR Description: nodulin-like protein [Arabidopsis thaliana]
  misc_feature (1)..(339): Homolog of NCBI NO: 15231274 NR Description: notdulin N21 family protein [Arabidopsis thaliana]
  misc_feature (1)..(152): Homolog of NCBI NO: 7487133 NR Description: hypothetical protein T18B16.150 - Arabidopsis >gi|2828293|emb|CAA16707.1| putative protein [Arabidopsis >gi|7268713|emb|CAB78920.1| putative protein [Arabidopsis
  misc_feature (184)..(287): Homolog of NCBI NO: 7487133 NR Description: hypothetical protein T18B16.150 - Arabidopsis >gi|2828293|emb|CAA16707.1| putative protein [Arabidopsis >gi|7268713|emb|CAB78920.1| putative protein [Arabidopsis
  misc_feature (153)..(178): Homolog of NCBI NO: 7487133 NR Description: hypothetical protein T18B16.150 - Arabidopsis >gi|2828293|emb|CAA16707.1| putative protein [Arabidopsis >gi|7268713|emb|CAB78920.1| putative protein [Arabidopsis
MAHSAMTLVQVINGGYHVVTKVALNVGVNQLVFCVFRDLLALSILAPLAFFRERTIRPPMNRSIFFSLFFLGLAGIFGNQLLFLMGLSYTNPTYAAAIQPSIPVFTFLLAVLMGTEKVNLLKVEGQTKVGGTLVCVSGAIAMALFRGPALFGVSSFLGLGFDQWHIGVLCLIGNCMCMAAFLAVQAPVLKKYPAYLSVAAYSYFFGASIMITTAILFVREPKDWSLTQSEVLAVIFAGVFASALNYGLLTWSNKILGAALVSLYNPLQPATSAFLSTIFLGSPIYLGSVLGGILIICGLYMVTWASYREQQTTSAGNEIASSSDVRISEPFIYRDETGK

SEQ ID NO: 107496 - protein, 334 aa, Arabidopsis thaliana
  peptide (1)..(334): Ceres Seq. ID no. 13650446
  misc_feature (172)..(299): Pfam Name: Integral membrane protein DUF6 Pfam Description: Integral membrane protein DUF6
  misc_feature (1)..(334): Homolog of NCBI NO: 30694751 NR Description: nodulin N21 family protein [Arabidopsis thaliana]
  misc_feature (148)..(328): Homolog of NCBI NO: 18415262 NR Description: nodulin-related protein [Arabidopsis thaliana] AT4g19180/T18B16_150 [Arabidopsis thaliana] At4g19180/T18B16_150 [Arabidopsis thaliana]
  misc_feature (1)..(147): Homolog of NCBI NO: 18415262 NR Description: nodulin-related protein [Arabidopsis thaliana] AT4g19180/T18B16_150 [Arabidopsis thaliana] At4g19180/T18B16_150 [Arabidopsis thaliana]
  misc_feature (148)..(328): Homolog of NCBI NO: 21593145 NR Description: unknown [Arabidopsis thaliana]
  misc_feature (1)..(147): Homolog of NCBI NO: 21593145 NR Description: unknown [Arabidopsis thaliana]
  misc_feature (1)..(334): Homolog of NCBI NO: 9758727 NR Description: nodulin-like protein [Arabidopsis thaliana]
  misc_feature (1)..(334): Homolog of NCBI NO: 15231274 NR Description: notdulin N21 family protein [Arabidopsis thaliana]
  misc_feature (1)..(147): Homolog of NCBI NO: 7487133 NR Description: hypothetical protein T18B16.150 - Arabidopsis >gi|2828293|emb|CAA16707.1| putative protein [Arabidopsis >gi|7268713|emb|CAB78920.1| putative protein [Arabidopsis
  misc_feature (179)..(282): Homolog of NCBI NO: 7487133 NR Description: hypothetical protein T18B16.150 - Arabidopsis >gi|2828293|emb|CAA16707.1| putative protein [Arabidopsis >gi|7268713|emb|CAB78920.1| putative protein [Arabidopsis
  misc_feature (148)..(173): Homolog of NCBI NO: 7487133 NR Description: hypothetical protein T18B16.150 - Arabidopsis >gi|2828293|emb|CAA16707.1| putative protein [Arabidopsis >gi|7268713|emb|CAB78920.1| putative protein [Arabidopsis
MTLVQVINGGYHVVTKVALNVGVNQLVFCVFRDLLALSILAPLAFFRERTIRPPMNRSIFFSLFFLGLAGIFGNQLLFLMGLSYTNPTYAAAIQPSIPVFTFLLAVLMGTEKVNLLKVEGQTKVGGTLVCVSGAIAMALFRGPALFGVSSFLGLGFDQWHIGVLCLIGNCMCMAAFLAVQAPVLKKYPAYLSVAAYSYFFGASIMITTAILFVREPKDWSLTQSEVLAVIFAGVFASALNYGLLTWSNKILGAALVSLYNPLQPATSAFLSTIFLGSPIYLGSVLGGILIICGLYMVTWASYREQQTTSAGNEIASSSDVRISEPFIYRDETGK

SEQ ID NO: 107497 - DNA, 1028 bp, Arabidopsis thaliana
  misc_feature (1)..(1028): Ceres Seq. ID no. 13650455
  misc_feature: MA Experiment ID: 20000227 Result: Down-regulated in Transcription
  misc_feature: MA Experiment 20000227 PARAMETER Experiment Name: At_Root-Tips-vs-Tops_P Parameter: Tissue Value: Root Tips vs. Root Tops
  misc_feature: MA Experiment ID: 20001451 Result: Down-regulated in Transcription
  misc_feature: MA Experiment 20001451 PARAMETER Experiment Name: At_Far-red-induction_P Parameter: Age (day) Value: 7
  misc_feature: MA Experiment 20001451 PARAMETER Experiment Name: At_Far-red-induction_P Parameter: Light Value: Far-red vs. White
  misc_feature: MA Experiment 20001451 PARAMETER Experiment Name: At_Far-red-induction_P Parameter: Organism Value: A. thaliana
  misc_feature: MA Experiment 20001451 PARAMETER Experiment Name: At_Far-red-induction_P Parameter: Plant Line Value: Columbia
  misc_feature: MA Experiment 20001451 PARAMETER Experiment Name: At_Far-red-induction_P Parameter: Timepoint (hr) Value: 24
  misc_feature: MA Experiment 20001451 PARAMETER Experiment Name: At_Far-red-induction_P Parameter: Tissue Value: Whole Plant
tcgctgtcgtcttacctcagcccgacgcgccttctagaaggctacctccgccgttgtctcagggcggcaggactgacgtcgcagacgctttccatagactctgaaacaaccatccacttctggggcccaccacctctagaccaccggagcgacgatgacagaccggttatgcttctcctccacggcttcggtccgtcgtccatgtggcagtggcggcgacagatgcaagccttctctccctccgctttcagggtttattctcccgatcttgtcttcttcggcgactctacctcttcctccaccaatcgcaccgaagtcttccaggaatagggaagtataatgtggctggaacaagctacggggggtttgttgcgtaccacatggccaaaatgtggccggaaaaagtggagaaagtggtgattgcaagctccggcatcaacatgcgaaagtgtgacggtgaaagtttattgcaaagatccaattgtgagtgcatcgagaaggttatgttaccatccactgcaactgagtttcgcacacttatggctttggcatcttcatggcggttagttcgtatgtttcctgatgctctctggaacgacgtaatcaataatagaaaagagaagatagaattgttgaagggagtgactttcggccggagcgaaaatttaaacatcgattctctttctcaggaggtcctaattgtatggggagacaaagatcagatatttcctgtgaagatggcttacgaattaaaagagattcttggagacaaaacgaaactagaaatcattgacaacacttcacatgttcctcagattgaatgtgctcaagagttcaacaatattgttttgagatttttgaagggttcttaagagccgtaattttattccatgctacatgattcttcagttttttttaagtgttaaactattggttacgtaattttgcgactttacttgccatgctttctcatttttcatgtaagaactttatccattactgtcattgtagagaactctatttataac

SEQ ID NO: 107498 - protein, 163 aa, Arabidopsis thaliana
  peptide (1)..(163): Ceres Seq. ID no. 13650456
  misc_feature (1)..(158): Pfam Name: alpha/beta hydrolase fold Pfam Description: alpha/beta hydrolase fold
  misc_feature (1)..(163): Homolog of NCBI NO: 30689631 NR Description: hydrolase, alpha/beta fold family [Arabidopsis
  misc_feature (1)..(163): Homolog of NCBI NO: 21592805 NR Description: unknown [Arabidopsis thaliana]
  misc_feature (1)..(160): Homolog of NCBI NO: 22326938 NR Description: hydrolase, alpha/beta fold family [Arabidopsis >gi|29294062|gb|AAO73899.1| hydrolase, alpha/beta fold family
  misc_feature (1)..(73): Homolog of NCBI NO: 13374854 NR Description: putative protein [Arabidopsis thaliana]
  misc_feature (1)..(76): Homolog of NCBI NO: 7486445 NR Description: hypothetical protein F4I10.120 - Arabidopsis >gi|4455333|emb|CAB36793.1| hypothetical protein [Arabidopsis >gi|7270267|emb|CAB80036.1| hypothetical protein [Arabidopsis
  misc_feature (1)..(163): Homolog of NCBI NO: 27436745 NR Description: Hypothetical protein [Oryza sativa (japonica
  misc_feature (1)..(160): Homolog of NCBI NO: 26451507 NR Description: unknown protein [Arabidopsis thaliana]
  misc_feature (1)..(163): Homolog of NCBI NO: 27436746 NR Description: Unknown protein [Oryza sativa (japonica
  misc_feature (1)..(162): Homolog of NCBI NO: 15218538 NR Description: hydrolase, alpha/beta fold family [Arabidopsis
  misc_feature (1)..(160): Homolog of NCBI NO: 34896168 NR Description: contains ESTs
MAKMWPEKVEKVVIASSGINMRKCDGESLLQRSNCECIEKVMLPSTATEFRTLMALASSWRLVRMFPDALWNDVINNRKEKIELLKGVTFGRSENLNIDSLSQEVLIVWGDKDQIFPVKMAYELKEILGDKTKLEIIDNTSHVPQIECAQEFNNIVLRFLKGS

SEQ ID NO: 107499 - protein, 160 aa, Arabidopsis thaliana
  peptide (1)..(160): Ceres Seq. ID no. 13650457
  misc_feature (1)..(155): Pfam Name: alpha/beta hydrolase fold Pfam Description: alpha/beta hydrolase fold
  misc_feature (1)..(160): Homolog of NCBI NO: 30689631 NR Description: hydrolase, alpha/beta fold family [Arabidopsis
  misc_feature (1)..(160): Homolog of NCBI NO: 21592805 NR Description: unknown [Arabidopsis thaliana]
  misc_feature (1)..(157): Homolog of NCBI NO: 22326938 NR Description: hydrolase, alpha/beta fold family [Arabidopsis >gi|29294062|gb|AAO73899.1| hydrolase, alpha/beta fold family
  misc_feature (1)..(70): Homolog of NCBI NO: 13374854 NR Description: putative protein [Arabidopsis thaliana]
  misc_feature (1)..(73): Homolog of NCBI NO: 7486445 NR Description: hypothetical protein F4I10.120 - Arabidopsis >gi|4455333|emb|CAB36793.1| hypothetical protein [Arabidopsis >gi|7270267|emb|CAB80036.1| hypothetical protein [Arabidopsis
  misc_feature (1)..(160): Homolog of NCBI NO: 27436745 NR Description: Hypothetical protein [Oryza sativa (japonica
  misc_feature (1)..(157): Homolog of NCBI NO: 26451507 NR Description: unknown protein [Arabidopsis thaliana]
  misc_feature (1)..(160): Homolog of NCBI NO: 27436746 NR Description: Unknown protein [Oryza sativa (japonica
  misc_feature (1)..(159): Homolog of NCBI NO: 15218538 NR Description: hydrolase, alpha/beta fold family [Arabidopsis
  misc_feature (1)..(157): Homolog of NCBI NO: 34896168 NR Description: contains ESTs
MWPEKVEKVVIASSGINMRKCDGESLLQRSNCECIEKVMLPSTATEFRTLMALASSWRLVRMFPDALWNDVINNRKEKIELLKGVTFGRSENLNIDSLSQEVLIVWGDKDQIFPVKMAYELKEILGDKTKLEIIDNTSHVPQIECAQEFNNIVLRFLKGS

SEQ ID NO: 107500 - protein, 143 aa, Arabidopsis thaliana
  peptide (1)..(143): Ceres Seq. ID no. 13650458
  misc_feature (1)..(138): Pfam Name: alpha/beta hydrolase fold Pfam Description: alpha/beta hydrolase fold
  misc_feature (1)..(143): Homolog of NCBI NO: 30689631 NR Description: hydrolase, alpha/beta fold family [Arabidopsis
  misc_feature (1)..(143): Homolog of NCBI NO: 21592805 NR Description: unknown [Arabidopsis thaliana]
  misc_feature (1)..(140): Homolog of NCBI NO: 22326938 NR Description: hydrolase, alpha/beta fold family [Arabidopsis >gi|29294062|gb|AAO73899.1| hydrolase, alpha/beta fold family
  misc_feature (1)..(53): Homolog of NCBI NO: 13374854 NR Description: putative protein [Arabidopsis thaliana]
  misc_feature (1)..(56): Homolog of NCBI NO: 7486445 NR Description: hypothetical protein F4I10.120 - Arabidopsis >gi|4455333|emb|CAB36793.1| hypothetical protein [Arabidopsis >gi|7270267|emb|CAB80036.1| hypothetical protein [Arabidopsis
  misc_feature (1)..(143): Homolog of NCBI NO: 27436745 NR Description: Hypothetical protein [Oryza sativa (japonica
  misc_feature (1)..(140): Homolog of NCBI NO: 26451507 NR Description: unknown protein [Arabidopsis thaliana]
  misc_feature (1)..(143): Homolog of NCBI NO: 27436746 NR Description: Unknown protein [Oryza sativa (japonica
  misc_feature (1)..(142): Homolog of NCBI NO: 15218538 NR Description: hydrolase, alpha/beta fold family [Arabidopsis
  misc_feature (1)..(140): Homolog of NCBI NO: 34896168 NR Description: contains ESTs
MRKCDGESLLQRSNCECIEKVMLPSTATEFRTLMALASSWRLVRMFPDALWNDVINNRKEKIELLKGVTFGRSENLNIDSLSQEVLIVWGDKDQIFPVKMAYELKEILGDKTKLEIIDNTSHVPQIECAQEFNNIVLRFLKGS

SEQ ID NO: 107501 - DNA, 1672 bp, Arabidopsis thaliana
  misc_feature (1)..(1672): Ceres Seq. ID no. 13650484
  misc_feature: MA Experiment ID: 20000179 Result: Up-regulated in Transcription
  misc_feature: MA Experiment 20000179 PARAMETER Experiment Name: At_Germinating_Seeds_P Parameter: Age (hr) Value: 6 vs. 0
  misc_feature: MA Experiment 20000179 PARAMETER Experiment Name: At_Germinating_Seeds_P Parameter: Tissue Value: Germinating Seeds
  misc_feature: MA Experiment ID: 20000180 Result: Up-regulated in Transcription
  misc_feature: MA Experiment 20000180 PARAMETER Experiment Name: At_Germinating_Seeds_P Parameter: Age (hr) Value: 24 vs. 0
  misc_feature: MA Experiment 20000180 PARAMETER Experiment Name: At_Germinating_Seeds_P Parameter: Tissue Value: Germinating Seeds
  misc_feature: MA Experiment ID: 20000573 Result: Up-regulated in Transcription
  misc_feature: MA Experiment 20000573 PARAMETER Experiment Name: At_100uM_ABA_Mutants__P Parameter: Organism Value: A. thaliana
  misc_feature: MA Experiment 20000573 PARAMETER Experiment Name: At_100uM_ABA_Mutants__P Parameter: Plant Line Value: CS22 vs. Ler wt
  misc_feature: MA Experiment 20000573 PARAMETER Experiment Name: At_100uM_ABA_Mutants__P Parameter: Timepoint (hr) Value: N/A
  misc_feature: MA Experiment 20000573 PARAMETER Experiment Name: At_100uM_ABA_Mutants__P Parameter: Tissue Value: Whole Plant
  misc_feature: MA Experiment 20000573 PARAMETER Experiment Name: At_100uM_ABA_Mutants__P Parameter: Treatment Value: None
  misc_feature: Pfam Name: Kinesin Pfam Description: Kinesin motor domain
agatttcgagtttcttctttcccgcccgtaagagaaaccctactctgactctccactccatttgagagactgagctcgttccgataaggagaggagatgtctaacgtaaccgtctgtgcgcgattcaggccgcgaagctctaaagagatgcgcgatcccagcagagatggtgtctgtgctcgacccatcgacgctgaaaccttcgttttccaagatgacaaggaagatgaatttacatttagcctcgatagagttttttatgaggactctacccaagctgcggtttatgagtttctggctctccccatcatgagagacgctgtaaatggtataaacggaacaatcatcacttatggacagacaggggctgggaagacttattccatggagggaccaggcatccaggactgtgatgagcacaataaaggacttcttccaagagtggtccatgggatgtttgagcaaatcagctcttccaatgatattgcaagatacactgttaaattgtctatggttgagatctacatggagaaagtcagggacctgttggacttatcaaaagcaaacatacagatcaaggagaacaaaacacaaggaatactcttgtcaggcgttacagaggtgcctgtatcagattcggtggaggcattacaacatctatgcaccggtttagctaaccgcgcagttggggaaacccaaatgaatatgtccagcagtagaagccactgcgcctacttgttcacaatccagcaggattcagttaaagataaaagggtaaaaacaggaaaactgattcttgtcgacctggctggctcagagaaagcagacaaaactggagcagaaggtagggttcttgaagaagcgaagacgatcaataaatcgctctcagccttggggaacgtgataaacgctctcactagtgggccatctagcaaagggaatcacataccatatcgtgactccaagcttactcgcatcttacaggatgccctgggtggaaattctcgaatggcgctgctttgctgttgctcaccaagcactttaaatgcatctgagacgctctcaactctcaggtttggcatgagggcaaaacacataaaagcatcaccacgtgctagtgaagtgaaatctgcgaaggcacaggaggaaccctcctcggttaccaaagatgaaaaatgtgggaggatcctagaaaagatgaaagagaggatgagcaacgaagacatcaaaatgctagaagatgtgtttatacaggaagggatcattttcagcctagattcgatggctgaagtggaaaccgtatacgaagatattgtatcaaaaactatacaatccttacagcaggctgttgatgaactccaacagaaagtcaaaaagttagaagcagaaaacataggtattcaggaacaagcattgcgcaatcacgaacctggttcggtcggaaagatgtcaaggttcatcagttcttggtatgcatcgttctttacgtcctaaagatgataaaatgaatatactatcttggtaatgtagtagatgtggacaagtagatggtaaagagataagtttctctttttaggtcgtgagagcaaaacagatattaacattcaaaggtatgtaatgaaatagtagataaaaaatggatgggaggatgaataaaagctaattaagagag

SEQ ID NO: 107502 - protein, 465 aa, Arabidopsis thaliana
  peptide (1)..(465): Ceres Seq. ID no. 13650485
  misc_feature: Pfam Name: Kinesin Pfam Description: Kinesin motor domain
  misc_feature (1)..(465): Homolog of NCBI NO: 30695816 NR Description: kinesin heavy chain, putative [Arabidopsis >gi|26453185|dbj|BAC43667.1| putative kinesin heavy chain thaliana] >gi|28951063|gb|AAO63455.1| At3g63480 [Arabidopsis
  misc_feature (1)..(465): Homolog of NCBI NO: 18412812 NR Description: kinesin heavy chain, putative [Arabidopsis
  misc_feature (1)..(465): Homolog of NCBI NO: 21553553 NR Description: kinesin heavy chain-like protein [Arabidopsis
  misc_feature (220)..(465): Homolog of NCBI NO: 11358473 NR Description: kinesin heavy chain-like protein - Arabidopsis
  misc_feature (1)..(175): Homolog of NCBI NO: 11358473 NR Description: kinesin heavy chain-like protein - Arabidopsis
  misc_feature (1)..(346): Homolog of NCBI NO: 27261501 NR Description: kinesin 1 [Dictyostelium discoideum]
  misc_feature (1)..(346): Homolog of NCBI NO: 40074457 NR Description: kinesin family member 3 [Dictyostelium discoideum]
  misc_feature (2)..(335): Homolog of NCBI NO: 6016438 NR Description: KINESIN HEAVY CHAIN (SYNKIN)
  misc_feature (2)..(350): Homolog of NCBI NO: 6016437 NR Description: Kinesin heavy chain >gi|7441386|pir||T10164
  misc_feature (2)..(350): Homolog of NCBI NO: 17942987 NR Description: Chain A, Structure Of A Fast Kinesin:
MSNVTVCARFRPRSSKEMRDPSRDGVCARPIDAETFVFQDDKEDEFTFSLDRVFYEDSTQAAVYEFLALPIMRDAVNGINGTIITYGQTGAGKTYSMEGPGIQDCDEHNKGLLPRVVHGMFEQISSSNDIARYTVKLSMVEIYMEKVRDLLDLSKANIQIKENKTQGILLSGVTEVPVSDSVEALQHLCTGLANRAVGETQMNMSSSRSHCAYLFTIQQDSVKDKRVKTGKLILVDLAGSEKADKTGAEGRVLEEAKTINKSLSALGNVINALTSGPSSKGNHIPYRDSKLTRILQDALGGNSRMALLCCCSPSTLNASETLSTLRFGMRAKHIKASPRASEVKSAKAQEEPSSVTKDEKCGRILEKMKERMSNEDIKMLEDVFIQEGIIFSLDSMAEVETVYEDIVSKTIQSLQQAVDELQQKVKKLEAENIGIQEQALRNHEPGSVGKMSRFISSWYASFFTS

SEQ ID NO: 107503 - protein, 448 aa, Arabidopsis thaliana
  peptide (1)..(448): Ceres Seq. ID no. 13650486
  misc_feature: Pfam Name: Kinesin Pfam Description: Kinesin motor domain
  misc_feature (1)..(448): Homolog of NCBI NO: 30695816 NR Description: kinesin heavy chain, putative [Arabidopsis >gi|26453185|dbj|BAC43667.1| putative kinesin heavy chain thaliana] >gi|28951063|gb|AAO63455.1| At3g63480 [Arabidopsis
  misc_feature (1)..(448): Homolog of NCBI NO: 18412812 NR Description: kinesin heavy chain, putative [Arabidopsis
  misc_feature (1)..(448): Homolog of NCBI NO: 21553553 NR Description: kinesin heavy chain-like protein [Arabidopsis
  misc_feature (203)..(448): Homolog of NCBI NO: 11358473 NR Description: kinesin heavy chain-like protein - Arabidopsis
  misc_feature (1)..(158): Homolog of NCBI NO: 11358473 NR Description: kinesin heavy chain-like protein - Arabidopsis
  misc_feature (1)..(329): Homolog of NCBI NO: 27261501 NR Description: kinesin 1 [Dictyostelium discoideum]
  misc_feature (1)..(329): Homolog of NCBI NO: 40074457 NR Description: kinesin family member 3 [Dictyostelium discoideum]
  misc_feature (1)..(318): Homolog of NCBI NO: 6016438 NR Description: KINESIN HEAVY CHAIN (SYNKIN)
  misc_feature (1)..(333): Homolog of NCBI NO: 6016437 NR Description: Kinesin heavy chain >gi|7441386|pir||T10164
  misc_feature (1)..(333): Homolog of NCBI NO: 17942987 NR Description: Chain A, Structure Of A Fast Kinesin:
MRDPSRDGVCARPIDAETFVFQDDKEDEFTFSLDRVFYEDSTQAAVYEFLALPIMRDAVNGINGTIITYGQTGAGKTYSMEGPGIQDCDEHNKGLLPRVVHGMFEQISSSNDIARYTVKLSMVEIYMEKVRDLLDLSKANIQIKENKTQGILLSGVTEVPVSDSVEALQHLCTGLANRAVGETQMNMSSSRSHCAYLFTIQQDSVKDKRVKTGKLILVDLAGSEKADKTGAEGRVLEEAKTINKSLSALGNVINALTSGPSSKGNHIPYRDSKLTRILQDALGGNSRMALLCCCSPSTLNASETLSTLRFGMRAKHIKASPRASEVKSAKAQEEPSSVTKDEKCGRILEKMKERMSNEDIKMLEDVFIQEGIIFSLDSMAEVETVYEDIVSKTIQSLQQAVDELQQKVKKLEAENIGIQEQALRNHEPGSVGKMSRFISSWYASFFTS

SEQ ID NO: 107504 - protein, 394 aa, Arabidopsis thaliana
  peptide (1)..(394): Ceres Seq. ID no. 13650487
  misc_feature: Pfam Name: Kinesin Pfam Description: Kinesin motor domain
  misc_feature (1)..(394): Homolog of NCBI NO: 30695816 NR Description: kinesin heavy chain, putative [Arabidopsis >gi|26453185|dbj|BAC43667.1| putative kinesin heavy chain thaliana] >gi|28951063|gb|AAO63455.1| At3g63480 [Arabidopsis
  misc_feature (1)..(394): Homolog of NCBI NO: 18412812 NR Description: kinesin heavy chain, putative [Arabidopsis
  misc_feature (1)..(394): Homolog of NCBI NO: 21553553 NR Description: kinesin heavy chain-like protein [Arabidopsis
  misc_feature (149)..(394): Homolog of NCBI NO: 11358473 NR Description: kinesin heavy chain-like protein - Arabidopsis
  misc_feature (1)..(104): Homolog of NCBI NO: 11358473 NR Description: kinesin heavy chain-like protein - Arabidopsis
  misc_feature (1)..(275): Homolog of NCBI NO: 27261501 NR Description: kinesin 1 [Dictyostelium discoideum]
  misc_feature (1)..(275): Homolog of NCBI NO: 40074457 NR Description: kinesin family member 3 [Dictyostelium discoideum]
  misc_feature (1)..(264): Homolog of NCBI NO: 6016438 NR Description: KINESIN HEAVY CHAIN (SYNKIN)
  misc_feature (1)..(279): Homolog of NCBI NO: 6016437 NR Description: Kinesin heavy chain >gi|7441386|pir||T10164
  misc_feature (1)..(279): Homolog of NCBI NO: 17942987 NR Description: Chain A, Structure Of A Fast Kinesin:
MRDAVNGINGTIITYGQTGAGKTYSMEGPGIQDCDEHNKGLLPRVVHGMFEQISSSNDIARYTVKLSMVEIYMEKVRDLLDLSKANIQIKENKTQGILLSGVTEVPVSDSVEALQHLCTGLANRAVGETQMNMSSSRSHCAYLFTIQQDSVKDKRVKTGKLILVDLAGSEKADKTGAEGRVLEEAKTINKSLSALGNVINALTSGPSSKGNHIPYRDSKLTRILQDALGGNSRMALLCCCSPSTLNASETLSTLRFGMRAKHIKASPRASEVKSAKAQEEPSSVTKDEKCGRILEKMKERMSNEDIKMLEDVFIQEGIIFSLDSMAEVETVYEDIVSKTIQSLQQAVDELQQKVKKLEAENIGIQEQALRNHEPGSVGKMSRFISSWYASFFTS

SEQ ID NO: 107505 - DNA, 1079 bp, Arabidopsis thaliana
  misc_feature (1)..(1079): Ceres Seq. ID no. 13650523
  misc_feature: MA Experiment ID: 20000180 Result: Down-regulated in Transcription
  misc_feature: MA Experiment 20000180 PARAMETER Experiment Name: At_Germinating_Seeds_P Parameter: Age (hr) Value: 24 vs. 0
  misc_feature: MA Experiment 20000180 PARAMETER Experiment Name: At_Germinating_Seeds_P Parameter: Tissue Value: Germinating Seeds
  misc_feature: MA Experiment ID: 20000437 Result: Down-regulated in Transcription
  misc_feature: MA Experiment 20000437 PARAMETER Experiment Name: At_Drought_P Parameter: Age (day) Value: 8
  misc_feature: MA Experiment 20000437 PARAMETER Experiment Name: At_Drought_P Parameter: Organism Value: A. thaliana
  misc_feature: MA Experiment 20000437 PARAMETER Experiment Name: At_Drought_P Parameter: Plant Line Value: WS
  misc_feature: MA Experiment 20000437 PARAMETER Experiment Name: At_Drought_P Parameter: Timepoint (hr) Value: 24
  misc_feature: MA Experiment 20000437 PARAMETER Experiment Name: At_Drought_P Parameter: Tissue Value: Whole Plant
  misc_feature: MA Experiment 20000437 PARAMETER Experiment Name: At_Drought_P Parameter: Treatment Value: Drought vs. No Drought
  misc_feature: MA Experiment ID: 20001248 Result: Up-regulated in Transcription
  misc_feature: MA Experiment 20001248 PARAMETER Experiment Name: At_Far-red-induction_P Parameter: Age (day) Value: 7
  misc_feature: MA Experiment 20001248 PARAMETER Experiment Name: At_Far-red-induction_P Parameter: Light Value: Far-red vs. White
  misc_feature: MA Experiment 20001248 PARAMETER Experiment Name: At_Far-red-induction_P Parameter: Organism Value: A. thaliana
  misc_feature: MA Experiment 20001248 PARAMETER Experiment Name: At_Far-red-induction_P Parameter: Plant Line Value: Columbia
  misc_feature: MA Experiment 20001248 PARAMETER Experiment Name: At_Far-red-induction_P Parameter: Timepoint (hr) Value: 4
  misc_feature: MA Experiment 20001248 PARAMETER Experiment Name: At_Far-red-induction_P Parameter: Tissue Value: Whole Plant
ctctcttaacctaaccaatccaaagttgccgctagggtcaccggaaaacttcagagttgtgtcttctattgaattctccgggaagtattagtgatggggctttctcttggggaacaacatttcattaaaggtgggattgctcaagatcttcgaactgatggtcggaaaagattgacttaccgtcctatctacgtcgaaaccggtgttattccgcaggctaatggttcagcgagagttagaattggtggaaccgatgtgattgctagtgtaaaggctgaaattgggaggccaagttcacttcaacccgataaaggaaaggttgcagttttcattgattgcagtccaacagctgaaccgacatttggggggagaggaggtgaggaattgtcttctgagcttgctttggctcttcaaagatgtcttctgggtggcaaaagtggagcaggagctggaataaatttatcttcgcttttaatcaaagaaggaaaagtttgctgggacctttatattgatggtcttgtcattagttcggatgggaatctattggatgccctgggtgctgccattaaggctgctttaaccaacacggccatcccaaaagtcaatgtttcagctgaagtagcagatgatgagcaaccagagattgacatcagcgacgaggaatatcttcaatttgacacttccagtgtcccggtcatagtcacgttaacaaaagtgggaacgcattacatagttgatgcaacagcagaagaggagtctcagatgagctcagctgtatctatatctgtgaatcggacaggccatatatgtgggttaaccaaacgaagcgggtctggcttagacccaagcgtcatccttgacatgatctctgttgccaagcatgtgacagagactctgatgagcaaacttgattcagagatttcagccgcagaggcctgcgaagacgaatcttgactcttgagtctcagagaatcaaagtttcaagatgaaacatgttagcaagggatcaacaatatttgtatctgtggaaaatcttatacgaagtcagaacagattaagctaatcaaaatcctttttcc

SEQ ID NO: 107506 - protein, 286 aa, Arabidopsis thaliana
  peptide (1)..(286): Ceres Seq. ID no. 13650524
  misc_feature (28)..(168): Pfam Name: 3' exoribonuclease family, domain 1 Pfam Description: 3' exoribonuclease family, domain 1
  misc_feature (1)..(286): Homolog of NCBI NO: 18398046 NR Description: 3 exoribonuclease -related [Arabidopsis thaliana]
  misc_feature (1)..(286): Homolog of NCBI NO: 6648187 NR Description: putative 3' exoribonuclease [Arabidopsis thaliana]
  misc_feature (1)..(286): Homolog of NCBI NO: 6466958 NR Description: hypothetical protein [Arabidopsis thaliana]
  misc_feature (3)..(281): Homolog of NCBI NO: 473949 NR Description: KIAA0116 [Homo sapiens]
  misc_feature (3)..(281): Homolog of NCBI NO: 24307981 NR Description: KIAA0116 protein [Homo sapiens] Exosome complex exonuclease RRP42 (Ribosomal RNA processing
  misc_feature (1)..(281): Homolog of NCBI NO: 34866707 NR Description: similar to Exosome complex exonuclease RRP42
  misc_feature (1)..(281): Homolog of NCBI NO: 28548933 NR Description: RIKEN cDNA 2610002K22 [Mus musculus]
  misc_feature (1)..(281): Homolog of NCBI NO: 30962875 NR Description: Similar to Exosome complex exonuclease RRP42 [Mus
  misc_feature (1)..(281): Homolog of NCBI NO: 21362905 NR Description: Exosome complex exonuclease RRP42 (Ribosomal RNA
  misc_feature (1)..(275): Homolog of NCBI NO: 28573444 NR Description: CG8395-PA [Drosophila melanogaster]
MGLSLGEQHFIKGGIAQDLRTDGRKRLTYRPIYVETGVIPQANGSARVRIGGTDVIASVKAEIGRPSSLQPDKGKVAVFIDCSPTAEPTFGGRGGEELSSELALALQRCLLGGKSGAGAGINLSSLLIKEGKVCWDLYIDGLVISSDGNLLDALGAAIKAALTNTAIPKVNVSAEVADDEQPEIDISDEEYLQFDTSSVPVIVTLTKVGTHYIVDATAEEESQMSSAVSISVNRTGHICGLTKRSGSGLDPSVILDMISVAKHVTETLMSKLDSEISAAEACEDES

SEQ ID NO: 107507 - DNA, 1145 bp, Arabidopsis thaliana
  misc_feature (1)..(1145): Ceres Seq. ID no. 13650529
  misc_feature: MA Experiment ID: 20000166 Result: Down-regulated in Transcription
  misc_feature: MA Experiment 20000166 PARAMETER Experiment Name: At_100uM_ABA_P Parameter: Age (day) Value: 14
  misc_feature: MA Experiment 20000166 PARAMETER Experiment Name: At_100uM_ABA_P Parameter: Organism Value: A. thaliana
  misc_feature: MA Experiment 20000166 PARAMETER Experiment Name: At_100uM_ABA_P Parameter: Plant Line Value: WS
  misc_feature: MA Experiment 20000166 PARAMETER Experiment Name: At_100uM_ABA_P Parameter: Timepoint (hr) Value: 1
  misc_feature: MA Experiment 20000166 PARAMETER Experiment Name: At_100uM_ABA_P Parameter: Tissue Value: Aerial
  misc_feature: MA Experiment 20000166 PARAMETER Experiment Name: At_100uM_ABA_P Parameter: Treatment Value: 100uM ABA vs. No Treatment
  misc_feature: MA Experiment ID: 20000169 Result: Down-regulated in Transcription
  misc_feature: MA Experiment 20000169 PARAMETER Experiment Name: At_100uM_ABA_P Parameter: Age (day) Value: 14
  misc_feature: MA Experiment 20000169 PARAMETER Experiment Name: At_100uM_ABA_P Parameter: Organism Value: A. thaliana
  misc_feature: MA Experiment 20000169 PARAMETER Experiment Name: At_100uM_ABA_P Parameter: Plant Line Value: WS
  misc_feature: MA Experiment 20000169 PARAMETER Experiment Name: At_100uM_ABA_P Parameter: Timepoint (hr) Value: 6
  misc_feature: MA Experiment 20000169 PARAMETER Experiment Name: At_100uM_ABA_P Parameter: Tissue Value: Aerial
  misc_feature: MA Experiment 20000169 PARAMETER Experiment Name: At_100uM_ABA_P Parameter: Treatment Value: 100uM ABA vs. No Treatment
  misc_feature: MA Experiment ID: 20000171 Result: Down-regulated in Transcription
  misc_feature: MA Experiment 20000171 PARAMETER Experiment Name: At_42deg_Heat_P Parameter: Age (day) Value: 14
  misc_feature: MA Experiment 20000171 PARAMETER Experiment Name: At_42deg_Heat_P Parameter: Organism Value: A. thaliana
  misc_feature: MA Experiment 20000171 PARAMETER Experiment Name: At_42deg_Heat_P Parameter: Plant Line Value: WS
  misc_feature: MA Experiment 20000171 PARAMETER Experiment Name: At_42deg_Heat_P Parameter: Temperature (deg C) Value: 42 vs. 22
  misc_feature: MA Experiment 20000171 PARAMETER Experiment Name: At_42deg_Heat_P Parameter: Timepoint (hr) Value: 1
  misc_feature: MA Experiment 20000171 PARAMETER Experiment Name: At_42deg_Heat_P Parameter: Tissue Value: Aerial
  misc_feature: MA Experiment ID: 20000173 Result: Down-regulated in Transcription
  misc_feature: MA Experiment 20000173 PARAMETER Experiment Name: At_42deg_Heat_P Parameter: Age (day) Value: 14
  misc_feature: MA Experiment 20000173 PARAMETER Experiment Name: At_42deg_Heat_P Parameter: Organism Value: A. thaliana
  misc_feature: MA Experiment 20000173 PARAMETER Experiment Name: At_42deg_Heat_P Parameter: Plant Line Value: WS
  misc_feature: MA Experiment 20000173 PARAMETER Experiment Name: At_42deg_Heat_P Parameter: Temperature (deg C) Value: 42 vs. 22
  misc_feature: MA Experiment 20000173 PARAMETER Experiment Name: At_42deg_Heat_P Parameter: Timepoint (hr) Value: 6
  misc_feature: MA Experiment 20000173 PARAMETER Experiment Name: At_42deg_Heat_P Parameter: Tissue Value: Aerial
  misc_feature: MA Experiment ID: 20000180 Result: Up-regulated in Transcription
  misc_feature: MA Experiment 20000180 PARAMETER Experiment Name: At_Germinating_Seeds_P Parameter: Age (hr) Value: 24 vs. 0
  misc_feature: MA Experiment 20000180 PARAMETER Experiment Name: At_Germinating_Seeds_P Parameter: Tissue Value: Germinating Seeds
  misc_feature: MA Experiment ID: 20000211 Result: Up-regulated in Transcription
  misc_feature: MA Experiment 20000211 PARAMETER Experiment Name: At_0.001percent_MeJA__P Parameter: Age (day) Value: 14
  misc_feature: MA Experiment 20000211 PARAMETER Experiment Name: At_0.001percent_MeJA__P Parameter: Organism Value: A. thaliana
  misc_feature: MA Experiment 20000211 PARAMETER Experiment Name: At_0.001percent_MeJA__P Parameter: Plant Line Value: WS
  misc_feature: MA Experiment 20000211 PARAMETER Experiment Name: At_0.001percent_MeJA__P Parameter: Timepoint (hr) Value: 1
  misc_feature: MA Experiment 20000211 PARAMETER Experiment Name: At_0.001percent_MeJA__P Parameter: Tissue Value: Aerial
  misc_feature: MA Experiment 20000211 PARAMETER Experiment Name: At_0.001percent_MeJA__P Parameter: Treatment Value: 0.001percent MeJA vs. No Treatment
  misc_feature: MA Experiment ID: 20000227 Result: Down-regulated in Transcription
  misc_feature: MA Experiment 20000227 PARAMETER Experiment Name: At_Root-Tips-vs-Tops_P Parameter: Tissue Value: Root Tips vs. Root Tops
  misc_feature: MA Experiment ID: 20000436 Result: Down-regulated in Transcription
  misc_feature: MA Experiment 20000436 PARAMETER Experiment Name: At_Drought_P Parameter: Age (day) Value: 7
  misc_feature: MA Experiment 20000436 PARAMETER Experiment Name: At_Drought_P Parameter: Organism Value: A. thaliana
  misc_feature: MA Experiment 20000436 PARAMETER Experiment Name: At_Drought_P Parameter: Plant Line Value: WS
  misc_feature: MA Experiment 20000436 PARAMETER Experiment Name: At_Drought_P Parameter: Timepoint (hr) Value: 12
  misc_feature: MA Experiment 20000436 PARAMETER Experiment Name: At_Drought_P Parameter: Tissue Value: Whole Plant
  misc_feature: MA Experiment 20000436 PARAMETER Experiment Name: At_Drought_P Parameter: Treatment Value: Drought vs. No Drought
  misc_feature: MA Experiment ID: 20000437 Result: Down-regulated in Transcription
  misc_feature: MA Experiment 20000437 PARAMETER Experiment Name: At_Drought_P Parameter: Age (day) Value: 8
  misc_feature: MA Experiment 20000437 PARAMETER Experiment Name: At_Drought_P Parameter: Organism Value: A. thaliana
  misc_feature: MA Experiment 20000437 PARAMETER Experiment Name: At_Drought_P Parameter: Plant Line Value: WS
  misc_feature: MA Experiment 20000437 PARAMETER Experiment Name: At_Drought_P Parameter: Timepoint (hr) Value: 24
  misc_feature: MA Experiment 20000437 PARAMETER Experiment Name: At_Drought_P Parameter: Tissue Value: Whole Plant
  misc_feature: MA Experiment 20000437 PARAMETER Experiment Name: At_Drought_P Parameter: Treatment Value: Drought vs. No Drought
  misc_feature: MA Experiment ID: 20000438 Result: Up-regulated in Transcription
  misc_feature: MA Experiment 20000438 PARAMETER Experiment Name: At_Shoots__P Parameter: Age (day) Value: 14
  misc_feature: MA Experiment 20000438 PARAMETER Experiment Name: At_Shoots__P Parameter: Tissue Value: Shoots vs. Whole Plant
  misc_feature: MA Experiment ID: 20000439 Result: Up-regulated in Transcription
  misc_feature: MA Experiment 20000439 PARAMETER Experiment Name: At_Roots__P Parameter: Age (day) Value: 14 vs. 21
  misc_feature: MA Experiment 20000439 PARAMETER Experiment Name: At_Roots__P Parameter: Organism Value: A. thaliana
  misc_feature: MA Experiment 20000439 PARAMETER Experiment Name: At_Roots__P Parameter: Tissue Value: Roots vs. Whole Plant
  misc_feature: MA Experiment ID: 20000453 Result: Down-regulated in Transcription
  misc_feature: MA Experiment 20000453 PARAMETER Experiment Name: At_100uM_ABA_P Parameter: Age (day) Value: 15
  misc_feature: MA Experiment 20000453 PARAMETER Experiment Name: At_100uM_ABA_P Parameter: Organism Value: A. thaliana
  misc_feature: MA Experiment 20000453 PARAMETER Experiment Name: At_100uM_ABA_P Parameter: Plant Line Value: WS
  misc_feature: MA Experiment 20000453 PARAMETER Experiment Name: At_100uM_ABA_P Parameter: Timepoint (hr) Value: 24
  misc_feature: MA Experiment 20000453 PARAMETER Experiment Name: At_100uM_ABA_P Parameter: Tissue Value: Aerial
  misc_feature: MA Experiment 20000453 PARAMETER Experiment Name: At_100uM_ABA_P Parameter: Treatment Value: 100uM ABA vs. No Treatment
  misc_feature: MA Experiment ID: 20000574 Result: Down-regulated in Transcription
  misc_feature: MA Experiment 20000574 PARAMETER Experiment Name: At_100uM_ABA_Mutants__P Parameter: Organism Value: A. thaliana
  misc_feature: MA Experiment 20000574 PARAMETER Experiment Name: At_100uM_ABA_Mutants__P Parameter: Plant Line Value: CS23 vs. Ler wt
  misc_feature: MA Experiment 20000574 PARAMETER Experiment Name: At_100uM_ABA_Mutants__P Parameter: Timepoint (hr) Value: N/A
  misc_feature: MA Experiment 20000574 PARAMETER Experiment Name: At_100uM_ABA_Mutants__P Parameter: Tissue Value: Whole Plant
  misc_feature: MA Experiment 20000574 PARAMETER Experiment Name: At_100uM_ABA_Mutants__P Parameter: Treatment Value: None
  misc_feature: MA Experiment ID: 20001450 Result: Down-regulated in Transcription
  misc_feature: MA Experiment 20001450 PARAMETER Experiment Name: At_Far-red-induction_P Parameter: Age (day) Value: 7
  misc_feature: MA Experiment 20001450 PARAMETER Experiment Name: At_Far-red-induction_P Parameter: Light Value: Far-red vs. White
  misc_feature: MA Experiment 20001450 PARAMETER Experiment Name: At_Far-red-induction_P Parameter: Organism Value: A. thaliana
  misc_feature: MA Experiment 20001450 PARAMETER Experiment Name: At_Far-red-induction_P Parameter: Plant Line Value: Columbia
  misc_feature: MA Experiment 20001450 PARAMETER Experiment Name: At_Far-red-induction_P Parameter: Timepoint (hr) Value: 8
  misc_feature: MA Experiment 20001450 PARAMETER Experiment Name: At_Far-red-induction_P Parameter: Tissue Value: Whole Plant
  misc_feature: MA Experiment ID: 20001554 Result: Down-regulated in Transcription
  misc_feature: MA Experiment 20001554 PARAMETER Experiment Name: At_Drought_Soil_Dry_P Parameter: Age (day) Value: 21
  misc_feature: MA Experiment 20001554 PARAMETER Experiment Name: At_Drought_Soil_Dry_P Parameter: Organism Value: A. thaliana
  misc_feature: MA Experiment 20001554 PARAMETER Experiment Name: At_Drought_Soil_Dry_P Parameter: Plant Line Value: WS
  misc_feature: MA Experiment 20001554 PARAMETER Experiment Name: At_Drought_Soil_Dry_P Parameter: Post Timepoint (hr) Value: None
  misc_feature: MA Experiment 20001554 PARAMETER Experiment Name: At_Drought_Soil_Dry_P Parameter: Post-Treatment Value: None
  misc_feature: MA Experiment 20001554 PARAMETER Experiment Name: At_Drought_Soil_Dry_P Parameter: Timepoint (day) Value: 7
  misc_feature: MA Experiment 20001554 PARAMETER Experiment Name: At_Drought_Soil_Dry_P Parameter: Treatment Value: Drought vs. No Drought
  misc_feature: MA Experiment ID: 20001904 Result: Down-regulated in Transcription
  misc_feature: MA Experiment 20001904 PARAMETER Experiment Name: At_Drought_Reproduction_P Parameter: Age (day) Value: 37
  misc_feature: MA Experiment 20001904 PARAMETER Experiment Name: At_Drought_Reproduction_P Parameter: Organism Value: A. thaliana
  misc_feature: MA Experiment 20001904 PARAMETER Experiment Name: At_Drought_Reproduction_P Parameter: Plant Line Value: WS
  misc_feature: MA Experiment 20001904 PARAMETER Experiment Name: At_Drought_Reproduction_P Parameter: Timepoint (day) Value: 7
  misc_feature: MA Experiment 20001904 PARAMETER Experiment Name: At_Drought_Reproduction_P Parameter: Tissue Value: Rosettes
  misc_feature: MA Experiment 20001904 PARAMETER Experiment Name: At_Drought_Reproduction_P Parameter: Treatment Value: Drought vs. No Drought
ctcaaaccaaccaaccaatatatcagatggcttccatggatcacaatcattttctttttcctctcctcttcatcatcatcatctcttccttgcacgttttgcgtgcttcgaccacaccttcacactcacacaaactaaaatccgccactaccattagaaaaatcaaccgtagaggaccttacattggccttgtgacggtctttgagaccgaagaagatgcttttctcggcagtgttgatttcagactcgatcctacgcatcctttcctcgatctctctggaagacgttttcgtatagggaagattcatggaaagaaggttgtgtatgtcagatgtgggataggaatggtgaacgcagcagcagcaacacaacaaatgatagatgtgttcagtgtgaaagggattgtgcattttgggattgctggaaatataaacaactcgatgtccataggagatgtgagcatccctaagcaaatcacgaatgctggcttgtgggattggctgaatccaggcaaagcaaaaggaaatgaggatgtagcgtacttagatgtcgggaactataatgttccacaaggaaacaataagttaggaactattggatacagttacgaggaattatattcagtcagtggtcacatcaattcaccaaagaaagtgttttggattaatacaactcaagagtggcttcatcttgcagctgatcttgagaagatggagctattgcagtgtgtgaatgcaagtctgtgtcttccaaataaacccaaagtagtagttggattaaaagcagccactgctgacatatttgtggataatgcagcctatagaaatttcttatacgatacttttggagtttcctcctcagacatggagagttctgctgtggccatgacttgcgtgtcaaatgggtatcccctaattgtgataagaggattatcagatttagcaggagtaggagataacactgttcgaaagtttggatctttggctgccactaacactgccaaagctgttttagagttcattaaaaagctcccaccgtcataattcctacgtgtaacctatcattatggatgtttgaatctgtattttccctagtttttctacgtacgttaaaaataaaattaataaaatctgtttttcttttcc

SEQ ID NO: 107508 - protein, 346 aa, Arabidopsis thaliana
  peptide (1)..(346): Ceres Seq. ID no. 13650530
  misc_feature (60)..(340): Pfam Name: Phosphorylase family Pfam Description: Phosphorylase family
  misc_feature (9)..(346): Homolog of NCBI NO: 18416327 NR Description: expressed protein [Arabidopsis thaliana] unknown protein [Arabidopsis thaliana]
  misc_feature (9)..(346): Homolog of NCBI NO: 21617914 NR Description: unknown [Arabidopsis thaliana]
  misc_feature (12)..(346): Homolog of NCBI NO: 7487317 NR Description: hypothetical protein T22A6.170 - Arabidopsis >gi|5051776|emb|CAB45069.1| putative protein [Arabidopsis >gi|7269284|emb|CAB79344.1| putative protein [Arabidopsis
  misc_feature (12)..(345): Homolog of NCBI NO: 21593613 NR Description: unknown [Arabidopsis thaliana]
  misc_feature (12)..(345): Homolog of NCBI NO: 30686500 NR Description: expressed protein [Arabidopsis thaliana] unknown protein [Arabidopsis thaliana]
  misc_feature (12)..(235): Homolog of NCBI NO: 7487318 NR Description: hypothetical protein T22A6.180 - Arabidopsis >gi|5051777|emb|CAB45070.1| putative protein [Arabidopsis >gi|7269285|emb|CAB79345.1| putative protein [Arabidopsis
  misc_feature (61)..(344): Homolog of NCBI NO: 481815 NR Description: vegetative storage protein win4.5 - western poplar x cottonwood (fragment) >gi|309839|gb|AAA16342.1| storage protein [Populus balsamifera subsp. trichocarpa x Populus
  misc_feature (237)..(345): Homolog of NCBI NO: 7487319 NR Description: hypothetical protein T22A6.190 - Arabidopsis >gi|5051778|emb|CAB45071.1| putative protein [Arabidopsis >gi|7269286|emb|CAB79346.1| putative protein [Arabidopsis
  misc_feature (116)..(340): Homolog of NCBI NO: 34897886 NR Description: ESTs AU032452(S10068),C23571(S10068) correspond a region of the predicted gene.~Similar to P.trichocarpa x P.
  misc_feature (61)..(344): Homolog of NCBI NO: 421813 NR Description: storage protein, bark - cottonwood
QTNQPIYQMASMDHNHFLFPLLFIIIISSLHVLRASTTPSHSHKLKSATTIRKINRRGPYIGLVTVFETEEDAFLGSVDFRLDPTHPFLDLSGRRFRIGKIHGKKVVYVRCGIGMVNAAAATQQMIDVFSVKGIVHFGIAGNINNSMSIGDVSIPKQITNAGLWDWLNPGKAKGNEDVAYLDVGNYNVPQGNNKLGTIGYSYEELYSVSGHINSPKKVFWINTTQEWLHLAADLEKMELLQCVNASLCLPNKPKVVVGLKAATADIFVDNAAYRNFLYDTFGVSSSDMESSAVAMTCVSNGYPLIVIRGLSDLAGVGDNTVRKFGSLAATNTAKAVLEFIKKLPPS

SEQ ID NO: 107509 - protein, 338 aa, Arabidopsis thaliana; identical to SEQ ID NO: 101930
  peptide (1)..(338): Ceres Seq. ID no. 13650531
  misc_feature (52)..(332): Pfam Name: Phosphorylase family Pfam Description: Phosphorylase family
  misc_feature (1)..(338): Homolog of NCBI NO: 18416327 NR Description: expressed protein [Arabidopsis thaliana] unknown protein [Arabidopsis thaliana]
  misc_feature (1)..(338): Homolog of NCBI NO: 21617914 NR Description: unknown [Arabidopsis thaliana]
  misc_feature (4)..(338): Homolog of NCBI NO: 7487317 NR Description: hypothetical protein T22A6.170 - Arabidopsis >gi|5051776|emb|CAB45069.1| putative protein [Arabidopsis >gi|7269284|emb|CAB79344.1| putative protein [Arabidopsis
  misc_feature (4)..(337): Homolog of NCBI NO: 21593613 NR Description: unknown [Arabidopsis thaliana]
  misc_feature (4)..(337): Homolog of NCBI NO: 30686500 NR Description: expressed protein [Arabidopsis thaliana] unknown protein [Arabidopsis thaliana]
  misc_feature (4)..(227): Homolog of NCBI NO: 7487318 NR Description: hypothetical protein T22A6.180 - Arabidopsis >gi|5051777|emb|CAB45070.1| putative protein [Arabidopsis >gi|7269285|emb|CAB79345.1| putative protein [Arabidopsis
  misc_feature (53)..(336): Homolog of NCBI NO: 481815 NR Description: vegetative storage protein win4.5 - western poplar x cottonwood (fragment) >gi|309839|gb|AAA16342.1| storage protein [Populus balsamifera subsp. trichocarpa x Populus
  misc_feature (229)..(337): Homolog of NCBI NO: 7487319 NR Description: hypothetical protein T22A6.190 - Arabidopsis >gi|5051778|emb|CAB45071.1| putative protein [Arabidopsis >gi|7269286|emb|CAB79346.1| putative protein [Arabidopsis
  misc_feature (108)..(332): Homolog of NCBI NO: 34897886 NR Description: ESTs AU032452(S10068),C23571(S10068) correspond a region of the predicted gene.~Similar to P.trichocarpa x P.
  misc_feature (53)..(336): Homolog of NCBI NO: 421813 NR Description: storage protein, bark - cottonwood

SEQ ID NO: 107510 - protein, 335 aa, Arabidopsis thaliana; identical to SEQ ID NO: 87862
  peptide (1)..(335): Ceres Seq. ID no. 13650532
  misc_feature (49)..(329): Pfam Name: Phosphorylase family Pfam Description: Phosphorylase family
  misc_feature (1)..(335): Homolog of NCBI NO: 18416327 NR Description: expressed protein [Arabidopsis thaliana] unknown protein [Arabidopsis thaliana]
  misc_feature (1)..(335): Homolog of NCBI NO: 21617914 NR Description: unknown [Arabidopsis thaliana]
  misc_feature (1)..(335): Homolog of NCBI NO: 7487317 NR Description: hypothetical protein T22A6.170 - Arabidopsis >gi|5051776|emb|CAB45069.1| putative protein [Arabidopsis >gi|7269284|emb|CAB79344.1| putative protein [Arabidopsis
  misc_feature (1)..(334): Homolog of NCBI NO: 21593613 NR Description: unknown [Arabidopsis thaliana]
  misc_feature (1)..(334): Homolog of NCBI NO: 30686500 NR Description: expressed protein [Arabidopsis thaliana] unknown protein [Arabidopsis thaliana]
  misc_feature (1)..(224): Homolog of NCBI NO: 7487318 NR Description: hypothetical protein T22A6.180 - Arabidopsis >gi|5051777|emb|CAB45070.1| putative protein [Arabidopsis >gi|7269285|emb|CAB79345.1| putative protein [Arabidopsis
  misc_feature (50)..(333): Homolog of NCBI NO: 481815 NR Description: vegetative storage protein win4.5 - western poplar x cottonwood (fragment) >gi|309839|gb|AAA16342.1| storage protein [Populus balsamifera subsp. trichocarpa x Populus
  misc_feature (226)..(334): Homolog of NCBI NO: 7487319 NR Description: hypothetical protein T22A6.190 - Arabidopsis >gi|5051778|emb|CAB45071.1| putative protein [Arabidopsis >gi|7269286|emb|CAB79346.1| putative protein [Arabidopsis
  misc_feature (105)..(329): Homolog of NCBI NO: 34897886 NR Description: ESTs AU032452(S10068),C23571(S10068) correspond a region of the predicted gene.~Similar to P.trichocarpa x P.
  misc_feature (50)..(333): Homolog of NCBI NO: 421813 NR Description: storage protein, bark - cottonwood

SEQ ID NO: 107511 - DNA, 673 bp, Arabidopsis thaliana
  misc_feature (1)..(673): Ceres Seq. ID no. 13650533
  misc_feature: MA Experiment ID: 20000306 Result: Up-regulated in Transcription
  misc_feature: MA Experiment 20000306 PARAMETER Experiment Name: At_Germinating_Seeds_Sub_P Parameter: Age (hr) Value: 6 vs. 0
  misc_feature: MA Experiment 20000306 PARAMETER Experiment Name: At_Germinating_Seeds_Sub_P Parameter: Organism Value: A. thaliana
  misc_feature: MA Experiment 20000306 PARAMETER Experiment Name: At_Germinating_Seeds_Sub_P Parameter: Plant Line Value: WS
  misc_feature: MA Experiment 20000306 PARAMETER Experiment Name: At_Germinating_Seeds_Sub_P Parameter: Tissue Value: Germinating Seeds
  misc_feature: MA Experiment ID: 20000307 Result: Up-regulated in Transcription
  misc_feature: MA Experiment 20000307 PARAMETER Experiment Name: At_Germinating_Seeds_Sub_P Parameter: Age (hr) Value: 24 vs. 0
  misc_feature: MA Experiment 20000307 PARAMETER Experiment Name: At_Germinating_Seeds_Sub_P Parameter: Organism Value: A. thaliana
  misc_feature: MA Experiment 20000307 PARAMETER Experiment Name: At_Germinating_Seeds_Sub_P Parameter: Plant Line Value: WS
  misc_feature: MA Experiment 20000307 PARAMETER Experiment Name: At_Germinating_Seeds_Sub_P Parameter: Tissue Value: Germinating Seeds
  misc_feature: MA Experiment ID: 20000315 Result: Down-regulated in Transcription
  misc_feature: MA Experiment 20000315 PARAMETER Experiment Name: At_14day_Shoots-Roots_Sub_P Parameter: Age (day) Value: 14
  misc_feature: MA Experiment 20000315 PARAMETER Experiment Name: At_14day_Shoots-Roots_Sub_P Parameter: Organism Value: A. thaliana
  misc_feature: MA Experiment 20000315 PARAMETER Experiment Name: At_14day_Shoots-Roots_Sub_P Parameter: Plant Line Value: WS
  misc_feature: MA Experiment 20000315 PARAMETER Experiment Name: At_14day_Shoots-Roots_Sub_P Parameter: Tissue Value: Shoots vs. Whole Plant
  misc_feature: MA Experiment ID: 20000328 Result: Down-regulated in Transcription
  misc_feature: MA Experiment 20000328 PARAMETER Experiment Name: At_42deg_Heat_Sub_P Parameter: Age (day) Value: 14
  misc_feature: MA Experiment 20000328 PARAMETER Experiment Name: At_42deg_Heat_Sub_P Parameter: Organism Value: A. thaliana
  misc_feature: MA Experiment 20000328 PARAMETER Experiment Name: At_42deg_Heat_Sub_P Parameter: Plant Line Value: WS
  misc_feature: MA Experiment 20000328 PARAMETER Experiment Name: At_42deg_Heat_Sub_P Parameter: Temperature (deg C) Value: 42 vs. 22
  misc_feature: MA Experiment 20000328 PARAMETER Experiment Name: At_42deg_Heat_Sub_P Parameter: Timepoint (hr) Value: 6
  misc_feature: MA Experiment 20000328 PARAMETER Experiment Name: At_42deg_Heat_Sub_P Parameter: Tissue Value: Aerial
  misc_feature: MA Experiment ID: 20000329 Result: Down-regulated in Transcription
  misc_feature: MA Experiment 20000329 PARAMETER Experiment Name: At_4deg_Cold_Sub_P Parameter: Age (day) Value: 14
  misc_feature: MA Experiment 20000329 PARAMETER Experiment Name: At_4deg_Cold_Sub_P Parameter: Organism Value: A. thaliana
  misc_feature: MA Experiment 20000329 PARAMETER Experiment Name: At_4deg_Cold_Sub_P Parameter: Plant Line Value: WS
  misc_feature: MA Experiment 20000329 PARAMETER Experiment Name: At_4deg_Cold_Sub_P Parameter: Temperature (deg C) Value: 4 vs. 22
  misc_feature: MA Experiment 20000329 PARAMETER Experiment Name: At_4deg_Cold_Sub_P Parameter: Timepoint (hr) Value: 6
  misc_feature: MA Experiment 20000329 PARAMETER Experiment Name: At_4deg_Cold_Sub_P Parameter: Tissue Value: Aerial
  misc_feature: Pfam Name: COX5B Pfam Description: Cytochrome c oxidase subunit Vb
aacgtaaaaacataagaaaaacagagtaaataaagtaatgcgccgatcgtcgacggagagtatgagatgagaagagaaattgatattgatattgtttgatatctactgtagatgattcgtcttgacaaagaggaaggaggctgcttgacatcgaccaccctgaaagtccttttggtacaaaggaatctcctgctgtcgtacagtcctactttgacaagagaaatatcggatgccgtggtggtgaaggcgaggatggacacgacgtcgtttggttctggctagataaaggaaagtcatttgaatgtccagtgtgctcccaatactttgagcacggaccaccagacggtcatggtgacgatgaagaccaccaccattgattccggtcttttcttaacggcgaaatgttttcttctattgtagtgagtggaataaatatttctcgttggtgaaaacacttaaatatgttttttttgatcctcgagaagacaccaccactttatttgcctcaggctctaaccctttttgctttcttgagacttttgtttttatgaatgattctcgagtcagaatcattcttctttttttgaattatataatatatagtttttggtgttcacggtgtgtatgttttgtggtaaaaagtaaaagcctagagaatgttcttccccccttt

SEQ ID NO: 107512 - protein, 56 aa, Arabidopsis thaliana
  peptide (1)..(56): Ceres Seq. ID no. 13650534
  misc_feature: Pfam Name: COX5B Pfam Description: Cytochrome c oxidase subunit Vb
  misc_feature (1)..(56): Homolog of NCBI NO: 26453146 NR Description: unknown protein [Arabidopsis thaliana]
MIRLDKEEGGCLTSTTLKVLLVQRNLLLSYSPTLTREISDAVVVKARMDTTSFGSG

SEQ ID NO: 107513 - protein, 42 aa, Arabidopsis thaliana
  peptide (1)..(42): Ceres Seq. ID no. 13650535
  misc_feature: Pfam Name: COX5B Pfam Description: Cytochrome c oxidase subunit Vb
MNDSRVRIILLFLNYIIYSFWCSRCVCFVVKSKSLENVLPPF

SEQ ID NO: 107514 - DNA, 1109 bp, Arabidopsis thaliana
  misc_feature (1)..(1109): Ceres Seq. ID no. 13650556
  misc_feature: MA Experiment ID: 20000234 Result: Up-regulated in Transcription
  misc_feature: MA Experiment 20000234 PARAMETER Experiment Name: At_Siliques_P Parameter: Age (day) Value: 21
  misc_feature: MA Experiment 20000234 PARAMETER Experiment Name: At_Siliques_P Parameter: Organism Value: A. thaliana
  misc_feature: MA Experiment 20000234 PARAMETER Experiment Name: At_Siliques_P Parameter: Plant Line Value: WS
  misc_feature: MA Experiment 20000234 PARAMETER Experiment Name: At_Siliques_P Parameter: Tissue Value: Less Than 5mm Siliques vs. Whole Plant
  misc_feature: MA Experiment ID: 20000235 Result: Up-regulated in Transcription
  misc_feature: MA Experiment 20000235 PARAMETER Experiment Name: At_Siliques_P Parameter: Age (day) Value: 21
  misc_feature: MA Experiment 20000235 PARAMETER Experiment Name: At_Siliques_P Parameter: Organism Value: A. thaliana
  misc_feature: MA Experiment 20000235 PARAMETER Experiment Name: At_Siliques_P Parameter: Plant Line Value: WS
  misc_feature: MA Experiment 20000235 PARAMETER Experiment Name: At_Siliques_P Parameter: Tissue Value: 5-10mm Siliques vs. Whole Plant
  misc_feature: MA Experiment ID: 20000438 Result: Up-regulated in Transcription
  misc_feature: MA Experiment 20000438 PARAMETER Experiment Name: At_Shoots__P Parameter: Age (day) Value: 14
  misc_feature: MA Experiment 20000438 PARAMETER Experiment Name: At_Shoots__P Parameter: Tissue Value: Shoots vs. Whole Plant
  misc_feature: MA Experiment ID: 20001451 Result: Down-regulated in Transcription
  misc_feature: MA Experiment 20001451 PARAMETER Experiment Name: At_Far-red-induction_P Parameter: Age (day) Value: 7
  misc_feature: MA Experiment 20001451 PARAMETER Experiment Name: At_Far-red-induction_P Parameter: Light Value: Far-red vs. White
  misc_feature: MA Experiment 20001451 PARAMETER Experiment Name: At_Far-red-induction_P Parameter: Organism Value: A. thaliana
  misc_feature: MA Experiment 20001451 PARAMETER Experiment Name: At_Far-red-induction_P Parameter: Plant Line Value: Columbia
  misc_feature: MA Experiment 20001451 PARAMETER Experiment Name: At_Far-red-induction_P Parameter: Timepoint (hr) Value: 24
  misc_feature: MA Experiment 20001451 PARAMETER Experiment Name: At_Far-red-induction_P Parameter: Tissue Value: Whole Plant
  misc_feature: Pfam Name: Pept_tRNA_hydro Pfam Description: Peptidyl-tRNA hydrolase
aattccccagaagaaaagatgaaagctgtagcttttcccgctaaaatcgcaaatcttagcttcccttctaactgttgctcactattcttccgatcaccggcgacgtttttatcgccggcattgccttgtcggaagctgacgaaaggaataagaggtctcgaaggcttgatgtctcagtgtttatcatcatcgtcacaatcattgtcattttcatcgaattcattctcctctcaaccggaatcagagttacttcaagctttaccttcttcgaagccaaaatctccgccactgcagctgccatggctcattgttggtttgggtaatcccggcaagaagtaccagggcacgcgccacaacgttggttttgagatggtggacgctttggctgatgcagaaggcatctccatgaacactgttaacttcaaggccttgtttgggaaaggcgttattggaaatataccgattatgctggctaaaccacaaactttcatggacctaagtggtgagtctgttggacaaatcgtttcattttacaagatcccgttaaagcaagtacttgtggtttacgatgatttagatttgccctttggtaaactacgtttattgccaaaaggtggtcacggaggccacaatgggatgagaagtattatagaccgcctcaaaggtagccgtgattttcctcgactaagaatagggatcggacgtcctccagggaagatggatacagccaattttgttctccgccagttcaatagacaggaacaggaagagttggatcacacattccaaaccgggttagaggcaataaggattcttttgcttgaggggttcaacaaaagtgcaacatttgtcaacactcgaaaatctatggagcaactcagttagaagtgacattgttacattacatatattcatataacaaactacaaagtgttcttgctgattcattaataatttttttttggttccatacttgaatcctttttgagcaaattgtacatcaaaagataaccagattatttgtttatcataatttctattatgtaactcgaaaatatggatttcagtatttgttcggctgtaatttaaattatacactttcattaaac

SEQ ID NO: 107515 - protein, 294 aa, Arabidopsis thaliana
  peptide (1)..(294): Ceres Seq. ID no. 13650557
  misc_feature: Pfam Name: Pept_tRNA_hydro Pfam Description: Peptidyl-tRNA hydrolase
  misc_feature (7)..(294): Homolog of NCBI NO: 26453108 NR Description: unknown protein [Arabidopsis thaliana]
  misc_feature (7)..(294): Homolog of NCBI NO: 30685853 NR Description: expressed protein [Arabidopsis thaliana]
  misc_feature (7)..(171): Homolog of NCBI NO: 25402858 NR Description: protein F15H18.8 [imported] - Arabidopsis >gi|6714302|gb|AAF25998.1|AC013354_17 F15H18.8 [Arabidopsis
  misc_feature (188)..(265): Homolog of NCBI NO: 25402858 NR Description: protein F15H18.8 [imported] - Arabidopsis >gi|6714302|gb|AAF25998.1|AC013354_17 F15H18.8 [Arabidopsis
  misc_feature (100)..(294): Homolog of NCBI NO: 34911418 NR Description: putative CRS2 [Oryza sativa (japonica
  misc_feature (100)..(285): Homolog of NCBI NO: 15237280 NR Description: CRS2-related protein [Arabidopsis thaliana]
  misc_feature (100)..(291): Homolog of NCBI NO: 40889732 NR Description: Chain A, Structure Of The Chloroplast Group Ii
  misc_feature (92)..(285): Homolog of NCBI NO: 6752919 NR Description: CRS2 [Zea mays]
  misc_feature (100)..(293): Homolog of NCBI NO: 30687503 NR Description: expressed protein [Arabidopsis thaliana]
  misc_feature (100)..(285): Homolog of NCBI NO: 40889730 NR Description: Chain A, Crystal Structure Of The Chloroplast
NSPEEKMKAVAFPAKIANLSFPSNCCSLFFRSPATFLSPALPCRKLTKGIRGLEGLMSQCLSSSSQSLSFSSNSFSSQPESELLQALPSSKPKSPPLQLPWLIVGLGNPGKKYQGTRHNVGFEMVDALADAEGISMNTVNFKALFGKGVIGNIPIMLAKPQTFMDLSGESVGQIVSFYKIPLKQVLVVYDDLDLPFGKLRLLPKGGHGGHNGMRSIIDRLKGSRDFPRLRIGIGRPPGKMDTANFVLRQFNRQEQEELDHTFQTGLEAIRILLLEGFNKSATFVNTRKSMEQLS

SEQ ID NO: 107516 - protein, 288 aa, Arabidopsis thaliana
  peptide (1)..(288): Ceres Seq. ID no. 13650558
  misc_feature: Pfam Name: Pept_tRNA_hydro Pfam Description: Peptidyl-tRNA hydrolase
  misc_feature (1)..(288): Homolog of NCBI NO: 26453108 NR Description: unknown protein [Arabidopsis thaliana]
  misc_feature (1)..(288): Homolog of NCBI NO: 30685853 NR Description: expressed protein [Arabidopsis thaliana]
  misc_feature (1)..(165): Homolog of NCBI NO: 25402858 NR Description: protein F15H18.8 [imported] - Arabidopsis >gi|6714302|gb|AAF25998.1|AC013354_17 F15H18.8 [Arabidopsis
  misc_feature (182)..(259): Homolog of NCBI NO: 25402858 NR Description: protein F15H18.8 [imported] - Arabidopsis >gi|6714302|gb|AAF25998.1|AC013354_17 F15H18.8 [Arabidopsis
  misc_feature (94)..(288): Homolog of NCBI NO: 34911418 NR Description: putative CRS2 [Oryza sativa (japonica
  misc_feature (94)..(279): Homolog of NCBI NO: 15237280 NR Description: CRS2-related protein [Arabidopsis thaliana]
  misc_feature (94)..(285): Homolog of NCBI NO: 40889732 NR Description: Chain A, Structure Of The Chloroplast Group Ii
  misc_feature (86)..(279): Homolog of NCBI NO: 6752919 NR Description: CRS2 [Zea mays]
  misc_feature (94)..(287): Homolog of NCBI NO: 30687503 NR Description: expressed protein [Arabidopsis thaliana]
  misc_feature (94)..(279): Homolog of NCBI NO: 40889730 NR Description: Chain A, Crystal Structure Of The Chloroplast
MKAVAFPAKIANLSFPSNCCSLFFRSPATFLSPALPCRKLTKGIRGLEGLMSQCLSSSSQSLSFSSNSFSSQPESELLQALPSSKPKSPPLQLPWLIVGLGNPGKKYQGTRHNVGFEMVDALADAEGISMNTVNFKALFGKGVIGNIPIMLAKPQTFMDLSGESVGQIVSFYKIPLKQVLVVYDDLDLPFGKLRLLPKGGHGGHNGMRSIIDRLKGSRDFPRLRIGIGRPPGKMDTANFVLRQFNRQEQEELDHTFQTGLEAIRILLLEGFNKSATFVNTRKSMEQLS

SEQ ID NO: 107517 - protein, 238 aa, Arabidopsis thaliana
  peptide (1)..(238): Ceres Seq. ID no. 13650559
  misc_feature: Pfam Name: Pept_tRNA_hydro Pfam Description: Peptidyl-tRNA hydrolase
  misc_feature (1)..(238): Homolog of NCBI NO: 26453108 NR Description: unknown protein [Arabidopsis thaliana]
  misc_feature (1)..(238): Homolog of NCBI NO: 30685853 NR Description: expressed protein [Arabidopsis thaliana]
  misc_feature (1)..(115): Homolog of NCBI NO: 25402858 NR Description: protein F15H18.8 [imported] - Arabidopsis >gi|6714302|gb|AAF25998.1|AC013354_17 F15H18.8 [Arabidopsis
  misc_feature (132)..(209): Homolog of NCBI NO: 25402858 NR Description: protein F15H18.8 [imported] - Arabidopsis >gi|6714302|gb|AAF25998.1|AC013354_17 F15H18.8 [Arabidopsis
  misc_feature (44)..(238): Homolog of NCBI NO: 34911418 NR Description: putative CRS2 [Oryza sativa (japonica
  misc_feature (44)..(229): Homolog of NCBI NO: 15237280 NR Description: CRS2-related protein [Arabidopsis thaliana]
  misc_feature (44)..(235): Homolog of NCBI NO: 40889732 NR Description: Chain A, Structure Of The Chloroplast Group Ii
  misc_feature (36)..(229): Homolog of NCBI NO: 6752919 NR Description: CRS2 [Zea mays]
  misc_feature (44)..(237): Homolog of NCBI NO: 30687503 NR Description: expressed protein [Arabidopsis thaliana]
  misc_feature (44)..(229): Homolog of NCBI NO: 40889730 NR Description: Chain A, Crystal Structure Of The Chloroplast
MSQCLSSSSQSLSFSSNSFSSQPESELLQALPSSKPKSPPLQLPWLIVGLGNPGKKYQGTRHNVGFEMVDALADAEGISMNTVNFKALFGKGVIGNIPIMLAKPQTFMDLSGESVGQIVSFYKIPLKQVLVVYDDLDLPFGKLRLLPKGGHGGHNGMRSIIDRLKGSRDFPRLRIGIGRPPGKMDTANFVLRQFNRQEQEELDHTFQTGLEAIRILLLEGFNKSATFVNTRKSMEQLS

SEQ ID NO: 107518 - DNA, 1126 bp, Arabidopsis thaliana
  misc_feature (1)..(1126): Ceres Seq. ID no. 13650568
  misc_feature: MA Experiment ID: 20000184 Result: Down-regulated in Transcription
  misc_feature: MA Experiment 20000184 PARAMETER Experiment Name: At_Shoots__P Parameter: Age (day) Value: 7
  misc_feature: MA Experiment 20000184 PARAMETER Experiment Name: At_Shoots__P Parameter: Tissue Value: Shoots vs. Whole Plant
ttggggccgaatgtttacaaaaacttcttcgatcgaacacatactagagagattcaaagctctccttcgtagattcgtgtattgtacagatttgtagagaacgagagagagaggagaacaaaatggtaggcgaagaggagacgaagaagagagtagtcactgaatcgctaggatggttaacggaatcttcgattatgccaaagaagcatcgcgccatcgaaggtgttggtccttcctcaatcatggagcttaaagctcagctctataagtctcaggaggaagctaaacagacaaaggattttacgggatccgatgctcaataccatcgcgccaaagaaaggattgccgccaaagattctttcgccgcgaaaaactccggcgtcgaaagtcgcaatttaaaggacaagcttgagcacaaagctgtaaaagatggagcagttagttatgccgcattggagaaaaaggctcagttgtatgataaacttgctagaggagagctttctgatgaagaaggtgaagagaagtactgtgttgacttctttaggaaaggaattcaacatgaagatccaaaaccatcaagcacttacaacagttccatttcagcaccacctgaagatttcaagcaagatggtgaagatgatggttcgctttttagcaccaaatttgctggacttggacatgcaattgggacagctgatgtaggtcaacacgtgcgcatggtcagggaggttcatgaggaagtcaatcaagcgagagaaaaggcaaccgagttaaagcaaaggagacaagagcaagcaacaaatcgtcgggagaaactcaaacaagcttatcttcggaagcagctcgagaaactaaaggctcaacaacaacaacaagaagatgaacaaaaaacttgatttttcgcttcgccaagctattggattttgagttgcggcctgaacgcagagaagacaatgacagagttgtccaccgaacccgaatgagtaatatggctgcaacaagaacacgtaagccatcattaagggatgaagctgtatccatatgctcttaaaagcgatttatgtactgtggattgttgtcaatcaacagattctatacaaagttaccaatagataatccttataac

SEQ ID NO: 107519 - protein, 257 aa, Arabidopsis thaliana; identical to SEQ ID NO: 42493
  peptide (1)..(257): Ceres Seq. ID no. 13650569
  misc_feature (1)..(257): Homolog of NCBI NO: 15236824 NR Description: cytochrome b561-related [Arabidopsis thaliana]
  misc_feature (1)..(257): Homolog of NCBI NO: 26452652 NR Description: unknown protein [Arabidopsis thaliana]
  misc_feature (1)..(153): Homolog of NCBI NO: 34910918 NR Description: OSJNBb0063G05.4 [Oryza sativa (japonica
  misc_feature (145)..(249): Homolog of NCBI NO: 34910918 NR Description: OSJNBb0063G05.4 [Oryza sativa (japonica
  misc_feature (25)..(256): Homolog of NCBI NO: 26333485 NR Description: unnamed protein product [Mus musculus]
  misc_feature (25)..(256): Homolog of NCBI NO: 29835270 NR Description: RIKEN cDNA C130022K22 gene [Mus musculus]
  misc_feature (25)..(256): Homolog of NCBI NO: 34857683 NR Description: similar to RIKEN cDNA C130022K22 gene [Rattus

SEQ ID NO: 107520 - protein, 233 aa, Arabidopsis thaliana; identical to SEQ ID NO: 42494
  peptide (1)..(233): Ceres Seq. ID no. 13650570
  misc_feature (1)..(233): Homolog of NCBI NO: 15236824 NR Description: cytochrome b561-related [Arabidopsis thaliana]
  misc_feature (1)..(233): Homolog of NCBI NO: 26452652 NR Description: unknown protein [Arabidopsis thaliana]
  misc_feature (1)..(129): Homolog of NCBI NO: 34910918 NR Description: OSJNBb0063G05.4 [Oryza sativa (japonica
  misc_feature (121)..(225): Homolog of NCBI NO: 34910918 NR Description: OSJNBb0063G05.4 [Oryza sativa (japonica
  misc_feature (1)..(232): Homolog of NCBI NO: 26333485 NR Description: unnamed protein product [Mus musculus]
  misc_feature (1)..(232): Homolog of NCBI NO: 29835270 NR Description: RIKEN cDNA C130022K22 gene [Mus musculus]
  misc_feature (1)..(232): Homolog of NCBI NO: 34857683 NR Description: similar to RIKEN cDNA C130022K22 gene [Rattus

SEQ ID NO: 107521 - protein, 217 aa, Arabidopsis thaliana; identical to SEQ ID NO: 42495
  peptide (1)..(217): Ceres Seq. ID no. 13650571
  misc_feature (1)..(217): Homolog of NCBI NO: 15236824 NR Description: cytochrome b561-related [Arabidopsis thaliana]
  misc_feature (1)..(217): Homolog of NCBI NO: 26452652 NR Description: unknown protein [Arabidopsis thaliana]
  misc_feature (1)..(113): Homolog of NCBI NO: 34910918 NR Description: OSJNBb0063G05.4 [Oryza sativa (japonica
  misc_feature (105)..(209): Homolog of NCBI NO: 34910918 NR Description: OSJNBb0063G05.4 [Oryza sativa (japonica
  misc_feature (1)..(216): Homolog of NCBI NO: 26333485 NR Description: unnamed protein product [Mus musculus]
  misc_feature (1)..(216): Homolog of NCBI NO: 29835270 NR Description: RIKEN cDNA C130022K22 gene [Mus musculus]
  misc_feature (1)..(216): Homolog of NCBI NO: 34857683 NR Description: similar to RIKEN cDNA C130022K22 gene [Rattus

SEQ ID NO: 107522 - DNA, 2984 bp, Arabidopsis thaliana
  misc_feature (1)..(2984): Ceres Seq. ID no. 13650576
  misc_feature: MA Experiment ID: 20000315 Result: Down-regulated in Transcription
  misc_feature: MA Experiment 20000315 PARAMETER Experiment Name: At_14day_Shoots-Roots_Sub_P Parameter: Age (day) Value: 14
  misc_feature: MA Experiment 20000315 PARAMETER Experiment Name: At_14day_Shoots-Roots_Sub_P Parameter: Organism Value: A. thaliana
  misc_feature: MA Experiment 20000315 PARAMETER Experiment Name: At_14day_Shoots-Roots_Sub_P Parameter: Plant Line Value: WS
  misc_feature: MA Experiment 20000315 PARAMETER Experiment Name: At_14day_Shoots-Roots_Sub_P Parameter: Tissue Value: Shoots vs. Whole Plant
  misc_feature: MA Experiment ID: 20000328 Result: Down-regulated in Transcription
  misc_feature: MA Experiment 20000328 PARAMETER Experiment Name: At_42deg_Heat_Sub_P Parameter: Age (day) Value: 14
  misc_feature: MA Experiment 20000328 PARAMETER Experiment Name: At_42deg_Heat_Sub_P Parameter: Organism Value: A. thaliana
  misc_feature: MA Experiment 20000328 PARAMETER Experiment Name: At_42deg_Heat_Sub_P Parameter: Plant Line Value: WS
  misc_feature: MA Experiment 20000328 PARAMETER Experiment Name: At_42deg_Heat_Sub_P Parameter: Temperature (deg C) Value: 42 vs. 22
  misc_feature: MA Experiment 20000328 PARAMETER Experiment Name: At_42deg_Heat_Sub_P Parameter: Timepoint (hr) Value: 6
  misc_feature: MA Experiment 20000328 PARAMETER Experiment Name: At_42deg_Heat_Sub_P Parameter: Tissue Value: Aerial
  misc_feature: MA Experiment ID: 20000355 Result: Up-regulated in Transcription
  misc_feature: MA Experiment 20000355 PARAMETER Experiment Name: At_Siliques_Sub_P Parameter: Age (day) Value: 21
  misc_feature: MA Experiment 20000355 PARAMETER Experiment Name: At_Siliques_Sub_P Parameter: Organism Value: A. thaliana
  misc_feature: MA Experiment 20000355 PARAMETER Experiment Name: At_Siliques_Sub_P Parameter: Plant Line Value: WS
  misc_feature: MA Experiment 20000355 PARAMETER Experiment Name: At_Siliques_Sub_P Parameter: Tissue Value: Less Than 5mm Siliques vs. Whole Plant
  misc_feature: MA Experiment ID: 20000440 Result: Up-regulated in Transcription
  misc_feature: MA Experiment 20000440 PARAMETER Experiment Name: At_Closed-Flower__Sub_P Parameter: Tissue Value: Closed Flower vs. Whole Plant
agctgaaaacgcctctgaaactcgcgagatctattttcaaatcgaagaagacagcaattcgagggtttacttgtcttgtcttgttgactcgattcgtagacttttggtctgaagcttcttcgtgttttatcttaacaatggcgggttttatcaatcttgaggattccccaatgtttcaaaaacaggtcttctccttggaagggacaagtgatgagcttaaagatcgttgtcagaagttatacaaaggtgttaagaagttcatgggagctttaggagaggcatctactggagttagtgcctttgcagattctcttgaagagtttggtgctggacatgatgatccagtcagtgtttcaattggaggtccagtaatatctaagttcataaatacacttcgagagctctcctcttataaggagtttcttcgctcacaggtggagcatgtattacttgagaggctgacaaactttatgactgttgatctacaagaagcaaaggagtctcggcgtcggttcgataaagctgtccattcttatgatcaggcacgcgaaaagtttgtgtcgctaaagaagaataccagaggagacattgttgctgagttggaagaggatttggagaactcgaagtcagcatttgagaaaagtcgtttcaatctagtatgctaagtctacgaatagaagcactactacgattgtcttttgacctttctgcatttaaatggttttctctttggtttaaggaatgcaggtaaattcactgatgaccattgaagcaaaaaagaagtacgagttcttggaatctataagtgcaattatggattcccatttcaaatattttaagcttgtatgtttcttctcttattttgcatttagagatgtaaccaagtgtgaccaactaagggaaacatcagtacctcgttgtactccttaatgtggtctctttgttctccagggttatgatctattaagtcaattggagccttacatccatcaggtattgacatacgcacaacagtcaaaagaacagtctaagattgaacaagatcgatttgcacaacgcattcaagaattcaggactcaatctgaattagacagccaacaggcctctgctaaagcagatccctccgatgttggtggaaaccatgtttatagagctatcccccgtaaaaacgtagaagcaaactcagtttcaacagcagacaaggaagtaactaaacaagggtatctattaaagcgatcagctagtttgagagctgattggaaaaggagattctttgtgcttgacaaccatggatccctatactattacagaaacaccggtaataaatcagcgaaatctcagcattactacagtggtttaggagagcatagtagcggcgtctttgggagatttcgtacaagacacaatcgatcagcttcacagggaagcctagattgcaatatgatcgatctccgtacttcactgataaaattggacgcagaggacacagatcttcgactctgttttagaattatatctcctcaaaagacttacacactacaggctgaaaatggagctgataggatggattgggtaaataagatcacagcagctataacaatacgtctgaattctcattttctgcagcagtcaccagcaagatacttggataaaaagaatactagttctggtcctgccactgaaaacctcaccctgaatcaaaaagaagattataatcaaagactaaatgtgggggatgacgtccttacaatactcagagaaattcctggaaataacacttgtgcagaatgcaatgcacctgaccccgattgggcatcattgaatcttggagttttgatgtgcattgaatgctctggtgttcacaggaatctcggcgttcatatatccaaggtgagatcgctcacattggatgtgaaagtatgggagcctacaatcttggacttatttcggaacttaggcaacggatactgtaattcagtctgggaggagctacttcatcaccttgacgatgacagtgaaaagggatcgacagacacacttgcatcagtttcgaaaccatcttcagaagattggtttactctgaaggagaaatatattaacggaaagtacctggagaaagcactagttgtcaaagatgaaagagaagcaaattctactgcctcaagtagaatatgggaagcggttcaaagcaggaacataagagacatctaccgactcattgtaaaagcagatgcaaatatcatcaataccaagttcgatgatattactgaccttgatgtatatcaccaccaccatgttgatgcaccagatgaagtaaagaaaaggcacgatccaaatgcgtgtcagagaatcaagaattcgaacgaagcaagaaactgtcttcaaggctgctcattgttgcatgtggcgtgtcaaagcggtgacccaatcttgcttgaactgctgttgcagttcggggctgacataaacatgagagattaccacggacgaactccattacaccattgcatcgcatcagggaacaacgcatttgcaaaggttttgctgagaagaggtgctcgtccatcaatagaggatggtggaggattaagtgtgttggaaagggcaatggagatgggagccataaccgatgaagagctcttccttctattagcagagtgtcagtaaattaccaatataccatttgctgattgattgctacgcaaaggaatgtaacttgtaactgttgtagtatttggtcatgacttgctcatcgcattgatgctccaatatttacctaattcccgaaggagatagaactctaggaaatgtcaagattccgacctactgtattagcctttgtaatgttatacataagatgatctcaaagattctaagcctgcacctcaaagtttttttttcttcttctgtatttgatatccgagatacaaatatgtgttttgtagccggaaactttattatagacaacattctcattgcccaac

SEQ ID NO: 107523 - protein, 408 aa, Arabidopsis thaliana
  peptide (1)..(408): Ceres Seq. ID no. 13650577
  misc_feature (99)..(236): Pfam Name: Putative GTPase activating protein for Arf Pfam Description: Putative GTPase activating protein for Arf
  misc_feature (1)..(407): Homolog of NCBI NO: 25402625 NR Description: hypothetical protein [imported] - Arabidopsis
  misc_feature (93)..(406): Homolog of NCBI NO: 30684352 NR Description: ARF GTPase-activating domain-containing protein
  misc_feature (1)..(63): Homolog of NCBI NO: 30684352 NR Description: ARF GTPase-activating domain-containing protein
  misc_feature (1)..(80): Homolog of NCBI NO: 15240398 NR Description: ARF GTPase-activating domain-containing protein
  misc_feature (70)..(267): Homolog of NCBI NO: 15240398 NR Description: ARF GTPase-activating domain-containing protein
  misc_feature (93)..(406): Homolog of NCBI NO: 11358303 NR Description: hypothetical protein T31B5.120 - Arabidopsis >gi|7529285|emb|CAB86637.1| putative protein [Arabidopsis
  misc_feature (1)..(63): Homolog of NCBI NO: 11358303 NR Description: hypothetical protein T31B5.120 - Arabidopsis >gi|7529285|emb|CAB86637.1| putative protein [Arabidopsis
  misc_feature (57)..(406): Homolog of NCBI NO: 38175545 NR Description: putative ARF GTPase-activating domain-containing
  misc_feature (1)..(89): Homolog of NCBI NO: 38175545 NR Description: putative ARF GTPase-activating domain-containing
  misc_feature (203)..(406): Homolog of NCBI NO: 15240398 NR Description: ARF GTPase-activating domain-containing protein
MIDLRTSLIKLDAEDTDLRLCFRIISPQKTYTLQAENGADRMDWVNKITAAITIRLNSHFLQQSPARYLDKKNTSSGPATENLTLNQKEDYNQRLNVGDDVLTILREIPGNNTCAECNAPDPDWASLNLGVLMCIECSGVHRNLGVHISKVRSLTLDVKVWEPTILDLFRNLGNGYCNSVWEELLHHLDDDSEKGSTDTLASVSKPSSEDWFTLKEKYINGKYLEKALVVKDEREANSTASSRIWEAVQSRNIRDIYRLIVKADANIINTKFDDITDLDVYHHHHVDAPDEVKKRHDPNACQRIKNSNEARNCLQGCSLLHVACQSGDPILLELLLQFGADINMRDYHGRTPLHHCIASGNNAFAKVLLRRGARPSIEDGGGLSVLERAMEMGAITDEELFLLLAECQ

SEQ ID NO: 107524 - protein, 367 aa, Arabidopsis thaliana
  peptide (1)..(367): Ceres Seq. ID no. 13650578
  misc_feature (58)..(195): Pfam Name: Putative GTPase activating protein for Arf Pfam Description: Putative GTPase activating protein for Arf
  misc_feature (1)..(366): Homolog of NCBI NO: 25402625 NR Description: hypothetical protein [imported] - Arabidopsis
  misc_feature (52)..(365): Homolog of NCBI NO: 30684352 NR Description: ARF GTPase-activating domain-containing protein
  misc_feature (1)..(22): Homolog of NCBI NO: 30684352 NR Description: ARF GTPase-activating domain-containing protein
  misc_feature (1)..(39): Homolog of NCBI NO: 15240398 NR Description: ARF GTPase-activating domain-containing protein
  misc_feature (29)..(226): Homolog of NCBI NO: 15240398 NR Description: ARF GTPase-activating domain-containing protein
  misc_feature (52)..(365): Homolog of NCBI NO: 11358303 NR Description: hypothetical protein T31B5.120 - Arabidopsis >gi|7529285|emb|CAB86637.1| putative protein [Arabidopsis
  misc_feature (1)..(22): Homolog of NCBI NO: 11358303 NR Description: hypothetical protein T31B5.120 - Arabidopsis >gi|7529285|emb|CAB86637.1| putative protein [Arabidopsis
  misc_feature (16)..(365): Homolog of NCBI NO: 38175545 NR Description: putative ARF GTPase-activating domain-containing
  misc_feature (1)..(48): Homolog of NCBI NO: 38175545 NR Description: putative ARF GTPase-activating domain-containing
  misc_feature (162)..(365): Homolog of NCBI NO: 15240398 NR Description: ARF GTPase-activating domain-containing protein
MDWVNKITAAITIRLNSHFLQQSPARYLDKKNTSSGPATENLTLNQKEDYNQRLNVGDDVLTILREIPGNNTCAECNAPDPDWASLNLGVLMCIECSGVHRNLGVHISKVRSLTLDVKVWEPTILDLFRNLGNGYCNSVWEELLHHLDDDSEKGSTDTLASVSKPSSEDWFTLKEKYINGKYLEKALVVKDEREANSTASSRIWEAVQSRNIRDIYRLIVKADANIINTKFDDITDLDVYHHHHVDAPDEVKKRHDPNACQRIKNSNEARNCLQGCSLLHVACQSGDPILLELLLQFGADINMRDYHGRTPLHHCIASGNNAFAKVLLRRGARPSIEDGGGLSVLERAMEMGAITDEELFLLLAECQ

SEQ ID NO: 107525 - protein, 276 aa, Arabidopsis thaliana
  peptide (1)..(276): Ceres Seq. ID no. 13650579
  misc_feature (1)..(104): Pfam Name: Putative GTPase activating protein for Arf Pfam Description: Putative GTPase activating protein for Arf
  misc_feature (1)..(275): Homolog of NCBI NO: 25402625 NR Description: hypothetical protein [imported] - Arabidopsis
  misc_feature (1)..(274): Homolog of NCBI NO: 30684352 NR Description: ARF GTPase-activating domain-containing protein
  misc_feature (1)..(135): Homolog of NCBI NO: 15240398 NR Description: ARF GTPase-activating domain-containing protein
  misc_feature (1)..(274): Homolog of NCBI NO: 11358303 NR Description: hypothetical protein T31B5.120 - Arabidopsis >gi|7529285|emb|CAB86637.1| putative protein [Arabidopsis
  misc_feature (1)..(274): Homolog of NCBI NO: 38175545 NR Description: putative ARF GTPase-activating domain-containing
  misc_feature (71)..(274): Homolog of NCBI NO: 15240398 NR Description: ARF GTPase-activating domain-containing protein
  misc_feature (1)..(95): Homolog of NCBI NO: 30109272 NR Description: Similar to centaurin, beta 5 [Homo sapiens]
  misc_feature (183)..(241): Homolog of NCBI NO: 30109272 NR Description: Similar to centaurin, beta 5 [Homo sapiens]
  misc_feature (1)..(94): Homolog of NCBI NO: 34873104 NR Description: similar to CENTB5 protein [Rattus norvegicus]
  misc_feature (176)..(241): Homolog of NCBI NO: 34873104 NR Description: similar to CENTB5 protein [Rattus norvegicus]
MCIECSGVHRNLGVHISKVRSLTLDVKVWEPTILDLFRNLGNGYCNSVWEELLHHLDDDSEKGSTDTLASVSKPSSEDWFTLKEKYINGKYLEKALVVKDEREANSTASSRIWEAVQSRNIRDIYRLIVKADANIINTKFDDITDLDVYHHHHVDAPDEVKKRHDPNACQRIKNSNEARNCLQGCSLLHVACQSGDPILLELLLQFGADINMRDYHGRTPLHHCIASGNNAFAKVLLRRGARPSIEDGGGLSVLERAMEMGAITDEELFLLLAECQ

SEQ ID NO: 107526 - DNA, 1046 bp, Arabidopsis thaliana
  misc_feature (1)..(1046): Ceres Seq. ID no. 13650610
  misc_feature: MA Experiment ID: 108434 Result: Up-regulated in Transcription
  misc_feature: MA Experiment 108434 PARAMETER Experiment Name: At_Root_Tips_cDNA_P Parameter: Tissue Value: Root Tips
  misc_feature: MA Experiment ID: 108435 Result: Up-regulated in Transcription
  misc_feature: MA Experiment 108435 PARAMETER Experiment Name: At_stm_Mutants_cDNA_P Parameter: Plant Line Value: wt Landsburg vs stm
  misc_feature: MA Experiment 108435 PARAMETER Experiment Name: At_stm_Mutants_cDNA_P Parameter: Tissue Value: Shoot Apical Meristem Region
  misc_feature: MA Experiment ID: 108462 Result: Down-regulated in Transcription
  misc_feature: MA Experiment 108462 PARAMETER Experiment Name: At_Germinating_Seeds_cDNA_P Parameter: Age (day) Value: 2 vs. 0
  misc_feature: MA Experiment 108462 PARAMETER Experiment Name: At_Germinating_Seeds_cDNA_P Parameter: Tissue Value: Germinating Seeds
  misc_feature: MA Experiment ID: 108463 Result: Down-regulated in Transcription
  misc_feature: MA Experiment 108463 PARAMETER Experiment Name: At_Germinating_Seeds_cDNA_P Parameter: Age (day) Value: 3 vs. 0
  misc_feature: MA Experiment 108463 PARAMETER Experiment Name: At_Germinating_Seeds_cDNA_P Parameter: Tissue Value: Germinating Seeds
  misc_feature: MA Experiment ID: 108464 Result: Down-regulated in Transcription
  misc_feature: MA Experiment 108464 PARAMETER Experiment Name: At_Germinating_Seeds_cDNA_P Parameter: Age (day) Value: 4 vs. 0
  misc_feature: MA Experiment 108464 PARAMETER Experiment Name: At_Germinating_Seeds_cDNA_P Parameter: Tissue Value: Germinating Seeds
  misc_feature: MA Experiment ID: 108594 Result: Up-regulated in Transcription
  misc_feature: MA Experiment 108594 PARAMETER Experiment Name: At_Ler-rhl_Root_cDNA_P Parameter: Plant Line Value: null
  misc_feature: MA Experiment ID: 20000069 Result: Down-regulated in Transcription
  misc_feature: MA Experiment 20000069 PARAMETER Experiment Name: At_100uM_ABA_Mutants_cDNA_P Parameter: Plant Line Value: CS23
  misc_feature: MA Experiment 20000069 PARAMETER Experiment Name: At_100uM_ABA_Mutants_cDNA_P Parameter: Timepoint (hr) Value: 6
  misc_feature: MA Experiment 20000069 PARAMETER Experiment Name: At_100uM_ABA_Mutants_cDNA_P Parameter: Tissue Value: Aerial
  misc_feature: MA Experiment 20000069 PARAMETER Experiment Name: At_100uM_ABA_Mutants_cDNA_P Parameter: Treatment Value: 100uM ABA vs. No Treatment
  misc_feature: MA Experiment ID: 20000180 Result: Down-regulated in Transcription
  misc_feature: MA Experiment 20000180 PARAMETER Experiment Name: At_Germinating_Seeds_P Parameter: Age (hr) Value: 24 vs. 0
  misc_feature: MA Experiment 20000180 PARAMETER Experiment Name: At_Germinating_Seeds_P Parameter: Tissue Value: Germinating Seeds
  misc_feature: MA Experiment ID: 20000184 Result: Up-regulated in Transcription
  misc_feature: MA Experiment 20000184 PARAMETER Experiment Name: At_Shoots__P Parameter: Age (day) Value: 7
  misc_feature: MA Experiment 20000184 PARAMETER Experiment Name: At_Shoots__P Parameter: Tissue Value: Shoots vs. Whole Plant
agggttctccgtgcagaggataagatattctagggttttgtggtaaatggaatcgaatcacgaaggcaacgcgatacaagtgattgaccaagtaacaaccatgacccatctgtctgacccgaatccgaaaaccaaaccgggtatgatgctcatgaaacaagaagacgggtatttgcagccggtgaagactaaaccggctccgaagagaccgacttctaaagaccgtcacacgaaagtagaaggacgaggtcggaggatccgaatgccggcgggttgcgctgctcgggtctttcaattgacccgtgaacttggtcacaaatccgacggagaaacgatacggtggttattggaacgagctgaaccggcgataattgaagcaaccggaaccggaactgtaccggctattgctgtatcggttaacggaactttaaaaatcccgacgagctctccagtgttgaatgacggcggccgtgacggtgacggtgacctaataaagaaacggaggaagagaaactgtacgagcgatttcgtagacgttaatgacagctgtcatagctccgttacttctgggttagctccgataacggcgtcaaactacggcgttaatatcctgaacgttaatacacaggggtttgtgccgttttggcctatgggtatgggtactgcgtttgttactggtgggccggatcaaatgggccaaatgtgggctattcctaccgttgctacagctccgtttctgaatgttggtgctagaccggtgtctagttatgtctcaaacgcttcagacgctgaggcggagatggaaacgagcggtggcggaacgacgcaaccgctgagggatttttcgttggagatttatgataagagagagcttcagtttttgggtggctcagggaactcatctccgtcttcatgtcatgagacttaaggaattttaactcttagttctagtttctttttagtttttagtaagtttgattcctgatttaggttaagtaagatttgtaaaagaattgggagcacgatttcaattttatgtttctgtc

SEQ ID NO: 107527 - protein, 293 aa, Arabidopsis thaliana; identical to SEQ ID NO: 99479
  peptide (1)..(293): Ceres Seq. ID no. 13650611
  misc_feature (46)..(252): Pfam Name: TCP family transcription factor Pfam Description: TCP family transcription factor
  misc_feature (1)..(293): Homolog of NCBI NO: 15242216 NR Description: TCP family transcription factor, putative thaliana] >gi|30696122|ref|NP_851173.1| TCP family transcription putative [Arabidopsis thaliana] >gi|8809685|dbj|BAA97226.1|
  misc_feature (34)..(293): Homolog of NCBI NO: 21592496 NR Description: unknown [Arabidopsis thaliana]
  misc_feature (27)..(235): Homolog of NCBI NO: 15225538 NR Description: TCP family transcription factor, putative
  misc_feature (49)..(238): Homolog of NCBI NO: 7489534 NR Description: probable DNA binding protein PCF2 - rice
  misc_feature (11)..(134): Homolog of NCBI NO: 11357581 NR Description: hypothetical protein F1P2.170 - Arabidopsis >gi|6522545|emb|CAB61988.1| putative protein [Arabidopsis
  misc_feature (11)..(134): Homolog of NCBI NO: 22331641 NR Description: TCP family transcription factor, putative thaliana] >gi|16604511|gb|AAL24261.1| AT3g47620/F1P2_170 thaliana] >gi|21655289|gb|AAM65356.1| AT3g47620/F1P2_170
  misc_feature (49)..(134): Homolog of NCBI NO: 18409345 NR Description: TCP family transcription factor, putative
  misc_feature (43)..(134): Homolog of NCBI NO: 5731257 NR Description: auxin-induced basic helix-loop-helix
  misc_feature (49)..(148): Homolog of NCBI NO: 15218305 NR Description: TCP family transcription factor, putative
  misc_feature (52)..(123): Homolog of NCBI NO: 15232059 NR Description: TCP family transcription factor, putative thaliana] >gi|9279624|dbj|BAB01082.1| gene_id:MOJ10.8~unknown [Arabidopsis thaliana] >gi|11595501|emb|CAC18326.1| putative

SEQ ID NO: 107528 - protein, 275 aa, Arabidopsis thaliana; identical to SEQ ID NO: 99480
  peptide (1)..(275): Ceres Seq. ID no. 13650612
  misc_feature (28)..(234): Pfam Name: TCP family transcription factor Pfam Description: TCP family transcription factor
  misc_feature (1)..(275): Homolog of NCBI NO: 15242216 NR Description: TCP family transcription factor, putative thaliana] >gi|30696122|ref|NP_851173.1| TCP family transcription putative [Arabidopsis thaliana] >gi|8809685|dbj|BAA97226.1|
  misc_feature (16)..(275): Homolog of NCBI NO: 21592496 NR Description: unknown [Arabidopsis thaliana]
  misc_feature (9)..(217): Homolog of NCBI NO: 15225538 NR Description: TCP family transcription factor, putative
  misc_feature (31)..(220): Homolog of NCBI NO: 7489534 NR Description: probable DNA binding protein PCF2 - rice
  misc_feature (1)..(116): Homolog of NCBI NO: 11357581 NR Description: hypothetical protein F1P2.170 - Arabidopsis >gi|6522545|emb|CAB61988.1| putative protein [Arabidopsis
  misc_feature (1)..(116): Homolog of NCBI NO: 22331641 NR Description: TCP family transcription factor, putative thaliana] >gi|16604511|gb|AAL24261.1| AT3g47620/F1P2_170 thaliana] >gi|21655289|gb|AAM65356.1| AT3g47620/F1P2_170
  misc_feature (31)..(116): Homolog of NCBI NO: 18409345 NR Description: TCP family transcription factor, putative
  misc_feature (25)..(116): Homolog of NCBI NO: 5731257 NR Description: auxin-induced basic helix-loop-helix
  misc_feature (31)..(130): Homolog of NCBI NO: 15218305 NR Description: TCP family transcription factor, putative
  misc_feature (34)..(105): Homolog of NCBI NO: 15232059 NR Description: TCP family transcription factor, putative thaliana] >gi|9279624|dbj|BAB01082.1| gene_id:MOJ10.8~unknown [Arabidopsis thaliana] >gi|11595501|emb|CAC18326.1| putative

SEQ ID NO: 107529 - protein, 261 aa, Arabidopsis thaliana; identical to SEQ ID NO: 99481
  peptide (1)..(261): Ceres Seq. ID no. 13650613
  misc_feature (14)..(220): Pfam Name: TCP family transcription factor Pfam Description: TCP family transcription factor
  misc_feature (1)..(261): Homolog of NCBI NO: 15242216 NR Description: TCP family transcription factor, putative thaliana] >gi|30696122|ref|NP_851173.1| TCP family transcription putative [Arabidopsis thaliana] >gi|8809685|dbj|BAA97226.1|
  misc_feature (2)..(261): Homolog of NCBI NO: 21592496 NR Description: unknown [Arabidopsis thaliana]
  misc_feature (1)..(203): Homolog of NCBI NO: 15225538 NR Description: TCP family transcription factor, putative
  misc_feature (17)..(206): Homolog of NCBI NO: 7489534 NR Description: probable DNA binding protein PCF2 - rice
  misc_feature (1)..(102): Homolog of NCBI NO: 11357581 NR Description: hypothetical protein F1P2.170 - Arabidopsis >gi|6522545|emb|CAB61988.1| putative protein [Arabidopsis
  misc_feature (1)..(102): Homolog of NCBI NO: 22331641 NR Description: TCP family transcription factor, putative thaliana] >gi|16604511|gb|AAL24261.1| AT3g47620/F1P2_170 thaliana] >gi|21655289|gb|AAM65356.1| AT3g47620/F1P2_170
  misc_feature (17)..(102): Homolog of NCBI NO: 18409345 NR Description: TCP family transcription factor, putative
  misc_feature (11)..(102): Homolog of NCBI NO: 5731257 NR Description: auxin-induced basic helix-loop-helix
  misc_feature (17)..(116): Homolog of NCBI NO: 15218305 NR Description: TCP family transcription factor, putative
  misc_feature (20)..(91): Homolog of NCBI NO: 15232059 NR Description: TCP family transcription factor, putative thaliana] >gi|9279624|dbj|BAB01082.1| gene_id:MOJ10.8~unknown [Arabidopsis thaliana] >gi|11595501|emb|CAC18326.1| putative

SEQ ID NO: 107530 - DNA, 699 bp, Arabidopsis thaliana
  misc_feature (1)..(699): Ceres Seq. ID no. 13650614
  misc_feature: MA Experiment ID: 20000173 Result: Up-regulated in Transcription
  misc_feature: MA Experiment 20000173 PARAMETER Experiment Name: At_42deg_Heat_P Parameter: Age (day) Value: 14
  misc_feature: MA Experiment 20000173 PARAMETER Experiment Name: At_42deg_Heat_P Parameter: Organism Value: A. thaliana
  misc_feature: MA Experiment 20000173 PARAMETER Experiment Name: At_42deg_Heat_P Parameter: Plant Line Value: WS
  misc_feature: MA Experiment 20000173 PARAMETER Experiment Name: At_42deg_Heat_P Parameter: Temperature (deg C) Value: 42 vs. 22
  misc_feature: MA Experiment 20000173 PARAMETER Experiment Name: At_42deg_Heat_P Parameter: Timepoint (hr) Value: 6
  misc_feature: MA Experiment 20000173 PARAMETER Experiment Name: At_42deg_Heat_P Parameter: Tissue Value: Aerial
  misc_feature: MA Experiment ID: 20000227 Result: Down-regulated in Transcription
  misc_feature: MA Experiment 20000227 PARAMETER Experiment Name: At_Root-Tips-vs-Tops_P Parameter: Tissue Value: Root Tips vs. Root Tops
  misc_feature: MA Experiment ID: 20001248 Result: Down-regulated in Transcription
  misc_feature: MA Experiment 20001248 PARAMETER Experiment Name: At_Far-red-induction_P Parameter: Age (day) Value: 7
  misc_feature: MA Experiment 20001248 PARAMETER Experiment Name: At_Far-red-induction_P Parameter: Light Value: Far-red vs. White
  misc_feature: MA Experiment 20001248 PARAMETER Experiment Name: At_Far-red-induction_P Parameter: Organism Value: A. thaliana
  misc_feature: MA Experiment 20001248 PARAMETER Experiment Name: At_Far-red-induction_P Parameter: Plant Line Value: Columbia
  misc_feature: MA Experiment 20001248 PARAMETER Experiment Name: At_Far-red-induction_P Parameter: Timepoint (hr) Value: 4
  misc_feature: MA Experiment 20001248 PARAMETER Experiment Name: At_Far-red-induction_P Parameter: Tissue Value: Whole Plant
  misc_feature: MA Experiment ID: 20001557 Result: Down-regulated in Transcription
  misc_feature: MA Experiment 20001557 PARAMETER Experiment Name: At_Drought_Soil_Dry_P Parameter: Age (day) Value: 27
  misc_feature: MA Experiment 20001557 PARAMETER Experiment Name: At_Drought_Soil_Dry_P Parameter: Organism Value: A. thaliana
  misc_feature: MA Experiment 20001557 PARAMETER Experiment Name: At_Drought_Soil_Dry_P Parameter: Plant Line Value: WS
  misc_feature: MA Experiment 20001557 PARAMETER Experiment Name: At_Drought_Soil_Dry_P Parameter: Post Timepoint (hr) Value: 3
  misc_feature: MA Experiment 20001557 PARAMETER Experiment Name: At_Drought_Soil_Dry_P Parameter: Post-Treatment Value: Re-Water vs. No Drought
  misc_feature: MA Experiment 20001557 PARAMETER Experiment Name: At_Drought_Soil_Dry_P Parameter: Timepoint (day) Value: 13
  misc_feature: MA Experiment 20001557 PARAMETER Experiment Name: At_Drought_Soil_Dry_P Parameter: Treatment Value: Drought vs. No Drought
  misc_feature: Pfam Name: RRM_1 Pfam Description: RNA recognition motif. (a.k.a. RRM, RBD, or RNP domain)
catcgctgtctggaacagcgataacggcttatgtaaccttcagagatgcgtatgctctggatatggctgtgttacttagcggagctacgatcgttgatcaaaccgtttggatatcggtctacggtgtctatttacatgaatctaacaatctcagacaagaagaagactatagtgttacggtgactcgttcagacgcgtttgcttcatcgcctggagaggccataaccgtggctcaacaagttgtgcagacgatgttagctaaaggctacgttttaagcaaagacgcgattggtaaagccaaagctttggatgagtctcagagattttcaagcttggtagcgaccaaattggcagagatcagccattaccttggcctcacacagaacattcagtcgagtatggaactcgtgagatcagcggacgagaagtatcatttctcggatttcactaaatccgcggttcttgtcacgggcacagctgctgtagccgcagccaccattacagggaaagtggctgcagctgcagcgactagtgtggtcaacagtcgttactttgctaatggggctttatggttctcagatgctttgggccgggctgcaaaagcagcggcccatatcggtggaggaggaagcaattgatgtaaaaagtctttgggcttccttggaaaacataaataaatgatatgtgaggttttaaagc

SEQ ID NO: 107531 - protein, 211 aa, Arabidopsis thaliana
  peptide (1)..(211): Ceres Seq. ID no. 13650615
  misc_feature: Pfam Name: RRM_1 Pfam Description: RNA recognition motif. (a.k.a. RRM, RBD, or RNP domain)
  misc_feature (4)..(211): Homolog of NCBI NO: 6714467 NR Description: unknown protein [Arabidopsis thaliana]
  misc_feature (21)..(211): Homolog of NCBI NO: 30678301 NR Description: RNA recognition motif (RRM)-containing protein thaliana] >gi|26452178|dbj|BAC43177.1| unknown protein thaliana] >gi|28372926|gb|AAO39945.1| At3g01210 [Arabidopsis
  misc_feature (6)..(210): Homolog of NCBI NO: 18394102 NR Description: RNA recognition motif (RRM)-containing protein thaliana] >gi|15292971|gb|AAK93596.1| unknown protein thaliana] >gi|20259677|gb|AAM14356.1| unknown protein
  misc_feature (6)..(210): Homolog of NCBI NO: 21618045 NR Description: unknown [Arabidopsis thaliana]
  misc_feature (6)..(205): Homolog of NCBI NO: 25518024 NR Description: F14L17.11 protein - Arabidopsis thaliana Contains similarity to Vip1 protein from Schizosaccharomyces gb|Y13635.1 and contains a RNA recognition motif PF|00076. EST
  misc_feature (8)..(209): Homolog of NCBI NO: 38344906 NR Description: OSJNBb0079B02.9 [Oryza sativa (japonica
  misc_feature (9)..(206): Homolog of NCBI NO: 7485085 NR Description: hypothetical protein - Arabidopsis thaliana hypothetical protein [Arabidopsis thaliana]
  misc_feature (9)..(206): Homolog of NCBI NO: 18414951 NR Description: RNA recognition motif (RRM)-containing protein thaliana] >gi|21593540|gb|AAM65507.1| putative splicing
  misc_feature (9)..(206): Homolog of NCBI NO: 34897896 NR Description: ESTs D15336(C0474),C98053(C0474) correspond to a of the predicted gene.~Similar to Arabidopsis thaliana DNA
  misc_feature (9)..(206): Homolog of NCBI NO: 8809670 NR Description: gene_id:MSD23.5~pir||C71447~similar to unknown
SLSGTAITAYVTFRDAYALDMAVLLSGATIVDQTVWISVYGVYLHESNNLRQEEDYSVTVTRSDAFASSPGEAITVAQQVVQTMLAKGYVLSKDAIGKAKALDESQRFSSLVATKLAEISHYLGLTQNIQSSMELVRSADEKYHFSDFTKSAVLVTGTAAVAAATITGKVAAAAATSVVNSRYFANGALWFSDALGRAAKAAAHIGGGGSN

SEQ ID NO: 107532 - protein, 191 aa, Arabidopsis thaliana; identical to SEQ ID NO: 79741
  peptide (1)..(191): Ceres Seq. ID no. 13650616
  misc_feature: Pfam Name: RRM_1 Pfam Description: RNA recognition motif. (a.k.a. RRM, RBD, or RNP domain)
  misc_feature (1)..(191): Homolog of NCBI NO: 6714467 NR Description: unknown protein [Arabidopsis thaliana]
  misc_feature (1)..(191): Homolog of NCBI NO: 30678301 NR Description: RNA recognition motif (RRM)-containing protein thaliana] >gi|26452178|dbj|BAC43177.1| unknown protein thaliana] >gi|28372926|gb|AAO39945.1| At3g01210 [Arabidopsis
  misc_feature (1)..(190): Homolog of NCBI NO: 18394102 NR Description: RNA recognition motif (RRM)-containing protein thaliana] >gi|15292971|gb|AAK93596.1| unknown protein thaliana] >gi|20259677|gb|AAM14356.1| unknown protein
  misc_feature (1)..(190): Homolog of NCBI NO: 21618045 NR Description: unknown [Arabidopsis thaliana]
  misc_feature (1)..(185): Homolog of NCBI NO: 25518024 NR Description: F14L17.11 protein - Arabidopsis thaliana Contains similarity to Vip1 protein from Schizosaccharomyces gb|Y13635.1 and contains a RNA recognition motif PF|00076. EST
  misc_feature (1)..(189): Homolog of NCBI NO: 38344906 NR Description: OSJNBb0079B02.9 [Oryza sativa (japonica
  misc_feature (1)..(186): Homolog of NCBI NO: 7485085 NR Description: hypothetical protein - Arabidopsis thaliana hypothetical protein [Arabidopsis thaliana]
  misc_feature (1)..(186): Homolog of NCBI NO: 18414951 NR Description: RNA recognition motif (RRM)-containing protein thaliana] >gi|21593540|gb|AAM65507.1| putative splicing
  misc_feature (1)..(186): Homolog of NCBI NO: 34897896 NR Description: ESTs D15336(C0474),C98053(C0474) correspond to a of the predicted gene.~Similar to Arabidopsis thaliana DNA
  misc_feature (1)..(186): Homolog of NCBI NO: 8809670 NR Description: gene_id:MSD23.5~pir||C71447~similar to unknown

SEQ ID NO: 107533 - protein, 128 aa, Arabidopsis thaliana; identical to SEQ ID NO: 79742
  peptide (1)..(128): Ceres Seq. ID no. 13650617
  misc_feature: Pfam Name: RRM_1 Pfam Description: RNA recognition motif. (a.k.a. RRM, RBD, or RNP domain)
  misc_feature (1)..(128): Homolog of NCBI NO: 6714467 NR Description: unknown protein [Arabidopsis thaliana]
  misc_feature (1)..(128): Homolog of NCBI NO: 30678301 NR Description: RNA recognition motif (RRM)-containing protein thaliana] >gi|26452178|dbj|BAC43177.1| unknown protein thaliana] >gi|28372926|gb|AAO39945.1| At3g01210 [Arabidopsis
  misc_feature (1)..(127): Homolog of NCBI NO: 18394102 NR Description: RNA recognition motif (RRM)-containing protein thaliana] >gi|15292971|gb|AAK93596.1| unknown protein thaliana] >gi|20259677|gb|AAM14356.1| unknown protein
  misc_feature (1)..(127): Homolog of NCBI NO: 21618045 NR Description: unknown [Arabidopsis thaliana]
  misc_feature (1)..(122): Homolog of NCBI NO: 25518024 NR Description: F14L17.11 protein - Arabidopsis thaliana Contains similarity to Vip1 protein from Schizosaccharomyces gb|Y13635.1 and contains a RNA recognition motif PF|00076. EST
  misc_feature (1)..(126): Homolog of NCBI NO: 38344906 NR Description: OSJNBb0079B02.9 [Oryza sativa (japonica
  misc_feature (1)..(123): Homolog of NCBI NO: 7485085 NR Description: hypothetical protein - Arabidopsis thaliana hypothetical protein [Arabidopsis thaliana]
  misc_feature (1)..(123): Homolog of NCBI NO: 18414951 NR Description: RNA recognition motif (RRM)-containing protein thaliana] >gi|21593540|gb|AAM65507.1| putative splicing
  misc_feature (1)..(123): Homolog of NCBI NO: 34897896 NR Description: ESTs D15336(C0474),C98053(C0474) correspond to a of the predicted gene.~Similar to Arabidopsis thaliana DNA
  misc_feature (1)..(123): Homolog of NCBI NO: 8809670 NR Description: gene_id:MSD23.5~pir||C71447~similar to unknown

SEQ ID NO: 107534 - DNA, 2534 bp, Arabidopsis thaliana
  misc_feature (1)..(2534): Ceres Seq. ID no. 13650622
  misc_feature: MA Experiment ID: 20000315 Result: Down-regulated in Transcription
  misc_feature: MA Experiment 20000315 PARAMETER Experiment Name: At_14day_Shoots-Roots_Sub_P Parameter: Age (day) Value: 14
  misc_feature: MA Experiment 20000315 PARAMETER Experiment Name: At_14day_Shoots-Roots_Sub_P Parameter: Organism Value: A. thaliana
  misc_feature: MA Experiment 20000315 PARAMETER Experiment Name: At_14day_Shoots-Roots_Sub_P Parameter: Plant Line Value: WS
  misc_feature: MA Experiment 20000315 PARAMETER Experiment Name: At_14day_Shoots-Roots_Sub_P Parameter: Tissue Value: Shoots vs. Whole Plant
  misc_feature: MA Experiment ID: 20000327 Result: Down-regulated in Transcription
  misc_feature: MA Experiment 20000327 PARAMETER Experiment Name: At_42deg_Heat_Sub_P Parameter: Age (day) Value: 14
  misc_feature: MA Experiment 20000327 PARAMETER Experiment Name: At_42deg_Heat_Sub_P Parameter: Organism Value: A. thaliana
  misc_feature: MA Experiment 20000327 PARAMETER Experiment Name: At_42deg_Heat_Sub_P Parameter: Plant Line Value: WS
  misc_feature: MA Experiment 20000327 PARAMETER Experiment Name: At_42deg_Heat_Sub_P Parameter: Temperature (deg C) Value: 42 vs. 22
  misc_feature: MA Experiment 20000327 PARAMETER Experiment Name: At_42deg_Heat_Sub_P Parameter: Timepoint (hr) Value: 1
  misc_feature: MA Experiment 20000327 PARAMETER Experiment Name: At_42deg_Heat_Sub_P Parameter: Tissue Value: Aerial
aattcaaaataaacctttctttctttctttctttcttctctatcattttatctgaatccgcctcccaaattcaatcctttaattttcaactccaaatcgatccttcaatcaatttctgaaacttttagtcatcatcagctcaatttcggatctccggagttgtatttttactcctttgtcggaggtaaaatagctcagtcgtcgttggtggcggcggcggggagaagcggaagggttatcggcgattatgcggtgggtcgacaaatcgggtcggggtcgttttccgtggtttgggaagggaggcatcttgttcatggcaccgtcgttgctatcaaggagatcgctatggctcggcttaataagaagttgcaagagagtctcatgtcggagattatcatcttaaggaagattaatcatcctaacatcattcgctttatcgacatgatcgaggctcccgggaagataaatttggtgttggagtactgtaaaggtggtgatctgtctatgtatattcacaaacatggaagtgttcctgaagctactgctaagcattttatgctgcagttagcggctggcttacaagttcttcgtgacaataatatcattcaccgcgatttaaagcctcagaatcttcttctatccacagatgataatgatgcagctctgaagattgccgattttggatttgcaagatcgttgcagcctaggggtttggcagaaactttatgtggttcaccactgtatatggccccagagattatgcagcttcaaaaatatgatgcaaaggcagatctctggagtgttggtgctatattatttcaacttgtgacaggcagaaccccttttacaggaaacagccaaattcagttgctccagaacattataagatcaactgaattacattttccagcagactgtagagatttgagtaccgactgtaaagatctatgccagaagctactgcgtcgtaatccagtggaacgtttgacgtttgaagagttttttcatcatcctttcctttcagacaaacaatcatatgatttcacaaggagtagattagattcacgaactatgaacgattttcattcatcaggaagcagtccctcaagaaatatagaagaaatttctcaagaagacgggttgccgttctttttagatgatgattctagtggacctgagggaagcccttcatcttttaaacatacttccccgatgaagtcatcttacggatttagtgttgaaagaagggaggcagcattaagtcctttgaaaaacatggatctttcttccagatatagtagagtcagtcatagagcagaaaccaataatttcaagtttgagggccatagattatcagatagaagccaattcaaaccgtcaagcttacctgattccagatcatttagtacccaaggaagaggggattctccagactcaatggatcaagattatgttctgatatctggaccaccggttgatataccatcatcttcatctggttctccgaagcctttcaattacccattcaaatcacattctcctcctgtagagttcatcaagagaaatgtaactaatttaacggctcctatgccaatagctagtgctactggcaacaaccttagtcgatttggaagcttggagagtcagaattgtatcccgggtacttcccatgggtctctggatcttgtagatgcttttgaacagccatcaactaacagcttgacaagaatccggtctttgcaaaagtgtgcagctgcaatagcagaattggttcatgaaaggggtgaaaatggtaagcatttagaagctttctcgatccaactggtgattcttgcaatttggaatcaagcactacacatctgtcatactcaggcagtctcgggtatagaaggaagcctgctccaagacattaacagagtaggaagaaatatcagccacggaggatcagagaagttattgcctcagattcagaaagaatttgtccaggaagtggagcgtgctgaagaacttgccaagtttgttgaatctgataatgcaaagatgccggatgcaatggagatgatacttcaagcagctcttgctcttggcataagtggaggagtagatgaagtgatgggagacgcagagaacgcaggaaacctctactcaaaagcggtgcgtttgttagtcttccttgcagtggaggcgcagacgctgattctcaatccacctttaacactcacaaactcagtaaggtatcgactcagaacatatattgactcactcataaccagattgaaacatctgcaatcacatagaagaacttcatatcctcagaagcaatgaggaggaacaaaaaaatccgaaatggttctcgtgtttgttttgttcagtgtctgtaattgtaatcatttgattgtacagccaaaaccaaaaaacgtaattcttaattcttttggggttaatccggagggacttgtaacattctctttgctgtgacgctcatcaattgtttctatagatttaattttaatatatttgaaaagaatctggct

SEQ ID NO: 107535 - protein, 659 aa, Arabidopsis thaliana
  peptide (1)..(659): Ceres Seq. ID no. 13650623
  misc_feature (1)..(225): Pfam Name: Protein kinase domain Pfam Description: Protein kinase domain
  misc_feature (1)..(531): Homolog of NCBI NO: 30687274 NR Description: protein kinase family [Arabidopsis thaliana]
  misc_feature (1)..(531): Homolog of NCBI NO: 20268768 NR Description: unknown protein [Arabidopsis thaliana]
  misc_feature (115)..(531): Homolog of NCBI NO: 30687278 NR Description: protein kinase family [Arabidopsis thaliana]
  misc_feature (1)..(288): Homolog of NCBI NO: 18412205 NR Description: protein kinase family [Arabidopsis thaliana]
  misc_feature (352)..(647): Homolog of NCBI NO: 18412205 NR Description: protein kinase family [Arabidopsis thaliana]
  misc_feature (240)..(659): Homolog of NCBI NO: 20268768 NR Description: unknown protein [Arabidopsis thaliana]
  misc_feature (240)..(659): Homolog of NCBI NO: 25408568 NR Description: hypothetical protein At2g37850 [imported] -
  misc_feature (240)..(659): Homolog of NCBI NO: 30687274 NR Description: protein kinase family [Arabidopsis thaliana]
  misc_feature (240)..(659): Homolog of NCBI NO: 30687278 NR Description: protein kinase family [Arabidopsis thaliana]
  misc_feature (1)..(210): Homolog of NCBI NO: 25287591 NR Description: probable protein kinase [imported] - Arabidopsis
MARLNKKLQESLMSEIIILRKINHPNIIRFIDMIEAPGKINLVLEYCKGGDLSMYIHKHGSVPEATAKHFMLQLAAGLQVLRDNNIIHRDLKPQNLLLSTDDNDAALKIADFGFARSLQPRGLAETLCGSPLYMAPEIMQLQKYDAKADLWSVGAILFQLVTGRTPFTGNSQIQLLQNIIRSTELHFPADCRDLSTDCKDLCQKLLRRNPVERLTFEEFFHHPFLSDKQSYDFTRSRLDSRTMNDFHSSGSSPSRNIEEISQEDGLPFFLDDDSSGPEGSPSSFKHTSPMKSSYGFSVERREAALSPLKNMDLSSRYSRVSHRAETNNFKFEGHRLSDRSQFKPSSLPDSRSFSTQGRGDSPDSMDQDYVLISGPPVDIPSSSSGSPKPFNYPFKSHSPPVEFIKRNVTNLTAPMPIASATGNNLSRFGSLESQNCIPGTSHGSLDLVDAFEQPSTNSLTRIRSLQKCAAAIAELVHERGENGKHLEAFSIQLVILAIWNQALHICHTQAVSGIEGSLLQDINRVGRNISHGGSEKLLPQIQKEFVQEVERAEELAKFVESDNAKMPDAMEMILQAALALGISGGVDEVMGDAENAGNLYSKAVRLLVFLAVEAQTLILNPPLTLTNSVRYRLRTYIDSLITRLKHLQSHRRTSYPQKQ

SEQ ID NO: 107536 - protein, 647 aa, Arabidopsis thaliana
  peptide (1)..(647): Ceres Seq. ID no. 13650624
  misc_feature (1)..(213): Pfam Name: Protein kinase domain Pfam Description: Protein kinase domain
  misc_feature (1)..(519): Homolog of NCBI NO: 30687274 NR Description: protein kinase family [Arabidopsis thaliana]
  misc_feature (1)..(519): Homolog of NCBI NO: 20268768 NR Description: unknown protein [Arabidopsis thaliana]
  misc_feature (103)..(519): Homolog of NCBI NO: 30687278 NR Description: protein kinase family [Arabidopsis thaliana]
  misc_feature (1)..(276): Homolog of NCBI NO: 18412205 NR Description: protein kinase family [Arabidopsis thaliana]
  misc_feature (340)..(635): Homolog of NCBI NO: 18412205 NR Description: protein kinase family [Arabidopsis thaliana]
  misc_feature (228)..(647): Homolog of NCBI NO: 20268768 NR Description: unknown protein [Arabidopsis thaliana]
  misc_feature (228)..(647): Homolog of NCBI NO: 30687274 NR Description: protein kinase family [Arabidopsis thaliana]
  misc_feature (228)..(647): Homolog of NCBI NO: 25408568 NR Description: hypothetical protein At2g37850 [imported] -
  misc_feature (228)..(647): Homolog of NCBI NO: 30687278 NR Description: protein kinase family [Arabidopsis thaliana]
  misc_feature (1)..(198): Homolog of NCBI NO: 25287591 NR Description: probable protein kinase [imported] - Arabidopsis
MSEIIILRKINHPNIIRFIDMIEAPGKINLVLEYCKGGDLSMYIHKHGSVPEATAKHFMLQLAAGLQVLRDNNIIHRDLKPQNLLLSTDDNDAALKIADFGFARSLQPRGLAETLCGSPLYMAPEIMQLQKYDAKADLWSVGAILFQLVTGRTPFTGNSQIQLLQNIIRSTELHFPADCRDLSTDCKDLCQKLLRRNPVERLTFEEFFHHPFLSDKQSYDFTRSRLDSRTMNDFHSSGSSPSRNIEEISQEDGLPFFLDDDSSGPEGSPSSFKHTSPMKSSYGFSVERREAALSPLKNMDLSSRYSRVSHRAETNNFKFEGHRLSDRSQFKPSSLPDSRSFSTQGRGDSPDSMDQDYVLISGPPVDIPSSSSGSPKPFNYPFKSHSPPVEFIKRNVTNLTAPMPIASATGNNLSRFGSLESQNCIPGTSHGSLDLVDAFEQPSTNSLTRIRSLQKCAAAIAELVHERGENGKHLEAFSIQLVILAIWNQALHICHTQAVSGIEGSLLQDINRVGRNISHGGSEKLLPQIQKEFVQEVERAEELAKFVESDNAKMPDAMEMILQAALALGISGGVDEVMGDAENAGNLYSKAVRLLVFLAVEAQTLILNPPLTLTNSVRYRLRTYIDSLITRLKHLQSHRRTSYPQKQ

SEQ ID NO: 107537 - protein, 627 aa, Arabidopsis thaliana
  peptide (1)..(627): Ceres Seq. ID no. 13650625
  misc_feature (1)..(193): Pfam Name: Protein kinase domain Pfam Description: Protein kinase domain
  misc_feature (1)..(499): Homolog of NCBI NO: 30687274 NR Description: protein kinase family [Arabidopsis thaliana]
  misc_feature (1)..(499): Homolog of NCBI NO: 20268768 NR Description: unknown protein [Arabidopsis thaliana]
  misc_feature (83)..(499): Homolog of NCBI NO: 30687278 NR Description: protein kinase family [Arabidopsis thaliana]
  misc_feature (1)..(256): Homolog of NCBI NO: 18412205 NR Description: protein kinase family [Arabidopsis thaliana]
  misc_feature (320)..(615): Homolog of NCBI NO: 18412205 NR Description: protein kinase family [Arabidopsis thaliana]
  misc_feature (208)..(627): Homolog of NCBI NO: 20268768 NR Description: unknown protein [Arabidopsis thaliana]
  misc_feature (208)..(627): Homolog of NCBI NO: 30687274 NR Description: protein kinase family [Arabidopsis thaliana]
  misc_feature (208)..(627): Homolog of NCBI NO: 25408568 NR Description: hypothetical protein At2g37850 [imported] -
  misc_feature (208)..(627): Homolog of NCBI NO: 30687278 NR Description: protein kinase family [Arabidopsis thaliana]
  misc_feature (1)..(178): Homolog of NCBI NO: 25287591 NR Description: probable protein kinase [imported] - Arabidopsis
MIEAPGKINLVLEYCKGGDLSMYIHKHGSVPEATAKHFMLQLAAGLQVLRDNNIIHRDLKPQNLLLSTDDNDAALKIADFGFARSLQPRGLAETLCGSPLYMAPEIMQLQKYDAKADLWSVGAILFQLVTGRTPFTGNSQIQLLQNIIRSTELHFPADCRDLSTDCKDLCQKLLRRNPVERLTFEEFFHHPFLSDKQSYDFTRSRLDSRTMNDFHSSGSSPSRNIEEISQEDGLPFFLDDDSSGPEGSPSSFKHTSPMKSSYGFSVERREAALSPLKNMDLSSRYSRVSHRAETNNFKFEGHRLSDRSQFKPSSLPDSRSFSTQGRGDSPDSMDQDYVLISGPPVDIPSSSSGSPKPFNYPFKSHSPPVEFIKRNVTNLTAPMPIASATGNNLSRFGSLESQNCIPGTSHGSLDLVDAFEQPSTNSLTRIRSLQKCAAAIAELVHERGENGKHLEAFSIQLVILAIWNQALHICHTQAVSGIEGSLLQDINRVGRNISHGGSEKLLPQIQKEFVQEVERAEELAKFVESDNAKMPDAMEMILQAALALGISGGVDEVMGDAENAGNLYSKAVRLLVFLAVEAQTLILNPPLTLTNSVRYRLRTYIDSLITRLKHLQSHRRTSYPQKQ

SEQ ID NO: 107538 - DNA, 1877 bp, Arabidopsis thaliana
  misc_feature (1)..(1877): Ceres Seq. ID no. 13650633
  misc_feature: MA Experiment ID: 20000179 Result: Up-regulated in Transcription
  misc_feature: MA Experiment 20000179 PARAMETER Experiment Name: At_Germinating_Seeds_P Parameter: Age (hr) Value: 6 vs. 0
  misc_feature: MA Experiment 20000179 PARAMETER Experiment Name: At_Germinating_Seeds_P Parameter: Tissue Value: Germinating Seeds
  misc_feature: MA Experiment ID: 20000180 Result: Up-regulated in Transcription
  misc_feature: MA Experiment 20000180 PARAMETER Experiment Name: At_Germinating_Seeds_P Parameter: Age (hr) Value: 24 vs. 0
  misc_feature: MA Experiment 20000180 PARAMETER Experiment Name: At_Germinating_Seeds_P Parameter: Tissue Value: Germinating Seeds
  misc_feature: MA Experiment ID: 20000185 Result: Down-regulated in Transcription
  misc_feature: MA Experiment 20000185 PARAMETER Experiment Name: At_Roots__P Parameter: Age (day) Value: 7 vs. 21
  misc_feature: MA Experiment 20000185 PARAMETER Experiment Name: At_Roots__P Parameter: Organism Value: A. thaliana
  misc_feature: MA Experiment 20000185 PARAMETER Experiment Name: At_Roots__P Parameter: Tissue Value: Roots vs. Whole Plant
  misc_feature: MA Experiment ID: 20000214 Result: Down-regulated in Transcription
  misc_feature: MA Experiment 20000214 PARAMETER Experiment Name: At_4deg_Cold_P Parameter: Timepoint (hr) Value: 6
  misc_feature: MA Experiment ID: 20000264 Result: Up-regulated in Transcription
  misc_feature: MA Experiment 20000264 PARAMETER Experiment Name: At_Open_Flower_P Parameter: Age (day) Value: 21
  misc_feature: MA Experiment 20000264 PARAMETER Experiment Name: At_Open_Flower_P Parameter: Plant Line Value: WS
  misc_feature: MA Experiment 20000264 PARAMETER Experiment Name: At_Open_Flower_P Parameter: Tissue Value: Open Flower vs. Whole Plant
  misc_feature: MA Experiment ID: 20000286 Result: Up-regulated in Transcription
  misc_feature: MA Experiment 20000286 PARAMETER Experiment Name: At_Open_Flower_P Parameter: Age (day) Value: 21
  misc_feature: MA Experiment 20000286 PARAMETER Experiment Name: At_Open_Flower_P Parameter: Plant Line Value: WS
  misc_feature: MA Experiment 20000286 PARAMETER Experiment Name: At_Open_Flower_P Parameter: Tissue Value: Half Open vs. Whole Plant
  misc_feature: MA Experiment ID: 20000439 Result: Down-regulated in Transcription
  misc_feature: MA Experiment 20000439 PARAMETER Experiment Name: At_Roots__P Parameter: Age (day) Value: 14 vs. 21
  misc_feature: MA Experiment 20000439 PARAMETER Experiment Name: At_Roots__P Parameter: Organism Value: A. thaliana
  misc_feature: MA Experiment 20000439 PARAMETER Experiment Name: At_Roots__P Parameter: Tissue Value: Roots vs. Whole Plant
  misc_feature: MA Experiment ID: 20000794 Result: Up-regulated in Transcription
  misc_feature: MA Experiment 20000794 PARAMETER Experiment Name: At_Petals_P Parameter: Age (day) Value: 23-25 days
  misc_feature: MA Experiment 20000794 PARAMETER Experiment Name: At_Petals_P Parameter: Plant Line Value: WS
  misc_feature: MA Experiment 20000794 PARAMETER Experiment Name: At_Petals_P Parameter: Tissue Value: Petals vs. Whole plant
  misc_feature: MA Experiment ID: 20001905 Result: Down-regulated in Transcription
  misc_feature: MA Experiment 20001905 PARAMETER Experiment Name: At_Drought_Reproduction_P Parameter: Age (day) Value: 40
  misc_feature: MA Experiment 20001905 PARAMETER Experiment Name: At_Drought_Reproduction_P Parameter: Organism Value: A. thaliana
  misc_feature: MA Experiment 20001905 PARAMETER Experiment Name: At_Drought_Reproduction_P Parameter: Plant Line Value: WS
  misc_feature: MA Experiment 20001905 PARAMETER Experiment Name: At_Drought_Reproduction_P Parameter: Timepoint (day) Value: 10
  misc_feature: MA Experiment 20001905 PARAMETER Experiment Name: At_Drought_Reproduction_P Parameter: Tissue Value: Rosettes
  misc_feature: MA Experiment 20001905 PARAMETER Experiment Name: At_Drought_Reproduction_P Parameter: Treatment Value: Drought vs. No Drought
atatatcactgttcttcttctatattggagttcatctcttttgtttctaaagaaagagagagagagagagagagaagagaagatgttgccaggcatactattatgctcacttaatcccaggaatcacagcaaaaagaaaaagagtgagcgagagagcttagaaactgagcccaaagacattgactactggtactctgttcaattcaatcgagatcctccgagattcgctctcaaatctgagaataacaatcaccattcccgcagtaagagcggcggcgatttttgcaagaagaagaagagaggagaaatggcgaacaaggtttctaacttctcggatctgattcaacgagttacggcgtcttgtttgttgcatccactctccgccggccggcaagatctcgctgtgaatcgccgggaagagtacgatactgaagaagaggagaatgaggaggaaggtgagattcagtacgaagacgcattggagaaggagaatggtaaagatgagacaattagggctaagaacggaaggaacggtgtgagtgttgagacggtgcaggagatggagatggtgatggacgaagttttcacggcggctgctgctatgaagagagcttacgttgcgcttcaggaagctcattcgccgtgggatccggagaagatgcacgatgctgatatggcgatggtggctgagctgagaaggattggttcattgagggaaagattcaggaggatgagaggtaccggaagtggtggtcgaaggaaaaacggcgccggaagaggaatgctgagagaggccgtggcgccttatgaggcggttgtgaaggagctgaagaaagaagtgaaagtgaaagatactgagattgagaatctgaaggagaaagtcaaagtggcttctatggccaacggtaacggaggcaagaaacaccgattgctttcaagccggaaagttaactgtaccacacagattgctgcgtctccggtgccggagttatttgagatgacaatgattcaggtgaaagaagcatcaaagtctttcacagggattctattgtcactaatgcgagctgcacattgggacattgcagcggctgttcgatccattgaagccgcttcagcttcatccggcggaatgtctgcttcttcgtttgcatcctcggttcagtcatctgtcccgaaccagcacgcgaagtttgctcttgagtcttacatctgtaggaaaatcttccaaggatttgatcacgaaacgttttacatggatggaggcttatcttctcttatcaacccggatcagtaccgtcgtgactgctttgcgcagttcaaagatatgaaagcaatggatcctatggagttgctagggatcttaccaacttgccattttggtaaattctgctcgaagaagtacctttcgatcattcaccaaaaaatggaagagtcgttgttcggggactcggaacagcgggagttggttgtagccggtaaccacccaagaagtcagttctatggagagttcttggggctagctaaagcagtctggctgcttcatctcctggcattctcgctcgacccatccccgagtcactttgaagcaaacagaggagccgagtttcactctcagtacatggagagtgtcgtgaggttttcggatggccgtgttcctgcgggtcaagttgttggatttcctgtttgtccaggattcaagcttagccatcaagggaaaggatcaatcatcaaatccagagtttacttggttccaagggcttaaaaaggtttctttgagttcactgtttcttaggaatacattatgtcctcgtgtgttgtttaagactttaagacaatctagcttcggaaaaatcttgaaataaagagaccgttcgtat

SEQ ID NO: 107539 - protein, 586 aa, Arabidopsis thaliana
  peptide (1)..(586): Ceres Seq. ID no. 13650634
  misc_feature (173)..(308): Pfam Name: Plant protein of unknown function (DUF641) Pfam Description: Plant protein of unknown function (DUF641)
  misc_feature (28)..(586): Homolog of NCBI NO: 26452122 NR Description: unknown protein [Arabidopsis thaliana]
  misc_feature (28)..(586): Homolog of NCBI NO: 30697152 NR Description: expressed protein [Arabidopsis thaliana]
  misc_feature (103)..(586): Homolog of NCBI NO: 22327960 NR Description: expressed protein [Arabidopsis thaliana] gb|AAB82637.1~gene_id:K19M22.15~similar to unknown protein thaliana] >gi|19715645|gb|AAL91642.1| AT5g58960/k19m22_160
  misc_feature (140)..(400): Homolog of NCBI NO: 34897362 NR Description: hypothetical protein [Oryza sativa]
  misc_feature (378)..(585): Homolog of NCBI NO: 34897362 NR Description: hypothetical protein [Oryza sativa]
  misc_feature (162)..(582): Homolog of NCBI NO: 15225441 NR Description: expressed protein [Arabidopsis thaliana]
  misc_feature (166)..(582): Homolog of NCBI NO: 37535904 NR Description: hypothetical protein [Oryza sativa (japonica group)] >gi|22267584|gb|AAM94919.1| hypothetical protein [Oryza
  misc_feature (185)..(451): Homolog of NCBI NO: 15235221 NR Description: expressed protein [Arabidopsis thaliana]
  misc_feature (484)..(545): Homolog of NCBI NO: 15235221 NR Description: expressed protein [Arabidopsis thaliana]
  misc_feature (182)..(582): Homolog of NCBI NO: 15219282 NR Description: expressed protein [Arabidopsis thaliana]
YITVLLLYWSSSLLFLKKEREREREEKMLPGILLCSLNPRNHSKKKKSERESLETEPKDIDYWYSVQFNRDPPRFALKSENNNHHSRSKSGGDFCKKKKRGEMANKVSNFSDLIQRVTASCLLHPLSAGRQDLAVNRREEYDTEEEENEEEGEIQYEDALEKENGKDETIRAKNGRNGVSVETVQEMEMVMDEVFTAAAAMKRAYVALQEAHSPWDPEKMHDADMAMVAELRRIGSLRERFRRMRGTGSGGRRKNGAGRGMLREAVAPYEAVVKELKKEVKVKDTEIENLKEKVKVASMANGNGGKKHRLLSSRKVNCTTQIAASPVPELFEMTMIQVKEASKSFTGILLSLMRAAHWDIAAAVRSIEAASASSGGMSASSFASSVQSSVPNQHAKFALESYICRKIFQGFDHETFYMDGGLSSLINPDQYRRDCFAQFKDMKAMDPMELLGILPTCHFGKFCSKKYLSIIHQKMEESLFGDSEQRELVVAGNHPRSQFYGEFLGLAKAVWLLHLLAFSLDPSPSHFEANRGAEFHSQYMESVVRFSDGRVPAGQVVGFPVCPGFKLSHQGKGSIIKSRVYLVPRA

SEQ ID NO: 107540 - protein, 559 aa, Arabidopsis thaliana
  peptide (1)..(559): Ceres Seq. ID no. 13650635
  misc_feature (146)..(281): Pfam Name: Plant protein of unknown function (DUF641) Pfam Description: Plant protein of unknown function (DUF641)
  misc_feature (1)..(559): Homolog of NCBI NO: 26452122 NR Description: unknown protein [Arabidopsis thaliana]
  misc_feature (1)..(559): Homolog of NCBI NO: 30697152 NR Description: expressed protein [Arabidopsis thaliana]
  misc_feature (76)..(559): Homolog of NCBI NO: 22327960 NR Description: expressed protein [Arabidopsis thaliana] gb|AAB82637.1~gene_id:K19M22.15~similar to unknown protein thaliana] >gi|19715645|gb|AAL91642.1| AT5g58960/k19m22_160
  misc_feature (113)..(373): Homolog of NCBI NO: 34897362 NR Description: hypothetical protein [Oryza sativa]
  misc_feature (351)..(558): Homolog of NCBI NO: 34897362 NR Description: hypothetical protein [Oryza sativa]
  misc_feature (135)..(555): Homolog of NCBI NO: 15225441 NR Description: expressed protein [Arabidopsis thaliana]
  misc_feature (139)..(555): Homolog of NCBI NO: 37535904 NR Description: hypothetical protein [Oryza sativa (japonica group)] >gi|22267584|gb|AAM94919.1| hypothetical protein [Oryza
  misc_feature (158)..(424): Homolog of NCBI NO: 15235221 NR Description: expressed protein [Arabidopsis thaliana]
  misc_feature (457)..(518): Homolog of NCBI NO: 15235221 NR Description: expressed protein [Arabidopsis thaliana]
  misc_feature (155)..(555): Homolog of NCBI NO: 15219282 NR Description: expressed protein [Arabidopsis thaliana]
MLPGILLCSLNPRNHSKKKKSERESLETEPKDIDYWYSVQFNRDPPRFALKSENNNHHSRSKSGGDFCKKKKRGEMANKVSNFSDLIQRVTASCLLHPLSAGRQDLAVNRREEYDTEEEENEEEGEIQYEDALEKENGKDETIRAKNGRNGVSVETVQEMEMVMDEVFTAAAAMKRAYVALQEAHSPWDPEKMHDADMAMVAELRRIGSLRERFRRMRGTGSGGRRKNGAGRGMLREAVAPYEAVVKELKKEVKVKDTEIENLKEKVKVASMANGNGGKKHRLLSSRKVNCTTQIAASPVPELFEMTMIQVKEASKSFTGILLSLMRAAHWDIAAAVRSIEAASASSGGMSASSFASSVQSSVPNQHAKFALESYICRKIFQGFDHETFYMDGGLSSLINPDQYRRDCFAQFKDMKAMDPMELLGILPTCHFGKFCSKKYLSIIHQKMEESLFGDSEQRELVVAGNHPRSQFYGEFLGLAKAVWLLHLLAFSLDPSPSHFEANRGAEFHSQYMESVVRFSDGRVPAGQVVGFPVCPGFKLSHQGKGSIIKSRVYLVPRA

SEQ ID NO: 107541 - protein, 484 aa, Arabidopsis thaliana
  peptide (1)..(484): Ceres Seq. ID no. 13650636
  misc_feature (71)..(206): Pfam Name: Plant protein of unknown function (DUF641) Pfam Description: Plant protein of unknown function (DUF641)
  misc_feature (1)..(484): Homolog of NCBI NO: 26452122 NR Description: unknown protein [Arabidopsis thaliana]
  misc_feature (1)..(484): Homolog of NCBI NO: 30697152 NR Description: expressed protein [Arabidopsis thaliana]
  misc_feature (1)..(484): Homolog of NCBI NO: 22327960 NR Description: expressed protein [Arabidopsis thaliana] gb|AAB82637.1~gene_id:K19M22.15~similar to unknown protein thaliana] >gi|19715645|gb|AAL91642.1| AT5g58960/k19m22_160
  misc_feature (38)..(298): Homolog of NCBI NO: 34897362 NR Description: hypothetical protein [Oryza sativa]
  misc_feature (276)..(483): Homolog of NCBI NO: 34897362 NR Description: hypothetical protein [Oryza sativa]
  misc_feature (60)..(480): Homolog of NCBI NO: 15225441 NR Description: expressed protein [Arabidopsis thaliana]
  misc_feature (64)..(480): Homolog of NCBI NO: 37535904 NR Description: hypothetical protein [Oryza sativa (japonica group)] >gi|22267584|gb|AAM94919.1| hypothetical protein [Oryza
  misc_feature (83)..(349): Homolog of NCBI NO: 15235221 NR Description: expressed protein [Arabidopsis thaliana]
  misc_feature (382)..(443): Homolog of NCBI NO: 15235221 NR Description: expressed protein [Arabidopsis thaliana]
  misc_feature (80)..(480): Homolog of NCBI NO: 15219282 NR Description: expressed protein [Arabidopsis thaliana]
MANKVSNFSDLIQRVTASCLLHPLSAGRQDLAVNRREEYDTEEEENEEEGEIQYEDALEKENGKDETIRAKNGRNGVSVETVQEMEMVMDEVFTAAAAMKRAYVALQEAHSPWDPEKMHDADMAMVAELRRIGSLRERFRRMRGTGSGGRRKNGAGRGMLREAVAPYEAVVKELKKEVKVKDTEIENLKEKVKVASMANGNGGKKHRLLSSRKVNCTTQIAASPVPELFEMTMIQVKEASKSFTGILLSLMRAAHWDIAAAVRSIEAASASSGGMSASSFASSVQSSVPNQHAKFALESYICRKIFQGFDHETFYMDGGLSSLINPDQYRRDCFAQFKDMKAMDPMELLGILPTCHFGKFCSKKYLSIIHQKMEESLFGDSEQRELVVAGNHPRSQFYGEFLGLAKAVWLLHLLAFSLDPSPSHFEANRGAEFHSQYMESVVRFSDGRVPAGQVVGFPVCPGFKLSHQGKGSIIKSRVYLVPRA

SEQ ID NO: 107542 - DNA, 1244 bp, Arabidopsis thaliana
  misc_feature (1)..(1244): Ceres Seq. ID no. 13650644
  misc_feature: MA Experiment ID: 20000173 Result: Down-regulated in Transcription
  misc_feature: MA Experiment 20000173 PARAMETER Experiment Name: At_42deg_Heat_P Parameter: Age (day) Value: 14
  misc_feature: MA Experiment 20000173 PARAMETER Experiment Name: At_42deg_Heat_P Parameter: Organism Value: A. thaliana
  misc_feature: MA Experiment 20000173 PARAMETER Experiment Name: At_42deg_Heat_P Parameter: Plant Line Value: WS
  misc_feature: MA Experiment 20000173 PARAMETER Experiment Name: At_42deg_Heat_P Parameter: Temperature (deg C) Value: 42 vs. 22
  misc_feature: MA Experiment 20000173 PARAMETER Experiment Name: At_42deg_Heat_P Parameter: Timepoint (hr) Value: 6
  misc_feature: MA Experiment 20000173 PARAMETER Experiment Name: At_42deg_Heat_P Parameter: Tissue Value: Aerial
  misc_feature: MA Experiment ID: 20000184 Result: Down-regulated in Transcription
  misc_feature: MA Experiment 20000184 PARAMETER Experiment Name: At_Shoots__P Parameter: Age (day) Value: 7
  misc_feature: MA Experiment 20000184 PARAMETER Experiment Name: At_Shoots__P Parameter: Tissue Value: Shoots vs. Whole Plant
  misc_feature: MA Experiment ID: 20000437 Result: Up-regulated in Transcription
  misc_feature: MA Experiment 20000437 PARAMETER Experiment Name: At_Drought_P Parameter: Age (day) Value: 8
  misc_feature: MA Experiment 20000437 PARAMETER Experiment Name: At_Drought_P Parameter: Organism Value: A. thaliana
  misc_feature: MA Experiment 20000437 PARAMETER Experiment Name: At_Drought_P Parameter: Plant Line Value: WS
  misc_feature: MA Experiment 20000437 PARAMETER Experiment Name: At_Drought_P Parameter: Timepoint (hr) Value: 24
  misc_feature: MA Experiment 20000437 PARAMETER Experiment Name: At_Drought_P Parameter: Tissue Value: Whole Plant
  misc_feature: MA Experiment 20000437 PARAMETER Experiment Name: At_Drought_P Parameter: Treatment Value: Drought vs. No Drought
  misc_feature: MA Experiment ID: 20001911 Result: Up-regulated in Transcription
  misc_feature: MA Experiment 20001911 PARAMETER Experiment Name: At_Drought_Reproduction_P Parameter: Age (day) Value: 40
  misc_feature: MA Experiment 20001911 PARAMETER Experiment Name: At_Drought_Reproduction_P Parameter: Organism Value: A. thaliana
  misc_feature: MA Experiment 20001911 PARAMETER Experiment Name: At_Drought_Reproduction_P Parameter: Plant Line Value: WS
  misc_feature: MA Experiment 20001911 PARAMETER Experiment Name: At_Drought_Reproduction_P Parameter: Timepoint (day) Value: 10
  misc_feature: MA Experiment 20001911 PARAMETER Experiment Name: At_Drought_Reproduction_P Parameter: Tissue Value: Flowers
  misc_feature: MA Experiment 20001911 PARAMETER Experiment Name: At_Drought_Reproduction_P Parameter: Treatment Value: Drought vs. No Drought
gggaagaagctttgaattaaaaaatagaagcaatagtttttgggggacaagcccggccgacgaatcggcggcgagacgttctttgtcaccgattgacatattcaaaaacgacgaagctaggtaaaggaacggagagaagagtcgataatagaagcgtagagatgggaaatcagaagctcaaatggacggcggaggaagaggaggcgttactcgccggagttaggaagcatggccctggaaagtggaagaatattctccgcgatcctgaattagctgagcagctctctagtcgctctaacatcgacctcaaggataaatggcgtaatttaagtgttgctcctggtattcaaggctctaaggataagatacggacaccaaaaatcaaagctgctgcttttcatctggctgccgctgctgctgccgctattgtaactcctactcatagtggtcactcttctccagttgctactcttccccgaagtggatcttctgatttgagcattgatgatagttttaacattgtagctgatccaaagaatgctcccaggtatgatggaatgatatttgaagctctttcaaacttgacggatgctaatggatctgatgtcagcgcaattttcaacttcattgagcaacgacaagaagtgccaccaaatttcaggaggatgcttagttcaagattgaggaggcttgcagctcagggaaagcttgaaaaggttagccacttaaaatcaacacagaacttctataagatgaatgataatagcttggtacaaagaacaccacatgtagcgagaccaaaagagagcaacacgaaatcccggcagcagacaaacagtcagggaccctctatttcacagcagattgttgaagcttcaataacagcagcttataagctcgtagaagtagagaacaaattagatgtgtcgaaaggagctgcagaagagatagagagactgatgaaactggcagaagaggctgatgagatgctagtgatagcgagagagatgcacgaagaatgtagtcagggaaagattatgtacttgaattgaggttgatggaacaaaagaagcagcacagaatctttggagtttcatcatcagagacgctctttgtttttggtatatattactaatagtaataggctattagcttgcattctcttcttcctatgtttttagtgatacgttacgaactcaggaactgtttggacaaaaaatgacactaactttctttcatttatc

SEQ ID NO: 107543 - protein, 296 aa, Arabidopsis thaliana
  peptide (1)..(296): Ceres Seq. ID no. 13650645
  misc_feature (126)..(200): Pfam Name: linker histone H1 and H5 family Pfam Description: linker histone H1 and H5 family
  misc_feature (1)..(296): Homolog of NCBI NO: 26452093 NR Description: putative myb-related DNA-binding protein thaliana] >gi|28950861|gb|AAO63354.1| At1g17520 [Arabidopsis
  misc_feature (1)..(296): Homolog of NCBI NO: 30685367 NR Description: myb-related DNA-binding protein -related
  misc_feature (1)..(198): Homolog of NCBI NO: 8778473 NR Description: F1L3.23 [Arabidopsis thaliana]
  misc_feature (1)..(289): Homolog of NCBI NO: 15218592 NR Description: DNA-binding protein -related [Arabidopsis
  misc_feature (1)..(293): Homolog of NCBI NO: 34910440 NR Description: histone H1-like protein [Oryza sativa (japonica
  misc_feature (1)..(295): Homolog of NCBI NO: 18463961 NR Description: histone H1-like protein [Zea mays]
  misc_feature (1)..(295): Homolog of NCBI NO: 34105721 NR Description: Single myb histone 4 [Zea mays subsp. mays]
  misc_feature (1)..(157): Homolog of NCBI NO: 13937143 NR Description: At1g72740/F28P22_7 [Arabidopsis thaliana]
  misc_feature (1)..(275): Homolog of NCBI NO: 27125811 NR Description: MYB28 protein [Oryza sativa (japonica
  misc_feature (1)..(272): Homolog of NCBI NO: 34105717 NR Description: Single myb histone 3 [Zea mays subsp. mays]
MGNQKLKWTAEEEEALLAGVRKHGPGKWKNILRDPELAEQLSSRSNIDLKDKWRNLSVAPGIQGSKDKIRTPKIKAAAFHLAAAAAAAIVTPTHSGHSSPVATLPRSGSSDLSIDDSFNIVADPKNAPRYDGMIFEALSNLTDANGSDVSAIFNFIEQRQEVPPNFRRMLSSRLRRLAAQGKLEKVSHLKSTQNFYKMNDNSLVQRTPHVARPKESNTKSRQQTNSQGPSISQQIVEASITAAYKLVEVENKLDVSKGAAEEIERLMKLAEEADEMLVIAREMHEECSQGKIMYLN

SEQ ID NO: 107544 - protein, 164 aa, Arabidopsis thaliana
  peptide (1)..(164): Ceres Seq. ID no. 13650646
  misc_feature (1)..(68): Pfam Name: linker histone H1 and H5 family Pfam Description: linker histone H1 and H5 family
  misc_feature (1)..(164): Homolog of NCBI NO: 26452093 NR Description: putative myb-related DNA-binding protein thaliana] >gi|28950861|gb|AAO63354.1| At1g17520 [Arabidopsis
  misc_feature (1)..(164): Homolog of NCBI NO: 30685367 NR Description: myb-related DNA-binding protein -related
  misc_feature (1)..(66): Homolog of NCBI NO: 8778473 NR Description: F1L3.23 [Arabidopsis thaliana]
  misc_feature (1)..(157): Homolog of NCBI NO: 15218592 NR Description: DNA-binding protein -related [Arabidopsis
  misc_feature (1)..(161): Homolog of NCBI NO: 34910440 NR Description: histone H1-like protein [Oryza sativa (japonica
  misc_feature (1)..(163): Homolog of NCBI NO: 18463961 NR Description: histone H1-like protein [Zea mays]
  misc_feature (1)..(163): Homolog of NCBI NO: 34105721 NR Description: Single myb histone 4 [Zea mays subsp. mays]
  misc_feature (1)..(25): Homolog of NCBI NO: 13937143 NR Description: At1g72740/F28P22_7 [Arabidopsis thaliana]
  misc_feature (1)..(143): Homolog of NCBI NO: 27125811 NR Description: MYB28 protein [Oryza sativa (japonica
  misc_feature (1)..(140): Homolog of NCBI NO: 34105717 NR Description: Single myb histone 3 [Zea mays subsp. mays]
MIFEALSNLTDANGSDVSAIFNFIEQRQEVPPNFRRMLSSRLRRLAAQGKLEKVSHLKSTQNFYKMNDNSLVQRTPHVARPKESNTKSRQQTNSQGPSISQQIVEASITAAYKLVEVENKLDVSKGAAEEIERLMKLAEEADEMLVIAREMHEECSQGKIMYLN

SEQ ID NO: 107545 - DNA, 926 bp, Arabidopsis thaliana
  misc_feature (1)..(926): Ceres Seq. ID no. 13650650
  misc_feature: MA Experiment ID: 108434 Result: Down-regulated in Transcription
  misc_feature: MA Experiment 108434 PARAMETER Experiment Name: At_Root_Tips_cDNA_P Parameter: Tissue Value: Root Tips
  misc_feature: MA Experiment ID: 108462 Result: Down-regulated in Transcription
  misc_feature: MA Experiment 108462 PARAMETER Experiment Name: At_Germinating_Seeds_cDNA_P Parameter: Age (day) Value: 2 vs. 0
  misc_feature: MA Experiment 108462 PARAMETER Experiment Name: At_Germinating_Seeds_cDNA_P Parameter: Tissue Value: Germinating Seeds
  misc_feature: MA Experiment ID: 108463 Result: Down-regulated in Transcription
  misc_feature: MA Experiment 108463 PARAMETER Experiment Name: At_Germinating_Seeds_cDNA_P Parameter: Age (day) Value: 3 vs. 0
  misc_feature: MA Experiment 108463 PARAMETER Experiment Name: At_Germinating_Seeds_cDNA_P Parameter: Tissue Value: Germinating Seeds
  misc_feature: MA Experiment ID: 108501 Result: Up-regulated in Transcription
  misc_feature: MA Experiment 108501 PARAMETER Experiment Name: At_ap2_floral_buds_cDNA_P Parameter: Plant Line Value: ap2 (Ler.)
  misc_feature: MA Experiment 108501 PARAMETER Experiment Name: At_ap2_floral_buds_cDNA_P Parameter: Tissue Value: Closed Flower
  misc_feature: MA Experiment ID: 20000179 Result: Up-regulated in Transcription
  misc_feature: MA Experiment 20000179 PARAMETER Experiment Name: At_Germinating_Seeds_P Parameter: Age (hr) Value: 6 vs. 0
  misc_feature: MA Experiment 20000179 PARAMETER Experiment Name: At_Germinating_Seeds_P Parameter: Tissue Value: Germinating Seeds
  misc_feature: MA Experiment ID: 20000184 Result: Down-regulated in Transcription
  misc_feature: MA Experiment 20000184 PARAMETER Experiment Name: At_Shoots__P Parameter: Age (day) Value: 7
  misc_feature: MA Experiment 20000184 PARAMETER Experiment Name: At_Shoots__P Parameter: Tissue Value: Shoots vs. Whole Plant
  misc_feature: MA Experiment ID: 20000227 Result: Down-regulated in Transcription
  misc_feature: MA Experiment 20000227 PARAMETER Experiment Name: At_Root-Tips-vs-Tops_P Parameter: Tissue Value: Root Tips vs. Root Tops
  misc_feature: MA Experiment ID: 20000234 Result: Up-regulated in Transcription
  misc_feature: MA Experiment 20000234 PARAMETER Experiment Name: At_Siliques_P Parameter: Age (day) Value: 21
  misc_feature: MA Experiment 20000234 PARAMETER Experiment Name: At_Siliques_P Parameter: Organism Value: A. thaliana
  misc_feature: MA Experiment 20000234 PARAMETER Experiment Name: At_Siliques_P Parameter: Plant Line Value: WS
  misc_feature: MA Experiment 20000234 PARAMETER Experiment Name: At_Siliques_P Parameter: Tissue Value: Less Than 5mm Siliques vs. Whole Plant
  misc_feature: MA Experiment ID: 20000235 Result: Up-regulated in Transcription
  misc_feature: MA Experiment 20000235 PARAMETER Experiment Name: At_Siliques_P Parameter: Age (day) Value: 21
  misc_feature: MA Experiment 20000235 PARAMETER Experiment Name: At_Siliques_P Parameter: Organism Value: A. thaliana
  misc_feature: MA Experiment 20000235 PARAMETER Experiment Name: At_Siliques_P Parameter: Plant Line Value: WS
  misc_feature: MA Experiment 20000235 PARAMETER Experiment Name: At_Siliques_P Parameter: Tissue Value: 5-10mm Siliques vs. Whole Plant
  misc_feature: MA Experiment ID: 20000264 Result: Up-regulated in Transcription
  misc_feature: MA Experiment 20000264 PARAMETER Experiment Name: At_Open_Flower_P Parameter: Age (day) Value: 21
  misc_feature: MA Experiment 20000264 PARAMETER Experiment Name: At_Open_Flower_P Parameter: Plant Line Value: WS
  misc_feature: MA Experiment 20000264 PARAMETER Experiment Name: At_Open_Flower_P Parameter: Tissue Value: Open Flower vs. Whole Plant
  misc_feature: MA Experiment ID: 20000286 Result: Up-regulated in Transcription
  misc_feature: MA Experiment 20000286 PARAMETER Experiment Name: At_Open_Flower_P Parameter: Age (day) Value: 21
  misc_feature: MA Experiment 20000286 PARAMETER Experiment Name: At_Open_Flower_P Parameter: Plant Line Value: WS
  misc_feature: MA Experiment 20000286 PARAMETER Experiment Name: At_Open_Flower_P Parameter: Tissue Value: Half Open vs. Whole Plant
  misc_feature: MA Experiment ID: 20000438 Result: Down-regulated in Transcription
  misc_feature: MA Experiment 20000438 PARAMETER Experiment Name: At_Shoots__P Parameter: Age (day) Value: 14
  misc_feature: MA Experiment 20000438 PARAMETER Experiment Name: At_Shoots__P Parameter: Tissue Value: Shoots vs. Whole Plant
  misc_feature: MA Experiment ID: 20000495 Result: Up-regulated in Transcription
  misc_feature: MA Experiment 20000495 PARAMETER Experiment Name: At_Guard_Cells_P Parameter: Harvest Date Value: 8/2/2002
  misc_feature: MA Experiment 20000495 PARAMETER Experiment Name: At_Guard_Cells_P Parameter: Organism Value: A. thaliana
  misc_feature: MA Experiment 20000495 PARAMETER Experiment Name: At_Guard_Cells_P Parameter: Tissue Value: Guard Cells vs. Leaves
  misc_feature: MA Experiment ID: 20000794 Result: Up-regulated in Transcription
  misc_feature: MA Experiment 20000794 PARAMETER Experiment Name: At_Petals_P Parameter: Age (day) Value: 23-25 days
  misc_feature: MA Experiment 20000794 PARAMETER Experiment Name: At_Petals_P Parameter: Plant Line Value: WS
  misc_feature: MA Experiment 20000794 PARAMETER Experiment Name: At_Petals_P Parameter: Tissue Value: Petals vs. Whole plant
  misc_feature: MA Experiment ID: 20001555 Result: Up-regulated in Transcription
  misc_feature: MA Experiment 20001555 PARAMETER Experiment Name: At_Drought_Soil_Dry_P Parameter: Age (day) Value: 24
  misc_feature: MA Experiment 20001555 PARAMETER Experiment Name: At_Drought_Soil_Dry_P Parameter: Organism Value: A. thaliana
  misc_feature: MA Experiment 20001555 PARAMETER Experiment Name: At_Drought_Soil_Dry_P Parameter: Plant Line Value: WS
  misc_feature: MA Experiment 20001555 PARAMETER Experiment Name: At_Drought_Soil_Dry_P Parameter: Post Timepoint (hr) Value: None
  misc_feature: MA Experiment 20001555 PARAMETER Experiment Name: At_Drought_Soil_Dry_P Parameter: Post-Treatment Value: None
  misc_feature: MA Experiment 20001555 PARAMETER Experiment Name: At_Drought_Soil_Dry_P Parameter: Timepoint (day) Value: 10
  misc_feature: MA Experiment 20001555 PARAMETER Experiment Name: At_Drought_Soil_Dry_P Parameter: Treatment Value: Drought vs. No Drought
  misc_feature: Pfam Name: SnoaL Pfam Description: SnoaL-like polyketide cyclase
attaaaaagctaatatggctactagggaagagagagataagtatagatcagtccttgaagatgcaggacaggttcaatggaggtatgataaccctccagacttcaatagtgtgaaccagctctttgaagaaggccagactaaggtccttcggttaatatatgtttcacttaaggtatgtgctatgtttatattttgtgaatctgattcgttgatagtatttgattttgagcgcaggtgtggccagaaggttcgttagaagagacagtgcaaaacgcgatcaagtcatgggagatggagttctcacataagatccgtttacaggacttcaagactataaaccctgagaagtttaagctctttgtcaatgggagagaaggtttatcagctgaagagacgcttaggcttgggagttacaatgctttgctcaagaactctttgcctgaagagtttcagtactataagcccgaggaagagagctttgagtcatcacatgacgcctttagatctgctttaccacgcgggtttgcgtgggaaatactctctgtgtactcggggcctcctgttatagccttcaaatttagacactggggatactttgaaggaactttcaaaggtcatgctcctactggggaaatggttcaattcctgggtctaggagttctaaaggttgacgaatcacttagagcagaggagattgagatttactatgatccaggagagctgttcgggggactactcaagggacctcctatatcagagaccaaaaccacagacagtggagacaacactgcagagaaacaaagctgcccattcacacactaagataataagaaaagtagaagtgtatttgaccctttaaagaatatattgtaacagtctcttggttattgatgcatggaataaattataagttatgttaggcgtc

SEQ ID NO: 107546 - protein, 176 aa, Arabidopsis thaliana; identical to SEQ ID NO: 25833
  peptide (1)..(176): Ceres Seq. ID no. 13650651
  misc_feature: Pfam Name: SnoaL Pfam Description: SnoaL-like polyketide cyclase
  misc_feature (1)..(176): Homolog of NCBI NO: 18412106 NR Description: expressed protein [Arabidopsis thaliana]
  misc_feature (1)..(176): Homolog of NCBI NO: 25372796 NR Description: hypothetical protein F9K20.18 [imported] - thaliana >gi|3834316|gb|AAC83032.1| Similar to gb|X16648 related protein from Hordeum vulgare. EST gb|Z18206 comes from
  misc_feature (1)..(176): Homolog of NCBI NO: 30699354 NR Description: expressed protein [Arabidopsis thaliana]
  misc_feature (1)..(169): Homolog of NCBI NO: 34910864 NR Description: putative pathogenesis related protein [Oryza
  misc_feature (1)..(152): Homolog of NCBI NO: 34910862 NR Description: putative pathogenesis related protein [Oryza
  misc_feature (1)..(163): Homolog of NCBI NO: 34904656 NR Description: putative pathogenesis related protein [Oryza
  misc_feature (1)..(157): Homolog of NCBI NO: 34904652 NR Description: putative pathogenesis related protein [Oryza
  misc_feature (1)..(155): Homolog of NCBI NO: 1346809 NR Description: Pathogen-related protein >gi|7489402|pir||T06168
  misc_feature (1)..(158): Homolog of NCBI NO: 23040182 NR Description: hypothetical protein [Trichodesmium erythraeum
  misc_feature (1)..(176): Homolog of NCBI NO: 23129762 NR Description: hypothetical protein [Nostoc punctiforme]

SEQ ID NO: 107547 - DNA, 660 bp, Arabidopsis thaliana
  misc_feature (1)..(660): Ceres Seq. ID no. 13650658
  misc_feature: MA Experiment ID: 20000234 Result: Down-regulated in Transcription
  misc_feature: MA Experiment 20000234 PARAMETER Experiment Name: At_Siliques_P Parameter: Age (day) Value: 21
  misc_feature: MA Experiment 20000234 PARAMETER Experiment Name: At_Siliques_P Parameter: Organism Value: A. thaliana
  misc_feature: MA Experiment 20000234 PARAMETER Experiment Name: At_Siliques_P Parameter: Plant Line Value: WS
  misc_feature: MA Experiment 20000234 PARAMETER Experiment Name: At_Siliques_P Parameter: Tissue Value: Less Than 5mm Siliques vs. Whole Plant
  misc_feature: MA Experiment ID: 20000235 Result: Down-regulated in Transcription
  misc_feature: MA Experiment 20000235 PARAMETER Experiment Name: At_Siliques_P Parameter: Age (day) Value: 21
  misc_feature: MA Experiment 20000235 PARAMETER Experiment Name: At_Siliques_P Parameter: Organism Value: A. thaliana
  misc_feature: MA Experiment 20000235 PARAMETER Experiment Name: At_Siliques_P Parameter: Plant Line Value: WS
  misc_feature: MA Experiment 20000235 PARAMETER Experiment Name: At_Siliques_P Parameter: Tissue Value: 5-10mm Siliques vs. Whole Plant
  misc_feature: MA Experiment ID: 20000265 Result: Down-regulated in Transcription
  misc_feature: MA Experiment 20000265 PARAMETER Experiment Name: At_Open_Flower_P Parameter: Age (day) Value: 21
  misc_feature: MA Experiment 20000265 PARAMETER Experiment Name: At_Open_Flower_P Parameter: Plant Line Value: WS
  misc_feature: MA Experiment 20000265 PARAMETER Experiment Name: At_Open_Flower_P Parameter: Tissue Value: Closed Flower vs. Whole Plant
  misc_feature: MA Experiment ID: 20000451 Result: Up-regulated in Transcription
  misc_feature: MA Experiment 20000451 PARAMETER Experiment Name: At_CS6879_Shoots-Roots_P Parameter: Age (day) Value: 14
  misc_feature: MA Experiment 20000451 PARAMETER Experiment Name: At_CS6879_Shoots-Roots_P Parameter: Organism Value: A. thaliana
  misc_feature: MA Experiment 20000451 PARAMETER Experiment Name: At_CS6879_Shoots-Roots_P Parameter: Plant Line Value: CS6879 vs. WS
  misc_feature: MA Experiment 20000451 PARAMETER Experiment Name: At_CS6879_Shoots-Roots_P Parameter: Tissue Value: Roots
  misc_feature: MA Experiment ID: 20000452 Result: Up-regulated in Transcription
  misc_feature: MA Experiment 20000452 PARAMETER Experiment Name: At_CS6879_Shoots-Roots_P Parameter: Age (day) Value: 14
  misc_feature: MA Experiment 20000452 PARAMETER Experiment Name: At_CS6879_Shoots-Roots_P Parameter: Organism Value: A. thaliana
  misc_feature: MA Experiment 20000452 PARAMETER Experiment Name: At_CS6879_Shoots-Roots_P Parameter: Plant Line Value: CS6879 vs. WS
  misc_feature: MA Experiment 20000452 PARAMETER Experiment Name: At_CS6879_Shoots-Roots_P Parameter: Tissue Value: Shoots
attccccatcgcacagacccccctaagaatccgagagagaagaagagataatgcagatcttcgtcaaaaccctcaccggcaaaactataaccctagaagttgagagcagcgacaccatcgacaatgttaaagccaaaatccaggacaaagagggcataccacctgatcaacagaggctgatttttgctggtaagcaattggaagatggccggaccttagctgattacaacatccagaaagagtctactcttcatcttgtcctcaggctcagaggtggaaccatgatcaaggtgaagacactcactggaaaagaaatcgagattgatatcgaaccaaccgacactattgatcggatcaaagaacgtgttgaagagaaagaaggcatccctcctgttcaacaaaggctcatatatgccggaaaacagcttgctgatgacaaaacggccaaagattatgcgatagagggaggctctgttcttcatttggttcttgctcttaggggtggtcttctctgatcttaataaataagcttttcaacaaacatcttttccctcactattgtcctccttatgtggaattcatgacacaccaaaattgctatgggaaattggaatattatgctctgcttgtgtgtttggatcatattacttgtatttttct

SEQ ID NO: 107548 - protein, 154 aa, Arabidopsis thaliana; identical to SEQ ID NO: 99020
  peptide (1)..(154): Ceres Seq. ID no. 13650659
  misc_feature (1)..(74): Pfam Name: Ubiquitin family Pfam Description: Ubiquitin family
  misc_feature (1)..(154): Homolog of NCBI NO: 18403909 NR Description: ubiquitin family [Arabidopsis thaliana]
  misc_feature (1)..(152): Homolog of NCBI NO: 30692436 NR Description: ubiquitin family [Arabidopsis thaliana]
  misc_feature (1)..(152): Homolog of NCBI NO: 20562909 NR Description: polyubiquitin 2 [Deschampsia antarctica]
  misc_feature (1)..(154): Homolog of NCBI NO: 7862066 NR Description: polyubiquitin [Populus tremula x Populus
  misc_feature (1)..(152): Homolog of NCBI NO: 34911624 NR Description: putative polyubiquitin [Oryza sativa (japonica group)] >gi|20161535|dbj|BAB90457.1| putative polyubiquitin
  misc_feature (1)..(153): Homolog of NCBI NO: 1684857 NR Description: polyubiquitin [Phaseolus vulgaris]
  misc_feature (1)..(153): Homolog of NCBI NO: 28804499 NR Description: polyubiquitin [Aster tripolium]
  misc_feature (1)..(153): Homolog of NCBI NO: 16660459 NR Description: polyubiquitin OUB1 [Olea europaea]
  misc_feature (1)..(153): Homolog of NCBI NO: 16660462 NR Description: polyubiquitin OUB2 [Olea europaea]
  misc_feature (1)..(153): Homolog of NCBI NO: 15982787 NR Description: AT4g05320/C17L7_240 [Arabidopsis thaliana]

SEQ ID NO: 107549 - protein, 77 aa, Arabidopsis thaliana; identical to SEQ ID NO: 99021
  peptide (1)..(77): Ceres Seq. ID no. 13650660
  misc_feature (2)..(73): Pfam Name: Ubiquitin family Pfam Description: Ubiquitin family
  misc_feature (1)..(77): Homolog of NCBI NO: 18403909 NR Description: ubiquitin family [Arabidopsis thaliana]
  misc_feature (1)..(75): Homolog of NCBI NO: 30692436 NR Description: ubiquitin family [Arabidopsis thaliana]
  misc_feature (1)..(75): Homolog of NCBI NO: 20562909 NR Description: polyubiquitin 2 [Deschampsia antarctica]
  misc_feature (1)..(77): Homolog of NCBI NO: 7862066 NR Description: polyubiquitin [Populus tremula x Populus
  misc_feature (1)..(75): Homolog of NCBI NO: 34911624 NR Description: putative polyubiquitin [Oryza sativa (japonica group)] >gi|20161535|dbj|BAB90457.1| putative polyubiquitin
  misc_feature (1)..(76): Homolog of NCBI NO: 1684857 NR Description: polyubiquitin [Phaseolus vulgaris]
  misc_feature (1)..(76): Homolog of NCBI NO: 28804499 NR Description: polyubiquitin [Aster tripolium]
  misc_feature (1)..(76): Homolog of NCBI NO: 16660462 NR Description: polyubiquitin OUB2 [Olea europaea]
  misc_feature (1)..(76): Homolog of NCBI NO: 16660459 NR Description: polyubiquitin OUB1 [Olea europaea]
  misc_feature (1)..(76): Homolog of NCBI NO: 15982787 NR Description: AT4g05320/C17L7_240 [Arabidopsis thaliana]

SEQ ID NO: 107550 - DNA, 882 bp, Arabidopsis thaliana
  misc_feature (1)..(882): Ceres Seq. ID no. 13650661
  misc_feature: MA Experiment ID: 20000439 Result: Up-regulated in Transcription
  misc_feature: MA Experiment 20000439 PARAMETER Experiment Name: At_Roots__P Parameter: Age (day) Value: 14 vs. 21
  misc_feature: MA Experiment 20000439 PARAMETER Experiment Name: At_Roots__P Parameter: Organism Value: A. thaliana
  misc_feature: MA Experiment 20000439 PARAMETER Experiment Name: At_Roots__P Parameter: Tissue Value: Roots vs. Whole Plant
  misc_feature: MA Experiment ID: 20000794 Result: Up-regulated in Transcription
  misc_feature: MA Experiment 20000794 PARAMETER Experiment Name: At_Petals_P Parameter: Age (day) Value: 23-25 days
  misc_feature: MA Experiment 20000794 PARAMETER Experiment Name: At_Petals_P Parameter: Plant Line Value: WS
  misc_feature: MA Experiment 20000794 PARAMETER Experiment Name: At_Petals_P Parameter: Tissue Value: Petals vs. Whole plant
  misc_feature: MA Experiment ID: 20001911 Result: Up-regulated in Transcription
  misc_feature: MA Experiment 20001911 PARAMETER Experiment Name: At_Drought_Reproduction_P Parameter: Age (day) Value: 40
  misc_feature: MA Experiment 20001911 PARAMETER Experiment Name: At_Drought_Reproduction_P Parameter: Organism Value: A. thaliana
  misc_feature: MA Experiment 20001911 PARAMETER Experiment Name: At_Drought_Reproduction_P Parameter: Plant Line Value: WS
  misc_feature: MA Experiment 20001911 PARAMETER Experiment Name: At_Drought_Reproduction_P Parameter: Timepoint (day) Value: 10
  misc_feature: MA Experiment 20001911 PARAMETER Experiment Name: At_Drought_Reproduction_P Parameter: Tissue Value: Flowers
  misc_feature: MA Experiment 20001911 PARAMETER Experiment Name: At_Drought_Reproduction_P Parameter: Treatment Value: Drought vs. No Drought
tctggaagagaggatgatggtgacatttgggagattttaatgcgaactcatagtgaggtcttaaacactcttcaatcacggttgacaaaattacagattgtaagacatttctgggaacgtagtgatattaaaggcgcgattgcggccttaagaaaactgtcagatcactctgttcaagcagatgtgatcaatattctaacagacaaaacagagattttaacattagatttattttctcaattagcacccgtcctcacaggcttattgggcagcaagactgagaggcctgtaaatgtctccttggaaatgctcttgaagcttgtagcagtgtttggcacagttatacaatcaactgtttcagcacgacgagttgtcggcgttgatcttcatgcagaggaaaggttacagatctgccaaagctgttctgcggaattgcaaaaggttcagaagattcttccactgctgacaagaagaggtggtcttatagcaagaaaggcacaagaactaaacctagttcttcaaacaccatagctcctggttcaaagtcaagaccactcggaatcacttgcgaactgtaaccccctcctgctgagttttccaatttgtacaatgtacattatcaagaaccatcttcatgttcctcccggtgcttttgtattgaagattcgctgaaaagtcgcaggttcttgtgcggggtttgatatagaattgtgccaggagaacatgaaaagtcactcggggaaaaactcggtatattgctgtaaatcaatctgtctgggattagagttgtatgtgcttcagattcttgattcagtgaatctcaaatgtgtagctgaaatggcaattacaatgtcgttctatgtgaatgtaatgtgcaatcct

SEQ ID NO: 107551 - protein, 176 aa, Arabidopsis thaliana
  peptide (1)..(176): Ceres Seq. ID no. 13650662
  misc_feature (1)..(133): Homolog of NCBI NO: 15219885 NR Description: expressed protein [Arabidopsis thaliana]
  misc_feature (14)..(176): Homolog of NCBI NO: 26452373 NR Description: unknown protein [Arabidopsis thaliana]
  misc_feature (1)..(134): Homolog of NCBI NO: 15220302 NR Description: transducin / WD-40 repeat protein family
  misc_feature (6)..(174): Homolog of NCBI NO: 38344202 NR Description: OSJNBa0064G10.18 [Oryza sativa (japonica
  misc_feature (1)..(51): Homolog of NCBI NO: 25404314 NR Description: hypothetical protein F11P17.7 [imported] -
  misc_feature (8)..(174): Homolog of NCBI NO: 30688988 NR Description: transducin / WD-40 repeat protein family thaliana] >gi|25083345|gb|AAN72064.1| putative protein
  misc_feature (105)..(134): Homolog of NCBI NO: 25404314 NR Description: hypothetical protein F11P17.7 [imported] -
  misc_feature (8)..(174): Homolog of NCBI NO: 30688991 NR Description: transducin / WD-40 repeat protein family
  misc_feature (8)..(160): Homolog of NCBI NO: 9759081 NR Description: contains similarity to unknown
  misc_feature (8)..(157): Homolog of NCBI NO: 10178281 NR Description: katanin p80 subunit-like protein [Arabidopsis
SGREDDGDIWEILMRTHSEVLNTLQSRLTKLQIVRHFWERSDIKGAIAALRKLSDHSVQADVINILTDKTEILTLDLFSQLAPVLTGLLGSKTERPVNVSLEMLLKLVAVFGTVIQSTVSARRVVGVDLHAEERLQICQSCSAELQKVQKILPLLTRRGGLIARKAQELNLVLQTP

SEQ ID NO: 107552 - protein, 163 aa, Arabidopsis thaliana
  peptide (1)..(163): Ceres Seq. ID no. 13650663
  misc_feature (1)..(120): Homolog of NCBI NO: 15219885 NR Description: expressed protein [Arabidopsis thaliana]
  misc_feature (1)..(163): Homolog of NCBI NO: 26452373 NR Description: unknown protein [Arabidopsis thaliana]
  misc_feature (1)..(121): Homolog of NCBI NO: 15220302 NR Description: transducin / WD-40 repeat protein family
  misc_feature (1)..(161): Homolog of NCBI NO: 38344202 NR Description: OSJNBa0064G10.18 [Oryza sativa (japonica
  misc_feature (1)..(38): Homolog of NCBI NO: 25404314 NR Description: hypothetical protein F11P17.7 [imported] -
  misc_feature (1)..(161): Homolog of NCBI NO: 30688988 NR Description: transducin / WD-40 repeat protein family thaliana] >gi|25083345|gb|AAN72064.1| putative protein
  misc_feature (92)..(121): Homolog of NCBI NO: 25404314 NR Description: hypothetical protein F11P17.7 [imported] -
  misc_feature (1)..(161): Homolog of NCBI NO: 30688991 NR Description: transducin / WD-40 repeat protein family
  misc_feature (1)..(147): Homolog of NCBI NO: 9759081 NR Description: contains similarity to unknown
  misc_feature (1)..(144): Homolog of NCBI NO: 10178281 NR Description: katanin p80 subunit-like protein [Arabidopsis
MRTHSEVLNTLQSRLTKLQIVRHFWERSDIKGAIAALRKLSDHSVQADVINILTDKTEILTLDLFSQLAPVLTGLLGSKTERPVNVSLEMLLKLVAVFGTVIQSTVSARRVVGVDLHAEERLQICQSCSAELQKVQKILPLLTRRGGLIARKAQELNLVLQTP

SEQ ID NO: 107553 - DNA, 1268 bp, Arabidopsis thaliana
  misc_feature (1)..(1268): Ceres Seq. ID no. 13650695
  misc_feature: MA Experiment ID: 20000234 Result: Up-regulated in Transcription
  misc_feature: MA Experiment 20000234 PARAMETER Experiment Name: At_Siliques_P Parameter: Age (day) Value: 21
  misc_feature: MA Experiment 20000234 PARAMETER Experiment Name: At_Siliques_P Parameter: Organism Value: A. thaliana
  misc_feature: MA Experiment 20000234 PARAMETER Experiment Name: At_Siliques_P Parameter: Plant Line Value: WS
  misc_feature: MA Experiment 20000234 PARAMETER Experiment Name: At_Siliques_P Parameter: Tissue Value: Less Than 5mm Siliques vs. Whole Plant
  misc_feature: MA Experiment ID: 20000235 Result: Up-regulated in Transcription
  misc_feature: MA Experiment 20000235 PARAMETER Experiment Name: At_Siliques_P Parameter: Age (day) Value: 21
  misc_feature: MA Experiment 20000235 PARAMETER Experiment Name: At_Siliques_P Parameter: Organism Value: A. thaliana
  misc_feature: MA Experiment 20000235 PARAMETER Experiment Name: At_Siliques_P Parameter: Plant Line Value: WS
  misc_feature: MA Experiment 20000235 PARAMETER Experiment Name: At_Siliques_P Parameter: Tissue Value: 5-10mm Siliques vs. Whole Plant
  misc_feature: MA Experiment ID: 20000265 Result: Up-regulated in Transcription
  misc_feature: MA Experiment 20000265 PARAMETER Experiment Name: At_Open_Flower_P Parameter: Age (day) Value: 21
  misc_feature: MA Experiment 20000265 PARAMETER Experiment Name: At_Open_Flower_P Parameter: Plant Line Value: WS
  misc_feature: MA Experiment 20000265 PARAMETER Experiment Name: At_Open_Flower_P Parameter: Tissue Value: Closed Flower vs. Whole Plant
  misc_feature: MA Experiment ID: 20000286 Result: Up-regulated in Transcription
  misc_feature: MA Experiment 20000286 PARAMETER Experiment Name: At_Open_Flower_P Parameter: Age (day) Value: 21
  misc_feature: MA Experiment 20000286 PARAMETER Experiment Name: At_Open_Flower_P Parameter: Plant Line Value: WS
  misc_feature: MA Experiment 20000286 PARAMETER Experiment Name: At_Open_Flower_P Parameter: Tissue Value: Half Open vs. Whole Plant
  misc_feature: MA Experiment ID: 20000495 Result: Up-regulated in Transcription
  misc_feature: MA Experiment 20000495 PARAMETER Experiment Name: At_Guard_Cells_P Parameter: Harvest Date Value: 8/2/2002
  misc_feature: MA Experiment 20000495 PARAMETER Experiment Name: At_Guard_Cells_P Parameter: Organism Value: A. thaliana
  misc_feature: MA Experiment 20000495 PARAMETER Experiment Name: At_Guard_Cells_P Parameter: Tissue Value: Guard Cells vs. Leaves
  misc_feature: MA Experiment ID: 20001560 Result: Up-regulated in Transcription
  misc_feature: MA Experiment 20001560 PARAMETER Experiment Name: At_Drought_Soil_Dry_P Parameter: Age (day) Value: 28
  misc_feature: MA Experiment 20001560 PARAMETER Experiment Name: At_Drought_Soil_Dry_P Parameter: Organism Value: A. thaliana
  misc_feature: MA Experiment 20001560 PARAMETER Experiment Name: At_Drought_Soil_Dry_P Parameter: Plant Line Value: WS
  misc_feature: MA Experiment 20001560 PARAMETER Experiment Name: At_Drought_Soil_Dry_P Parameter: Post Timepoint (hr) Value: None
  misc_feature: MA Experiment 20001560 PARAMETER Experiment Name: At_Drought_Soil_Dry_P Parameter: Post-Treatment Value: None
  misc_feature: MA Experiment 20001560 PARAMETER Experiment Name: At_Drought_Soil_Dry_P Parameter: Timepoint (day) Value: 14
  misc_feature: MA Experiment 20001560 PARAMETER Experiment Name: At_Drought_Soil_Dry_P Parameter: Treatment Value: Drought vs. No Drought
  misc_feature: MA Experiment ID: 20001904 Result: Up-regulated in Transcription
  misc_feature: MA Experiment 20001904 PARAMETER Experiment Name: At_Drought_Reproduction_P Parameter: Age (day) Value: 37
  misc_feature: MA Experiment 20001904 PARAMETER Experiment Name: At_Drought_Reproduction_P Parameter: Organism Value: A. thaliana
  misc_feature: MA Experiment 20001904 PARAMETER Experiment Name: At_Drought_Reproduction_P Parameter: Plant Line Value: WS
  misc_feature: MA Experiment 20001904 PARAMETER Experiment Name: At_Drought_Reproduction_P Parameter: Timepoint (day) Value: 7
  misc_feature: MA Experiment 20001904 PARAMETER Experiment Name: At_Drought_Reproduction_P Parameter: Tissue Value: Rosettes
  misc_feature: MA Experiment 20001904 PARAMETER Experiment Name: At_Drought_Reproduction_P Parameter: Treatment Value: Drought vs. No Drought
  misc_feature: MA Experiment ID: 20001905 Result: Up-regulated in Transcription
  misc_feature: MA Experiment 20001905 PARAMETER Experiment Name: At_Drought_Reproduction_P Parameter: Age (day) Value: 40
  misc_feature: MA Experiment 20001905 PARAMETER Experiment Name: At_Drought_Reproduction_P Parameter: Organism Value: A. thaliana
  misc_feature: MA Experiment 20001905 PARAMETER Experiment Name: At_Drought_Reproduction_P Parameter: Plant Line Value: WS
  misc_feature: MA Experiment 20001905 PARAMETER Experiment Name: At_Drought_Reproduction_P Parameter: Timepoint (day) Value: 10
  misc_feature: MA Experiment 20001905 PARAMETER Experiment Name: At_Drought_Reproduction_P Parameter: Tissue Value: Rosettes
  misc_feature: MA Experiment 20001905 PARAMETER Experiment Name: At_Drought_Reproduction_P Parameter: Treatment Value: Drought vs. No Drought
catcgctgttccagagctaaaaaaccctaatcttctcgggcttgtcatctccaaaattcagggttcaatttcttcaccatagaagatatagcgttatctccggcgtctaaggggactttagggacattcttgtggtggagaaatgggagacgaccagctagatttcgagctcccagaagaggttttgtcggtgattccgatggacccttttgagcagctggatctcgcgaggaagattacatcaatggcgatagcttcaagggtgtcgaatctggactctgaggtggttgaattgagacagaagcttctgggtaaggaaagtgttgtccgtgagcttgaggagaaagcgtctcgcctggagagagactgccgcgaggctgattcgagattgaaggtcgttctcgaagataatatgaacctgacaaaggagaaggattcactggcaatgactgtaacgaaactcacccgtgatttggctaagctggagacattcaagcggcagttaatcaaatccctgagcgatgagagtggtccgcaaacagaacctgttgatattaggacatgcgaccagccaggatcatatccaggcaaagatggaaggatcaatgcacactcaattaaacaagcttacagtggatctacagacacgaacaatccagttgttgaagcttcaaaatacactggaaacaaattttcaatgacatcatacatatctccacgtcttaccccaaccgcaacaccaaagatcatctccacaagtgtgtctcctcgaggctattctgcagcaggttctcctaaaagaacatcaggtgcagtttctcccacaaaggcaacactctggtacccgtcaagtcagcaatcatcggctgcgaattctcctcctcgcaaccgcacactcccagctcgtacaccgcggatggatggtaaagaattcttccggcaagccaggagccgattatcctatgaacaattcagttccttcttagctaacatcaaagagctcaacgcccagaagcaaacccgagaggaaactctgaggaaagcagatgagatatttggggaagagaacaaagatctttatttatctttccaaggtctccttaacagaaacatgcgttaaactttcataagccgttatcttgaatctgggccaatgtgataggatggatattaaccattgtagtatgtgtattccctacgggatttagtttgcaaagtgttttttttgtttcatcacaaacaaagaagaagaagtatctcgttttggg

SEQ ID NO: 107554 - protein, 325 aa, Arabidopsis thaliana
  peptide (1)..(325): Ceres Seq. ID no. 13650696
  misc_feature (1)..(325): Homolog of NCBI NO: 30684901 NR Description: expressed protein [Arabidopsis thaliana] ESTs gb|N38586 and gb|N38613 come from this gene. [Arabidopsis >gi|26452357|dbj|BAC43264.1| unknown protein [Arabidopsis
  misc_feature (7)..(320): Homolog of NCBI NO: 15222835 NR Description: expressed protein [Arabidopsis thaliana]
  misc_feature (8)..(323): Homolog of NCBI NO: 18414476 NR Description: expressed protein [Arabidopsis thaliana] AT4g15540/dl3810w [Arabidopsis thaliana] AT4g15540/dl3810w [Arabidopsis thaliana]
  misc_feature (63)..(323): Homolog of NCBI NO: 38344261 NR Description: OSJNBa0008M17.14 [Oryza sativa (japonica
  misc_feature (8)..(295): Homolog of NCBI NO: 7485048 NR Description: hypothetical protein - Arabidopsis thaliana hypothetical protein [Arabidopsis thaliana]
  misc_feature (7)..(252): Homolog of NCBI NO: 25404089 NR Description: hypothetical protein T6H22.12 [imported] - thaliana >gi|6056378|gb|AAF02842.1|AC009894_13 Hypothetical
  misc_feature (6)..(209): Homolog of NCBI NO: 38344261 NR Description: OSJNBa0008M17.14 [Oryza sativa (japonica
  misc_feature (15)..(128): Homolog of NCBI NO: 23489944 NR Description: hypothetical protein [Plasmodium yoelii yoelii]
  misc_feature (244)..(323): Homolog of NCBI NO: 23489944 NR Description: hypothetical protein [Plasmodium yoelii yoelii]
  misc_feature (15)..(128): Homolog of NCBI NO: 23613663 NR Description: hypothetical protein, conserved [Plasmodium
MGDDQLDFELPEEVLSVIPMDPFEQLDLARKITSMAIASRVSNLDSEVVELRQKLLGKESVVRELEEKASRLERDCREADSRLKVVLEDNMNLTKEKDSLAMTVTKLTRDLAKLETFKRQLIKSLSDESGPQTEPVDIRTCDQPGSYPGKDGRINAHSIKQAYSGSTDTNNPVVEASKYTGNKFSMTSYISPRLTPTATPKIISTSVSPRGYSAAGSPKRTSGAVSPTKATLWYPSSQQSSAANSPPRNRTLPARTPRMDGKEFFRQARSRLSYEQFSSFLANIKELNAQKQTREETLRKADEIFGEENKDLYLSFQGLLNRNMR

SEQ ID NO: 107555 - protein, 306 aa, Arabidopsis thaliana
  peptide (1)..(306): Ceres Seq. ID no. 13650697
  misc_feature (1)..(306): Homolog of NCBI NO: 30684901 NR Description: expressed protein [Arabidopsis thaliana] ESTs gb|N38586 and gb|N38613 come from this gene. [Arabidopsis >gi|26452357|dbj|BAC43264.1| unknown protein [Arabidopsis
  misc_feature (1)..(301): Homolog of NCBI NO: 15222835 NR Description: expressed protein [Arabidopsis thaliana]
  misc_feature (1)..(304): Homolog of NCBI NO: 18414476 NR Description: expressed protein [Arabidopsis thaliana] AT4g15540/dl3810w [Arabidopsis thaliana] AT4g15540/dl3810w [Arabidopsis thaliana]
  misc_feature (44)..(304): Homolog of NCBI NO: 38344261 NR Description: OSJNBa0008M17.14 [Oryza sativa (japonica
  misc_feature (1)..(276): Homolog of NCBI NO: 7485048 NR Description: hypothetical protein - Arabidopsis thaliana hypothetical protein [Arabidopsis thaliana]
  misc_feature (1)..(233): Homolog of NCBI NO: 25404089 NR Description: hypothetical protein T6H22.12 [imported] - thaliana >gi|6056378|gb|AAF02842.1|AC009894_13 Hypothetical
  misc_feature (1)..(190): Homolog of NCBI NO: 38344261 NR Description: OSJNBa0008M17.14 [Oryza sativa (japonica
  misc_feature (1)..(109): Homolog of NCBI NO: 23489944 NR Description: hypothetical protein [Plasmodium yoelii yoelii]
  misc_feature (225)..(304): Homolog of NCBI NO: 23489944 NR Description: hypothetical protein [Plasmodium yoelii yoelii]
  misc_feature (1)..(109): Homolog of NCBI NO: 23613663 NR Description: hypothetical protein, conserved [Plasmodium
MDPFEQLDLARKITSMAIASRVSNLDSEVVELRQKLLGKESVVRELEEKASRLERDCREADSRLKVVLEDNMNLTKEKDSLAMTVTKLTRDLAKLETFKRQLIKSLSDESGPQTEPVDIRTCDQPGSYPGKDGRINAHSIKQAYSGSTDTNNPVVEASKYTGNKFSMTSYISPRLTPTATPKIISTSVSPRGYSAAGSPKRTSGAVSPTKATLWYPSSQQSSAANSPPRNRTLPARTPRMDGKEFFRQARSRLSYEQFSSFLANIKELNAQKQTREETLRKADEIFGEENKDLYLSFQGLLNRNMR

SEQ ID NO: 107556 - protein, 291 aa, Arabidopsis thaliana
  peptide (1)..(291): Ceres Seq. ID no. 13650698
  misc_feature (1)..(291): Homolog of NCBI NO: 30684901 NR Description: expressed protein [Arabidopsis thaliana] ESTs gb|N38586 and gb|N38613 come from this gene. [Arabidopsis >gi|26452357|dbj|BAC43264.1| unknown protein [Arabidopsis
  misc_feature (1)..(286): Homolog of NCBI NO: 15222835 NR Description: expressed protein [Arabidopsis thaliana]
  misc_feature (1)..(289): Homolog of NCBI NO: 18414476 NR Description: expressed protein [Arabidopsis thaliana] AT4g15540/dl3810w [Arabidopsis thaliana] AT4g15540/dl3810w [Arabidopsis thaliana]
  misc_feature (29)..(289): Homolog of NCBI NO: 38344261 NR Description: OSJNBa0008M17.14 [Oryza sativa (japonica
  misc_feature (1)..(261): Homolog of NCBI NO: 7485048 NR Description: hypothetical protein - Arabidopsis thaliana hypothetical protein [Arabidopsis thaliana]
  misc_feature (1)..(218): Homolog of NCBI NO: 25404089 NR Description: hypothetical protein T6H22.12 [imported] - thaliana >gi|6056378|gb|AAF02842.1|AC009894_13 Hypothetical
  misc_feature (1)..(175): Homolog of NCBI NO: 38344261 NR Description: OSJNBa0008M17.14 [Oryza sativa (japonica
  misc_feature (1)..(94): Homolog of NCBI NO: 23489944 NR Description: hypothetical protein [Plasmodium yoelii yoelii]
  misc_feature (210)..(289): Homolog of NCBI NO: 23489944 NR Description: hypothetical protein [Plasmodium yoelii yoelii]
  misc_feature (1)..(94): Homolog of NCBI NO: 23613663 NR Description: hypothetical protein, conserved [Plasmodium
MAIASRVSNLDSEVVELRQKLLGKESVVRELEEKASRLERDCREADSRLKVVLEDNMNLTKEKDSLAMTVTKLTRDLAKLETFKRQLIKSLSDESGPQTEPVDIRTCDQPGSYPGKDGRINAHSIKQAYSGSTDTNNPVVEASKYTGNKFSMTSYISPRLTPTATPKIISTSVSPRGYSAAGSPKRTSGAVSPTKATLWYPSSQQSSAANSPPRNRTLPARTPRMDGKEFFRQARSRLSYEQFSSFLANIKELNAQKQTREETLRKADEIFGEENKDLYLSFQGLLNRNMR

SEQ ID NO: 107557 - DNA, 453 bp, Arabidopsis thaliana
  misc_feature (1)..(453): Ceres Seq. ID no. 13650699
  misc_feature: MA Experiment ID: 20000179 Result: Up-regulated in Transcription
  misc_feature: MA Experiment 20000179 PARAMETER Experiment Name: At_Germinating_Seeds_P Parameter: Age (hr) Value: 6 vs. 0
  misc_feature: MA Experiment 20000179 PARAMETER Experiment Name: At_Germinating_Seeds_P Parameter: Tissue Value: Germinating Seeds
  misc_feature: MA Experiment ID: 20000180 Result: Up-regulated in Transcription
  misc_feature: MA Experiment 20000180 PARAMETER Experiment Name: At_Germinating_Seeds_P Parameter: Age (hr) Value: 24 vs. 0
  misc_feature: MA Experiment 20000180 PARAMETER Experiment Name: At_Germinating_Seeds_P Parameter: Tissue Value: Germinating Seeds
  misc_feature: MA Experiment ID: 20000185 Result: Down-regulated in Transcription
  misc_feature: MA Experiment 20000185 PARAMETER Experiment Name: At_Roots__P Parameter: Age (day) Value: 7 vs. 21
  misc_feature: MA Experiment 20000185 PARAMETER Experiment Name: At_Roots__P Parameter: Organism Value: A. thaliana
  misc_feature: MA Experiment 20000185 PARAMETER Experiment Name: At_Roots__P Parameter: Tissue Value: Roots vs. Whole Plant
  misc_feature: MA Experiment ID: 20000234 Result: Up-regulated in Transcription
  misc_feature: MA Experiment 20000234 PARAMETER Experiment Name: At_Siliques_P Parameter: Age (day) Value: 21
  misc_feature: MA Experiment 20000234 PARAMETER Experiment Name: At_Siliques_P Parameter: Organism Value: A. thaliana
  misc_feature: MA Experiment 20000234 PARAMETER Experiment Name: At_Siliques_P Parameter: Plant Line Value: WS
  misc_feature: MA Experiment 20000234 PARAMETER Experiment Name: At_Siliques_P Parameter: Tissue Value: Less Than 5mm Siliques vs. Whole Plant
  misc_feature: MA Experiment ID: 20000235 Result: Up-regulated in Transcription
  misc_feature: MA Experiment 20000235 PARAMETER Experiment Name: At_Siliques_P Parameter: Age (day) Value: 21
  misc_feature: MA Experiment 20000235 PARAMETER Experiment Name: At_Siliques_P Parameter: Organism Value: A. thaliana
  misc_feature: MA Experiment 20000235 PARAMETER Experiment Name: At_Siliques_P Parameter: Plant Line Value: WS
  misc_feature: MA Experiment 20000235 PARAMETER Experiment Name: At_Siliques_P Parameter: Tissue Value: 5-10mm Siliques vs. Whole Plant
  misc_feature: MA Experiment ID: 20000436 Result: Down-regulated in Transcription
  misc_feature: MA Experiment 20000436 PARAMETER Experiment Name: At_Drought_P Parameter: Age (day) Value: 7
  misc_feature: MA Experiment 20000436 PARAMETER Experiment Name: At_Drought_P Parameter: Organism Value: A. thaliana
  misc_feature: MA Experiment 20000436 PARAMETER Experiment Name: At_Drought_P Parameter: Plant Line Value: WS
  misc_feature: MA Experiment 20000436 PARAMETER Experiment Name: At_Drought_P Parameter: Timepoint (hr) Value: 12
  misc_feature: MA Experiment 20000436 PARAMETER Experiment Name: At_Drought_P Parameter: Tissue Value: Whole Plant
  misc_feature: MA Experiment 20000436 PARAMETER Experiment Name: At_Drought_P Parameter: Treatment Value: Drought vs. No Drought
  misc_feature: MA Experiment ID: 20000437 Result: Down-regulated in Transcription
  misc_feature: MA Experiment 20000437 PARAMETER Experiment Name: At_Drought_P Parameter: Age (day) Value: 8
  misc_feature: MA Experiment 20000437 PARAMETER Experiment Name: At_Drought_P Parameter: Organism Value: A. thaliana
  misc_feature: MA Experiment 20000437 PARAMETER Experiment Name: At_Drought_P Parameter: Plant Line Value: WS
  misc_feature: MA Experiment 20000437 PARAMETER Experiment Name: At_Drought_P Parameter: Timepoint (hr) Value: 24
  misc_feature: MA Experiment 20000437 PARAMETER Experiment Name: At_Drought_P Parameter: Tissue Value: Whole Plant
  misc_feature: MA Experiment 20000437 PARAMETER Experiment Name: At_Drought_P Parameter: Treatment Value: Drought vs. No Drought
  misc_feature: MA Experiment ID: 20000438 Result: Up-regulated in Transcription
  misc_feature: MA Experiment 20000438 PARAMETER Experiment Name: At_Shoots__P Parameter: Age (day) Value: 14
  misc_feature: MA Experiment 20000438 PARAMETER Experiment Name: At_Shoots__P Parameter: Tissue Value: Shoots vs. Whole Plant
  misc_feature: MA Experiment ID: 20000439 Result: Down-regulated in Transcription
  misc_feature: MA Experiment 20000439 PARAMETER Experiment Name: At_Roots__P Parameter: Age (day) Value: 14 vs. 21
  misc_feature: MA Experiment 20000439 PARAMETER Experiment Name: At_Roots__P Parameter: Organism Value: A. thaliana
  misc_feature: MA Experiment 20000439 PARAMETER Experiment Name: At_Roots__P Parameter: Tissue Value: Roots vs. Whole Plant
  misc_feature: MA Experiment ID: 20001247 Result: Down-regulated in Transcription
  misc_feature: MA Experiment 20001247 PARAMETER Experiment Name: At_Far-red-induction_P Parameter: Age (day) Value: 7
  misc_feature: MA Experiment 20001247 PARAMETER Experiment Name: At_Far-red-induction_P Parameter: Light Value: Far-red vs. White
  misc_feature: MA Experiment 20001247 PARAMETER Experiment Name: At_Far-red-induction_P Parameter: Organism Value: A. thaliana
  misc_feature: MA Experiment 20001247 PARAMETER Experiment Name: At_Far-red-induction_P Parameter: Plant Line Value: Columbia
  misc_feature: MA Experiment 20001247 PARAMETER Experiment Name: At_Far-red-induction_P Parameter: Timepoint (hr) Value: 1
  misc_feature: MA Experiment 20001247 PARAMETER Experiment Name: At_Far-red-induction_P Parameter: Tissue Value: Whole Plant
  misc_feature: MA Experiment ID: 20001248 Result: Down-regulated in Transcription
  misc_feature: MA Experiment 20001248 PARAMETER Experiment Name: At_Far-red-induction_P Parameter: Age (day) Value: 7
  misc_feature: MA Experiment 20001248 PARAMETER Experiment Name: At_Far-red-induction_P Parameter: Light Value: Far-red vs. White
  misc_feature: MA Experiment 20001248 PARAMETER Experiment Name: At_Far-red-induction_P Parameter: Organism Value: A. thaliana
  misc_feature: MA Experiment 20001248 PARAMETER Experiment Name: At_Far-red-induction_P Parameter: Plant Line Value: Columbia
  misc_feature: MA Experiment 20001248 PARAMETER Experiment Name: At_Far-red-induction_P Parameter: Timepoint (hr) Value: 4
  misc_feature: MA Experiment 20001248 PARAMETER Experiment Name: At_Far-red-induction_P Parameter: Tissue Value: Whole Plant
  misc_feature: MA Experiment ID: 20001450 Result: Down-regulated in Transcription
  misc_feature: MA Experiment 20001450 PARAMETER Experiment Name: At_Far-red-induction_P Parameter: Age (day) Value: 7
  misc_feature: MA Experiment 20001450 PARAMETER Experiment Name: At_Far-red-induction_P Parameter: Light Value: Far-red vs. White
  misc_feature: MA Experiment 20001450 PARAMETER Experiment Name: At_Far-red-induction_P Parameter: Organism Value: A. thaliana
  misc_feature: MA Experiment 20001450 PARAMETER Experiment Name: At_Far-red-induction_P Parameter: Plant Line Value: Columbia
  misc_feature: MA Experiment 20001450 PARAMETER Experiment Name: At_Far-red-induction_P Parameter: Timepoint (hr) Value: 8
  misc_feature: MA Experiment 20001450 PARAMETER Experiment Name: At_Far-red-induction_P Parameter: Tissue Value: Whole Plant
  misc_feature: MA Experiment ID: 20001560 Result: Up-regulated in Transcription
  misc_feature: MA Experiment 20001560 PARAMETER Experiment Name: At_Drought_Soil_Dry_P Parameter: Age (day) Value: 28
  misc_feature: MA Experiment 20001560 PARAMETER Experiment Name: At_Drought_Soil_Dry_P Parameter: Organism Value: A. thaliana
  misc_feature: MA Experiment 20001560 PARAMETER Experiment Name: At_Drought_Soil_Dry_P Parameter: Plant Line Value: WS
  misc_feature: MA Experiment 20001560 PARAMETER Experiment Name: At_Drought_Soil_Dry_P Parameter: Post Timepoint (hr) Value: None
  misc_feature: MA Experiment 20001560 PARAMETER Experiment Name: At_Drought_Soil_Dry_P Parameter: Post-Treatment Value: None
  misc_feature: MA Experiment 20001560 PARAMETER Experiment Name: At_Drought_Soil_Dry_P Parameter: Timepoint (day) Value: 14
  misc_feature: MA Experiment 20001560 PARAMETER Experiment Name: At_Drought_Soil_Dry_P Parameter: Treatment Value: Drought vs. No Drought
  misc_feature: MA Experiment ID: 20001757 Result: Up-regulated in Transcription
  misc_feature: MA Experiment 20001757 PARAMETER Experiment Name: At_50mM_NH4NO3_L-to-H_P Parameter: Timepoint (hr) Value: 6
  misc_feature: MA Experiment 20001757 PARAMETER Experiment Name: At_50mM_NH4NO3_L-to-H_P Parameter: Tissue Value: Leaf
  misc_feature: MA Experiment 20001757 PARAMETER Experiment Name: At_50mM_NH4NO3_L-to-H_P Parameter: Treatment Value: 50mM NH4NO3 vs 100mM Mannitol
  misc_feature: MA Experiment ID: 20001905 Result: Down-regulated in Transcription
  misc_feature: MA Experiment 20001905 PARAMETER Experiment Name: At_Drought_Reproduction_P Parameter: Age (day) Value: 40
  misc_feature: MA Experiment 20001905 PARAMETER Experiment Name: At_Drought_Reproduction_P Parameter: Organism Value: A. thaliana
  misc_feature: MA Experiment 20001905 PARAMETER Experiment Name: At_Drought_Reproduction_P Parameter: Plant Line Value: WS
  misc_feature: MA Experiment 20001905 PARAMETER Experiment Name: At_Drought_Reproduction_P Parameter: Timepoint (day) Value: 10
  misc_feature: MA Experiment 20001905 PARAMETER Experiment Name: At_Drought_Reproduction_P Parameter: Tissue Value: Rosettes
  misc_feature: MA Experiment 20001905 PARAMETER Experiment Name: At_Drought_Reproduction_P Parameter: Treatment Value: Drought vs. No Drought
  misc_feature: Pfam Name: RRM_1 Pfam Description: RNA recognition motif. (a.k.a. RRM, RBD, or RNP domain)
gtgtctctctgtccagagagaaatggcagcatcatcagtactactctcgtgcttcaaatcccatcatcaaccaaaccttctccatggctgcaactactcatctaaccaaacactcctcagattcaacttttcaaccccaaaacctctcctgatctcctcacggagctgctcacgacgattcagagtcttgtcagagaccatcaccgtcaaattggaagatcacggggttatggctttgtatgttactcttccaaagcagaaatggaaaccgctcttgaatcgcttgacggatttgagctggagggtcgggcgattcgagtaaaccttgctcaagggaagaaattttgatatcatacaacaacattgtgtaatcatttagagttttatacattagagttatgtttatattgattgaactaattaactcaaaagatcaataaaactttttatgcc

SEQ ID NO: 107558 - protein, 106 aa, Arabidopsis thaliana
  peptide (1)..(106): Ceres Seq. ID no. 13650700
  misc_feature: Pfam Name: RRM_1 Pfam Description: RNA recognition motif. (a.k.a. RRM, RBD, or RNP domain)
  misc_feature (8)..(73): Homolog of NCBI NO: 15218972 NR Description: 29 kDa ribonucleoprotein, chloroplast protein cp29), putative [Arabidopsis thaliana]
  misc_feature (8)..(106): Homolog of NCBI NO: 30696379 NR Description: 29 kDa ribonucleoprotein, chloroplast protein cp29), putative [Arabidopsis thaliana]
CLSVQREMAASSVLLSCFKSHHQPNLLHGCNYSSNQTLLRFNFSTPKPLLISSRSCSRRFRVLSETITVKLEDHGVMALYVTLPKQKWKPLLNRLTDLSWRVGRFE

SEQ ID NO: 107559 - protein, 99 aa, Arabidopsis thaliana
  peptide (1)..(99): Ceres Seq. ID no. 13650701
  misc_feature: Pfam Name: RRM_1 Pfam Description: RNA recognition motif. (a.k.a. RRM, RBD, or RNP domain)
  misc_feature (1)..(66): Homolog of NCBI NO: 15218972 NR Description: 29 kDa ribonucleoprotein, chloroplast protein cp29), putative [Arabidopsis thaliana]
  misc_feature (1)..(99): Homolog of NCBI NO: 30696379 NR Description: 29 kDa ribonucleoprotein, chloroplast protein cp29), putative [Arabidopsis thaliana]
MAASSVLLSCFKSHHQPNLLHGCNYSSNQTLLRFNFSTPKPLLISSRSCSRRFRVLSETITVKLEDHGVMALYVTLPKQKWKPLLNRLTDLSWRVGRFE

SEQ ID NO: 107560 - DNA, 1546 bp, Arabidopsis thaliana
  misc_feature (1)..(1546): Ceres Seq. ID no. 13650705
acaaactctctctcttctctctctctcccacacacacgcttttatttattttggagctaatcggaaaacaaaaaagcaacggccaaagcaatgaggaaagatgatctctgcatcactgttcctaccttcttccgatgtcctatatctctcgacgttatgaaatctccggtgagtctttgcaccggcgttacctacgatcgagctagtatccaacggtggcttgacggcgggaataacacttgtccggcgacgatgcagattcttcagaataaagatttcataccgaatcggactcttcaacgtcttatcgagatttggtctgattctgttcgtcgtcgaacttgtgttgaatcggcggaattagctgctccgacgagagacgagatcgccgatgcgatcgatagagtgaagatcgagaaagaagaaagagatgatcgcgaggttttgtcgaagattgttcgattcgggagagaatctgatgataacagaggatttctcgccggaaaagatgatttcgtgaaacttctcgtggatctgattaatcaggtggatttcgaaaccacctccgccgcgaaatctctggttgttcaagaagcggtgaagattctgagtacgattcgaagcaaagtctcagatcggagacggttttcgaatctgattttaaccaacggtcgagatcggttatcggtgatcgtctacttgtttaaaaccgggaatgtcgaattgaaaattgattgcgccggtttacttgagttcatcgccgtcgacgctgaatcaaagctgttaatcgccgagagagatggattaatcacggagctaatgaaatcgattagtaaagattctgatttaagtttaatcgaatcgagtttatcgtgcttgatcgcgattagctcaccgaaacgtgtgaaactcaatctcctccgagagaaactcatcggagatgttacgaaactgttatcagattcaacgtcgtcgttgagcgtttcggtgacggagaaatgcttgaagcttctggagattttagcatctacaaaggaagggagatcggaaatttgcggcggagatggcgagtgtttgaagacggtggttaagaagctgatgaaagtgtcaacggcggcgacggagcacgccgtgacggtgctgtggagtgtttcttatctattcaaagaagataaagctttggaagctgttacaagtgttaacggagttacgaaaattctgttactgttacagagcaattgctctcccgccgttagacgtatgttaacggatcttcttaaggtcttcaaggtgaattcaagatcttgcctttcggcttacgacaccaaaacgacacatatcatgccgttttaaatcaattcttttactacttactagggttcgtttttaggatttgtttcttgggaaagaggtaagaacaattgtaaaactaaaatgaaatttttgaatagtgaatataaactaaaaaagaagattcaattcattgctcattgaatgtgtagtctattattctcttattaatgtaaagtaaaatcaattaatgacg

SEQ ID NO: 107561 - protein, 420 aa, Arabidopsis thaliana
  peptide (1)..(420): Ceres Seq. ID no. 13650706
  misc_feature (9)..(83): Pfam Name: U-box domain Pfam Description: U-box domain
  misc_feature (1)..(420): Homolog of NCBI NO: 15237755 NR Description: expressed protein [Arabidopsis thaliana] emb|CAB89350.1~gene_id:MUB3.18~strong similarity to unknown
  misc_feature (1)..(420): Homolog of NCBI NO: 15242515 NR Description: hypothetical protein [Arabidopsis thaliana]
  misc_feature (8)..(420): Homolog of NCBI NO: 15230166 NR Description: expressed protein [Arabidopsis thaliana]
  misc_feature (8)..(420): Homolog of NCBI NO: 26451013 NR Description: unknown protein [Arabidopsis thaliana]
  misc_feature (2)..(420): Homolog of NCBI NO: 13539578 NR Description: photoperiod responsive protein [Solanum tuberosum
  misc_feature (8)..(420): Homolog of NCBI NO: 38605834 NR Description: OSJNBb0108J11.6 [Oryza sativa (japonica
  misc_feature (4)..(413): Homolog of NCBI NO: 14582200 NR Description: immediate-early fungal elicitor protein CMPG1
  misc_feature (5)..(420): Homolog of NCBI NO: 15222819 NR Description: expressed protein [Arabidopsis thaliana]
  misc_feature (5)..(420): Homolog of NCBI NO: 26451730 NR Description: unknown protein [Arabidopsis thaliana]
  misc_feature (5)..(400): Homolog of NCBI NO: 18402223 NR Description: expressed protein [Arabidopsis thaliana] gb|AAD21464.1~gene_id:MLD14.11~similar to unknown protein thaliana] >gi|21554399|gb|AAM63504.1| unknown [Arabidopsis
MRKDDLCITVPTFFRCPISLDVMKSPVSLCTGVTYDRASIQRWLDGGNNTCPATMQILQNKDFIPNRTLQRLIEIWSDSVRRRTCVESAELAAPTRDEIADAIDRVKIEKEERDDREVLSKIVRFGRESDDNRGFLAGKDDFVKLLVDLINQVDFETTSAAKSLVVQEAVKILSTIRSKVSDRRRFSNLILTNGRDRLSVIVYLFKTGNVELKIDCAGLLEFIAVDAESKLLIAERDGLITELMKSISKDSDLSLIESSLSCLIAISSPKRVKLNLLREKLIGDVTKLLSDSTSSLSVSVTEKCLKLLEILASTKEGRSEICGGDGECLKTVVKKLMKVSTAATEHAVTVLWSVSYLFKEDKALEAVTSVNGVTKILLLLQSNCSPAVRRMLTDLLKVFKVNSRSCLSAYDTKTTHIMPF

SEQ ID NO: 107562 - protein, 398 aa, Arabidopsis thaliana
  peptide (1)..(398): Ceres Seq. ID no. 13650707
  misc_feature (1)..(61): Pfam Name: U-box domain Pfam Description: U-box domain
  misc_feature (1)..(398): Homolog of NCBI NO: 15237755 NR Description: expressed protein [Arabidopsis thaliana] emb|CAB89350.1~gene_id:MUB3.18~strong similarity to unknown
  misc_feature (1)..(398): Homolog of NCBI NO: 15242515 NR Description: hypothetical protein [Arabidopsis thaliana]
  misc_feature (1)..(398): Homolog of NCBI NO: 15230166 NR Description: expressed protein [Arabidopsis thaliana]
  misc_feature (1)..(398): Homolog of NCBI NO: 26451013 NR Description: unknown protein [Arabidopsis thaliana]
  misc_feature (1)..(398): Homolog of NCBI NO: 13539578 NR Description: photoperiod responsive protein [Solanum tuberosum
  misc_feature (1)..(398): Homolog of NCBI NO: 38605834 NR Description: OSJNBb0108J11.6 [Oryza sativa (japonica
  misc_feature (1)..(391): Homolog of NCBI NO: 14582200 NR Description: immediate-early fungal elicitor protein CMPG1
  misc_feature (1)..(398): Homolog of NCBI NO: 15222819 NR Description: expressed protein [Arabidopsis thaliana]
  misc_feature (1)..(398): Homolog of NCBI NO: 26451730 NR Description: unknown protein [Arabidopsis thaliana]
  misc_feature (1)..(378): Homolog of NCBI NO: 18402223 NR Description: expressed protein [Arabidopsis thaliana] gb|AAD21464.1~gene_id:MLD14.11~similar to unknown protein thaliana] >gi|21554399|gb|AAM63504.1| unknown [Arabidopsis
MKSPVSLCTGVTYDRASIQRWLDGGNNTCPATMQILQNKDFIPNRTLQRLIEIWSDSVRRRTCVESAELAAPTRDEIADAIDRVKIEKEERDDREVLSKIVRFGRESDDNRGFLAGKDDFVKLLVDLINQVDFETTSAAKSLVVQEAVKILSTIRSKVSDRRRFSNLILTNGRDRLSVIVYLFKTGNVELKIDCAGLLEFIAVDAESKLLIAERDGLITELMKSISKDSDLSLIESSLSCLIAISSPKRVKLNLLREKLIGDVTKLLSDSTSSLSVSVTEKCLKLLEILASTKEGRSEICGGDGECLKTVVKKLMKVSTAATEHAVTVLWSVSYLFKEDKALEAVTSVNGVTKILLLLQSNCSPAVRRMLTDLLKVFKVNSRSCLSAYDTKTTHIMPF

SEQ ID NO: 107563 - protein, 366 aa, Arabidopsis thaliana
  peptide (1)..(366): Ceres Seq. ID no. 13650708
  misc_feature (1)..(366): Homolog of NCBI NO: 15237755 NR Description: expressed protein [Arabidopsis thaliana] emb|CAB89350.1~gene_id:MUB3.18~strong similarity to unknown
  misc_feature (1)..(366): Homolog of NCBI NO: 15242515 NR Description: hypothetical protein [Arabidopsis thaliana]
  misc_feature (1)..(366): Homolog of NCBI NO: 15230166 NR Description: expressed protein [Arabidopsis thaliana]
  misc_feature (1)..(366): Homolog of NCBI NO: 26451013 NR Description: unknown protein [Arabidopsis thaliana]
  misc_feature (1)..(366): Homolog of NCBI NO: 13539578 NR Description: photoperiod responsive protein [Solanum tuberosum
  misc_feature (1)..(366): Homolog of NCBI NO: 38605834 NR Description: OSJNBb0108J11.6 [Oryza sativa (japonica
  misc_feature (1)..(359): Homolog of NCBI NO: 14582200 NR Description: immediate-early fungal elicitor protein CMPG1
  misc_feature (1)..(366): Homolog of NCBI NO: 15222819 NR Description: expressed protein [Arabidopsis thaliana]
  misc_feature (1)..(366): Homolog of NCBI NO: 26451730 NR Description: unknown protein [Arabidopsis thaliana]
  misc_feature (1)..(346): Homolog of NCBI NO: 18402223 NR Description: expressed protein [Arabidopsis thaliana] gb|AAD21464.1~gene_id:MLD14.11~similar to unknown protein thaliana] >gi|21554399|gb|AAM63504.1| unknown [Arabidopsis
MQILQNKDFIPNRTLQRLIEIWSDSVRRRTCVESAELAAPTRDEIADAIDRVKIEKEERDDREVLSKIVRFGRESDDNRGFLAGKDDFVKLLVDLINQVDFETTSAAKSLVVQEAVKILSTIRSKVSDRRRFSNLILTNGRDRLSVIVYLFKTGNVELKIDCAGLLEFIAVDAESKLLIAERDGLITELMKSISKDSDLSLIESSLSCLIAISSPKRVKLNLLREKLIGDVTKLLSDSTSSLSVSVTEKCLKLLEILASTKEGRSEICGGDGECLKTVVKKLMKVSTAATEHAVTVLWSVSYLFKEDKALEAVTSVNGVTKILLLLQSNCSPAVRRMLTDLLKVFKVNSRSCLSAYDTKTTHIMPF

SEQ ID NO: 107564 - DNA, 1265 bp, Arabidopsis thaliana
  misc_feature (1)..(1265): Ceres Seq. ID no. 13650709
  misc_feature: MA Experiment ID: 20000169 Result: Down-regulated in Transcription
  misc_feature: MA Experiment 20000169 PARAMETER Experiment Name: At_100uM_ABA_P Parameter: Age (day) Value: 14
  misc_feature: MA Experiment 20000169 PARAMETER Experiment Name: At_100uM_ABA_P Parameter: Organism Value: A. thaliana
  misc_feature: MA Experiment 20000169 PARAMETER Experiment Name: At_100uM_ABA_P Parameter: Plant Line Value: WS
  misc_feature: MA Experiment 20000169 PARAMETER Experiment Name: At_100uM_ABA_P Parameter: Timepoint (hr) Value: 6
  misc_feature: MA Experiment 20000169 PARAMETER Experiment Name: At_100uM_ABA_P Parameter: Tissue Value: Aerial
  misc_feature: MA Experiment 20000169 PARAMETER Experiment Name: At_100uM_ABA_P Parameter: Treatment Value: 100uM ABA vs. No Treatment
  misc_feature: MA Experiment ID: 20000171 Result: Down-regulated in Transcription
  misc_feature: MA Experiment 20000171 PARAMETER Experiment Name: At_42deg_Heat_P Parameter: Age (day) Value: 14
  misc_feature: MA Experiment 20000171 PARAMETER Experiment Name: At_42deg_Heat_P Parameter: Organism Value: A. thaliana
  misc_feature: MA Experiment 20000171 PARAMETER Experiment Name: At_42deg_Heat_P Parameter: Plant Line Value: WS
  misc_feature: MA Experiment 20000171 PARAMETER Experiment Name: At_42deg_Heat_P Parameter: Temperature (deg C) Value: 42 vs. 22
  misc_feature: MA Experiment 20000171 PARAMETER Experiment Name: At_42deg_Heat_P Parameter: Timepoint (hr) Value: 1
  misc_feature: MA Experiment 20000171 PARAMETER Experiment Name: At_42deg_Heat_P Parameter: Tissue Value: Aerial
  misc_feature: MA Experiment ID: 20000173 Result: Down-regulated in Transcription
  misc_feature: MA Experiment 20000173 PARAMETER Experiment Name: At_42deg_Heat_P Parameter: Age (day) Value: 14
  misc_feature: MA Experiment 20000173 PARAMETER Experiment Name: At_42deg_Heat_P Parameter: Organism Value: A. thaliana
  misc_feature: MA Experiment 20000173 PARAMETER Experiment Name: At_42deg_Heat_P Parameter: Plant Line Value: WS
  misc_feature: MA Experiment 20000173 PARAMETER Experiment Name: At_42deg_Heat_P Parameter: Temperature (deg C) Value: 42 vs. 22
  misc_feature: MA Experiment 20000173 PARAMETER Experiment Name: At_42deg_Heat_P Parameter: Timepoint (hr) Value: 6
  misc_feature: MA Experiment 20000173 PARAMETER Experiment Name: At_42deg_Heat_P Parameter: Tissue Value: Aerial
  misc_feature: MA Experiment ID: 20000182 Result: Down-regulated in Transcription
  misc_feature: MA Experiment 20000182 PARAMETER Experiment Name: At_2mM_SA_P Parameter: Age (day) Value: 14
  misc_feature: MA Experiment 20000182 PARAMETER Experiment Name: At_2mM_SA_P Parameter: Organism Value: A. thaliana
  misc_feature: MA Experiment 20000182 PARAMETER Experiment Name: At_2mM_SA_P Parameter: Plant Line Value: WS
  misc_feature: MA Experiment 20000182 PARAMETER Experiment Name: At_2mM_SA_P Parameter: Timepoint (hr) Value: 6
  misc_feature: MA Experiment 20000182 PARAMETER Experiment Name: At_2mM_SA_P Parameter: Tissue Value: Aerial
  misc_feature: MA Experiment 20000182 PARAMETER Experiment Name: At_2mM_SA_P Parameter: Treatment Value: 2mM SA vs. No Treatment
  misc_feature: MA Experiment ID: 20000184 Result: Up-regulated in Transcription
  misc_feature: MA Experiment 20000184 PARAMETER Experiment Name: At_Shoots__P Parameter: Age (day) Value: 7
  misc_feature: MA Experiment 20000184 PARAMETER Experiment Name: At_Shoots__P Parameter: Tissue Value: Shoots vs. Whole Plant
  misc_feature: MA Experiment ID: 20000185 Result: Up-regulated in Transcription
  misc_feature: MA Experiment 20000185 PARAMETER Experiment Name: At_Roots__P Parameter: Age (day) Value: 7 vs. 21
  misc_feature: MA Experiment 20000185 PARAMETER Experiment Name: At_Roots__P Parameter: Organism Value: A. thaliana
  misc_feature: MA Experiment 20000185 PARAMETER Experiment Name: At_Roots__P Parameter: Tissue Value: Roots vs. Whole Plant
  misc_feature: MA Experiment ID: 20000235 Result: Down-regulated in Transcription
  misc_feature: MA Experiment 20000235 PARAMETER Experiment Name: At_Siliques_P Parameter: Age (day) Value: 21
  misc_feature: MA Experiment 20000235 PARAMETER Experiment Name: At_Siliques_P Parameter: Organism Value: A. thaliana
  misc_feature: MA Experiment 20000235 PARAMETER Experiment Name: At_Siliques_P Parameter: Plant Line Value: WS
  misc_feature: MA Experiment 20000235 PARAMETER Experiment Name: At_Siliques_P Parameter: Tissue Value: 5-10mm Siliques vs. Whole Plant
  misc_feature: MA Experiment ID: 20000268 Result: Down-regulated in Transcription
  misc_feature: MA Experiment 20000268 PARAMETER Experiment Name: At_100mM_NaCl__P Parameter: Age (day) Value: 14
  misc_feature: MA Experiment 20000268 PARAMETER Experiment Name: At_100mM_NaCl__P Parameter: Organism Value: A. thaliana
  misc_feature: MA Experiment 20000268 PARAMETER Experiment Name: At_100mM_NaCl__P Parameter: Plant Line Value: WS
  misc_feature: MA Experiment 20000268 PARAMETER Experiment Name: At_100mM_NaCl__P Parameter: Timepoint (hr) Value: 6
  misc_feature: MA Experiment 20000268 PARAMETER Experiment Name: At_100mM_NaCl__P Parameter: Tissue Value: Whole Plant
  misc_feature: MA Experiment 20000268 PARAMETER Experiment Name: At_100mM_NaCl__P Parameter: Treatment Value: 100mM NaCl vs. No Treatment
  misc_feature: MA Experiment ID: 20000436 Result: Down-regulated in Transcription
  misc_feature: MA Experiment 20000436 PARAMETER Experiment Name: At_Drought_P Parameter: Age (day) Value: 7
  misc_feature: MA Experiment 20000436 PARAMETER Experiment Name: At_Drought_P Parameter: Organism Value: A. thaliana
  misc_feature: MA Experiment 20000436 PARAMETER Experiment Name: At_Drought_P Parameter: Plant Line Value: WS
  misc_feature: MA Experiment 20000436 PARAMETER Experiment Name: At_Drought_P Parameter: Timepoint (hr) Value: 12
  misc_feature: MA Experiment 20000436 PARAMETER Experiment Name: At_Drought_P Parameter: Tissue Value: Whole Plant
  misc_feature: MA Experiment 20000436 PARAMETER Experiment Name: At_Drought_P Parameter: Treatment Value: Drought vs. No Drought
  misc_feature: MA Experiment ID: 20000437 Result: Down-regulated in Transcription
  misc_feature: MA Experiment 20000437 PARAMETER Experiment Name: At_Drought_P Parameter: Age (day) Value: 8
  misc_feature: MA Experiment 20000437 PARAMETER Experiment Name: At_Drought_P Parameter: Organism Value: A. thaliana
  misc_feature: MA Experiment 20000437 PARAMETER Experiment Name: At_Drought_P Parameter: Plant Line Value: WS
  misc_feature: MA Experiment 20000437 PARAMETER Experiment Name: At_Drought_P Parameter: Timepoint (hr) Value: 24
  misc_feature: MA Experiment 20000437 PARAMETER Experiment Name: At_Drought_P Parameter: Tissue Value: Whole Plant
  misc_feature: MA Experiment 20000437 PARAMETER Experiment Name: At_Drought_P Parameter: Treatment Value: Drought vs. No Drought
  misc_feature: MA Experiment ID: 20000438 Result: Up-regulated in Transcription
  misc_feature: MA Experiment 20000438 PARAMETER Experiment Name: At_Shoots__P Parameter: Age (day) Value: 14
  misc_feature: MA Experiment 20000438 PARAMETER Experiment Name: At_Shoots__P Parameter: Tissue Value: Shoots vs. Whole Plant
  misc_feature: MA Experiment ID: 20000439 Result: Up-regulated in Transcription
  misc_feature: MA Experiment 20000439 PARAMETER Experiment Name: At_Roots__P Parameter: Age (day) Value: 14 vs. 21
  misc_feature: MA Experiment 20000439 PARAMETER Experiment Name: At_Roots__P Parameter: Organism Value: A. thaliana
  misc_feature: MA Experiment 20000439 PARAMETER Experiment Name: At_Roots__P Parameter: Tissue Value: Roots vs. Whole Plant
  misc_feature: MA Experiment ID: 20000495 Result: Up-regulated in Transcription
  misc_feature: MA Experiment 20000495 PARAMETER Experiment Name: At_Guard_Cells_P Parameter: Harvest Date Value: 8/2/2002
  misc_feature: MA Experiment 20000495 PARAMETER Experiment Name: At_Guard_Cells_P Parameter: Organism Value: A. thaliana
  misc_feature: MA Experiment 20000495 PARAMETER Experiment Name: At_Guard_Cells_P Parameter: Tissue Value: Guard Cells vs. Leaves
  misc_feature: MA Experiment ID: 20000573 Result: Down-regulated in Transcription
  misc_feature: MA Experiment 20000573 PARAMETER Experiment Name: At_100uM_ABA_Mutants__P Parameter: Organism Value: A. thaliana
  misc_feature: MA Experiment 20000573 PARAMETER Experiment Name: At_100uM_ABA_Mutants__P Parameter: Plant Line Value: CS22 vs. Ler wt
  misc_feature: MA Experiment 20000573 PARAMETER Experiment Name: At_100uM_ABA_Mutants__P Parameter: Timepoint (hr) Value: N/A
  misc_feature: MA Experiment 20000573 PARAMETER Experiment Name: At_100uM_ABA_Mutants__P Parameter: Tissue Value: Whole Plant
  misc_feature: MA Experiment 20000573 PARAMETER Experiment Name: At_100uM_ABA_Mutants__P Parameter: Treatment Value: None
  misc_feature: MA Experiment ID: 20000574 Result: Down-regulated in Transcription
  misc_feature: MA Experiment 20000574 PARAMETER Experiment Name: At_100uM_ABA_Mutants__P Parameter: Organism Value: A. thaliana
  misc_feature: MA Experiment 20000574 PARAMETER Experiment Name: At_100uM_ABA_Mutants__P Parameter: Plant Line Value: CS23 vs. Ler wt
  misc_feature: MA Experiment 20000574 PARAMETER Experiment Name: At_100uM_ABA_Mutants__P Parameter: Timepoint (hr) Value: N/A
  misc_feature: MA Experiment 20000574 PARAMETER Experiment Name: At_100uM_ABA_Mutants__P Parameter: Tissue Value: Whole Plant
  misc_feature: MA Experiment 20000574 PARAMETER Experiment Name: At_100uM_ABA_Mutants__P Parameter: Treatment Value: None
  misc_feature: MA Experiment ID: 20000794 Result: Down-regulated in Transcription
  misc_feature: MA Experiment 20000794 PARAMETER Experiment Name: At_Petals_P Parameter: Age (day) Value: 23-25 days
  misc_feature: MA Experiment 20000794 PARAMETER Experiment Name: At_Petals_P Parameter: Plant Line Value: WS
  misc_feature: MA Experiment 20000794 PARAMETER Experiment Name: At_Petals_P Parameter: Tissue Value: Petals vs. Whole plant
  misc_feature: MA Experiment ID: 20001554 Result: Down-regulated in Transcription
  misc_feature: MA Experiment 20001554 PARAMETER Experiment Name: At_Drought_Soil_Dry_P Parameter: Age (day) Value: 21
  misc_feature: MA Experiment 20001554 PARAMETER Experiment Name: At_Drought_Soil_Dry_P Parameter: Organism Value: A. thaliana
  misc_feature: MA Experiment 20001554 PARAMETER Experiment Name: At_Drought_Soil_Dry_P Parameter: Plant Line Value: WS
  misc_feature: MA Experiment 20001554 PARAMETER Experiment Name: At_Drought_Soil_Dry_P Parameter: Post Timepoint (hr) Value: None
  misc_feature: MA Experiment 20001554 PARAMETER Experiment Name: At_Drought_Soil_Dry_P Parameter: Post-Treatment Value: None
  misc_feature: MA Experiment 20001554 PARAMETER Experiment Name: At_Drought_Soil_Dry_P Parameter: Timepoint (day) Value: 7
  misc_feature: MA Experiment 20001554 PARAMETER Experiment Name: At_Drought_Soil_Dry_P Parameter: Treatment Value: Drought vs. No Drought
  misc_feature: MA Experiment ID: 20001555 Result: Down-regulated in Transcription
  misc_feature: MA Experiment 20001555 PARAMETER Experiment Name: At_Drought_Soil_Dry_P Parameter: Age (day) Value: 24
  misc_feature: MA Experiment 20001555 PARAMETER Experiment Name: At_Drought_Soil_Dry_P Parameter: Organism Value: A. thaliana
  misc_feature: MA Experiment 20001555 PARAMETER Experiment Name: At_Drought_Soil_Dry_P Parameter: Plant Line Value: WS
  misc_feature: MA Experiment 20001555 PARAMETER Experiment Name: At_Drought_Soil_Dry_P Parameter: Post Timepoint (hr) Value: None
  misc_feature: MA Experiment 20001555 PARAMETER Experiment Name: At_Drought_Soil_Dry_P Parameter: Post-Treatment Value: None
  misc_feature: MA Experiment 20001555 PARAMETER Experiment Name: At_Drought_Soil_Dry_P Parameter: Timepoint (day) Value: 10
  misc_feature: MA Experiment 20001555 PARAMETER Experiment Name: At_Drought_Soil_Dry_P Parameter: Treatment Value: Drought vs. No Drought
  misc_feature: MA Experiment ID: 20001556 Result: Down-regulated in Transcription
  misc_feature: MA Experiment 20001556 PARAMETER Experiment Name: At_Drought_Soil_Dry_P Parameter: Age (day) Value: 26
  misc_feature: MA Experiment 20001556 PARAMETER Experiment Name: At_Drought_Soil_Dry_P Parameter: Organism Value: A. thaliana
  misc_feature: MA Experiment 20001556 PARAMETER Experiment Name: At_Drought_Soil_Dry_P Parameter: Plant Line Value: WS
  misc_feature: MA Experiment 20001556 PARAMETER Experiment Name: At_Drought_Soil_Dry_P Parameter: Post Timepoint (hr) Value: None
  misc_feature: MA Experiment 20001556 PARAMETER Experiment Name: At_Drought_Soil_Dry_P Parameter: Post-Treatment Value: None
  misc_feature: MA Experiment 20001556 PARAMETER Experiment Name: At_Drought_Soil_Dry_P Parameter: Timepoint (day) Value: 12
  misc_feature: MA Experiment 20001556 PARAMETER Experiment Name: At_Drought_Soil_Dry_P Parameter: Treatment Value: Drought vs. No Drought
  misc_feature: MA Experiment ID: 20001560 Result: Down-regulated in Transcription
  misc_feature: MA Experiment 20001560 PARAMETER Experiment Name: At_Drought_Soil_Dry_P Parameter: Age (day) Value: 28
  misc_feature: MA Experiment 20001560 PARAMETER Experiment Name: At_Drought_Soil_Dry_P Parameter: Organism Value: A. thaliana
  misc_feature: MA Experiment 20001560 PARAMETER Experiment Name: At_Drought_Soil_Dry_P Parameter: Plant Line Value: WS
  misc_feature: MA Experiment 20001560 PARAMETER Experiment Name: At_Drought_Soil_Dry_P Parameter: Post Timepoint (hr) Value: None
  misc_feature: MA Experiment 20001560 PARAMETER Experiment Name: At_Drought_Soil_Dry_P Parameter: Post-Treatment Value: None
  misc_feature: MA Experiment 20001560 PARAMETER Experiment Name: At_Drought_Soil_Dry_P Parameter: Timepoint (day) Value: 14
  misc_feature: MA Experiment 20001560 PARAMETER Experiment Name: At_Drought_Soil_Dry_P Parameter: Treatment Value: Drought vs. No Drought
  misc_feature: MA Experiment ID: 20001757 Result: Up-regulated in Transcription
  misc_feature: MA Experiment 20001757 PARAMETER Experiment Name: At_50mM_NH4NO3_L-to-H_P Parameter: Timepoint (hr) Value: 6
  misc_feature: MA Experiment 20001757 PARAMETER Experiment Name: At_50mM_NH4NO3_L-to-H_P Parameter: Tissue Value: Leaf
  misc_feature: MA Experiment 20001757 PARAMETER Experiment Name: At_50mM_NH4NO3_L-to-H_P Parameter: Treatment Value: 50mM NH4NO3 vs 100mM Mannitol
gtctctctcaaagcctacacactcattctcactctgtttctacaaccctaaatctcttttcatttacagacagaaatggttagattcatagaagaaaacacaaaacttgtagaaaaagaaaccgggaacaaatcaaacaacgatgtaacaacaacgaagaagaaagctcttcaagatatcattatcaacaatggagtaggattgatcaattcatgggttgattcaatgagagcttgttcccctactcatcttaaatctttgttgaaacaaagctcttggctcacggaacatccatcagctttggatatgtttgaagagattcttcacctttctgaaggaaaacaaatcgttatgttcttggattatgatggcactttatctcccattgttgatgatccagatcgagctttcatgtctagaaagatgagaagaactgtgaggaaactagcaaactgtttcccgacggccatagttagtgggagatgcatagaaaaggtttataactttgtaaaactaactgagttgtactatgctggaagtcatggaatggacatcaaaggaccagagcaagggtccaaatatgagcaaattttacaggatagtaaatctcttctttgccaaccagctacagagttcctccccatgatcgacgaggtttatcataaattagtggagaaaacaaaatctactcccggagcccaagtagagaacaacaaattttgtgtctctgttcacttccgacgcgtagatgaaaataactggagtgatttggctaaccaagttcgatcagtaatgaaagactaccctaagctccgtcttactcaaggaagaaaagttttggaggttcgtccgattattaaatgggacaaaggcaaagcactcgagtttttattagagtcacttggatacgctaattgtaccgacgttttccctctttatatcggagatgatcgcaccgacgaagatgcattcaaggtattgagagaacgaagacaaggtcttggcattcttgtatctaaatttccaaaggagactagcgcgtcttattcactgcaagaacccgatgaggttatggagttcttgcaacgtttagtggaatggaaacaattgagatctggagcatgatgagagctataactacagaagaatcgtttcttcttaattagtaacttgttaattttattttattttcttgctctcatatattgtactcaacgcgtatgtaaaatgtttataagaaaattgtagatccatcattctcaagg

SEQ ID NO: 107565 - protein, 349 aa, Arabidopsis thaliana
  peptide (1)..(349): Ceres Seq. ID no. 13650710
  misc_feature (94)..(330): Pfam Name: Trehalose-phosphatase Pfam Description: Trehalose-phosphatase
  misc_feature (1)..(349): Homolog of NCBI NO: 30692524 NR Description: trehalose-6-phosphate phosphatase, putative thaliana] >gi|26452744|dbj|BAC43453.1| putative protein thaliana] >gi|28973301|gb|AAO63975.1| unknown protein
  misc_feature (78)..(326): Homolog of NCBI NO: 7487212 NR Description: hypothetical protein T19P19.160 - Arabidopsis >gi|3080446|emb|CAA18763.1| puative protein [Arabidopsis >gi|7270961|emb|CAB80640.1| puative protein [Arabidopsis
  misc_feature (24)..(346): Homolog of NCBI NO: 30683008 NR Description: trehalose-6-phosphate phosphatase, putative
  misc_feature (78)..(349): Homolog of NCBI NO: 15227161 NR Description: trehalose-6-phosphate phosphatase, putative
  misc_feature (24)..(340): Homolog of NCBI NO: 15238360 NR Description: trehalose-6-phosphate phosphatase, putative
  misc_feature (24)..(336): Homolog of NCBI NO: 11282598 NR Description: trehalose-6-phosphate phosphatase-like protein -
  misc_feature (24)..(345): Homolog of NCBI NO: 18399940 NR Description: trehalose-6-phosphate phosphatase, putative
  misc_feature (24)..(345): Homolog of NCBI NO: 21554408 NR Description: trehalose-phosphatase, putative [Arabidopsis
  misc_feature (24)..(345): Homolog of NCBI NO: 25354597 NR Description: probable trehalose-phosphatase [imported] -
  misc_feature (44)..(348): Homolog of NCBI NO: 15218205 NR Description: trehalose-6-phosphate phosphatase (TPPB) thaliana] >gi|25354598|pir||H96809 protein hypothetical protein
MVRFIEENTKLVEKETGNKSNNDVTTTKKKALQDIIINNGVGLINSWVDSMRACSPTHLKSLLKQSSWLTEHPSALDMFEEILHLSEGKQIVMFLDYDGTLSPIVDDPDRAFMSRKMRRTVRKLANCFPTAIVSGRCIEKVYNFVKLTELYYAGSHGMDIKGPEQGSKYEQILQDSKSLLCQPATEFLPMIDEVYHKLVEKTKSTPGAQVENNKFCVSVHFRRVDENNWSDLANQVRSVMKDYPKLRLTQGRKVLEVRPIIKWDKGKALEFLLESLGYANCTDVFPLYIGDDRTDEDAFKVLRERRQGLGILVSKFPKETSASYSLQEPDEVMEFLQRLVEWKQLRSGA

SEQ ID NO: 107566 - protein, 299 aa, Arabidopsis thaliana
  peptide (1)..(299): Ceres Seq. ID no. 13650711
  misc_feature (44)..(280): Pfam Name: Trehalose-phosphatase Pfam Description: Trehalose-phosphatase
  misc_feature (1)..(299): Homolog of NCBI NO: 30692524 NR Description: trehalose-6-phosphate phosphatase, putative thaliana] >gi|26452744|dbj|BAC43453.1| putative protein thaliana] >gi|28973301|gb|AAO63975.1| unknown protein
  misc_feature (28)..(276): Homolog of NCBI NO: 7487212 NR Description: hypothetical protein T19P19.160 - Arabidopsis >gi|3080446|emb|CAA18763.1| puative protein [Arabidopsis >gi|7270961|emb|CAB80640.1| puative protein [Arabidopsis
  misc_feature (1)..(296): Homolog of NCBI NO: 30683008 NR Description: trehalose-6-phosphate phosphatase, putative
  misc_feature (28)..(299): Homolog of NCBI NO: 15227161 NR Description: trehalose-6-phosphate phosphatase, putative
  misc_feature (1)..(290): Homolog of NCBI NO: 15238360 NR Description: trehalose-6-phosphate phosphatase, putative
  misc_feature (1)..(286): Homolog of NCBI NO: 11282598 NR Description: trehalose-6-phosphate phosphatase-like protein -
  misc_feature (1)..(295): Homolog of NCBI NO: 18399940 NR Description: trehalose-6-phosphate phosphatase, putative
  misc_feature (1)..(295): Homolog of NCBI NO: 21554408 NR Description: trehalose-phosphatase, putative [Arabidopsis
  misc_feature (1)..(295): Homolog of NCBI NO: 25354597 NR Description: probable trehalose-phosphatase [imported] -
  misc_feature (1)..(298): Homolog of NCBI NO: 15218205 NR Description: trehalose-6-phosphate phosphatase (TPPB) thaliana] >gi|25354598|pir||H96809 protein hypothetical protein
MRACSPTHLKSLLKQSSWLTEHPSALDMFEEILHLSEGKQIVMFLDYDGTLSPIVDDPDRAFMSRKMRRTVRKLANCFPTAIVSGRCIEKVYNFVKLTELYYAGSHGMDIKGPEQGSKYEQILQDSKSLLCQPATEFLPMIDEVYHKLVEKTKSTPGAQVENNKFCVSVHFRRVDENNWSDLANQVRSVMKDYPKLRLTQGRKVLEVRPIIKWDKGKALEFLLESLGYANCTDVFPLYIGDDRTDEDAFKVLRERRQGLGILVSKFPKETSASYSLQEPDEVMEFLQRLVEWKQLRSGA

SEQ ID NO: 107567 - protein, 272 aa, Arabidopsis thaliana
  peptide (1)..(272): Ceres Seq. ID no. 13650712
  misc_feature (17)..(253): Pfam Name: Trehalose-phosphatase Pfam Description: Trehalose-phosphatase
  misc_feature (1)..(272): Homolog of NCBI NO: 30692524 NR Description: trehalose-6-phosphate phosphatase, putative thaliana] >gi|26452744|dbj|BAC43453.1| putative protein thaliana] >gi|28973301|gb|AAO63975.1| unknown protein
  misc_feature (1)..(249): Homolog of NCBI NO: 7487212 NR Description: hypothetical protein T19P19.160 - Arabidopsis >gi|3080446|emb|CAA18763.1| puative protein [Arabidopsis >gi|7270961|emb|CAB80640.1| puative protein [Arabidopsis
  misc_feature (1)..(269): Homolog of NCBI NO: 30683008 NR Description: trehalose-6-phosphate phosphatase, putative
  misc_feature (1)..(272): Homolog of NCBI NO: 15227161 NR Description: trehalose-6-phosphate phosphatase, putative
  misc_feature (1)..(263): Homolog of NCBI NO: 15238360 NR Description: trehalose-6-phosphate phosphatase, putative
  misc_feature (1)..(259): Homolog of NCBI NO: 11282598 NR Description: trehalose-6-phosphate phosphatase-like protein -
  misc_feature (1)..(268): Homolog of NCBI NO: 18399940 NR Description: trehalose-6-phosphate phosphatase, putative
  misc_feature (1)..(268): Homolog of NCBI NO: 21554408 NR Description: trehalose-phosphatase, putative [Arabidopsis
  misc_feature (1)..(268): Homolog of NCBI NO: 25354597 NR Description: probable trehalose-phosphatase [imported] -
  misc_feature (1)..(271): Homolog of NCBI NO: 15218205 NR Description: trehalose-6-phosphate phosphatase (TPPB) thaliana] >gi|25354598|pir||H96809 protein hypothetical protein
MFEEILHLSEGKQIVMFLDYDGTLSPIVDDPDRAFMSRKMRRTVRKLANCFPTAIVSGRCIEKVYNFVKLTELYYAGSHGMDIKGPEQGSKYEQILQDSKSLLCQPATEFLPMIDEVYHKLVEKTKSTPGAQVENNKFCVSVHFRRVDENNWSDLANQVRSVMKDYPKLRLTQGRKVLEVRPIIKWDKGKALEFLLESLGYANCTDVFPLYIGDDRTDEDAFKVLRERRQGLGILVSKFPKETSASYSLQEPDEVMEFLQRLVEWKQLRSGA

SEQ ID NO: 107568 - DNA, 2117 bp, Arabidopsis thaliana
  misc_feature (1)..(2117): Ceres Seq. ID no. 13650719
  misc_feature: MA Experiment ID: 20000307 Result: Up-regulated in Transcription
  misc_feature: MA Experiment 20000307 PARAMETER Experiment Name: At_Germinating_Seeds_Sub_P Parameter: Age (hr) Value: 24 vs. 0
  misc_feature: MA Experiment 20000307 PARAMETER Experiment Name: At_Germinating_Seeds_Sub_P Parameter: Organism Value: A. thaliana
  misc_feature: MA Experiment 20000307 PARAMETER Experiment Name: At_Germinating_Seeds_Sub_P Parameter: Plant Line Value: WS
  misc_feature: MA Experiment 20000307 PARAMETER Experiment Name: At_Germinating_Seeds_Sub_P Parameter: Tissue Value: Germinating Seeds
  misc_feature: MA Experiment ID: 20000315 Result: Down-regulated in Transcription
  misc_feature: MA Experiment 20000315 PARAMETER Experiment Name: At_14day_Shoots-Roots_Sub_P Parameter: Age (day) Value: 14
  misc_feature: MA Experiment 20000315 PARAMETER Experiment Name: At_14day_Shoots-Roots_Sub_P Parameter: Organism Value: A. thaliana
  misc_feature: MA Experiment 20000315 PARAMETER Experiment Name: At_14day_Shoots-Roots_Sub_P Parameter: Plant Line Value: WS
  misc_feature: MA Experiment 20000315 PARAMETER Experiment Name: At_14day_Shoots-Roots_Sub_P Parameter: Tissue Value: Shoots vs. Whole Plant
  misc_feature: MA Experiment ID: 20000327 Result: Down-regulated in Transcription
  misc_feature: MA Experiment 20000327 PARAMETER Experiment Name: At_42deg_Heat_Sub_P Parameter: Age (day) Value: 14
  misc_feature: MA Experiment 20000327 PARAMETER Experiment Name: At_42deg_Heat_Sub_P Parameter: Organism Value: A. thaliana
  misc_feature: MA Experiment 20000327 PARAMETER Experiment Name: At_42deg_Heat_Sub_P Parameter: Plant Line Value: WS
  misc_feature: MA Experiment 20000327 PARAMETER Experiment Name: At_42deg_Heat_Sub_P Parameter: Temperature (deg C) Value: 42 vs. 22
  misc_feature: MA Experiment 20000327 PARAMETER Experiment Name: At_42deg_Heat_Sub_P Parameter: Timepoint (hr) Value: 1
  misc_feature: MA Experiment 20000327 PARAMETER Experiment Name: At_42deg_Heat_Sub_P Parameter: Tissue Value: Aerial
  misc_feature: MA Experiment ID: 20000328 Result: Down-regulated in Transcription
  misc_feature: MA Experiment 20000328 PARAMETER Experiment Name: At_42deg_Heat_Sub_P Parameter: Age (day) Value: 14
  misc_feature: MA Experiment 20000328 PARAMETER Experiment Name: At_42deg_Heat_Sub_P Parameter: Organism Value: A. thaliana
  misc_feature: MA Experiment 20000328 PARAMETER Experiment Name: At_42deg_Heat_Sub_P Parameter: Plant Line Value: WS
  misc_feature: MA Experiment 20000328 PARAMETER Experiment Name: At_42deg_Heat_Sub_P Parameter: Temperature (deg C) Value: 42 vs. 22
  misc_feature: MA Experiment 20000328 PARAMETER Experiment Name: At_42deg_Heat_Sub_P Parameter: Timepoint (hr) Value: 6
  misc_feature: MA Experiment 20000328 PARAMETER Experiment Name: At_42deg_Heat_Sub_P Parameter: Tissue Value: Aerial
  misc_feature: MA Experiment ID: 20000347 Result: Up-regulated in Transcription
  misc_feature: MA Experiment 20000347 PARAMETER Experiment Name: At_2mM_SA_Sub_P Parameter: Age (day) Value: 14
  misc_feature: MA Experiment 20000347 PARAMETER Experiment Name: At_2mM_SA_Sub_P Parameter: Organism Value: A. thaliana
  misc_feature: MA Experiment 20000347 PARAMETER Experiment Name: At_2mM_SA_Sub_P Parameter: Plant Line Value: WS
  misc_feature: MA Experiment 20000347 PARAMETER Experiment Name: At_2mM_SA_Sub_P Parameter: Timepoint (hr) Value: 6
  misc_feature: MA Experiment 20000347 PARAMETER Experiment Name: At_2mM_SA_Sub_P Parameter: Tissue Value: Aerial
  misc_feature: MA Experiment 20000347 PARAMETER Experiment Name: At_2mM_SA_Sub_P Parameter: Treatment Value: 2mM SA vs. No Treatment
  misc_feature: MA Experiment ID: 20000355 Result: Down-regulated in Transcription
  misc_feature: MA Experiment 20000355 PARAMETER Experiment Name: At_Siliques_Sub_P Parameter: Age (day) Value: 21
  misc_feature: MA Experiment 20000355 PARAMETER Experiment Name: At_Siliques_Sub_P Parameter: Organism Value: A. thaliana
  misc_feature: MA Experiment 20000355 PARAMETER Experiment Name: At_Siliques_Sub_P Parameter: Plant Line Value: WS
  misc_feature: MA Experiment 20000355 PARAMETER Experiment Name: At_Siliques_Sub_P Parameter: Tissue Value: Less Than 5mm Siliques vs. Whole Plant
  misc_feature: MA Experiment ID: 20000440 Result: Down-regulated in Transcription
  misc_feature: MA Experiment 20000440 PARAMETER Experiment Name: At_Closed-Flower__Sub_P Parameter: Tissue Value: Closed Flower vs. Whole Plant
acattatctgaaacccagatcgaggaaaaggaaccatgtcttctctgatctctttcatcttccttttccttttctcatccatcacagcttctgctcaaaatactttctacctatatcataattgttcagtcacgacgactttctcaagtaacagcacttactccaccaatctcaaaacccttttgtcctctctctcttcccttaacgcttcttcttactccaccggattccaaaccgccacggcgggacaggcccccgacagggtcaccggacttttcctctgccgcgtcgacgtctcgtcggaagtttgccgtagctgcgtcacctttgccgtaaacgaaacgttgactcggtgtccaaaagataaagaaggcgtgttctattacgagcagtgtctgctcagatactctaacaggaatatagtagccactctaaacaccgatggaggaatgttcatgcagagcgctaggaatcctctatcagtcaaacaagatcagttcagagatttggtcttgacccccatgaacttagccgccgttgaagccgccaggagtttcaaaaaatgggctgtgagaaaaattgatttaaatgcatcccagagtttgtacggaatggttcggtgcactcctgatcttagggaacaagactgcttagactgtctgaaaataggcatcaatcaagtaacctatgacaaaattgggggaaggattcttctgccgagctgtgcttcaagatacgataattacgcgttttacaacgaatctaatgttggaacacctcaagattcatcaccacgtcctggaaaaggtggaaactcctctgtcataattattgcagttgttgttccaatcactgtactttttcttctattagtagctgtttttagtgtcagggctaaaaataagaggacgcttaatgagaaggaaccagtagctgaagttttcttttccagatgggaatgatattacgactgcaggatcacttcagtttgattttaaggcaattgaggcagcaacgaattgctttttgccaattaacaagctaggtcaaggtggtttcggcgaagtttacaagggtacattgagtagtggactacaagttgcggtgaagagactatcgaagacatcaggacaaggtgaaaaagagtttgaaaacgaagttgttgttgttgcaaagctccaacatagaaatttggtaaagctgcttggttattgtttggaaggagaagaaaaaatacttgtctacgagtttgtgcccaacaagagccttgatcacttcctctttgactctacgatgaaaatgaagctagactggacaagaaggtacaagatcataggaggaattgctagaggaattctttatcttcatcaagattcacgactcacaattatacatcgagacctcaaagcagggaacatcctcttggatgatgatatgaatcctaaaattgcagattttggaatggcgagaatatttgggatggaccaaacagaagccatgacaagaagagtagttggaacttatggatacatgtctcccgagtatgcgatgtacggccaattctccatgaaatcagatgtgtacagttttggcgtcttagtacttgagattataagcggcatgaagaatagtagtctctatcaaatggatgaaagtgttggcaacttggttacatatacttggagactatggagcaatgggtcgccatcagagcttgtagatccgtcatttggagataattatcaaacaagcgaaattactaggtgcatccatatcgctttactatgtgttcaggaagatgctgaagatcgtccaaccatgtcatcgatagttcaaatgctcactactagcttgatcgctctcgctgagcctagaccacctggatttttcttccgaagcaagcaggaacaagcaggtccacctattgattcatctacgcattgttcagtcgacgaagcttccattactcgtgtaactcctcgttgaagacaaaactattcgttaatctaaacatttgtgatatatgattttagactattaagatcgacagtgaacaaaaattcatgtaagttaaactggttttattgtttattttctttataaattctttaattaac

SEQ ID NO: 107569 - protein, 308 aa, Arabidopsis thaliana
  peptide (1)..(308): Ceres Seq. ID no. 13650720
  misc_feature (1)..(255): Homolog of NCBI NO: 15236446 NR Description: serine/threonine kinase [Arabidopsis thaliana]
  misc_feature (281)..(301): Homolog of NCBI NO: 15236446 NR Description: serine/threonine kinase [Arabidopsis thaliana]
  misc_feature (1)..(293): Homolog of NCBI NO: 15236447 NR Description: receptor-like protein kinase, putative
  misc_feature (16)..(255): Homolog of NCBI NO: 15236453 NR Description: receptor-like protein kinase, putative
  misc_feature (252)..(302): Homolog of NCBI NO: 15236453 NR Description: receptor-like protein kinase, putative
  misc_feature (4)..(254): Homolog of NCBI NO: 15231262 NR Description: receptor-like protein kinase, putative
  misc_feature (1)..(291): Homolog of NCBI NO: 30686087 NR Description: serine/threonine kinase -related protein
  misc_feature (1)..(291): Homolog of NCBI NO: 24417476 NR Description: unknown [Arabidopsis thaliana]
  misc_feature (5)..(297): Homolog of NCBI NO: 18416074 NR Description: protein kinase - like protein [Arabidopsis
  misc_feature (5)..(290): Homolog of NCBI NO: 30686059 NR Description: protein kinase - like protein [Arabidopsis >gi|23296342|gb|AAN13047.1| putative protein kinase [Arabidopsis
MSSLISFIFLFLFSSITASAQNTFYLYHNCSVTTTFSSNSTYSTNLKTLLSSLSSLNASSYSTGFQTATAGQAPDRVTGLFLCRVDVSSEVCRSCVTFAVNETLTRCPKDKEGVFYYEQCLLRYSNRNIVATLNTDGGMFMQSARNPLSVKQDQFRDLVLTPMNLAAVEAARSFKKWAVRKIDLNASQSLYGMVRCTPDLREQDCLDCLKIGINQVTYDKIGGRILLPSCASRYDNYAFYNESNVGTPQDSSPRPGKGGNSSVIIIAVVVPITVLFLLLVAVFSVRAKNKRTLNEKEPVAEVFFSRWE

SEQ ID NO: 107570 - protein, 230 aa, Arabidopsis thaliana
  peptide (1)..(230): Ceres Seq. ID no. 13650721
  misc_feature (1)..(183): Pfam Name: Protein kinase domain Pfam Description: Protein kinase domain
  misc_feature (1)..(128): Homolog of NCBI NO: 15236446 NR Description: serine/threonine kinase [Arabidopsis thaliana]
  misc_feature (164)..(230): Homolog of NCBI NO: 15236446 NR Description: serine/threonine kinase [Arabidopsis thaliana]
  misc_feature (1)..(230): Homolog of NCBI NO: 15236447 NR Description: receptor-like protein kinase, putative
  misc_feature (1)..(230): Homolog of NCBI NO: 15236453 NR Description: receptor-like protein kinase, putative
  misc_feature (1)..(230): Homolog of NCBI NO: 15231262 NR Description: receptor-like protein kinase, putative
  misc_feature (1)..(230): Homolog of NCBI NO: 30686087 NR Description: serine/threonine kinase -related protein
  misc_feature (1)..(230): Homolog of NCBI NO: 24417476 NR Description: unknown [Arabidopsis thaliana]
  misc_feature (1)..(230): Homolog of NCBI NO: 18416074 NR Description: protein kinase - like protein [Arabidopsis
  misc_feature (1)..(230): Homolog of NCBI NO: 30686059 NR Description: protein kinase - like protein [Arabidopsis >gi|23296342|gb|AAN13047.1| putative protein kinase [Arabidopsis
  misc_feature (1)..(230): Homolog of NCBI NO: 13506745 NR Description: receptor-like protein kinase 4 [Arabidopsis
MKMKLDWTRRYKIIGGIARGILYLHQDSRLTIIHRDLKAGNILLDDDMNPKIADFGMARIFGMDQTEAMTRRVVGTYGYMSPEYAMYGQFSMKSDVYSFGVLVLEIISGMKNSSLYQMDESVGNLVTYTWRLWSNGSPSELVDPSFGDNYQTSEITRCIHIALLCVQEDAEDRPTMSSIVQMLTTSLIALAEPRPPGFFFRSKQEQAGPPIDSSTHCSVDEASITRVTPR

SEQ ID NO: 107571 - protein, 228 aa, Arabidopsis thaliana
  peptide (1)..(228): Ceres Seq. ID no. 13650722
  misc_feature (1)..(181): Pfam Name: Protein kinase domain Pfam Description: Protein kinase domain
  misc_feature (1)..(126): Homolog of NCBI NO: 15236446 NR Description: serine/threonine kinase [Arabidopsis thaliana]
  misc_feature (162)..(228): Homolog of NCBI NO: 15236446 NR Description: serine/threonine kinase [Arabidopsis thaliana]
  misc_feature (1)..(228): Homolog of NCBI NO: 15236447 NR Description: receptor-like protein kinase, putative
  misc_feature (1)..(228): Homolog of NCBI NO: 15236453 NR Description: receptor-like protein kinase, putative
  misc_feature (1)..(228): Homolog of NCBI NO: 15231262 NR Description: receptor-like protein kinase, putative
  misc_feature (1)..(228): Homolog of NCBI NO: 30686087 NR Description: serine/threonine kinase -related protein
  misc_feature (1)..(228): Homolog of NCBI NO: 24417476 NR Description: unknown [Arabidopsis thaliana]
  misc_feature (1)..(228): Homolog of NCBI NO: 18416074 NR Description: protein kinase - like protein [Arabidopsis
  misc_feature (1)..(228): Homolog of NCBI NO: 30686059 NR Description: protein kinase - like protein [Arabidopsis >gi|23296342|gb|AAN13047.1| putative protein kinase [Arabidopsis
  misc_feature (1)..(228): Homolog of NCBI NO: 13506745 NR Description: receptor-like protein kinase 4 [Arabidopsis
MKLDWTRRYKIIGGIARGILYLHQDSRLTIIHRDLKAGNILLDDDMNPKIADFGMARIFGMDQTEAMTRRVVGTYGYMSPEYAMYGQFSMKSDVYSFGVLVLEIISGMKNSSLYQMDESVGNLVTYTWRLWSNGSPSELVDPSFGDNYQTSEITRCIHIALLCVQEDAEDRPTMSSIVQMLTTSLIALAEPRPPGFFFRSKQEQAGPPIDSSTHCSVDEASITRVTPR

SEQ ID NO: 107572 - DNA, 1122 bp, Arabidopsis thaliana
  misc_feature (1)..(1122): Ceres Seq. ID no. 13650734
  misc_feature: MA Experiment ID: 20000171 Result: Down-regulated in Transcription
  misc_feature: MA Experiment 20000171 PARAMETER Experiment Name: At_42deg_Heat_P Parameter: Age (day) Value: 14
  misc_feature: MA Experiment 20000171 PARAMETER Experiment Name: At_42deg_Heat_P Parameter: Organism Value: A. thaliana
  misc_feature: MA Experiment 20000171 PARAMETER Experiment Name: At_42deg_Heat_P Parameter: Plant Line Value: WS
  misc_feature: MA Experiment 20000171 PARAMETER Experiment Name: At_42deg_Heat_P Parameter: Temperature (deg C) Value: 42 vs. 22
  misc_feature: MA Experiment 20000171 PARAMETER Experiment Name: At_42deg_Heat_P Parameter: Timepoint (hr) Value: 1
  misc_feature: MA Experiment 20000171 PARAMETER Experiment Name: At_42deg_Heat_P Parameter: Tissue Value: Aerial
  misc_feature: MA Experiment ID: 20000173 Result: Down-regulated in Transcription
  misc_feature: MA Experiment 20000173 PARAMETER Experiment Name: At_42deg_Heat_P Parameter: Age (day) Value: 14
  misc_feature: MA Experiment 20000173 PARAMETER Experiment Name: At_42deg_Heat_P Parameter: Organism Value: A. thaliana
  misc_feature: MA Experiment 20000173 PARAMETER Experiment Name: At_42deg_Heat_P Parameter: Plant Line Value: WS
  misc_feature: MA Experiment 20000173 PARAMETER Experiment Name: At_42deg_Heat_P Parameter: Temperature (deg C) Value: 42 vs. 22
  misc_feature: MA Experiment 20000173 PARAMETER Experiment Name: At_42deg_Heat_P Parameter: Timepoint (hr) Value: 6
  misc_feature: MA Experiment 20000173 PARAMETER Experiment Name: At_42deg_Heat_P Parameter: Tissue Value: Aerial
  misc_feature: MA Experiment ID: 20000180 Result: Up-regulated in Transcription
  misc_feature: MA Experiment 20000180 PARAMETER Experiment Name: At_Germinating_Seeds_P Parameter: Age (hr) Value: 24 vs. 0
  misc_feature: MA Experiment 20000180 PARAMETER Experiment Name: At_Germinating_Seeds_P Parameter: Tissue Value: Germinating Seeds
  misc_feature: MA Experiment ID: 20000182 Result: Up-regulated in Transcription
  misc_feature: MA Experiment 20000182 PARAMETER Experiment Name: At_2mM_SA_P Parameter: Age (day) Value: 14
  misc_feature: MA Experiment 20000182 PARAMETER Experiment Name: At_2mM_SA_P Parameter: Organism Value: A. thaliana
  misc_feature: MA Experiment 20000182 PARAMETER Experiment Name: At_2mM_SA_P Parameter: Plant Line Value: WS
  misc_feature: MA Experiment 20000182 PARAMETER Experiment Name: At_2mM_SA_P Parameter: Timepoint (hr) Value: 6
  misc_feature: MA Experiment 20000182 PARAMETER Experiment Name: At_2mM_SA_P Parameter: Tissue Value: Aerial
  misc_feature: MA Experiment 20000182 PARAMETER Experiment Name: At_2mM_SA_P Parameter: Treatment Value: 2mM SA vs. No Treatment
  misc_feature: MA Experiment ID: 20000184 Result: Down-regulated in Transcription
  misc_feature: MA Experiment 20000184 PARAMETER Experiment Name: At_Shoots__P Parameter: Age (day) Value: 7
  misc_feature: MA Experiment 20000184 PARAMETER Experiment Name: At_Shoots__P Parameter: Tissue Value: Shoots vs. Whole Plant
  misc_feature: MA Experiment ID: 20000185 Result: Down-regulated in Transcription
  misc_feature: MA Experiment 20000185 PARAMETER Experiment Name: At_Roots__P Parameter: Age (day) Value: 7 vs. 21
  misc_feature: MA Experiment 20000185 PARAMETER Experiment Name: At_Roots__P Parameter: Organism Value: A. thaliana
  misc_feature: MA Experiment 20000185 PARAMETER Experiment Name: At_Roots__P Parameter: Tissue Value: Roots vs. Whole Plant
  misc_feature: MA Experiment ID: 20000227 Result: Down-regulated in Transcription
  misc_feature: MA Experiment 20000227 PARAMETER Experiment Name: At_Root-Tips-vs-Tops_P Parameter: Tissue Value: Root Tips vs. Root Tops
  misc_feature: MA Experiment ID: 20000234 Result: Down-regulated in Transcription
  misc_feature: MA Experiment 20000234 PARAMETER Experiment Name: At_Siliques_P Parameter: Age (day) Value: 21
  misc_feature: MA Experiment 20000234 PARAMETER Experiment Name: At_Siliques_P Parameter: Organism Value: A. thaliana
  misc_feature: MA Experiment 20000234 PARAMETER Experiment Name: At_Siliques_P Parameter: Plant Line Value: WS
  misc_feature: MA Experiment 20000234 PARAMETER Experiment Name: At_Siliques_P Parameter: Tissue Value: Less Than 5mm Siliques vs. Whole Plant
  misc_feature: MA Experiment ID: 20000235 Result: Down-regulated in Transcription
  misc_feature: MA Experiment 20000235 PARAMETER Experiment Name: At_Siliques_P Parameter: Age (day) Value: 21
  misc_feature: MA Experiment 20000235 PARAMETER Experiment Name: At_Siliques_P Parameter: Organism Value: A. thaliana
  misc_feature: MA Experiment 20000235 PARAMETER Experiment Name: At_Siliques_P Parameter: Plant Line Value: WS
  misc_feature: MA Experiment 20000235 PARAMETER Experiment Name: At_Siliques_P Parameter: Tissue Value: 5-10mm Siliques vs. Whole Plant
  misc_feature: MA Experiment ID: 20000264 Result: Down-regulated in Transcription
  misc_feature: MA Experiment 20000264 PARAMETER Experiment Name: At_Open_Flower_P Parameter: Age (day) Value: 21
  misc_feature: MA Experiment 20000264 PARAMETER Experiment Name: At_Open_Flower_P Parameter: Plant Line Value: WS
  misc_feature: MA Experiment 20000264 PARAMETER Experiment Name: At_Open_Flower_P Parameter: Tissue Value: Open Flower vs. Whole Plant
  misc_feature: MA Experiment ID: 20000265 Result: Down-regulated in Transcription
  misc_feature: MA Experiment 20000265 PARAMETER Experiment Name: At_Open_Flower_P Parameter: Age (day) Value: 21
  misc_feature: MA Experiment 20000265 PARAMETER Experiment Name: At_Open_Flower_P Parameter: Plant Line Value: WS
  misc_feature: MA Experiment 20000265 PARAMETER Experiment Name: At_Open_Flower_P Parameter: Tissue Value: Closed Flower vs. Whole Plant
  misc_feature: MA Experiment ID: 20000286 Result: Down-regulated in Transcription
  misc_feature: MA Experiment 20000286 PARAMETER Experiment Name: At_Open_Flower_P Parameter: Age (day) Value: 21
  misc_feature: MA Experiment 20000286 PARAMETER Experiment Name: At_Open_Flower_P Parameter: Plant Line Value: WS
  misc_feature: MA Experiment 20000286 PARAMETER Experiment Name: At_Open_Flower_P Parameter: Tissue Value: Half Open vs. Whole Plant
  misc_feature: MA Experiment ID: 20000308 Result: Up-regulated in Transcription
  misc_feature: MA Experiment 20000308 PARAMETER Experiment Name: At_100mM_NaCl__P Parameter: Age (day) Value: 17
  misc_feature: MA Experiment 20000308 PARAMETER Experiment Name: At_100mM_NaCl__P Parameter: Organism Value: A. thaliana
  misc_feature: MA Experiment 20000308 PARAMETER Experiment Name: At_100mM_NaCl__P Parameter: Plant Line Value: WS
  misc_feature: MA Experiment 20000308 PARAMETER Experiment Name: At_100mM_NaCl__P Parameter: Timepoint (hr) Value: 72
  misc_feature: MA Experiment 20000308 PARAMETER Experiment Name: At_100mM_NaCl__P Parameter: Tissue Value: Whole Plant
  misc_feature: MA Experiment 20000308 PARAMETER Experiment Name: At_100mM_NaCl__P Parameter: Treatment Value: 100mM NaCl vs. No Treatment
  misc_feature: MA Experiment ID: 20000438 Result: Down-regulated in Transcription
  misc_feature: MA Experiment 20000438 PARAMETER Experiment Name: At_Shoots__P Parameter: Age (day) Value: 14
  misc_feature: MA Experiment 20000438 PARAMETER Experiment Name: At_Shoots__P Parameter: Tissue Value: Shoots vs. Whole Plant
  misc_feature: MA Experiment ID: 20000439 Result: Down-regulated in Transcription
  misc_feature: MA Experiment 20000439 PARAMETER Experiment Name: At_Roots__P Parameter: Age (day) Value: 14 vs. 21
  misc_feature: MA Experiment 20000439 PARAMETER Experiment Name: At_Roots__P Parameter: Organism Value: A. thaliana
  misc_feature: MA Experiment 20000439 PARAMETER Experiment Name: At_Roots__P Parameter: Tissue Value: Roots vs. Whole Plant
  misc_feature: MA Experiment ID: 20000451 Result: Up-regulated in Transcription
  misc_feature: MA Experiment 20000451 PARAMETER Experiment Name: At_CS6879_Shoots-Roots_P Parameter: Age (day) Value: 14
  misc_feature: MA Experiment 20000451 PARAMETER Experiment Name: At_CS6879_Shoots-Roots_P Parameter: Organism Value: A. thaliana
  misc_feature: MA Experiment 20000451 PARAMETER Experiment Name: At_CS6879_Shoots-Roots_P Parameter: Plant Line Value: CS6879 vs. WS
  misc_feature: MA Experiment 20000451 PARAMETER Experiment Name: At_CS6879_Shoots-Roots_P Parameter: Tissue Value: Roots
  misc_feature: MA Experiment ID: 20000495 Result: Down-regulated in Transcription
  misc_feature: MA Experiment 20000495 PARAMETER Experiment Name: At_Guard_Cells_P Parameter: Harvest Date Value: 8/2/2002
  misc_feature: MA Experiment 20000495 PARAMETER Experiment Name: At_Guard_Cells_P Parameter: Organism Value: A. thaliana
  misc_feature: MA Experiment 20000495 PARAMETER Experiment Name: At_Guard_Cells_P Parameter: Tissue Value: Guard Cells vs. Leaves
  misc_feature: MA Experiment ID: 20000496 Result: Up-regulated in Transcription
  misc_feature: MA Experiment 20000496 PARAMETER Experiment Name: At_Guard_Cells_P Parameter: Harvest Date Value: 7/19/2002
  misc_feature: MA Experiment 20000496 PARAMETER Experiment Name: At_Guard_Cells_P Parameter: Organism Value: Canola
  misc_feature: MA Experiment 20000496 PARAMETER Experiment Name: At_Guard_Cells_P Parameter: Tissue Value: Guard Cells vs. Leaves
  misc_feature: MA Experiment ID: 20000606 Result: Up-regulated in Transcription
  misc_feature: MA Experiment 20000606 PARAMETER Experiment Name: At_CS8548_Mutant_P Parameter: Age (day) Value: 14
  misc_feature: MA Experiment 20000606 PARAMETER Experiment Name: At_CS8548_Mutant_P Parameter: Plant Line Value: CS8548 vs. wt
  misc_feature: MA Experiment 20000606 PARAMETER Experiment Name: At_CS8548_Mutant_P Parameter: Tissue Value: Whole Plant
  misc_feature: MA Experiment ID: 20000709 Result: Down-regulated in Transcription
  misc_feature: MA Experiment 20000709 PARAMETER Experiment Name: At_15mM_NH4NO3_L-to-H_P Parameter: Age (hr) Value: 14
  misc_feature: MA Experiment 20000709 PARAMETER Experiment Name: At_15mM_NH4NO3_L-to-H_P Parameter: Organism Value: A. thaliana
  misc_feature: MA Experiment 20000709 PARAMETER Experiment Name: At_15mM_NH4NO3_L-to-H_P Parameter: Plant Line Value: WS
  misc_feature: MA Experiment 20000709 PARAMETER Experiment Name: At_15mM_NH4NO3_L-to-H_P Parameter: Timepoint (hr) Value: 4
  misc_feature: MA Experiment 20000709 PARAMETER Experiment Name: At_15mM_NH4NO3_L-to-H_P Parameter: Tissue Value: Aerial
  misc_feature: MA Experiment 20000709 PARAMETER Experiment Name: At_15mM_NH4NO3_L-to-H_P Parameter: Treatment Value: 15mM NH4NO3 vs. 30mM Mannitol
  misc_feature: MA Experiment ID: 20000794 Result: Down-regulated in Transcription
  misc_feature: MA Experiment 20000794 PARAMETER Experiment Name: At_Petals_P Parameter: Age (day) Value: 23-25 days
  misc_feature: MA Experiment 20000794 PARAMETER Experiment Name: At_Petals_P Parameter: Plant Line Value: WS
  misc_feature: MA Experiment 20000794 PARAMETER Experiment Name: At_Petals_P Parameter: Tissue Value: Petals vs. Whole plant
  misc_feature: MA Experiment ID: 20001450 Result: Down-regulated in Transcription
  misc_feature: MA Experiment 20001450 PARAMETER Experiment Name: At_Far-red-induction_P Parameter: Age (day) Value: 7
  misc_feature: MA Experiment 20001450 PARAMETER Experiment Name: At_Far-red-induction_P Parameter: Light Value: Far-red vs. White
  misc_feature: MA Experiment 20001450 PARAMETER Experiment Name: At_Far-red-induction_P Parameter: Organism Value: A. thaliana
  misc_feature: MA Experiment 20001450 PARAMETER Experiment Name: At_Far-red-induction_P Parameter: Plant Line Value: Columbia
  misc_feature: MA Experiment 20001450 PARAMETER Experiment Name: At_Far-red-induction_P Parameter: Timepoint (hr) Value: 8
  misc_feature: MA Experiment 20001450 PARAMETER Experiment Name: At_Far-red-induction_P Parameter: Tissue Value: Whole Plant
  misc_feature: MA Experiment ID: 20001558 Result: Down-regulated in Transcription
  misc_feature: MA Experiment 20001558 PARAMETER Experiment Name: At_Drought_Soil_Dry_P Parameter: Age (day) Value: 27
  misc_feature: MA Experiment 20001558 PARAMETER Experiment Name: At_Drought_Soil_Dry_P Parameter: Organism Value: A. thaliana
  misc_feature: MA Experiment 20001558 PARAMETER Experiment Name: At_Drought_Soil_Dry_P Parameter: Plant Line Value: WS
  misc_feature: MA Experiment 20001558 PARAMETER Experiment Name: At_Drought_Soil_Dry_P Parameter: Post Timepoint (hr) Value: 6
  misc_feature: MA Experiment 20001558 PARAMETER Experiment Name: At_Drought_Soil_Dry_P Parameter: Post-Treatment Value: Re-Water vs. No Drought
  misc_feature: MA Experiment 20001558 PARAMETER Experiment Name: At_Drought_Soil_Dry_P Parameter: Timepoint (day) Value: 13
  misc_feature: MA Experiment 20001558 PARAMETER Experiment Name: At_Drought_Soil_Dry_P Parameter: Treatment Value: Drought vs. No Drought
  misc_feature: MA Experiment ID: 20001560 Result: Down-regulated in Transcription
  misc_feature: MA Experiment 20001560 PARAMETER Experiment Name: At_Drought_Soil_Dry_P Parameter: Age (day) Value: 28
  misc_feature: MA Experiment 20001560 PARAMETER Experiment Name: At_Drought_Soil_Dry_P Parameter: Organism Value: A. thaliana
  misc_feature: MA Experiment 20001560 PARAMETER Experiment Name: At_Drought_Soil_Dry_P Parameter: Plant Line Value: WS
  misc_feature: MA Experiment 20001560 PARAMETER Experiment Name: At_Drought_Soil_Dry_P Parameter: Post Timepoint (hr) Value: None
  misc_feature: MA Experiment 20001560 PARAMETER Experiment Name: At_Drought_Soil_Dry_P Parameter: Post-Treatment Value: None
  misc_feature: MA Experiment 20001560 PARAMETER Experiment Name: At_Drought_Soil_Dry_P Parameter: Timepoint (day) Value: 14
  misc_feature: MA Experiment 20001560 PARAMETER Experiment Name: At_Drought_Soil_Dry_P Parameter: Treatment Value: Drought vs. No Drought
  misc_feature: MA Experiment ID: 20001768 Result: Up-regulated in Transcription
  misc_feature: MA Experiment 20001768 PARAMETER Experiment Name: At_Far-red-enriched-adult_P Parameter: Age (day) Value: 28
  misc_feature: MA Experiment 20001768 PARAMETER Experiment Name: At_Far-red-enriched-adult_P Parameter: Light Value: Far-red enriched vs. White
  misc_feature: MA Experiment 20001768 PARAMETER Experiment Name: At_Far-red-enriched-adult_P Parameter: Organism Value: A. thaliana
  misc_feature: MA Experiment 20001768 PARAMETER Experiment Name: At_Far-red-enriched-adult_P Parameter: Plant Line Value: Columbia
  misc_feature: MA Experiment 20001768 PARAMETER Experiment Name: At_Far-red-enriched-adult_P Parameter: Timepoint (hr) Value: 1
  misc_feature: MA Experiment 20001768 PARAMETER Experiment Name: At_Far-red-enriched-adult_P Parameter: Tissue Value: Aerial
  misc_feature: MA Experiment ID: 20001904 Result: Down-regulated in Transcription
  misc_feature: MA Experiment 20001904 PARAMETER Experiment Name: At_Drought_Reproduction_P Parameter: Age (day) Value: 37
  misc_feature: MA Experiment 20001904 PARAMETER Experiment Name: At_Drought_Reproduction_P Parameter: Organism Value: A. thaliana
  misc_feature: MA Experiment 20001904 PARAMETER Experiment Name: At_Drought_Reproduction_P Parameter: Plant Line Value: WS
  misc_feature: MA Experiment 20001904 PARAMETER Experiment Name: At_Drought_Reproduction_P Parameter: Timepoint (day) Value: 7
  misc_feature: MA Experiment 20001904 PARAMETER Experiment Name: At_Drought_Reproduction_P Parameter: Tissue Value: Rosettes
  misc_feature: MA Experiment 20001904 PARAMETER Experiment Name: At_Drought_Reproduction_P Parameter: Treatment Value: Drought vs. No Drought
gaaggagagaagaagaagaaccttacaattgcttttgtaaatattgtaggtagtttaaggacgtcactacctacatacatggatttatgtggaactcagatgctgcgcctctcatcgcctcatttcaaaacccttcatttggtgaggcatgcacaaggagtccacaatatagcattagaagagaagggagagaaacctgaatcagaaaagctttttgacgcccacctttctccaaagggtttgcaacaggtttcggaaaggcgcaaccaaatccttgaatcaggattacttaacactgtcgagttagtgataacctctccgctgtgcagagcaatggaaacttcaataggaatatttaggggacaaggatatgtaaatatatccgaagactttgcaaaagctaacaacttccctccaattgtagcacttgagatctgtagagaacgcatgggactctatccatgtgatcgtagagcaagtataagtactcgccgcactttttttcctgagatcgactttacaatgatagagagtgatgaagacgctctatggcaagacaaggaaagggaaaaattagaagatgttgctactagaggtcttcactttgttaaatggttatgggagagaccagaaaaagagatagcaattgtaagccacgggattttcttgcaacaaacactttgtgcgctgcatggaaaagttggcatacctcttgaagatagtctccttacaaggtttgccaattgtgaactccggtcgattcggatagagaagagtgacatggaagcggatacattaatgacttgtaactgtagaaattacgttactccaccttcaacttccttccattcacacgcttgaatagaaggcatgcatatgttatatatggactgtgttttcttttccaagccacactcatggatcggagtttcagaaccaaggaaaatcgaagctactattcccatttgccattaccaagctaccagcaccaatacattgtaatcaatcactagtaacaaaaaaatctataatttcaaagatacgtttacatcgaaaaaaagaaagataacgtttgcaaatgatataaaagcttttcctttttttttttttttaattattatg

SEQ ID NO: 107573 - protein, 286 aa, Arabidopsis thaliana
  peptide (1)..(286): Ceres Seq. ID no. 13650735
  misc_feature (43)..(252): Pfam Name: Phosphoglycerate mutase family Pfam Description: Phosphoglycerate mutase family
  misc_feature (27)..(286): Homolog of NCBI NO: 30681450 NR Description: expressed protein [Arabidopsis thaliana] unknown protein [Arabidopsis thaliana]
EGEKKKNLTIAFVNIVGSLRTSLPTYMDLCGTQMLRLSSPHFKTLHLVRHAQGVHNIALEEKGEKPESEKLFDAHLSPKGLQQVSERRNQILESGLLNTVELVITSPLCRAMETSIGIFRGQGYVNISEDFAKANNFPPIVALEICRERMGLYPCDRRASISTRRTFFPEIDFTMIESDEDALWQDKEREKLEDVATRGLHFVKWLWERPEKEIAIVSHGIFLQQTLCALHGKVGIPLEDSLLTRFANCELRSIRIEKSDMEADTLMTCNCRNYVTPPSTSFHSHA

SEQ ID NO: 107574 - protein, 260 aa, Arabidopsis thaliana
  peptide (1)..(260): Ceres Seq. ID no. 13650736
  misc_feature (17)..(226): Pfam Name: Phosphoglycerate mutase family Pfam Description: Phosphoglycerate mutase family
  misc_feature (1)..(260): Homolog of NCBI NO: 30681450 NR Description: expressed protein [Arabidopsis thaliana] unknown protein [Arabidopsis thaliana]
MDLCGTQMLRLSSPHFKTLHLVRHAQGVHNIALEEKGEKPESEKLFDAHLSPKGLQQVSERRNQILESGLLNTVELVITSPLCRAMETSIGIFRGQGYVNISEDFAKANNFPPIVALEICRERMGLYPCDRRASISTRRTFFPEIDFTMIESDEDALWQDKEREKLEDVATRGLHFVKWLWERPEKEIAIVSHGIFLQQTLCALHGKVGIPLEDSLLTRFANCELRSIRIEKSDMEADTLMTCNCRNYVTPPSTSFHSHA

SEQ ID NO: 107575 - protein, 253 aa, Arabidopsis thaliana
  peptide (1)..(253): Ceres Seq. ID no. 13650737
  misc_feature (10)..(219): Pfam Name: Phosphoglycerate mutase family Pfam Description: Phosphoglycerate mutase family
  misc_feature (1)..(253): Homolog of NCBI NO: 30681450 NR Description: expressed protein [Arabidopsis thaliana] unknown protein [Arabidopsis thaliana]
MLRLSSPHFKTLHLVRHAQGVHNIALEEKGEKPESEKLFDAHLSPKGLQQVSERRNQILESGLLNTVELVITSPLCRAMETSIGIFRGQGYVNISEDFAKANNFPPIVALEICRERMGLYPCDRRASISTRRTFFPEIDFTMIESDEDALWQDKEREKLEDVATRGLHFVKWLWERPEKEIAIVSHGIFLQQTLCALHGKVGIPLEDSLLTRFANCELRSIRIEKSDMEADTLMTCNCRNYVTPPSTSFHSHA

SEQ ID NO: 107576 - DNA, 1181 bp, Arabidopsis thaliana
  misc_feature (1)..(1181): Ceres Seq. ID no. 13650738
  misc_feature: MA Experiment ID: 20000180 Result: Up-regulated in Transcription
  misc_feature: MA Experiment 20000180 PARAMETER Experiment Name: At_Germinating_Seeds_P Parameter: Age (hr) Value: 24 vs. 0
  misc_feature: MA Experiment 20000180 PARAMETER Experiment Name: At_Germinating_Seeds_P Parameter: Tissue Value: Germinating Seeds
  misc_feature: MA Experiment ID: 20000265 Result: Up-regulated in Transcription
  misc_feature: MA Experiment 20000265 PARAMETER Experiment Name: At_Open_Flower_P Parameter: Age (day) Value: 21
  misc_feature: MA Experiment 20000265 PARAMETER Experiment Name: At_Open_Flower_P Parameter: Plant Line Value: WS
  misc_feature: MA Experiment 20000265 PARAMETER Experiment Name: At_Open_Flower_P Parameter: Tissue Value: Closed Flower vs. Whole Plant
gatctgcgtagatgatgaatgtttctggagaatgtgtaggccgtgaaagatgcgaggaattagccaagtcttcttcgttttaccggaaagtttactcggagatagaagaaattggatgggaaccaataaggagattaggtggagatttaacgttttttagctttcacattctagataagaagggaagagctcacaacttagaaattcaactgaacagagactatcctaattcaccaccttctgtttctgcggtttgttaatgtcaaatccttaagcttttttcattctccgtagcgaattaacttttgcttcgatgtaggatgtgccatatatgtttacactagaatggtcaacaagttcaagattgaaggatgtaatgcaccaattccaaaagcatttggactatcttcaagaattttggtctgtcttggacaatatcgataaatctctatgtgttgttgatgtcaagcaaccagctcgtgcctctgctattcgccggattgatgctgggaatgattgtatcatcattgttcatatcgacttcaaagaccctaaatccctaccagagtcccggtttattggtcctgtgccttcagctacgcatatgaacaacttgcatatgttatggagaagaaattgcaaaagatggtcaaatgaaagatcatttcctgagaaccttgaatgtattctaggtactgagcttccaaagcctctaggtctccaagtggaagacgatcaacaacaagttgaatgtgggatttgctatgcgcagtttctacccaccgatgaggagctcggagctagaagtgggacacgaacagattacacatgtgaaaacatcagttgcaacaagtctttccatagcctctgcctcacagactggttaaggtctatcacaacaacaagacagtcatttgatgttctgtttgggaactgcccttattgttcagacccagttgcagtcaaaaccagcaacaaatagagttagacaaaccatcatcctaattagctgatatctgaatgttgtaatgaaacgtgatacaaagagaagagttagtacagtaatgagtagtagtagtaagtgaggacaaaagttcctttttactatttttcttctgtacgtttaagataagactcatgtagctttcaaataagagatgtgaatgtaccttgtttttttc

SEQ ID NO: 107577 - protein, 216 aa, Arabidopsis thaliana
  peptide (1)..(216): Ceres Seq. ID no. 13650739
  misc_feature (1)..(216): Homolog of NCBI NO: 30698155 NR Description: expressed protein [Arabidopsis thaliana]
  misc_feature (1)..(216): Homolog of NCBI NO: 39104597 NR Description: unknown protein [Arabidopsis thaliana]
  misc_feature (107)..(216): Homolog of NCBI NO: 10177332 NR Description: gene_id:MPA24.9~unknown protein [Arabidopsis
  misc_feature (47)..(80): Homolog of NCBI NO: 10177332 NR Description: gene_id:MPA24.9~unknown protein [Arabidopsis
  misc_feature (1)..(216): Homolog of NCBI NO: 13385416 NR Description: PHD finger protein 9; proliferation of germ germ cell deficient [Mus musculus] >gi|12842891|dbj|BAB25772.1| protein product [Mus musculus] >gi|12847699|dbj|BAB27674.1|
  misc_feature (1)..(212): Homolog of NCBI NO: 33416848 NR Description: Unknown (protein for MGC:66144) [Danio rerio]
  misc_feature (1)..(206): Homolog of NCBI NO: 34879602 NR Description: similar to PHD finger protein 9; proliferation of
  misc_feature (1)..(216): Homolog of NCBI NO: 8922360 NR Description: PHD finger protein 9 [Homo sapiens]
  misc_feature (1)..(216): Homolog of NCBI NO: 32493396 NR Description: PHF9 protein [Homo sapiens]
  misc_feature (114)..(216): Homolog of NCBI NO: 12848314 NR Description: unnamed protein product [Mus musculus]
MFTLEWSTSSRLKDVMHQFQKHLDYLQEFWSVLDNIDKSLCVVDVKQPARASAIRRIDAGNDCIIIVHIDFKDPKSLPESRFIGPVPSATHMNNLHMLWRRNCKRWSNERSFPENLECILGTELPKPLGLQVEDDQQQVECGICYAQFLPTDEELGARSGTRTDYTCENISCNKSFHSLCLTDWLRSITTTRQSFDVLFGNCPYCSDPVAVKTSNK

SEQ ID NO: 107578 - protein, 201 aa, Arabidopsis thaliana
  peptide (1)..(201): Ceres Seq. ID no. 13650740
  misc_feature (1)..(201): Homolog of NCBI NO: 30698155 NR Description: expressed protein [Arabidopsis thaliana]
  misc_feature (1)..(201): Homolog of NCBI NO: 39104597 NR Description: unknown protein [Arabidopsis thaliana]
  misc_feature (92)..(201): Homolog of NCBI NO: 10177332 NR Description: gene_id:MPA24.9~unknown protein [Arabidopsis
  misc_feature (32)..(65): Homolog of NCBI NO: 10177332 NR Description: gene_id:MPA24.9~unknown protein [Arabidopsis
  misc_feature (1)..(201): Homolog of NCBI NO: 13385416 NR Description: PHD finger protein 9; proliferation of germ germ cell deficient [Mus musculus] >gi|12842891|dbj|BAB25772.1| protein product [Mus musculus] >gi|12847699|dbj|BAB27674.1|
  misc_feature (1)..(197): Homolog of NCBI NO: 33416848 NR Description: Unknown (protein for MGC:66144) [Danio rerio]
  misc_feature (1)..(191): Homolog of NCBI NO: 34879602 NR Description: similar to PHD finger protein 9; proliferation of
  misc_feature (1)..(201): Homolog of NCBI NO: 8922360 NR Description: PHD finger protein 9 [Homo sapiens]
  misc_feature (1)..(201): Homolog of NCBI NO: 32493396 NR Description: PHF9 protein [Homo sapiens]
  misc_feature (99)..(201): Homolog of NCBI NO: 12848314 NR Description: unnamed protein product [Mus musculus]
MHQFQKHLDYLQEFWSVLDNIDKSLCVVDVKQPARASAIRRIDAGNDCIIIVHIDFKDPKSLPESRFIGPVPSATHMNNLHMLWRRNCKRWSNERSFPENLECILGTELPKPLGLQVEDDQQQVECGICYAQFLPTDEELGARSGTRTDYTCENISCNKSFHSLCLTDWLRSITTTRQSFDVLFGNCPYCSDPVAVKTSNK

SEQ ID NO: 107579 - protein, 125 aa, Arabidopsis thaliana
  peptide (1)..(125): Ceres Seq. ID no. 13650741
  misc_feature (1)..(125): Homolog of NCBI NO: 30698155 NR Description: expressed protein [Arabidopsis thaliana]
  misc_feature (1)..(125): Homolog of NCBI NO: 39104597 NR Description: unknown protein [Arabidopsis thaliana]
  misc_feature (16)..(125): Homolog of NCBI NO: 10177332 NR Description: gene_id:MPA24.9~unknown protein [Arabidopsis
  misc_feature (1)..(125): Homolog of NCBI NO: 13385416 NR Description: PHD finger protein 9; proliferation of germ germ cell deficient [Mus musculus] >gi|12842891|dbj|BAB25772.1| protein product [Mus musculus] >gi|12847699|dbj|BAB27674.1|
  misc_feature (1)..(121): Homolog of NCBI NO: 33416848 NR Description: Unknown (protein for MGC:66144) [Danio rerio]
  misc_feature (1)..(115): Homolog of NCBI NO: 34879602 NR Description: similar to PHD finger protein 9; proliferation of
  misc_feature (1)..(125): Homolog of NCBI NO: 8922360 NR Description: PHD finger protein 9 [Homo sapiens]
  misc_feature (1)..(125): Homolog of NCBI NO: 32493396 NR Description: PHF9 protein [Homo sapiens]
  misc_feature (23)..(125): Homolog of NCBI NO: 12848314 NR Description: unnamed protein product [Mus musculus]
  misc_feature (1)..(58): Homolog of NCBI NO: 12848314 NR Description: unnamed protein product [Mus musculus]
MNNLHMLWRRNCKRWSNERSFPENLECILGTELPKPLGLQVEDDQQQVECGICYAQFLPTDEELGARSGTRTDYTCENISCNKSFHSLCLTDWLRSITTTRQSFDVLFGNCPYCSDPVAVKTSNK

SEQ ID NO: 107580 - DNA, 1530 bp, Arabidopsis thaliana
  misc_feature (1)..(1530): Ceres Seq. ID no. 13650750
  misc_feature: MA Experiment ID: 20000171 Result: Down-regulated in Transcription
  misc_feature: MA Experiment 20000171 PARAMETER Experiment Name: At_42deg_Heat_P Parameter: Age (day) Value: 14
  misc_feature: MA Experiment 20000171 PARAMETER Experiment Name: At_42deg_Heat_P Parameter: Organism Value: A. thaliana
  misc_feature: MA Experiment 20000171 PARAMETER Experiment Name: At_42deg_Heat_P Parameter: Plant Line Value: WS
  misc_feature: MA Experiment 20000171 PARAMETER Experiment Name: At_42deg_Heat_P Parameter: Temperature (deg C) Value: 42 vs. 22
  misc_feature: MA Experiment 20000171 PARAMETER Experiment Name: At_42deg_Heat_P Parameter: Timepoint (hr) Value: 1
  misc_feature: MA Experiment 20000171 PARAMETER Experiment Name: At_42deg_Heat_P Parameter: Tissue Value: Aerial
  misc_feature: MA Experiment ID: 20000173 Result: Down-regulated in Transcription
  misc_feature: MA Experiment 20000173 PARAMETER Experiment Name: At_42deg_Heat_P Parameter: Age (day) Value: 14
  misc_feature: MA Experiment 20000173 PARAMETER Experiment Name: At_42deg_Heat_P Parameter: Organism Value: A. thaliana
  misc_feature: MA Experiment 20000173 PARAMETER Experiment Name: At_42deg_Heat_P Parameter: Plant Line Value: WS
  misc_feature: MA Experiment 20000173 PARAMETER Experiment Name: At_42deg_Heat_P Parameter: Temperature (deg C) Value: 42 vs. 22
  misc_feature: MA Experiment 20000173 PARAMETER Experiment Name: At_42deg_Heat_P Parameter: Timepoint (hr) Value: 6
  misc_feature: MA Experiment 20000173 PARAMETER Experiment Name: At_42deg_Heat_P Parameter: Tissue Value: Aerial
  misc_feature: MA Experiment ID: 20000184 Result: Down-regulated in Transcription
  misc_feature: MA Experiment 20000184 PARAMETER Experiment Name: At_Shoots__P Parameter: Age (day) Value: 7
  misc_feature: MA Experiment 20000184 PARAMETER Experiment Name: At_Shoots__P Parameter: Tissue Value: Shoots vs. Whole Plant
  misc_feature: MA Experiment ID: 20000794 Result: Up-regulated in Transcription
  misc_feature: MA Experiment 20000794 PARAMETER Experiment Name: At_Petals_P Parameter: Age (day) Value: 23-25 days
  misc_feature: MA Experiment 20000794 PARAMETER Experiment Name: At_Petals_P Parameter: Plant Line Value: WS
  misc_feature: MA Experiment 20000794 PARAMETER Experiment Name: At_Petals_P Parameter: Tissue Value: Petals vs. Whole plant
  misc_feature: MA Experiment ID: 20001560 Result: Down-regulated in Transcription
  misc_feature: MA Experiment 20001560 PARAMETER Experiment Name: At_Drought_Soil_Dry_P Parameter: Age (day) Value: 28
  misc_feature: MA Experiment 20001560 PARAMETER Experiment Name: At_Drought_Soil_Dry_P Parameter: Organism Value: A. thaliana
  misc_feature: MA Experiment 20001560 PARAMETER Experiment Name: At_Drought_Soil_Dry_P Parameter: Plant Line Value: WS
  misc_feature: MA Experiment 20001560 PARAMETER Experiment Name: At_Drought_Soil_Dry_P Parameter: Post Timepoint (hr) Value: None
  misc_feature: MA Experiment 20001560 PARAMETER Experiment Name: At_Drought_Soil_Dry_P Parameter: Post-Treatment Value: None
  misc_feature: MA Experiment 20001560 PARAMETER Experiment Name: At_Drought_Soil_Dry_P Parameter: Timepoint (day) Value: 14
  misc_feature: MA Experiment 20001560 PARAMETER Experiment Name: At_Drought_Soil_Dry_P Parameter: Treatment Value: Drought vs. No Drought
atcaaacccaaaagcccaaaacccagaagaacaaaaaatctctcttttgaaaattctccttttgcaaatcattcaagtgaagcacaatcatcttcttcttcttctccagcttcatcaatctcttctagactttttgcgtttacctgaaaaactgttttgatcagtatcaagttgatggagcatttgttggaacatatgggataaattatggaaggatagctgacaacataccatctccggagaaagtagttttacttctaaagcaagctaaaattcggaatgtgcgtatatacgatgtagatcacactgttcttgaagcttttagtggaactggtttagaccttgttgttggacttcctaatgggtttttaaaagagatgagttcaaatgctgatcatgctttctcttgggttaaagaaaatattcagtctttcttacccaagactcggattcgcggtatcgctataggtaacgaagttcttggaggcggtgattctgagctcgcgggagctttacttggtgctgctaaaaatgtgtacaatgcgttgaagaaaatgaatctggaggacactgtgcagatcactacggctcattcacaggctgtgttttctgattcctacccgccttcgtcttgtgtgtttaaagaggatgttgttcagttcatgaagccattgttggagttttttcagcagattgggtctcctttttgtttgaatgcttacccttttttggcgtacacttataatccgaaggagattgatatcaactatgctcttttcaagccaacggaagggatatatgacccgaaaaccgatttgcattacgataacatgcttgatgctcagattgatgctgcttacatggcgttgcaagatgctgggtttaagaagatggaggttatgatcactgaaactgggtgggcttctaaaggggattcagatgaacctgcagcaacaccagagaacgcaagaacgtataactataacctcaggaagaggcttgctaagaagaaagggacacctcttagaccaaaaacggtgcttaaagcctatatctttgcattgttcaatgaaaactcaaaaccgggcaagagttctgagacacactttggactttttaaacctgatggaaccatatcatatgacattggattcaacaatctaaagtctgattctcccaagtcactcatttcatcatcaaagtcagctcgttactatgtggcattggtcatctctgtctcggctttcctcttgatgatataaatgcggaaatggtgtgagctttgacgatccttggatttggtcgtacattcgtagcactataatatatattactagggttgggacgctaacgaaatggtaggagcacaaatttactgcaattctcatatatgtagccaagagatatccagaaaagatatcaccagacactatcatatatacacatcttatgtaaaacaaatctaatacataaatttgggtctctgcttatattttgttggattggatactggggaaattaacggatatc

SEQ ID NO: 107581 - protein, 294 aa, Arabidopsis thaliana
  peptide (1)..(294): Ceres Seq. ID no. 13650751
  misc_feature (1)..(259): Pfam Name: Glycosyl hydrolases family 17 Pfam Description: Glycosyl hydrolases family 17
  misc_feature (1)..(294): Homolog of NCBI NO: 18401187 NR Description: glycosyl hydrolase family 17 [Arabidopsis
  misc_feature (1)..(294): Homolog of NCBI NO: 21618052 NR Description: putative beta-1,3-glucanase [Arabidopsis thaliana]
  misc_feature (1)..(275): Homolog of NCBI NO: 7447981 NR Description: probable beta-1,3-glucanase At2g26600 [imported]
  misc_feature (1)..(294): Homolog of NCBI NO: 26452328 NR Description: putative beta-1,3-glucanase [Arabidopsis
  misc_feature (1)..(294): Homolog of NCBI NO: 30683187 NR Description: glycosyl hydrolase family 17 [Arabidopsis
  misc_feature (1)..(294): Homolog of NCBI NO: 15232696 NR Description: glycosyl hydrolase family 17 [Arabidopsis
  misc_feature (1)..(294): Homolog of NCBI NO: 11994352 NR Description: beta-1,3-glucanase-like protein [Arabidopsis
  misc_feature (1)..(266): Homolog of NCBI NO: 15209173 NR Description: putative elicitor inducible chitinase [Solanum
  misc_feature (1)..(269): Homolog of NCBI NO: 419789 NR Description: hypothetical protein - potato
  misc_feature (1)..(259): Homolog of NCBI NO: 25316443 NR Description: CDS protein F9L11.6 [imported] - Arabidopsis
MSSNADHAFSWVKENIQSFLPKTRIRGIAIGNEVLGGGDSELAGALLGAAKNVYNALKKMNLEDTVQITTAHSQAVFSDSYPPSSCVFKEDVVQFMKPLLEFFQQIGSPFCLNAYPFLAYTYNPKEIDINYALFKPTEGIYDPKTDLHYDNMLDAQIDAAYMALQDAGFKKMEVMITETGWASKGDSDEPAATPENARTYNYNLRKRLAKKKGTPLRPKTVLKAYIFALFNENSKPGKSSETHFGLFKPDGTISYDIGFNNLKSDSPKSLISSSKSARYYVALVISVSAFLLMI

SEQ ID NO: 107582 - protein, 235 aa, Arabidopsis thaliana
  peptide (1)..(235): Ceres Seq. ID no. 13650752
  misc_feature (1)..(200): Pfam Name: Glycosyl hydrolases family 17 Pfam Description: Glycosyl hydrolases family 17
  misc_feature (1)..(235): Homolog of NCBI NO: 18401187 NR Description: glycosyl hydrolase family 17 [Arabidopsis
  misc_feature (1)..(235): Homolog of NCBI NO: 21618052 NR Description: putative beta-1,3-glucanase [Arabidopsis thaliana]
  misc_feature (1)..(216): Homolog of NCBI NO: 7447981 NR Description: probable beta-1,3-glucanase At2g26600 [imported]
  misc_feature (1)..(235): Homolog of NCBI NO: 26452328 NR Description: putative beta-1,3-glucanase [Arabidopsis
  misc_feature (1)..(235): Homolog of NCBI NO: 30683187 NR Description: glycosyl hydrolase family 17 [Arabidopsis
  misc_feature (1)..(235): Homolog of NCBI NO: 15232696 NR Description: glycosyl hydrolase family 17 [Arabidopsis
  misc_feature (1)..(235): Homolog of NCBI NO: 11994352 NR Description: beta-1,3-glucanase-like protein [Arabidopsis
  misc_feature (1)..(207): Homolog of NCBI NO: 15209173 NR Description: putative elicitor inducible chitinase [Solanum
  misc_feature (1)..(210): Homolog of NCBI NO: 419789 NR Description: hypothetical protein - potato
  misc_feature (1)..(200): Homolog of NCBI NO: 25316443 NR Description: CDS protein F9L11.6 [imported] - Arabidopsis
MNLEDTVQITTAHSQAVFSDSYPPSSCVFKEDVVQFMKPLLEFFQQIGSPFCLNAYPFLAYTYNPKEIDINYALFKPTEGIYDPKTDLHYDNMLDAQIDAAYMALQDAGFKKMEVMITETGWASKGDSDEPAATPENARTYNYNLRKRLAKKKGTPLRPKTVLKAYIFALFNENSKPGKSSETHFGLFKPDGTISYDIGFNNLKSDSPKSLISSSKSARYYVALVISVSAFLLMI

SEQ ID NO: 107583 - protein, 199 aa, Arabidopsis thaliana
  peptide (1)..(199): Ceres Seq. ID no. 13650753
  misc_feature (1)..(164): Pfam Name: Glycosyl hydrolases family 17 Pfam Description: Glycosyl hydrolases family 17
  misc_feature (1)..(199): Homolog of NCBI NO: 18401187 NR Description: glycosyl hydrolase family 17 [Arabidopsis
  misc_feature (1)..(199): Homolog of NCBI NO: 21618052 NR Description: putative beta-1,3-glucanase [Arabidopsis thaliana]
  misc_feature (1)..(180): Homolog of NCBI NO: 7447981 NR Description: probable beta-1,3-glucanase At2g26600 [imported]
  misc_feature (1)..(199): Homolog of NCBI NO: 26452328 NR Description: putative beta-1,3-glucanase [Arabidopsis
  misc_feature (1)..(199): Homolog of NCBI NO: 30683187 NR Description: glycosyl hydrolase family 17 [Arabidopsis
  misc_feature (1)..(199): Homolog of NCBI NO: 15232696 NR Description: glycosyl hydrolase family 17 [Arabidopsis
  misc_feature (1)..(199): Homolog of NCBI NO: 11994352 NR Description: beta-1,3-glucanase-like protein [Arabidopsis
  misc_feature (1)..(171): Homolog of NCBI NO: 15209173 NR Description: putative elicitor inducible chitinase [Solanum
  misc_feature (1)..(174): Homolog of NCBI NO: 419789 NR Description: hypothetical protein - potato
  misc_feature (1)..(164): Homolog of NCBI NO: 25316443 NR Description: CDS protein F9L11.6 [imported] - Arabidopsis
MKPLLEFFQQIGSPFCLNAYPFLAYTYNPKEIDINYALFKPTEGIYDPKTDLHYDNMLDAQIDAAYMALQDAGFKKMEVMITETGWASKGDSDEPAATPENARTYNYNLRKRLAKKKGTPLRPKTVLKAYIFALFNENSKPGKSSETHFGLFKPDGTISYDIGFNNLKSDSPKSLISSSKSARYYVALVISVSAFLLMI

SEQ ID NO: 107584 - DNA, 987 bp, Arabidopsis thaliana
  misc_feature (1)..(987): Ceres Seq. ID no. 13650754
  misc_feature: MA Experiment ID: 20000314 Result: Down-regulated in Transcription
  misc_feature: MA Experiment 20000314 PARAMETER Experiment Name: At_14day_Shoots-Roots_Sub_P Parameter: Age (day) Value: 14
  misc_feature: MA Experiment 20000314 PARAMETER Experiment Name: At_14day_Shoots-Roots_Sub_P Parameter: Organism Value: A. thaliana
  misc_feature: MA Experiment 20000314 PARAMETER Experiment Name: At_14day_Shoots-Roots_Sub_P Parameter: Plant Line Value: WS
  misc_feature: MA Experiment 20000314 PARAMETER Experiment Name: At_14day_Shoots-Roots_Sub_P Parameter: Tissue Value: Roots vs. Whole Plant
  misc_feature: MA Experiment ID: 20000346 Result: Up-regulated in Transcription
  misc_feature: MA Experiment 20000346 PARAMETER Experiment Name: At_2mM_SA_Sub_P Parameter: Age (day) Value: 14
  misc_feature: MA Experiment 20000346 PARAMETER Experiment Name: At_2mM_SA_Sub_P Parameter: Organism Value: A. thaliana
  misc_feature: MA Experiment 20000346 PARAMETER Experiment Name: At_2mM_SA_Sub_P Parameter: Plant Line Value: WS
  misc_feature: MA Experiment 20000346 PARAMETER Experiment Name: At_2mM_SA_Sub_P Parameter: Timepoint (hr) Value: 1
  misc_feature: MA Experiment 20000346 PARAMETER Experiment Name: At_2mM_SA_Sub_P Parameter: Tissue Value: Aerial
  misc_feature: MA Experiment 20000346 PARAMETER Experiment Name: At_2mM_SA_Sub_P Parameter: Treatment Value: 2mM SA vs. No Treatment
  misc_feature: MA Experiment ID: 20000355 Result: Down-regulated in Transcription
  misc_feature: MA Experiment 20000355 PARAMETER Experiment Name: At_Siliques_Sub_P Parameter: Age (day) Value: 21
  misc_feature: MA Experiment 20000355 PARAMETER Experiment Name: At_Siliques_Sub_P Parameter: Organism Value: A. thaliana
  misc_feature: MA Experiment 20000355 PARAMETER Experiment Name: At_Siliques_Sub_P Parameter: Plant Line Value: WS
  misc_feature: MA Experiment 20000355 PARAMETER Experiment Name: At_Siliques_Sub_P Parameter: Tissue Value: Less Than 5mm Siliques vs. Whole Plant
aaggtactaactctgttctggtgaagaacctatacttgtcatgcgatccttacatgagaatttgcatggggaaacctaatccttccactgctgctcttgctcaagcttacactcccggccaaccaatagaagggtacggagtgtctacagtgatagaatctgggcattcagattacaaaaaaggagacctactctggggtatagttgcatgggaggagtacagtgttatcacttgactcacgagcatttcaagatccaacatactgatgttccattgtcttactacactggacttctcggtatgcctggtatgaccgcatatgttgggttttatgagatctgttctccaaagaaaggagagacagtttatgtgtcagctgcatctggtgctgttggtcagcttgtgggacaatttgctaagatgatgggctgttatgttgttggaagtgctggtagcaaagaaaaggttgatctcctgaagaccaagtttgggtttgattatgcatttaactacaaggaagaacctgaccttagtgctgcgctcaaaaggtgtttccctaatggcattgacatatactttgagaatgtaggaggcaaaatgctagatgcagtgcttatgaacatgaacatgcacgggcgtatcgctgtctgtggaatgatctcacagtacaatcttgagaaccaagaaggtgtacacaacctatccaacataatctacaaacgaatccgcattcaaggctttgtagtgtctgatttctacgacgaatactcaaagttcttggagtttctgcatccgcacattaaagaagggaagataacgtacgtggaagatgtagctgatgggctcgagaaaggtcctgaagctctcgtgggactcttccatggtaagaatgttgggaaacaagttgttgttattgctcgtgaatgatgaatactttaattgggagtaaggttttattgctcgtgagggaataatacttatttggg

SEQ ID NO: 107585 - protein, 239 aa, Arabidopsis thaliana
  peptide (1)..(239): Ceres Seq. ID no. 13650755
  misc_feature (28)..(236): Pfam Name: Zinc-binding dehydrogenase Pfam Description: Zinc-binding dehydrogenase
  misc_feature (9)..(239): Homolog of NCBI NO: 15237888 NR Description: NADP-dependent oxidoreductase (P1), putative
  misc_feature (9)..(239): Homolog of NCBI NO: 21539447 NR Description: quinone oxidoreductase-like protein [Arabidopsis
  misc_feature (9)..(239): Homolog of NCBI NO: 22326861 NR Description: NADP-dependent oxidoreductase, putative thaliana] >gi|16604344|gb|AAL24178.1| AT5g16970/F2K13_120 thaliana] >gi|23297366|gb|AAN12951.1| putative quinone
  misc_feature (9)..(239): Homolog of NCBI NO: 17529140 NR Description: putative quinone oxidoreductase [Arabidopsis
  misc_feature (5)..(239): Homolog of NCBI NO: 11358740 NR Description: quinone oxidoreductase-like protein - Arabidopsis
  misc_feature (9)..(239): Homolog of NCBI NO: 21554121 NR Description: quinone oxidoreductase-like protein [Arabidopsis
  misc_feature (9)..(239): Homolog of NCBI NO: 1362014 NR Description: probable NADPH2:quinone reductase (EC 1.6.5.5) P2
  misc_feature (9)..(239): Homolog of NCBI NO: 15237890 NR Description: allyl alcohol dehydrogenase, putative
  misc_feature (9)..(239): Homolog of NCBI NO: 11358742 NR Description: quinone oxidoreductase-like protein - Arabidopsis
  misc_feature (13)..(239): Homolog of NCBI NO: 15228456 NR Description: NADP-dependent oxidoreductase (P2), putative
MGGVQCYHLTHEHFKIQHTDVPLSYYTGLLGMPGMTAYVGFYEICSPKKGETVYVSAASGAVGQLVGQFAKMMGCYVVGSAGSKEKVDLLKTKFGFDYAFNYKEEPDLSAALKRCFPNGIDIYFENVGGKMLDAVLMNMNMHGRIAVCGMISQYNLENQEGVHNLSNIIYKRIRIQGFVVSDFYDEYSKFLEFLHPHIKEGKITYVEDVADGLEKGPEALVGLFHGKNVGKQVVVIARE

SEQ ID NO: 107586 - protein, 208 aa, Arabidopsis thaliana
  peptide (1)..(208): Ceres Seq. ID no. 13650756
  misc_feature (1)..(205): Pfam Name: Zinc-binding dehydrogenase Pfam Description: Zinc-binding dehydrogenase
  misc_feature (1)..(208): Homolog of NCBI NO: 15237888 NR Description: NADP-dependent oxidoreductase (P1), putative
  misc_feature (1)..(208): Homolog of NCBI NO: 21539447 NR Description: quinone oxidoreductase-like protein [Arabidopsis
  misc_feature (1)..(208): Homolog of NCBI NO: 22326861 NR Description: NADP-dependent oxidoreductase, putative thaliana] >gi|16604344|gb|AAL24178.1| AT5g16970/F2K13_120 thaliana] >gi|23297366|gb|AAN12951.1| putative quinone
  misc_feature (1)..(208): Homolog of NCBI NO: 17529140 NR Description: putative quinone oxidoreductase [Arabidopsis
  misc_feature (1)..(208): Homolog of NCBI NO: 11358740 NR Description: quinone oxidoreductase-like protein - Arabidopsis
  misc_feature (1)..(208): Homolog of NCBI NO: 21554121 NR Description: quinone oxidoreductase-like protein [Arabidopsis
  misc_feature (1)..(208): Homolog of NCBI NO: 1362014 NR Description: probable NADPH2:quinone reductase (EC 1.6.5.5) P2
  misc_feature (1)..(208): Homolog of NCBI NO: 15237890 NR Description: allyl alcohol dehydrogenase, putative
  misc_feature (1)..(208): Homolog of NCBI NO: 11358742 NR Description: quinone oxidoreductase-like protein - Arabidopsis
  misc_feature (1)..(208): Homolog of NCBI NO: 15228456 NR Description: NADP-dependent oxidoreductase (P2), putative
MPGMTAYVGFYEICSPKKGETVYVSAASGAVGQLVGQFAKMMGCYVVGSAGSKEKVDLLKTKFGFDYAFNYKEEPDLSAALKRCFPNGIDIYFENVGGKMLDAVLMNMNMHGRIAVCGMISQYNLENQEGVHNLSNIIYKRIRIQGFVVSDFYDEYSKFLEFLHPHIKEGKITYVEDVADGLEKGPEALVGLFHGKNVGKQVVVIARE

SEQ ID NO: 107587 - protein, 205 aa, Arabidopsis thaliana
  peptide (1)..(205): Ceres Seq. ID no. 13650757
  misc_feature (1)..(202): Pfam Name: Zinc-binding dehydrogenase Pfam Description: Zinc-binding dehydrogenase
  misc_feature (1)..(205): Homolog of NCBI NO: 15237888 NR Description: NADP-dependent oxidoreductase (P1), putative
  misc_feature (1)..(205): Homolog of NCBI NO: 21539447 NR Description: quinone oxidoreductase-like protein [Arabidopsis
  misc_feature (1)..(205): Homolog of NCBI NO: 22326861 NR Description: NADP-dependent oxidoreductase, putative thaliana] >gi|16604344|gb|AAL24178.1| AT5g16970/F2K13_120 thaliana] >gi|23297366|gb|AAN12951.1| putative quinone
  misc_feature (1)..(205): Homolog of NCBI NO: 17529140 NR Description: putative quinone oxidoreductase [Arabidopsis
  misc_feature (1)..(205): Homolog of NCBI NO: 11358740 NR Description: quinone oxidoreductase-like protein - Arabidopsis
  misc_feature (1)..(205): Homolog of NCBI NO: 21554121 NR Description: quinone oxidoreductase-like protein [Arabidopsis
  misc_feature (1)..(205): Homolog of NCBI NO: 1362014 NR Description: probable NADPH2:quinone reductase (EC 1.6.5.5) P2
  misc_feature (1)..(205): Homolog of NCBI NO: 15237890 NR Description: allyl alcohol dehydrogenase, putative
  misc_feature (1)..(205): Homolog of NCBI NO: 11358742 NR Description: quinone oxidoreductase-like protein - Arabidopsis
  misc_feature (1)..(205): Homolog of NCBI NO: 15228456 NR Description: NADP-dependent oxidoreductase (P2), putative
MTAYVGFYEICSPKKGETVYVSAASGAVGQLVGQFAKMMGCYVVGSAGSKEKVDLLKTKFGFDYAFNYKEEPDLSAALKRCFPNGIDIYFENVGGKMLDAVLMNMNMHGRIAVCGMISQYNLENQEGVHNLSNIIYKRIRIQGFVVSDFYDEYSKFLEFLHPHIKEGKITYVEDVADGLEKGPEALVGLFHGKNVGKQVVVIARE

SEQ ID NO: 107588 - DNA, 2595 bp, Arabidopsis thaliana
  misc_feature (1)..(2595): Ceres Seq. ID no. 13650780
  misc_feature: MA Experiment ID: 20000111 Result: Down-regulated in Transcription
  misc_feature: MA Experiment 20000111 PARAMETER Experiment Name: At_42deg_Heat_cDNA_P Parameter: Temperature (deg C) Value: 42 vs. 22
  misc_feature: MA Experiment 20000111 PARAMETER Experiment Name: At_42deg_Heat_cDNA_P Parameter: Timepoint (hr) Value: 6
  misc_feature: MA Experiment 20000111 PARAMETER Experiment Name: At_42deg_Heat_cDNA_P Parameter: Tissue Value: Aerial
  misc_feature: MA Experiment ID: 20000144 Result: Down-regulated in Transcription
  misc_feature: MA Experiment 20000144 PARAMETER Experiment Name: At_42deg_Heat_cDNA_P Parameter: Temperature (deg C) Value: 42 vs. 22
  misc_feature: MA Experiment 20000144 PARAMETER Experiment Name: At_42deg_Heat_cDNA_P Parameter: Timepoint (hr) Value: 1
  misc_feature: MA Experiment 20000144 PARAMETER Experiment Name: At_42deg_Heat_cDNA_P Parameter: Tissue Value: Aerial
  misc_feature: MA Experiment ID: 20000171 Result: Down-regulated in Transcription
  misc_feature: MA Experiment 20000171 PARAMETER Experiment Name: At_42deg_Heat_P Parameter: Age (day) Value: 14
  misc_feature: MA Experiment 20000171 PARAMETER Experiment Name: At_42deg_Heat_P Parameter: Organism Value: A. thaliana
  misc_feature: MA Experiment 20000171 PARAMETER Experiment Name: At_42deg_Heat_P Parameter: Plant Line Value: WS
  misc_feature: MA Experiment 20000171 PARAMETER Experiment Name: At_42deg_Heat_P Parameter: Temperature (deg C) Value: 42 vs. 22
  misc_feature: MA Experiment 20000171 PARAMETER Experiment Name: At_42deg_Heat_P Parameter: Timepoint (hr) Value: 1
  misc_feature: MA Experiment 20000171 PARAMETER Experiment Name: At_42deg_Heat_P Parameter: Tissue Value: Aerial
  misc_feature: MA Experiment ID: 20000173 Result: Down-regulated in Transcription
  misc_feature: MA Experiment 20000173 PARAMETER Experiment Name: At_42deg_Heat_P Parameter: Age (day) Value: 14
  misc_feature: MA Experiment 20000173 PARAMETER Experiment Name: At_42deg_Heat_P Parameter: Organism Value: A. thaliana
  misc_feature: MA Experiment 20000173 PARAMETER Experiment Name: At_42deg_Heat_P Parameter: Plant Line Value: WS
  misc_feature: MA Experiment 20000173 PARAMETER Experiment Name: At_42deg_Heat_P Parameter: Temperature (deg C) Value: 42 vs. 22
  misc_feature: MA Experiment 20000173 PARAMETER Experiment Name: At_42deg_Heat_P Parameter: Timepoint (hr) Value: 6
  misc_feature: MA Experiment 20000173 PARAMETER Experiment Name: At_42deg_Heat_P Parameter: Tissue Value: Aerial
  misc_feature: MA Experiment ID: 20000179 Result: Up-regulated in Transcription
  misc_feature: MA Experiment 20000179 PARAMETER Experiment Name: At_Germinating_Seeds_P Parameter: Age (hr) Value: 6 vs. 0
  misc_feature: MA Experiment 20000179 PARAMETER Experiment Name: At_Germinating_Seeds_P Parameter: Tissue Value: Germinating Seeds
  misc_feature: MA Experiment ID: 20000180 Result: Up-regulated in Transcription
  misc_feature: MA Experiment 20000180 PARAMETER Experiment Name: At_Germinating_Seeds_P Parameter: Age (hr) Value: 24 vs. 0
  misc_feature: MA Experiment 20000180 PARAMETER Experiment Name: At_Germinating_Seeds_P Parameter: Tissue Value: Germinating Seeds
  misc_feature: MA Experiment ID: 20000184 Result: Down-regulated in Transcription
  misc_feature: MA Experiment 20000184 PARAMETER Experiment Name: At_Shoots__P Parameter: Age (day) Value: 7
  misc_feature: MA Experiment 20000184 PARAMETER Experiment Name: At_Shoots__P Parameter: Tissue Value: Shoots vs. Whole Plant
  misc_feature: MA Experiment ID: 20000224 Result: Up-regulated in Transcription
  misc_feature: MA Experiment ID: 20000235 Result: Up-regulated in Transcription
  misc_feature: MA Experiment 20000235 PARAMETER Experiment Name: At_Siliques_P Parameter: Age (day) Value: 21
  misc_feature: MA Experiment 20000235 PARAMETER Experiment Name: At_Siliques_P Parameter: Organism Value: A. thaliana
  misc_feature: MA Experiment 20000235 PARAMETER Experiment Name: At_Siliques_P Parameter: Plant Line Value: WS
  misc_feature: MA Experiment 20000235 PARAMETER Experiment Name: At_Siliques_P Parameter: Tissue Value: 5-10mm Siliques vs. Whole Plant
  misc_feature: MA Experiment ID: 20000286 Result: Up-regulated in Transcription
  misc_feature: MA Experiment 20000286 PARAMETER Experiment Name: At_Open_Flower_P Parameter: Age (day) Value: 21
  misc_feature: MA Experiment 20000286 PARAMETER Experiment Name: At_Open_Flower_P Parameter: Plant Line Value: WS
  misc_feature: MA Experiment 20000286 PARAMETER Experiment Name: At_Open_Flower_P Parameter: Tissue Value: Half Open vs. Whole Plant
  misc_feature: MA Experiment ID: 20000794 Result: Up-regulated in Transcription
  misc_feature: MA Experiment 20000794 PARAMETER Experiment Name: At_Petals_P Parameter: Age (day) Value: 23-25 days
  misc_feature: MA Experiment 20000794 PARAMETER Experiment Name: At_Petals_P Parameter: Plant Line Value: WS
  misc_feature: MA Experiment 20000794 PARAMETER Experiment Name: At_Petals_P Parameter: Tissue Value: Petals vs. Whole plant
  misc_feature: MA Experiment ID: 20001557 Result: Up-regulated in Transcription
  misc_feature: MA Experiment 20001557 PARAMETER Experiment Name: At_Drought_Soil_Dry_P Parameter: Age (day) Value: 27
  misc_feature: MA Experiment 20001557 PARAMETER Experiment Name: At_Drought_Soil_Dry_P Parameter: Organism Value: A. thaliana
  misc_feature: MA Experiment 20001557 PARAMETER Experiment Name: At_Drought_Soil_Dry_P Parameter: Plant Line Value: WS
  misc_feature: MA Experiment 20001557 PARAMETER Experiment Name: At_Drought_Soil_Dry_P Parameter: Post Timepoint (hr) Value: 3
  misc_feature: MA Experiment 20001557 PARAMETER Experiment Name: At_Drought_Soil_Dry_P Parameter: Post-Treatment Value: Re-Water vs. No Drought
  misc_feature: MA Experiment 20001557 PARAMETER Experiment Name: At_Drought_Soil_Dry_P Parameter: Timepoint (day) Value: 13
  misc_feature: MA Experiment 20001557 PARAMETER Experiment Name: At_Drought_Soil_Dry_P Parameter: Treatment Value: Drought vs. No Drought
  misc_feature: MA Experiment ID: 20001905 Result: Up-regulated in Transcription
  misc_feature: MA Experiment 20001905 PARAMETER Experiment Name: At_Drought_Reproduction_P Parameter: Age (day) Value: 40
  misc_feature: MA Experiment 20001905 PARAMETER Experiment Name: At_Drought_Reproduction_P Parameter: Organism Value: A. thaliana
  misc_feature: MA Experiment 20001905 PARAMETER Experiment Name: At_Drought_Reproduction_P Parameter: Plant Line Value: WS
  misc_feature: MA Experiment 20001905 PARAMETER Experiment Name: At_Drought_Reproduction_P Parameter: Timepoint (day) Value: 10
  misc_feature: MA Experiment 20001905 PARAMETER Experiment Name: At_Drought_Reproduction_P Parameter: Tissue Value: Rosettes
  misc_feature: MA Experiment 20001905 PARAMETER Experiment Name: At_Drought_Reproduction_P Parameter: Treatment Value: Drought vs. No Drought
  misc_feature: Pfam Name: Glyco_transf_8 Pfam Description: Glycosyl transferase family 8
atggtcaagacaccaatttatttaattataattttagatcttgaaattttattattattatttttttcccttatagttttattatttgttttgcttagatccaccggcaaaatcactgagaacaaaaaaaaagctcgttgtgttgttattcctctcatttgtttcttcttcttcctcagctcctttgattttgaatcttgatctgtgaggaaggctctttgaaatatcttcacaagacgtgaatttgaggcgagcccttttggattctcgtgttcaattgtttgaagcaacaatctcccagaggagtaaggcgggaatctcaaaattcggattgggtggttctgatatccaaatgcggtctgggagaagaccacaaggaagaagaatagctataaggaacgaaacagagacggaattgagatcgagaatcggagagaaatcgggatcggagaagcggaatctgatcggatctgatgttgggtttgggattgttgttgttgttgttgtcaggaattaggtttttttcggaatcggtttctgttgtcactgtggtggggctgcactaccaaggaggatgcagcttcacatatcgccgagtatgagaagcattacgatttcgagcagcaatgagtttattgacttgatgaagatcaaggtcgcagctcgtcacatctcttaccgaactctcttccacaccatcttaatcctcgctttcttgttgccttttgttttcattctcaccgctgttgttacccttgagggtgtcaacaaatgctcctccattgattgtttagggaggcggataggtccacgtcttcttggtagggtagatgattcagagagactagctagagacttttataaaattctaaacgaagtaagcactcaagaaattccagatggtttgaagcttccaaattcttttagtcaacttgtttccgatatgaagaataaccactatgatgcaaaaacatttgctcttgtgctgcgagccatgatggagaagtttgaacgtgatatgagggaatcgaaatttgcagaacttatgaacaagcactttgcagcaagttccattcccaaaggcattcattgtctctctctaagactgacagatgaatattcctccaatgctcatgctcgaagacagcttccttcaccagagtttctccctgttctttcagataatgcttaccaccactttattttgtccacggacaatattttggctgcctcagttgtggtctcatccgctgttcagtcatcttcaaaacccgagaaaattgtctttcacatcattacagacaagaaaacctatgcgggtatgcattcatggtttgcgcttaattctgttgcaccagcaattgttgaggttaaaggtgttcatcagtttgactggttgacgagagagaatgttccggttttggaagctgtggaaagccataatggtgtcagggactattatcatgggaatcatgtcgctggggcaaacctcaccgaaacaactcctcgaacatttgcttcaaaattgcagtctagaagtccaaaatacatatctttgctcaaccatcttagaatatatataccagagcttttcccgaacttggacaaggtggttttcttagacgatgatatagttgtccagggagacttaactccactttgggatgttgacctcggtggtaaggtcaatggggcagtagagacttgcaggggtgaagatgaatgggtgatgtcaaagcgtttaaggaactacttcaatttctctcacccgctcatcgcaaagcatttagatcctgaagaatgtgcttgggcatatggtatgaatatcttcgatctacaagcttggaggaaaacaaatatcagagaaacgtatcactcttggcttagagagaatctaaagtcaaatctgacaatgtggaaacttggaaccttgcctcctgctcttatcgcgttcaagggtcacgtacacataatagactcgtcatggcatatgctaggattaggctaccagagcaagaccaacatagaaaatgtgaagaaagcagcagtgatccactacaatgggcagtcaaagccatggctggagattggtttcgagcatctgcggccattctggaccaaatacgtcaactactcaaatgatttcatcaagaactgtcacatattggagtaggaaaaccgaaactttgagatgatcatgaaggtaagagttacaggtgtatgatcatgaaggtagttacaggtgtaaaagaggagaagtagtaaaaaagacaaggcagtctgcagatattacactcagtctaaagaaggaagaatcagaaatttagtttgccacatacataagggaaacttggttgcagcgaagggaaggttgcataagagaaagagagagagagagataaagattcattctttctgtaaaatagaaggttacccttttttgaaattcttttggagaatccaattcttgaatctttttataagaatggggaaagaaagattgggtttataattcttttttggttattaagagagagagggagaggttatgaccagaaaagccagttgttgataaattgaggaacacacttatac

SEQ ID NO: 107589 - protein, 532 aa, Arabidopsis thaliana
  peptide (1)..(532): Ceres Seq. ID no. 13650781
  misc_feature: Pfam Name: Glyco_transf_8 Pfam Description: Glycosyl transferase family 8
  misc_feature (1)..(532): Homolog of NCBI NO: 11358133 NR Description: hypothetical protein T20K14_80 - Arabidopsis >gi|9755802|emb|CAC01746.1| putative protein [Arabidopsis
  misc_feature (1)..(532): Homolog of NCBI NO: 30685369 NR Description: glycosyltransferase family 8 [Arabidopsis >gi|26452322|dbj|BAC43247.1| unknown protein [Arabidopsis
  misc_feature (1)..(532): Homolog of NCBI NO: 30678270 NR Description: glycosyltransferase family 8 [Arabidopsis
  misc_feature (24)..(532): Homolog of NCBI NO: 6714484 NR Description: unknown protein [Arabidopsis thaliana]
  misc_feature (1)..(530): Homolog of NCBI NO: 15239707 NR Description: glycosyltransferase family 8 [Arabidopsis >gi|10176796|dbj|BAB09935.1| contains similarity to unknown
  misc_feature (28)..(531): Homolog of NCBI NO: 22331857 NR Description: glycosyltransferase family 8 [Arabidopsis >gi|20466464|gb|AAM20549.1| putative protein [Arabidopsis >gi|22136432|gb|AAM91294.1| putative protein [Arabidopsis
  misc_feature (28)..(531): Homolog of NCBI NO: 11358146 NR Description: hypothetical protein T20N10.140 - Arabidopsis >gi|7630074|emb|CAB88296.1| putative protein [Arabidopsis
  misc_feature (128)..(529): Homolog of NCBI NO: 18399484 NR Description: glycosyltransferase family 8 [Arabidopsis >gi|14334692|gb|AAK59524.1| unknown protein [Arabidopsis >gi|16323394|gb|AAL15191.1| unknown protein [Arabidopsis
  misc_feature (163)..(529): Homolog of NCBI NO: 15230806 NR Description: glycosyltransferase family 8 [Arabidopsis >gi|26398609|sp|Q9LSG3|QUA1_ARATH Glycosyltransferase QUASIMODO1 emb|CAB71043.1~gene_id:MJL12.8~similar to unknown protein
  misc_feature (103)..(532): Homolog of NCBI NO: 7485958 NR Description: hypothetical protein F22I13.40 - Arabidopsis >gi|4539335|emb|CAB37483.1| putative protein [Arabidopsis >gi|7270811|emb|CAB80492.1| putative protein [Arabidopsis
MQLHISPSMRSITISSSNEFIDLMKIKVAARHISYRTLFHTILILAFLLPFVFILTAVVTLEGVNKCSSIDCLGRRIGPRLLGRVDDSERLARDFYKILNEVSTQEIPDGLKLPNSFSQLVSDMKNNHYDAKTFALVLRAMMEKFERDMRESKFAELMNKHFAASSIPKGIHCLSLRLTDEYSSNAHARRQLPSPEFLPVLSDNAYHHFILSTDNILAASVVVSSAVQSSSKPEKIVFHIITDKKTYAGMHSWFALNSVAPAIVEVKGVHQFDWLTRENVPVLEAVESHNGVRDYYHGNHVAGANLTETTPRTFASKLQSRSPKYISLLNHLRIYIPELFPNLDKVVFLDDDIVVQGDLTPLWDVDLGGKVNGAVETCRGEDEWVMSKRLRNYFNFSHPLIAKHLDPEECAWAYGMNIFDLQAWRKTNIRETYHSWLRENLKSNLTMWKLGTLPPALIAFKGHVHIIDSSWHMLGLGYQSKTNIENVKKAAVIHYNGQSKPWLEIGFEHLRPFWTKYVNYSNDFIKNCHILE

SEQ ID NO: 107590 - protein, 524 aa, Arabidopsis thaliana
  peptide (1)..(524): Ceres Seq. ID no. 13650782
  misc_feature: Pfam Name: Glyco_transf_8 Pfam Description: Glycosyl transferase family 8
  misc_feature (1)..(524): Homolog of NCBI NO: 11358133 NR Description: hypothetical protein T20K14_80 - Arabidopsis >gi|9755802|emb|CAC01746.1| putative protein [Arabidopsis
  misc_feature (1)..(524): Homolog of NCBI NO: 30685369 NR Description: glycosyltransferase family 8 [Arabidopsis >gi|26452322|dbj|BAC43247.1| unknown protein [Arabidopsis
  misc_feature (1)..(524): Homolog of NCBI NO: 30678270 NR Description: glycosyltransferase family 8 [Arabidopsis
  misc_feature (16)..(524): Homolog of NCBI NO: 6714484 NR Description: unknown protein [Arabidopsis thaliana]
  misc_feature (1)..(522): Homolog of NCBI NO: 15239707 NR Description: glycosyltransferase family 8 [Arabidopsis >gi|10176796|dbj|BAB09935.1| contains similarity to unknown
  misc_feature (20)..(523): Homolog of NCBI NO: 22331857 NR Description: glycosyltransferase family 8 [Arabidopsis >gi|20466464|gb|AAM20549.1| putative protein [Arabidopsis >gi|22136432|gb|AAM91294.1| putative protein [Arabidopsis
  misc_feature (20)..(523): Homolog of NCBI NO: 11358146 NR Description: hypothetical protein T20N10.140 - Arabidopsis >gi|7630074|emb|CAB88296.1| putative protein [Arabidopsis
  misc_feature (120)..(521): Homolog of NCBI NO: 18399484 NR Description: glycosyltransferase family 8 [Arabidopsis >gi|14334692|gb|AAK59524.1| unknown protein [Arabidopsis >gi|16323394|gb|AAL15191.1| unknown protein [Arabidopsis
  misc_feature (155)..(521): Homolog of NCBI NO: 15230806 NR Description: glycosyltransferase family 8 [Arabidopsis >gi|26398609|sp|Q9LSG3|QUA1_ARATH Glycosyltransferase QUASIMODO1 emb|CAB71043.1~gene_id:MJL12.8~similar to unknown protein
  misc_feature (95)..(524): Homolog of NCBI NO: 7485958 NR Description: hypothetical protein F22I13.40 - Arabidopsis >gi|4539335|emb|CAB37483.1| putative protein [Arabidopsis >gi|7270811|emb|CAB80492.1| putative protein [Arabidopsis
MRSITISSSNEFIDLMKIKVAARHISYRTLFHTILILAFLLPFVFILTAVVTLEGVNKCSSIDCLGRRIGPRLLGRVDDSERLARDFYKILNEVSTQEIPDGLKLPNSFSQLVSDMKNNHYDAKTFALVLRAMMEKFERDMRESKFAELMNKHFAASSIPKGIHCLSLRLTDEYSSNAHARRQLPSPEFLPVLSDNAYHHFILSTDNILAASVVVSSAVQSSSKPEKIVFHIITDKKTYAGMHSWFALNSVAPAIVEVKGVHQFDWLTRENVPVLEAVESHNGVRDYYHGNHVAGANLTETTPRTFASKLQSRSPKYISLLNHLRIYIPELFPNLDKVVFLDDDIVVQGDLTPLWDVDLGGKVNGAVETCRGEDEWVMSKRLRNYFNFSHPLIAKHLDPEECAWAYGMNIFDLQAWRKTNIRETYHSWLRENLKSNLTMWKLGTLPPALIAFKGHVHIIDSSWHMLGLGYQSKTNIENVKKAAVIHYNGQSKPWLEIGFEHLRPFWTKYVNYSNDFIKNCHILE

SEQ ID NO: 107591 - protein, 509 aa, Arabidopsis thaliana
  peptide (1)..(509): Ceres Seq. ID no. 13650783
  misc_feature: Pfam Name: Glyco_transf_8 Pfam Description: Glycosyl transferase family 8
  misc_feature (1)..(509): Homolog of NCBI NO: 11358133 NR Description: hypothetical protein T20K14_80 - Arabidopsis >gi|9755802|emb|CAC01746.1| putative protein [Arabidopsis
  misc_feature (1)..(509): Homolog of NCBI NO: 30685369 NR Description: glycosyltransferase family 8 [Arabidopsis >gi|26452322|dbj|BAC43247.1| unknown protein [Arabidopsis
  misc_feature (1)..(509): Homolog of NCBI NO: 30678270 NR Description: glycosyltransferase family 8 [Arabidopsis
  misc_feature (1)..(509): Homolog of NCBI NO: 6714484 NR Description: unknown protein [Arabidopsis thaliana]
  misc_feature (1)..(507): Homolog of NCBI NO: 15239707 NR Description: glycosyltransferase family 8 [Arabidopsis >gi|10176796|dbj|BAB09935.1| contains similarity to unknown
  misc_feature (5)..(508): Homolog of NCBI NO: 22331857 NR Description: glycosyltransferase family 8 [Arabidopsis >gi|20466464|gb|AAM20549.1| putative protein [Arabidopsis >gi|22136432|gb|AAM91294.1| putative protein [Arabidopsis
  misc_feature (5)..(508): Homolog of NCBI NO: 11358146 NR Description: hypothetical protein T20N10.140 - Arabidopsis >gi|7630074|emb|CAB88296.1| putative protein [Arabidopsis
  misc_feature (105)..(506): Homolog of NCBI NO: 18399484 NR Description: glycosyltransferase family 8 [Arabidopsis >gi|14334692|gb|AAK59524.1| unknown protein [Arabidopsis >gi|16323394|gb|AAL15191.1| unknown protein [Arabidopsis
  misc_feature (140)..(506): Homolog of NCBI NO: 15230806 NR Description: glycosyltransferase family 8 [Arabidopsis >gi|26398609|sp|Q9LSG3|QUA1_ARATH Glycosyltransferase QUASIMODO1 emb|CAB71043.1~gene_id:MJL12.8~similar to unknown protein
  misc_feature (80)..(509): Homolog of NCBI NO: 7485958 NR Description: hypothetical protein F22I13.40 - Arabidopsis >gi|4539335|emb|CAB37483.1| putative protein [Arabidopsis >gi|7270811|emb|CAB80492.1| putative protein [Arabidopsis
MKIKVAARHISYRTLFHTILILAFLLPFVFILTAVVTLEGVNKCSSIDCLGRRIGPRLLGRVDDSERLARDFYKILNEVSTQEIPDGLKLPNSFSQLVSDMKNNHYDAKTFALVLRAMMEKFERDMRESKFAELMNKHFAASSIPKGIHCLSLRLTDEYSSNAHARRQLPSPEFLPVLSDNAYHHFILSTDNILAASVVVSSAVQSSSKPEKIVFHIITDKKTYAGMHSWFALNSVAPAIVEVKGVHQFDWLTRENVPVLEAVESHNGVRDYYHGNHVAGANLTETTPRTFASKLQSRSPKYISLLNHLRIYIPELFPNLDKVVFLDDDIVVQGDLTPLWDVDLGGKVNGAVETCRGEDEWVMSKRLRNYFNFSHPLIAKHLDPEECAWAYGMNIFDLQAWRKTNIRETYHSWLRENLKSNLTMWKLGTLPPALIAFKGHVHIIDSSWHMLGLGYQSKTNIENVKKAAVIHYNGQSKPWLEIGFEHLRPFWTKYVNYSNDFIKNCHILE

SEQ ID NO: 107592 - DNA, 945 bp, Arabidopsis thaliana
  misc_feature (1)..(945): Ceres Seq. ID no. 13650792
  misc_feature: MA Experiment ID: 20000184 Result: Down-regulated in Transcription
  misc_feature: MA Experiment 20000184 PARAMETER Experiment Name: At_Shoots__P Parameter: Age (day) Value: 7
  misc_feature: MA Experiment 20000184 PARAMETER Experiment Name: At_Shoots__P Parameter: Tissue Value: Shoots vs. Whole Plant
  misc_feature: MA Experiment ID: 20000234 Result: Up-regulated in Transcription
  misc_feature: MA Experiment 20000234 PARAMETER Experiment Name: At_Siliques_P Parameter: Age (day) Value: 21
  misc_feature: MA Experiment 20000234 PARAMETER Experiment Name: At_Siliques_P Parameter: Organism Value: A. thaliana
  misc_feature: MA Experiment 20000234 PARAMETER Experiment Name: At_Siliques_P Parameter: Plant Line Value: WS
  misc_feature: MA Experiment 20000234 PARAMETER Experiment Name: At_Siliques_P Parameter: Tissue Value: Less Than 5mm Siliques vs. Whole Plant
  misc_feature: MA Experiment ID: 20000438 Result: Down-regulated in Transcription
  misc_feature: MA Experiment 20000438 PARAMETER Experiment Name: At_Shoots__P Parameter: Age (day) Value: 14
  misc_feature: MA Experiment 20000438 PARAMETER Experiment Name: At_Shoots__P Parameter: Tissue Value: Shoots vs. Whole Plant
  misc_feature: MA Experiment ID: 20000527 Result: Down-regulated in Transcription
  misc_feature: MA Experiment 20000527 PARAMETER Experiment Name: At_10percent_PEG_P Parameter: Age (day) Value: 20
  misc_feature: MA Experiment 20000527 PARAMETER Experiment Name: At_10percent_PEG_P Parameter: Organism Value: A. thaliana
  misc_feature: MA Experiment 20000527 PARAMETER Experiment Name: At_10percent_PEG_P Parameter: Plant Line Value: WS
  misc_feature: MA Experiment 20000527 PARAMETER Experiment Name: At_10percent_PEG_P Parameter: Timepoint (day) Value: 20
  misc_feature: MA Experiment 20000527 PARAMETER Experiment Name: At_10percent_PEG_P Parameter: Tissue Value: Whole Plant
  misc_feature: MA Experiment 20000527 PARAMETER Experiment Name: At_10percent_PEG_P Parameter: Treatment Value: 10percent PEG vs. No Treatment
  misc_feature: MA Experiment ID: 20000794 Result: Down-regulated in Transcription
  misc_feature: MA Experiment 20000794 PARAMETER Experiment Name: At_Petals_P Parameter: Age (day) Value: 23-25 days
  misc_feature: MA Experiment 20000794 PARAMETER Experiment Name: At_Petals_P Parameter: Plant Line Value: WS
  misc_feature: MA Experiment 20000794 PARAMETER Experiment Name: At_Petals_P Parameter: Tissue Value: Petals vs. Whole plant
  misc_feature: MA Experiment ID: 20001554 Result: Up-regulated in Transcription
  misc_feature: MA Experiment 20001554 PARAMETER Experiment Name: At_Drought_Soil_Dry_P Parameter: Age (day) Value: 21
  misc_feature: MA Experiment 20001554 PARAMETER Experiment Name: At_Drought_Soil_Dry_P Parameter: Organism Value: A. thaliana
  misc_feature: MA Experiment 20001554 PARAMETER Experiment Name: At_Drought_Soil_Dry_P Parameter: Plant Line Value: WS
  misc_feature: MA Experiment 20001554 PARAMETER Experiment Name: At_Drought_Soil_Dry_P Parameter: Post Timepoint (hr) Value: None
  misc_feature: MA Experiment 20001554 PARAMETER Experiment Name: At_Drought_Soil_Dry_P Parameter: Post-Treatment Value: None
  misc_feature: MA Experiment 20001554 PARAMETER Experiment Name: At_Drought_Soil_Dry_P Parameter: Timepoint (day) Value: 7
  misc_feature: MA Experiment 20001554 PARAMETER Experiment Name: At_Drought_Soil_Dry_P Parameter: Treatment Value: Drought vs. No Drought
  misc_feature: MA Experiment ID: 20001555 Result: Up-regulated in Transcription
  misc_feature: MA Experiment 20001555 PARAMETER Experiment Name: At_Drought_Soil_Dry_P Parameter: Age (day) Value: 24
  misc_feature: MA Experiment 20001555 PARAMETER Experiment Name: At_Drought_Soil_Dry_P Parameter: Organism Value: A. thaliana
  misc_feature: MA Experiment 20001555 PARAMETER Experiment Name: At_Drought_Soil_Dry_P Parameter: Plant Line Value: WS
  misc_feature: MA Experiment 20001555 PARAMETER Experiment Name: At_Drought_Soil_Dry_P Parameter: Post Timepoint (hr) Value: None
  misc_feature: MA Experiment 20001555 PARAMETER Experiment Name: At_Drought_Soil_Dry_P Parameter: Post-Treatment Value: None
  misc_feature: MA Experiment 20001555 PARAMETER Experiment Name: At_Drought_Soil_Dry_P Parameter: Timepoint (day) Value: 10
  misc_feature: MA Experiment 20001555 PARAMETER Experiment Name: At_Drought_Soil_Dry_P Parameter: Treatment Value: Drought vs. No Drought
  misc_feature: MA Experiment ID: 20001556 Result: Up-regulated in Transcription
  misc_feature: MA Experiment 20001556 PARAMETER Experiment Name: At_Drought_Soil_Dry_P Parameter: Age (day) Value: 26
  misc_feature: MA Experiment 20001556 PARAMETER Experiment Name: At_Drought_Soil_Dry_P Parameter: Organism Value: A. thaliana
  misc_feature: MA Experiment 20001556 PARAMETER Experiment Name: At_Drought_Soil_Dry_P Parameter: Plant Line Value: WS
  misc_feature: MA Experiment 20001556 PARAMETER Experiment Name: At_Drought_Soil_Dry_P Parameter: Post Timepoint (hr) Value: None
  misc_feature: MA Experiment 20001556 PARAMETER Experiment Name: At_Drought_Soil_Dry_P Parameter: Post-Treatment Value: None
  misc_feature: MA Experiment 20001556 PARAMETER Experiment Name: At_Drought_Soil_Dry_P Parameter: Timepoint (day) Value: 12
  misc_feature: MA Experiment 20001556 PARAMETER Experiment Name: At_Drought_Soil_Dry_P Parameter: Treatment Value: Drought vs. No Drought
  misc_feature: MA Experiment ID: 20001768 Result: Up-regulated in Transcription
  misc_feature: MA Experiment 20001768 PARAMETER Experiment Name: At_Far-red-enriched-adult_P Parameter: Age (day) Value: 28
  misc_feature: MA Experiment 20001768 PARAMETER Experiment Name: At_Far-red-enriched-adult_P Parameter: Light Value: Far-red enriched vs. White
  misc_feature: MA Experiment 20001768 PARAMETER Experiment Name: At_Far-red-enriched-adult_P Parameter: Organism Value: A. thaliana
  misc_feature: MA Experiment 20001768 PARAMETER Experiment Name: At_Far-red-enriched-adult_P Parameter: Plant Line Value: Columbia
  misc_feature: MA Experiment 20001768 PARAMETER Experiment Name: At_Far-red-enriched-adult_P Parameter: Timepoint (hr) Value: 1
  misc_feature: MA Experiment 20001768 PARAMETER Experiment Name: At_Far-red-enriched-adult_P Parameter: Tissue Value: Aerial
  misc_feature: MA Experiment ID: 20001771 Result: Up-regulated in Transcription
  misc_feature: MA Experiment 20001771 PARAMETER Experiment Name: At_Far-red-enriched-adult_P Parameter: Age (day) Value: 28
  misc_feature: MA Experiment 20001771 PARAMETER Experiment Name: At_Far-red-enriched-adult_P Parameter: Light Value: Far-red enriched vs. White
  misc_feature: MA Experiment 20001771 PARAMETER Experiment Name: At_Far-red-enriched-adult_P Parameter: Organism Value: A. thaliana
  misc_feature: MA Experiment 20001771 PARAMETER Experiment Name: At_Far-red-enriched-adult_P Parameter: Plant Line Value: Columbia
  misc_feature: MA Experiment 20001771 PARAMETER Experiment Name: At_Far-red-enriched-adult_P Parameter: Timepoint (hr) Value: 16
  misc_feature: MA Experiment 20001771 PARAMETER Experiment Name: At_Far-red-enriched-adult_P Parameter: Tissue Value: Aerial
  misc_feature: MA Experiment ID: 20001773 Result: Up-regulated in Transcription
  misc_feature: MA Experiment 20001773 PARAMETER Experiment Name: At_Far-red-enriched-adult_P Parameter: Age (day) Value: 30
  misc_feature: MA Experiment 20001773 PARAMETER Experiment Name: At_Far-red-enriched-adult_P Parameter: Light Value: Far-red enriched vs. White
  misc_feature: MA Experiment 20001773 PARAMETER Experiment Name: At_Far-red-enriched-adult_P Parameter: Organism Value: A. thaliana
  misc_feature: MA Experiment 20001773 PARAMETER Experiment Name: At_Far-red-enriched-adult_P Parameter: Plant Line Value: Columbia
  misc_feature: MA Experiment 20001773 PARAMETER Experiment Name: At_Far-red-enriched-adult_P Parameter: Timepoint (hr) Value: 48
  misc_feature: MA Experiment 20001773 PARAMETER Experiment Name: At_Far-red-enriched-adult_P Parameter: Tissue Value: Aerial
  misc_feature: MA Experiment ID: 20001904 Result: Up-regulated in Transcription
  misc_feature: MA Experiment 20001904 PARAMETER Experiment Name: At_Drought_Reproduction_P Parameter: Age (day) Value: 37
  misc_feature: MA Experiment 20001904 PARAMETER Experiment Name: At_Drought_Reproduction_P Parameter: Organism Value: A. thaliana
  misc_feature: MA Experiment 20001904 PARAMETER Experiment Name: At_Drought_Reproduction_P Parameter: Plant Line Value: WS
  misc_feature: MA Experiment 20001904 PARAMETER Experiment Name: At_Drought_Reproduction_P Parameter: Timepoint (day) Value: 7
  misc_feature: MA Experiment 20001904 PARAMETER Experiment Name: At_Drought_Reproduction_P Parameter: Tissue Value: Rosettes
  misc_feature: MA Experiment 20001904 PARAMETER Experiment Name: At_Drought_Reproduction_P Parameter: Treatment Value: Drought vs. No Drought
  misc_feature: MA Experiment ID: 20001906 Result: Down-regulated in Transcription
  misc_feature: MA Experiment 20001906 PARAMETER Experiment Name: At_Drought_Reproduction_P Parameter: Age (day) Value: 35
  misc_feature: MA Experiment 20001906 PARAMETER Experiment Name: At_Drought_Reproduction_P Parameter: Organism Value: A. thaliana
  misc_feature: MA Experiment 20001906 PARAMETER Experiment Name: At_Drought_Reproduction_P Parameter: Plant Line Value: WS
  misc_feature: MA Experiment 20001906 PARAMETER Experiment Name: At_Drought_Reproduction_P Parameter: Timepoint (day) Value: 5
  misc_feature: MA Experiment 20001906 PARAMETER Experiment Name: At_Drought_Reproduction_P Parameter: Tissue Value: Siliques
  misc_feature: MA Experiment 20001906 PARAMETER Experiment Name: At_Drought_Reproduction_P Parameter: Treatment Value: Drought vs. No Drought
  misc_feature: MA Experiment ID: 20001908 Result: Down-regulated in Transcription
  misc_feature: MA Experiment 20001908 PARAMETER Experiment Name: At_Drought_Reproduction_P Parameter: Age (day) Value: 40
  misc_feature: MA Experiment 20001908 PARAMETER Experiment Name: At_Drought_Reproduction_P Parameter: Organism Value: A. thaliana
  misc_feature: MA Experiment 20001908 PARAMETER Experiment Name: At_Drought_Reproduction_P Parameter: Plant Line Value: WS
  misc_feature: MA Experiment 20001908 PARAMETER Experiment Name: At_Drought_Reproduction_P Parameter: Timepoint (day) Value: 10
  misc_feature: MA Experiment 20001908 PARAMETER Experiment Name: At_Drought_Reproduction_P Parameter: Tissue Value: Siliques
  misc_feature: MA Experiment 20001908 PARAMETER Experiment Name: At_Drought_Reproduction_P Parameter: Treatment Value: Drought vs. No Drought
gagagagttaagtgagtagttggagatagaaagatcagagacgaggaatctctctcccactctcactttctctcctattcttagttcgtgtcagaaacacacagagaaattaagaaccctaatttaaaacagaagaatggtacattcgaagaagttccgaggtgtccgccagcgtcagtggggttcttgggtttctgagattcgtcatcctctcttagtgtggctaggaacattcgacacggcggaaacagcggctagagcctacgaccaagccgcggttctaatgaacggccagagcgcgaagactaacttccccgtcatcaaatcgaacggttcaaattccttggagattaactctgcgttaaggtctcccaaatcattatcggaactattgaacgctaagctaaggaagaactgtaaagaccagacaccgtatctgacgtgtctccgcctcgacaacgacagctcacacatcggcgtctggcagaaacgcgccgggtcaaaaacgagtccaaactgggtcaagcttgttgaactaggtgacaaagttaacgcacgtcccggtggtgatattgagactaataagatgaaggtacgaaacgaagacgttcaggaagatgatcaaatggcgatgcagatgatcgaggagttgcttaactggacctgtcctggatctggatccattgcacaggtctaaaggagaatcattgaattatatgatcaagataataatatagttgagggttaataataatcgagggtaagtaatttacgtgtagctaataattaatataattttcgaacatatatatgaatatatgatagctctagaaatgagtacgtatatatacgtaaacatttttcctcaaatatagtatatgtgttgtgattctaagacttgtaaactgatatggcctactgtttaaagagtagttgatattttct

SEQ ID NO: 107593 - protein, 186 aa, Arabidopsis thaliana
  peptide (1)..(186): Ceres Seq. ID no. 13650793
  misc_feature (4)..(65): Pfam Name: AP2 domain Pfam Description: AP2 domain
  misc_feature (1)..(186): Homolog of NCBI NO: 30689846 NR Description: AP2 domain transcription factor, putative thaliana] >gi|26452577|dbj|BAC43373.1| putative AP2 domain protein [Arabidopsis thaliana] >gi|28973113|gb|AAO63881.1|
  misc_feature (1)..(186): Homolog of NCBI NO: 15239413 NR Description: AP2 domain transcription factor, putative
  misc_feature (1)..(176): Homolog of NCBI NO: 15238976 NR Description: putative protein; protein id: At5g11190.1 thaliana] >gi|8953381|emb|CAB96654.1| putative protein
  misc_feature (1)..(174): Homolog of NCBI NO: 15218134 NR Description: ethylene responsive element binding factor 2
  misc_feature (1)..(174): Homolog of NCBI NO: 21553845 NR Description: putative ethylene responsive element [Arabidopsis
  misc_feature (5)..(175): Homolog of NCBI NO: 15238727 NR Description: ethylene responsive element binding protein, [Arabidopsis thaliana] >gi|15010716|gb|AAK74017.1| [Arabidopsis thaliana] >gi|16974345|gb|AAL31157.1|
  misc_feature (6)..(94): Homolog of NCBI NO: 38343976 NR Description: OSJNBb0022F16.15 [Oryza sativa (japonica
  misc_feature (5)..(92): Homolog of NCBI NO: 18650662 NR Description: ethylene response factor 1 [Lycopersicon
  misc_feature (1)..(133): Homolog of NCBI NO: 21554056 NR Description: TINY-like protein [Arabidopsis thaliana]
  misc_feature (1)..(133): Homolog of NCBI NO: 15219139 NR Description: transcription factor TINY family [Arabidopsis
MVHSKKFRGVRQRQWGSWVSEIRHPLLVWLGTFDTAETAARAYDQAAVLMNGQSAKTNFPVIKSNGSNSLEINSALRSPKSLSELLNAKLRKNCKDQTPYLTCLRLDNDSSHIGVWQKRAGSKTSPNWVKLVELGDKVNARPGGDIETNKMKVRNEDVQEDDQMAMQMIEELLNWTCPGSGSIAQV

SEQ ID NO: 107594 - protein, 137 aa, Arabidopsis thaliana; identical to SEQ ID NO: 80216
  peptide (1)..(137): Ceres Seq. ID no. 13650794
  misc_feature (1)..(137): Homolog of NCBI NO: 30689846 NR Description: AP2 domain transcription factor, putative thaliana] >gi|26452577|dbj|BAC43373.1| putative AP2 domain protein [Arabidopsis thaliana] >gi|28973113|gb|AAO63881.1|
  misc_feature (1)..(137): Homolog of NCBI NO: 15239413 NR Description: AP2 domain transcription factor, putative
  misc_feature (1)..(127): Homolog of NCBI NO: 15238976 NR Description: putative protein; protein id: At5g11190.1 thaliana] >gi|8953381|emb|CAB96654.1| putative protein
  misc_feature (1)..(125): Homolog of NCBI NO: 15218134 NR Description: ethylene responsive element binding factor 2
  misc_feature (1)..(125): Homolog of NCBI NO: 21553845 NR Description: putative ethylene responsive element [Arabidopsis
  misc_feature (1)..(126): Homolog of NCBI NO: 15238727 NR Description: ethylene responsive element binding protein, [Arabidopsis thaliana] >gi|15010716|gb|AAK74017.1| [Arabidopsis thaliana] >gi|16974345|gb|AAL31157.1|
  misc_feature (1)..(45): Homolog of NCBI NO: 38343976 NR Description: OSJNBb0022F16.15 [Oryza sativa (japonica
  misc_feature (1)..(43): Homolog of NCBI NO: 18650662 NR Description: ethylene response factor 1 [Lycopersicon
  misc_feature (1)..(84): Homolog of NCBI NO: 21554056 NR Description: TINY-like protein [Arabidopsis thaliana]
  misc_feature (1)..(84): Homolog of NCBI NO: 15219139 NR Description: transcription factor TINY family [Arabidopsis

SEQ ID NO: 107595 - DNA, 3029 bp, Arabidopsis thaliana
  misc_feature (1)..(3029): Ceres Seq. ID no. 13650817
  misc_feature: MA Experiment ID: 108464 Result: Up-regulated in Transcription
  misc_feature: MA Experiment 108464 PARAMETER Experiment Name: At_Germinating_Seeds_cDNA_P Parameter: Age (day) Value: 4 vs. 0
  misc_feature: MA Experiment 108464 PARAMETER Experiment Name: At_Germinating_Seeds_cDNA_P Parameter: Tissue Value: Germinating Seeds
  misc_feature: MA Experiment ID: 20000071 Result: Up-regulated in Transcription
  misc_feature: MA Experiment 20000071 PARAMETER Experiment Name: At_100uM_ABA_Mutants_cDNA_P Parameter: Plant Line Value: CS8104
  misc_feature: MA Experiment 20000071 PARAMETER Experiment Name: At_100uM_ABA_Mutants_cDNA_P Parameter: Timepoint (hr) Value: 6
  misc_feature: MA Experiment 20000071 PARAMETER Experiment Name: At_100uM_ABA_Mutants_cDNA_P Parameter: Tissue Value: Aerial
  misc_feature: MA Experiment 20000071 PARAMETER Experiment Name: At_100uM_ABA_Mutants_cDNA_P Parameter: Treatment Value: 100uM ABA vs. No Treatment
gtacggagaattaagcttcctttggagatggcgtccatggcgaccggcgtcagtttttcgatgactagcggcataggagaaggaggatacgatgttcatcgagtagcgacggctgcacggacaactctgaagctgaatcagaagaactcactgagcgagagtacatgcatgcttttggggatgaataagtatcggggatccggagctatacgaaccgtctcgaaggctgtcggttacggacaagagatgagtaagagtctgagggtgggactcatttgcggaggtccgtcggcggagcgcgggatttctctcaactctgctagatcagttctcgatcatattcagggtgatggtataaacgtgagctgctattatatagatcctgatctcaaagcctttgcaatttcatccgctcaggtgtactcgaatactccttcagatttcgattttaagctggagagtcttgcacagggattctcgtcattatccgaattggccgagcatcttgtttctgctgtggacattgtttttccagtaattcatggtcgatttggtgaagatgggggcattcaggagctgttggaaagtcacaacattccatttgtggggactggatcccgtgaatgttttcgagcatttgacaagtatgaagcctctttggagctcaaggaacttggtttcatgacagtaccaaactacttggtgcagggaactggagtagacaaaagtgaaatagcactgtggtttacagataaccagctggatctcgagatgggaaaagttgtggtaaaaccagctaaagcaggttcaagcattggtgtcaaggttgcttttggcgtaaatgattcaattaaaaaggctactcttattctagagggaattgatgatagagttgttgttgaggtgtttattgaagatgcatatgagttcactgccatcgtcctggatgtgggttctggttctgtttgccatcctgttgttttgatgcctactgaggtgcaacttcagtttcatggcattggtgatccaaaggaaaacgcaatcttcgactatcggaggaagtatctgccgacacagcaggtcacctatcacactcctccacgtttccctatccatgttatcaaaagtattcgtgaagaggcatctcttatatttcaaaagcttggtttacgtgactttgctcgcattgatggatggtatttggctcccaattcaaatttatcatcacctgtaagtgaaacgcttggaggaaccaagtcaggagatattatattcacagacatcaacctgataagtggcatgaagcaaactagctttctcttccagcaggcatctaaggttggattttctcattcaaacattctgcgaacaatcgtccaccgtgcttgctcgaggtttccccatcttgattggtataattatgggtatagtcaattactccaaggttcaacaaccctggaagtctctgaggacccccagaaagtgtttgtcatatttggaggagatacttcagagcggcaggtgtccgtcatgagtggaacaaatgtctgggtcaatttgcaaagatatgtagatcttaatgtaactccctgtttgctttccccctcacttagcaactcattaggcgcatcttcgaacttggacaatagagaagtctgggttttgccctactcggttgtgctaaggcacactgctgaggaagttcttgcagcgtgcttagaagcagtcgagcctgttagggctttatttacatctctgctgcagaagcaagtgatggaggatcttatggatggttttaagaatcaaagctggtttgcagggtttgatataacagacgagctgcccagaaagtactcattgaaagagtggatcaagcatgccaaggaagctcaagcaactgtcttcattgcagtgcatggaggaattggtgaagatggtacactgcagggcttgctggaggatgaaggagtttcttatacaggtccaggcgtactagcttcaaggacttgtatggacaaggttatgacatctcaggctcttagtaatctttcagagtttggaattcataccataagcaaagatgtgaagagaacagaggatataatgcatgagaccttcccaaatgtttgggatgaattaatcaagaagcttcagtgtctcacactatgtgttaaaccagcaaaggatggatgttccactggcgttgcaagattatgttcctctgaagaccttgctgtatatgtacaagctttgaaagattgtataccaagaattcctccaaacactctttctaagacacatggaatgattgagatgccaaatcctactccagaattcttgatttttgaaccatttgtcgaaaccgatgaaatcatagtttcatccaaagccaagcagcagctctcttggaaaggtaggaggcggtgggtagagatgactgtgggtgtaattggaaagcatgggtcaatgcattcactgagtcctagtcttactgtcaaggaaagtggggatatattgtctctcgaggaaaagttccaagtggcatatgaaattaaatcttgaataggaggcactggcataaatcttactccacctccaccaacaatcatgagtaaggaagctttggagagatgcaaacaaggcattgagctgattgcagaaactctcggcttagaagggttttcacggatcgatgcttttgtgcatgttgaaaccggagaggtgctggttatagaggtaaacacagttcccggaatgactccttccactgttttaatccaacaggcattagcagagcagccgccaatgtaccctcctcaattctttcgcactctgctccatcttgctacgcagagagttgtgtaagcttttctttgtctttcgtatttacattattcccaagtttagtgtgttttttgtaaattcgatgccttcgtcatatgattaaaataaagtggatcccatatgtatgagctatgatttgaatttcatttcggtatatattttatgaattgtaaatttgcaatatc

SEQ ID NO: 107596 - protein, 853 aa, Arabidopsis thaliana
  peptide (1)..(853): Ceres Seq. ID no. 13650818
  misc_feature (87)..(412): Pfam Name: D-ala D-ala ligase Pfam Description: D-ala D-ala ligase
  misc_feature (80)..(853): Homolog of NCBI NO: 33146883 NR Description: unknown protein [Oryza sativa (japonica
  misc_feature (10)..(527): Homolog of NCBI NO: 18398265 NR Description: expressed protein [Arabidopsis thaliana] unknown protein [Arabidopsis thaliana]
  misc_feature (116)..(853): Homolog of NCBI NO: 34898182 NR Description: P0034A04.1 [Oryza sativa (japonica
  misc_feature (80)..(115): Homolog of NCBI NO: 34898182 NR Description: P0034A04.1 [Oryza sativa (japonica
  misc_feature (13)..(527): Homolog of NCBI NO: 21536607 NR Description: unknown [Arabidopsis thaliana]
  misc_feature (10)..(527): Homolog of NCBI NO: 6403498 NR Description: unknown protein [Arabidopsis thaliana]
  misc_feature (592)..(846): Homolog of NCBI NO: 15231971 NR Description: expressed protein [Arabidopsis thaliana]
  misc_feature (615)..(845): Homolog of NCBI NO: 23136007 NR Description: hypothetical protein [Cytophaga hutchinsonii]
  misc_feature (134)..(287): Homolog of NCBI NO: 23136007 NR Description: hypothetical protein [Cytophaga hutchinsonii]
  misc_feature (421)..(568): Homolog of NCBI NO: 23136007 NR Description: hypothetical protein [Cytophaga hutchinsonii]
VRRIKLPLEMASMATGVSFSMTSGIGEGGYDVHRVATAARTTLKLNQKNSLSESTCMLLGMNKYRGSGAIRTVSKAVGYGQEMSKSLRVGLICGGPSAERGISLNSARSVLDHIQGDGINVSCYYIDPDLKAFAISSAQVYSNTPSDFDFKLESLAQGFSSLSELAEHLVSAVDIVFPVIHGRFGEDGGIQELLESHNIPFVGTGSRECFRAFDKYEASLELKELGFMTVPNYLVQGTGVDKSEIALWFTDNQLDLEMGKVVVKPAKAGSSIGVKVAFGVNDSIKKATLILEGIDDRVVVEVFIEDAYEFTAIVLDVGSGSVCHPVVLMPTEVQLQFHGIGDPKENAIFDYRRKYLPTQQVTYHTPPRFPIHVIKSIREEASLIFQKLGLRDFARIDGWYLAPNSNLSSPVSETLGGTKSGDIIFTDINLISGMKQTSFLFQQASKVGFSHSNILRTIVHRACSRFPHLDWYNYGYSQLLQGSTTLEVSEDPQKVFVIFGGDTSERQVSVMSGTNVWVNLQRYVDLNVTPCLLSPSLSNSLGASSNLDNREVWVLPYSVVLRHTAEEVLAACLEAVEPVRALFTSLLQKQVMEDLMDGFKNQSWFAGFDITDELPRKYSLKEWIKHAKEAQATVFIAVHGGIGEDGTLQGLLEDEGVSYTGPGVLASRTCMDKVMTSQALSNLSEFGIHTISKDVKRTEDIMHETFPNVWDELIKKLQCLTLCVKPAKDGCSTGVARLCSSEDLAVYVQALKDCIPRIPPNTLSKTHGMIEMPNPTPEFLIFEPFVETDEIIVSSKAKQQLSWKGRRRWVEMTVGVIGKHGSMHSLSPSLTVKESGDILSLEEKFQVAYEIKS

SEQ ID NO: 107597 - protein, 844 aa, Arabidopsis thaliana
  peptide (1)..(844): Ceres Seq. ID no. 13650819
  misc_feature (78)..(403): Pfam Name: D-ala D-ala ligase Pfam Description: D-ala D-ala ligase
  misc_feature (71)..(844): Homolog of NCBI NO: 33146883 NR Description: unknown protein [Oryza sativa (japonica
  misc_feature (1)..(518): Homolog of NCBI NO: 18398265 NR Description: expressed protein [Arabidopsis thaliana] unknown protein [Arabidopsis thaliana]
  misc_feature (107)..(844): Homolog of NCBI NO: 34898182 NR Description: P0034A04.1 [Oryza sativa (japonica
  misc_feature (71)..(106): Homolog of NCBI NO: 34898182 NR Description: P0034A04.1 [Oryza sativa (japonica
  misc_feature (4)..(518): Homolog of NCBI NO: 21536607 NR Description: unknown [Arabidopsis thaliana]
  misc_feature (1)..(518): Homolog of NCBI NO: 6403498 NR Description: unknown protein [Arabidopsis thaliana]
  misc_feature (583)..(837): Homolog of NCBI NO: 15231971 NR Description: expressed protein [Arabidopsis thaliana]
  misc_feature (606)..(836): Homolog of NCBI NO: 23136007 NR Description: hypothetical protein [Cytophaga hutchinsonii]
  misc_feature (125)..(278): Homolog of NCBI NO: 23136007 NR Description: hypothetical protein [Cytophaga hutchinsonii]
  misc_feature (412)..(559): Homolog of NCBI NO: 23136007 NR Description: hypothetical protein [Cytophaga hutchinsonii]
MASMATGVSFSMTSGIGEGGYDVHRVATAARTTLKLNQKNSLSESTCMLLGMNKYRGSGAIRTVSKAVGYGQEMSKSLRVGLICGGPSAERGISLNSARSVLDHIQGDGINVSCYYIDPDLKAFAISSAQVYSNTPSDFDFKLESLAQGFSSLSELAEHLVSAVDIVFPVIHGRFGEDGGIQELLESHNIPFVGTGSRECFRAFDKYEASLELKELGFMTVPNYLVQGTGVDKSEIALWFTDNQLDLEMGKVVVKPAKAGSSIGVKVAFGVNDSIKKATLILEGIDDRVVVEVFIEDAYEFTAIVLDVGSGSVCHPVVLMPTEVQLQFHGIGDPKENAIFDYRRKYLPTQQVTYHTPPRFPIHVIKSIREEASLIFQKLGLRDFARIDGWYLAPNSNLSSPVSETLGGTKSGDIIFTDINLISGMKQTSFLFQQASKVGFSHSNILRTIVHRACSRFPHLDWYNYGYSQLLQGSTTLEVSEDPQKVFVIFGGDTSERQVSVMSGTNVWVNLQRYVDLNVTPCLLSPSLSNSLGASSNLDNREVWVLPYSVVLRHTAEEVLAACLEAVEPVRALFTSLLQKQVMEDLMDGFKNQSWFAGFDITDELPRKYSLKEWIKHAKEAQATVFIAVHGGIGEDGTLQGLLEDEGVSYTGPGVLASRTCMDKVMTSQALSNLSEFGIHTISKDVKRTEDIMHETFPNVWDELIKKLQCLTLCVKPAKDGCSTGVARLCSSEDLAVYVQALKDCIPRIPPNTLSKTHGMIEMPNPTPEFLIFEPFVETDEIIVSSKAKQQLSWKGRRRWVEMTVGVIGKHGSMHSLSPSLTVKESGDILSLEEKFQVAYEIKS

SEQ ID NO: 107598 - protein, 841 aa, Arabidopsis thaliana
  peptide (1)..(841): Ceres Seq. ID no. 13650820
  misc_feature (75)..(400): Pfam Name: D-ala D-ala ligase Pfam Description: D-ala D-ala ligase
  misc_feature (68)..(841): Homolog of NCBI NO: 33146883 NR Description: unknown protein [Oryza sativa (japonica
  misc_feature (1)..(515): Homolog of NCBI NO: 18398265 NR Description: expressed protein [Arabidopsis thaliana] unknown protein [Arabidopsis thaliana]
  misc_feature (104)..(841): Homolog of NCBI NO: 34898182 NR Description: P0034A04.1 [Oryza sativa (japonica
  misc_feature (68)..(103): Homolog of NCBI NO: 34898182 NR Description: P0034A04.1 [Oryza sativa (japonica
  misc_feature (1)..(515): Homolog of NCBI NO: 21536607 NR Description: unknown [Arabidopsis thaliana]
  misc_feature (1)..(515): Homolog of NCBI NO: 6403498 NR Description: unknown protein [Arabidopsis thaliana]
  misc_feature (580)..(834): Homolog of NCBI NO: 15231971 NR Description: expressed protein [Arabidopsis thaliana]
  misc_feature (603)..(833): Homolog of NCBI NO: 23136007 NR Description: hypothetical protein [Cytophaga hutchinsonii]
  misc_feature (122)..(275): Homolog of NCBI NO: 23136007 NR Description: hypothetical protein [Cytophaga hutchinsonii]
  misc_feature (409)..(556): Homolog of NCBI NO: 23136007 NR Description: hypothetical protein [Cytophaga hutchinsonii]
MATGVSFSMTSGIGEGGYDVHRVATAARTTLKLNQKNSLSESTCMLLGMNKYRGSGAIRTVSKAVGYGQEMSKSLRVGLICGGPSAERGISLNSARSVLDHIQGDGINVSCYYIDPDLKAFAISSAQVYSNTPSDFDFKLESLAQGFSSLSELAEHLVSAVDIVFPVIHGRFGEDGGIQELLESHNIPFVGTGSRECFRAFDKYEASLELKELGFMTVPNYLVQGTGVDKSEIALWFTDNQLDLEMGKVVVKPAKAGSSIGVKVAFGVNDSIKKATLILEGIDDRVVVEVFIEDAYEFTAIVLDVGSGSVCHPVVLMPTEVQLQFHGIGDPKENAIFDYRRKYLPTQQVTYHTPPRFPIHVIKSIREEASLIFQKLGLRDFARIDGWYLAPNSNLSSPVSETLGGTKSGDIIFTDINLISGMKQTSFLFQQASKVGFSHSNILRTIVHRACSRFPHLDWYNYGYSQLLQGSTTLEVSEDPQKVFVIFGGDTSERQVSVMSGTNVWVNLQRYVDLNVTPCLLSPSLSNSLGASSNLDNREVWVLPYSVVLRHTAEEVLAACLEAVEPVRALFTSLLQKQVMEDLMDGFKNQSWFAGFDITDELPRKYSLKEWIKHAKEAQATVFIAVHGGIGEDGTLQGLLEDEGVSYTGPGVLASRTCMDKVMTSQALSNLSEFGIHTISKDVKRTEDIMHETFPNVWDELIKKLQCLTLCVKPAKDGCSTGVARLCSSEDLAVYVQALKDCIPRIPPNTLSKTHGMIEMPNPTPEFLIFEPFVETDEIIVSSKAKQQLSWKGRRRWVEMTVGVIGKHGSMHSLSPSLTVKESGDILSLEEKFQVAYEIKS

SEQ ID NO: 107599 - DNA, 2772 bp, Arabidopsis thaliana
  misc_feature (1)..(2772): Ceres Seq. ID no. 13650829
  misc_feature: MA Experiment ID: 20000286 Result: Up-regulated in Transcription
  misc_feature: MA Experiment 20000286 PARAMETER Experiment Name: At_Open_Flower_P Parameter: Age (day) Value: 21
  misc_feature: MA Experiment 20000286 PARAMETER Experiment Name: At_Open_Flower_P Parameter: Plant Line Value: WS
  misc_feature: MA Experiment 20000286 PARAMETER Experiment Name: At_Open_Flower_P Parameter: Tissue Value: Half Open vs. Whole Plant
  misc_feature: MA Experiment ID: 20000437 Result: Down-regulated in Transcription
  misc_feature: MA Experiment 20000437 PARAMETER Experiment Name: At_Drought_P Parameter: Age (day) Value: 8
  misc_feature: MA Experiment 20000437 PARAMETER Experiment Name: At_Drought_P Parameter: Organism Value: A. thaliana
  misc_feature: MA Experiment 20000437 PARAMETER Experiment Name: At_Drought_P Parameter: Plant Line Value: WS
  misc_feature: MA Experiment 20000437 PARAMETER Experiment Name: At_Drought_P Parameter: Timepoint (hr) Value: 24
  misc_feature: MA Experiment 20000437 PARAMETER Experiment Name: At_Drought_P Parameter: Tissue Value: Whole Plant
  misc_feature: MA Experiment 20000437 PARAMETER Experiment Name: At_Drought_P Parameter: Treatment Value: Drought vs. No Drought
  misc_feature: MA Experiment ID: 20000495 Result: Up-regulated in Transcription
  misc_feature: MA Experiment 20000495 PARAMETER Experiment Name: At_Guard_Cells_P Parameter: Harvest Date Value: 8/2/2002
  misc_feature: MA Experiment 20000495 PARAMETER Experiment Name: At_Guard_Cells_P Parameter: Organism Value: A. thaliana
  misc_feature: MA Experiment 20000495 PARAMETER Experiment Name: At_Guard_Cells_P Parameter: Tissue Value: Guard Cells vs. Leaves
  misc_feature: MA Experiment ID: 20000794 Result: Up-regulated in Transcription
  misc_feature: MA Experiment 20000794 PARAMETER Experiment Name: At_Petals_P Parameter: Age (day) Value: 23-25 days
  misc_feature: MA Experiment 20000794 PARAMETER Experiment Name: At_Petals_P Parameter: Plant Line Value: WS
  misc_feature: MA Experiment 20000794 PARAMETER Experiment Name: At_Petals_P Parameter: Tissue Value: Petals vs. Whole plant
  misc_feature: MA Experiment ID: 20001910 Result: Up-regulated in Transcription
  misc_feature: MA Experiment 20001910 PARAMETER Experiment Name: At_Drought_Reproduction_P Parameter: Age (day) Value: 37
  misc_feature: MA Experiment 20001910 PARAMETER Experiment Name: At_Drought_Reproduction_P Parameter: Organism Value: A. thaliana
  misc_feature: MA Experiment 20001910 PARAMETER Experiment Name: At_Drought_Reproduction_P Parameter: Plant Line Value: WS
  misc_feature: MA Experiment 20001910 PARAMETER Experiment Name: At_Drought_Reproduction_P Parameter: Timepoint (day) Value: 7
  misc_feature: MA Experiment 20001910 PARAMETER Experiment Name: At_Drought_Reproduction_P Parameter: Tissue Value: Flowers
  misc_feature: MA Experiment 20001910 PARAMETER Experiment Name: At_Drought_Reproduction_P Parameter: Treatment Value: Drought vs. No Drought
ataaactaattactatggcggagaattcgcggctacgagagctacggagacacagatgatgaaagagagaaagagagagagagagagagagaatgtgaggttaaaattatccattgttgttcttcagtgcaccactgaatcgaagttttctaatttggagaaagaggatttctctaaacccctaatttaggaagaccgcagatttctttagtattgagaatgagattctccgagaagatggattagtgaatcgagaggttgatatcgttaaatgcggggattttgcaatctagggttcttaagcattgtaatcgatgaaggctcaaaagggaagctcgaagaagaaaggtacgaattctgggttagtcgctgtagcagtggataacaataaaggaagccaacatgctctcaaatgggctgctgatcatcttgtctctaaaggacaaaccattatcctcctccatgttatccttaggtcatcctctgattcaggtgagattactgcagagaaacataagcaagctgaaaatctttttgtgacatttcattgctactgcagtcgaaaagagatacaatgccttgatgtcacgcttgaggatgacaacattgtcaagtcccttgcggaatatgtttcctctggtgtgattgagaatttgattcttggtgctccttcgaggcatggattcatgaggaaatttaagatttctgatacaccgagcaatgtagcgaaagcagcacctgatttctgtacagtttacgttatttcaaaagggaagatatcatctgtccgccatgcctcacgagctgctccatatcggtctccgcttatgggtcagattgaaaaccactctgaaatcataaactacgaaaagttcagaaacaccatgagctttagagatagggctcctcccaggtcttcgactgctagctccattgaagattatggaaagtcacctatggcaaggacgtcaaattacgcaaactcattctttgatttggaagattccgaaaacgacatatcatttgtttgctcaggcaggccaagtaccgcaagctcaggccggccaagtacaagtaccggaaggtctgacatatcttttgtgagctcaggcaggccgagtacaagcaccactggaagcccttccttcatctacgattttcctgattctggtttaactccgagagagtcgacgagctctggacactctatgcgtctaggaatcaggttcaatgacacaaatatccaacatgatttctcattcgtctcacaagatagcggtcggtcatcttgttcttgttcaccacaaaacttggaagaagtggaagctgagatgcggagattgaagcaggaactgaaacacgcaattgacatgtatggatcagcttgcagagaagcactagctgcaaagcaagaggcgaaggagctccaacgtcagaaaattgaagaggaagggtgggtgcaagaaggacagttatcagagaaatctacaaagtccatagtggaaaaagagagagcacataaagctgcgaaggatgcttctgaaacagcaggcaagatagcagagctcgaaacacaaagaagagctatagaagctgcaggttctttctctgattccagtttaaggtatcgaaggtatgtcattggtgagattgaagaagccacaaactcattcgacaaggctaataaaataggcgaaggcgggtatggtcctgtctataagggttatcttgatcatacccctgttgctattaaggctttgaaagcagatgcagttcaaggaagatctcaatttcaaagagaggtagaagttcttagctgcataagacacccacacatggtactactaattggagcatgtccagagtatggagtgcttgtatatgagtatatggccaaagggagtttagctgataggctctataagtatggaaacacaccaccactctcgtgggagctcaggttccgaattgcagccgaagttgcgacgggtctgctcttcctacaccagacgaaacccgagcctatagtgcaccgtgatcttaaacccggaaacattttgattgaccagaactacgtaagcaaaataggggacgttggattagccaaactagtgcctgcagttgctgaaaacgtcacgcagtgccacgtgtcatcaaccgctgggactttctgttacattgaccctgagtaccaacaaactggaatgctaggtgtgaaatctgatgtctactcttttggtatcttgcttctcgaactgctcacagcgaaaaggccgacgggtttggcttataccgttgagcaagcaatggagcaagggaaattcaaggatatgttagacccagcagtgcctaactggccggtggaagaagctatgtctttggcaaagattgctcttaaatgtgcacagctgagaaggaaagaccgaccagacctcggaaaagaggttttaccagagctcaataaattgagagctcgtgcagatacgaatatggaatggatgatgttcaacttaagtagaggtcgtctaacaccaaatcatagccaagtgtccttgccaccagttgatgaactaagtgtatgctcggataagtcttatacacattcaagcactgtatccgacacagagaagaactcagaccaaaacgaagaggattagcatattttgtgtgttgaaggaaatggagtgagaccattgttaaagcttatgtaattgtgaatattgttgtatgtatgtatgtatataattcgtaaaggaagaaaataactgaaag

SEQ ID NO: 107600 - protein, 780 aa, Arabidopsis thaliana
  peptide (1)..(780): Ceres Seq. ID no. 13650830
  misc_feature (14)..(151): Pfam Name: Universal stress protein family Pfam Description: Universal stress protein family
  misc_feature (5)..(748): Homolog of NCBI NO: 7487915 NR Description: hypothetical protein YUP8H12R.45 - Arabidopsis >gi|3152590|gb|AAC17071.1| Similar to protein serine/threonine
  misc_feature (5)..(750): Homolog of NCBI NO: 15219360 NR Description: protein kinase family [Arabidopsis thaliana]
  misc_feature (68)..(748): Homolog of NCBI NO: 30699374 NR Description: protein kinase family [Arabidopsis thaliana]
  misc_feature (68)..(748): Homolog of NCBI NO: 26450948 NR Description: unknown protein [Arabidopsis thaliana]
  misc_feature (56)..(747): Homolog of NCBI NO: 15224129 NR Description: protein kinase family [Arabidopsis thaliana]
  misc_feature (227)..(750): Homolog of NCBI NO: 25518361 NR Description: hypothetical protein F17F16.3 [imported] - thaliana >gi|9954729|gb|AAG09082.1|AC026237_3 Similar to protein
  misc_feature (17)..(728): Homolog of NCBI NO: 14719286 NR Description: serine threonine kinase 1 [Zea mays]
  misc_feature (17)..(728): Homolog of NCBI NO: 18092335 NR Description: serine threonine kinase [Zea mays]
  misc_feature (240)..(750): Homolog of NCBI NO: 8778472 NR Description: F1L3.25 [Arabidopsis thaliana]
  misc_feature (11)..(264): Homolog of NCBI NO: 8778472 NR Description: F1L3.25 [Arabidopsis thaliana]
MKAQKGSSKKKGTNSGLVAVAVDNNKGSQHALKWAADHLVSKGQTIILLHVILRSSSDSGEITAEKHKQAENLFVTFHCYCSRKEIQCLDVTLEDDNIVKSLAEYVSSGVIENLILGAPSRHGFMRKFKISDTPSNVAKAAPDFCTVYVISKGKISSVRHASRAAPYRSPLMGQIENHSEIINYEKFRNTMSFRDRAPPRSSTASSIEDYGKSPMARTSNYANSFFDLEDSENDISFVCSGRPSTASSGRPSTSTGRSDISFVSSGRPSTSTTGSPSFIYDFPDSGLTPRESTSSGHSMRLGIRFNDTNIQHDFSFVSQDSGRSSCSCSPQNLEEVEAEMRRLKQELKHAIDMYGSACREALAAKQEAKELQRQKIEEEGWVQEGQLSEKSTKSIVEKERAHKAAKDASETAGKIAELETQRRAIEAAGSFSDSSLRYRRYVIGEIEEATNSFDKANKIGEGGYGPVYKGYLDHTPVAIKALKADAVQGRSQFQREVEVLSCIRHPHMVLLIGACPEYGVLVYEYMAKGSLADRLYKYGNTPPLSWELRFRIAAEVATGLLFLHQTKPEPIVHRDLKPGNILIDQNYVSKIGDVGLAKLVPAVAENVTQCHVSSTAGTFCYIDPEYQQTGMLGVKSDVYSFGILLLELLTAKRPTGLAYTVEQAMEQGKFKDMLDPAVPNWPVEEAMSLAKIALKCAQLRRKDRPDLGKEVLPELNKLRARADTNMEWMMFNLSRGRLTPNHSQVSLPPVDELSVCSDKSYTHSSTVSDTEKNSDQNEED

SEQ ID NO: 107601 - protein, 656 aa, Arabidopsis thaliana
  peptide (1)..(656): Ceres Seq. ID no. 13650831
  misc_feature (1)..(624): Homolog of NCBI NO: 7487915 NR Description: hypothetical protein YUP8H12R.45 - Arabidopsis >gi|3152590|gb|AAC17071.1| Similar to protein serine/threonine
  misc_feature (1)..(626): Homolog of NCBI NO: 15219360 NR Description: protein kinase family [Arabidopsis thaliana]
  misc_feature (1)..(624): Homolog of NCBI NO: 30699374 NR Description: protein kinase family [Arabidopsis thaliana]
  misc_feature (1)..(624): Homolog of NCBI NO: 26450948 NR Description: unknown protein [Arabidopsis thaliana]
  misc_feature (1)..(623): Homolog of NCBI NO: 15224129 NR Description: protein kinase family [Arabidopsis thaliana]
  misc_feature (103)..(626): Homolog of NCBI NO: 25518361 NR Description: hypothetical protein F17F16.3 [imported] - thaliana >gi|9954729|gb|AAG09082.1|AC026237_3 Similar to protein
  misc_feature (1)..(604): Homolog of NCBI NO: 14719286 NR Description: serine threonine kinase 1 [Zea mays]
  misc_feature (1)..(604): Homolog of NCBI NO: 18092335 NR Description: serine threonine kinase [Zea mays]
  misc_feature (116)..(626): Homolog of NCBI NO: 8778472 NR Description: F1L3.25 [Arabidopsis thaliana]
  misc_feature (1)..(140): Homolog of NCBI NO: 8778472 NR Description: F1L3.25 [Arabidopsis thaliana]
MRKFKISDTPSNVAKAAPDFCTVYVISKGKISSVRHASRAAPYRSPLMGQIENHSEIINYEKFRNTMSFRDRAPPRSSTASSIEDYGKSPMARTSNYANSFFDLEDSENDISFVCSGRPSTASSGRPSTSTGRSDISFVSSGRPSTSTTGSPSFIYDFPDSGLTPRESTSSGHSMRLGIRFNDTNIQHDFSFVSQDSGRSSCSCSPQNLEEVEAEMRRLKQELKHAIDMYGSACREALAAKQEAKELQRQKIEEEGWVQEGQLSEKSTKSIVEKERAHKAAKDASETAGKIAELETQRRAIEAAGSFSDSSLRYRRYVIGEIEEATNSFDKANKIGEGGYGPVYKGYLDHTPVAIKALKADAVQGRSQFQREVEVLSCIRHPHMVLLIGACPEYGVLVYEYMAKGSLADRLYKYGNTPPLSWELRFRIAAEVATGLLFLHQTKPEPIVHRDLKPGNILIDQNYVSKIGDVGLAKLVPAVAENVTQCHVSSTAGTFCYIDPEYQQTGMLGVKSDVYSFGILLLELLTAKRPTGLAYTVEQAMEQGKFKDMLDPAVPNWPVEEAMSLAKIALKCAQLRRKDRPDLGKEVLPELNKLRARADTNMEWMMFNLSRGRLTPNHSQVSLPPVDELSVCSDKSYTHSSTVSDTEKNSDQNEED

SEQ ID NO: 107602 - protein, 609 aa, Arabidopsis thaliana
  peptide (1)..(609): Ceres Seq. ID no. 13650832
  misc_feature (1)..(577): Homolog of NCBI NO: 7487915 NR Description: hypothetical protein YUP8H12R.45 - Arabidopsis >gi|3152590|gb|AAC17071.1| Similar to protein serine/threonine
  misc_feature (1)..(579): Homolog of NCBI NO: 15219360 NR Description: protein kinase family [Arabidopsis thaliana]
  misc_feature (1)..(577): Homolog of NCBI NO: 30699374 NR Description: protein kinase family [Arabidopsis thaliana]
  misc_feature (1)..(577): Homolog of NCBI NO: 26450948 NR Description: unknown protein [Arabidopsis thaliana]
  misc_feature (1)..(576): Homolog of NCBI NO: 15224129 NR Description: protein kinase family [Arabidopsis thaliana]
  misc_feature (56)..(579): Homolog of NCBI NO: 25518361 NR Description: hypothetical protein F17F16.3 [imported] - thaliana >gi|9954729|gb|AAG09082.1|AC026237_3 Similar to protein
  misc_feature (1)..(557): Homolog of NCBI NO: 14719286 NR Description: serine threonine kinase 1 [Zea mays]
  misc_feature (1)..(557): Homolog of NCBI NO: 18092335 NR Description: serine threonine kinase [Zea mays]
  misc_feature (69)..(579): Homolog of NCBI NO: 8778472 NR Description: F1L3.25 [Arabidopsis thaliana]
  misc_feature (1)..(93): Homolog of NCBI NO: 8778472 NR Description: F1L3.25 [Arabidopsis thaliana]
MGQIENHSEIINYEKFRNTMSFRDRAPPRSSTASSIEDYGKSPMARTSNYANSFFDLEDSENDISFVCSGRPSTASSGRPSTSTGRSDISFVSSGRPSTSTTGSPSFIYDFPDSGLTPRESTSSGHSMRLGIRFNDTNIQHDFSFVSQDSGRSSCSCSPQNLEEVEAEMRRLKQELKHAIDMYGSACREALAAKQEAKELQRQKIEEEGWVQEGQLSEKSTKSIVEKERAHKAAKDASETAGKIAELETQRRAIEAAGSFSDSSLRYRRYVIGEIEEATNSFDKANKIGEGGYGPVYKGYLDHTPVAIKALKADAVQGRSQFQREVEVLSCIRHPHMVLLIGACPEYGVLVYEYMAKGSLADRLYKYGNTPPLSWELRFRIAAEVATGLLFLHQTKPEPIVHRDLKPGNILIDQNYVSKIGDVGLAKLVPAVAENVTQCHVSSTAGTFCYIDPEYQQTGMLGVKSDVYSFGILLLELLTAKRPTGLAYTVEQAMEQGKFKDMLDPAVPNWPVEEAMSLAKIALKCAQLRRKDRPDLGKEVLPELNKLRARADTNMEWMMFNLSRGRLTPNHSQVSLPPVDELSVCSDKSYTHSSTVSDTEKNSDQNEED

SEQ ID NO: 107603 - DNA, 847 bp, Arabidopsis thaliana
  misc_feature (1)..(847): Ceres Seq. ID no. 13650837
  misc_feature: MA Experiment ID: 20000171 Result: Up-regulated in Transcription
  misc_feature: MA Experiment 20000171 PARAMETER Experiment Name: At_42deg_Heat_P Parameter: Age (day) Value: 14
  misc_feature: MA Experiment 20000171 PARAMETER Experiment Name: At_42deg_Heat_P Parameter: Organism Value: A. thaliana
  misc_feature: MA Experiment 20000171 PARAMETER Experiment Name: At_42deg_Heat_P Parameter: Plant Line Value: WS
  misc_feature: MA Experiment 20000171 PARAMETER Experiment Name: At_42deg_Heat_P Parameter: Temperature (deg C) Value: 42 vs. 22
  misc_feature: MA Experiment 20000171 PARAMETER Experiment Name: At_42deg_Heat_P Parameter: Timepoint (hr) Value: 1
  misc_feature: MA Experiment 20000171 PARAMETER Experiment Name: At_42deg_Heat_P Parameter: Tissue Value: Aerial
  misc_feature: MA Experiment ID: 20000173 Result: Up-regulated in Transcription
  misc_feature: MA Experiment 20000173 PARAMETER Experiment Name: At_42deg_Heat_P Parameter: Age (day) Value: 14
  misc_feature: MA Experiment 20000173 PARAMETER Experiment Name: At_42deg_Heat_P Parameter: Organism Value: A. thaliana
  misc_feature: MA Experiment 20000173 PARAMETER Experiment Name: At_42deg_Heat_P Parameter: Plant Line Value: WS
  misc_feature: MA Experiment 20000173 PARAMETER Experiment Name: At_42deg_Heat_P Parameter: Temperature (deg C) Value: 42 vs. 22
  misc_feature: MA Experiment 20000173 PARAMETER Experiment Name: At_42deg_Heat_P Parameter: Timepoint (hr) Value: 6
  misc_feature: MA Experiment 20000173 PARAMETER Experiment Name: At_42deg_Heat_P Parameter: Tissue Value: Aerial
  misc_feature: MA Experiment ID: 20000184 Result: Down-regulated in Transcription
  misc_feature: MA Experiment 20000184 PARAMETER Experiment Name: At_Shoots__P Parameter: Age (day) Value: 7
  misc_feature: MA Experiment 20000184 PARAMETER Experiment Name: At_Shoots__P Parameter: Tissue Value: Shoots vs. Whole Plant
  misc_feature: MA Experiment ID: 20000495 Result: Down-regulated in Transcription
  misc_feature: MA Experiment 20000495 PARAMETER Experiment Name: At_Guard_Cells_P Parameter: Harvest Date Value: 8/2/2002
  misc_feature: MA Experiment 20000495 PARAMETER Experiment Name: At_Guard_Cells_P Parameter: Organism Value: A. thaliana
  misc_feature: MA Experiment 20000495 PARAMETER Experiment Name: At_Guard_Cells_P Parameter: Tissue Value: Guard Cells vs. Leaves
  misc_feature: MA Experiment ID: 20001451 Result: Down-regulated in Transcription
  misc_feature: MA Experiment 20001451 PARAMETER Experiment Name: At_Far-red-induction_P Parameter: Age (day) Value: 7
  misc_feature: MA Experiment 20001451 PARAMETER Experiment Name: At_Far-red-induction_P Parameter: Light Value: Far-red vs. White
  misc_feature: MA Experiment 20001451 PARAMETER Experiment Name: At_Far-red-induction_P Parameter: Organism Value: A. thaliana
  misc_feature: MA Experiment 20001451 PARAMETER Experiment Name: At_Far-red-induction_P Parameter: Plant Line Value: Columbia
  misc_feature: MA Experiment 20001451 PARAMETER Experiment Name: At_Far-red-induction_P Parameter: Timepoint (hr) Value: 24
  misc_feature: MA Experiment 20001451 PARAMETER Experiment Name: At_Far-red-induction_P Parameter: Tissue Value: Whole Plant
  misc_feature: Pfam Name: PIG-F Pfam Description: Phospho-ethanolamine N-methyltransferase
aaaggaaaagccatgaaagaggcgaaggagaagaagaatccagaaatctccgttagtatcacgatatcaacttggggggcttttgctgtttatgtgattactgggttatttctgatcttcggatttcacgtggtccgtaacaaatactctgtcgatctcatttctgatccaactctcactctgcgtctcctatggattattgagttcccgatcgtggtaatcatctacagcttgttccgacgaaacccagagaaatgctcgtactttagagctgttggccgaagcttagtcggactaattgccggtgctcttataaatgctttgggagctgtttctttgggtgcacctattggaatgcaatctctatcaaaaacaattcactggtcctttctaatgtctgttttcacggttgtaccagcaactgcagttttaggtgcatcatggatagattggcatcgtatctttgcttcactaaaaccaatcggaattatagaacatatgctcttagttccagcatatggagcaattattggaggatggtttggagcttggcctatgccacttgactgggaaagaccatggcaggaatggcctatatgtgtgtgttatggagctataggaggctacattggtggacaaatggtgagtttgttgactcttctcagcgaacacaagaatttgaagctagcctagaatagattgatcgtctctggatcggcagaatgagtgtcattttgttttgacttgattgctagatggagagacaacaatagggcaaaggtttttgttagcttggacaaattttgttatattccacatcgaatcaagtgttcaagagaattgcaac

SEQ ID NO: 107604 - protein, 230 aa, Arabidopsis thaliana
  peptide (1)..(230): Ceres Seq. ID no. 13650838
  misc_feature: Pfam Name: PIG-F Pfam Description: Phospho-ethanolamine N-methyltransferase
  misc_feature (5)..(230): Homolog of NCBI NO: 30684686 NR Description: expressed protein [Arabidopsis thaliana]
  misc_feature (5)..(218): Homolog of NCBI NO: 25518421 NR Description: hypothetical protein T24D18.15 - Arabidopsis >gi|6587811|gb|AAF18502.1|AC010924_15 ESTs gb|AI992787, gb|T20398
  misc_feature (53)..(209): Homolog of NCBI NO: 19075814 NR Description: putative short-chain dehydrogenase
  misc_feature (111)..(227): Homolog of NCBI NO: 4505797 NR Description: phosphatidylinositol glycan, class F isoform 1
  misc_feature (111)..(227): Homolog of NCBI NO: 22135636 NR Description: phosphatidylinositol glycan, class F [Mus
  misc_feature (111)..(227): Homolog of NCBI NO: 6679315 NR Description: phosphatidylinositol glycan, class F [Mus
  misc_feature (111)..(195): Homolog of NCBI NO: 27894291 NR Description: phosphatidylinositol glycan, class F isoform 2 sapiens] >gi|18204349|gb|AAH21725.1|AAH21725 Similar to
  misc_feature (111)..(215): Homolog of NCBI NO: 32412938 NR Description: hypothetical protein [Neurospora crassa]
  misc_feature (95)..(226): Homolog of NCBI NO: 40742646 NR Description: hypothetical protein AN7650.2 [Aspergillus
KGKAMKEAKEKKNPEISVSITISTWGAFAVYVITGLFLIFGFHVVRNKYSVDLISDPTLTLRLLWIIEFPIVVIIYSLFRRNPEKCSYFRAVGRSLVGLIAGALINALGAVSLGAPIGMQSLSKTIHWSFLMSVFTVVPATAVLGASWIDWHRIFASLKPIGIIEHMLLVPAYGAIIGGWFGAWPMPLDWERPWQEWPICVCYGAIGGYIGGQMVSLLTLLSEHKNLKLA

SEQ ID NO: 107605 - protein, 226 aa, Arabidopsis thaliana
  peptide (1)..(226): Ceres Seq. ID no. 13650839
  misc_feature: Pfam Name: PIG-F Pfam Description: Phospho-ethanolamine N-methyltransferase
  misc_feature (1)..(226): Homolog of NCBI NO: 30684686 NR Description: expressed protein [Arabidopsis thaliana]
  misc_feature (1)..(214): Homolog of NCBI NO: 25518421 NR Description: hypothetical protein T24D18.15 - Arabidopsis >gi|6587811|gb|AAF18502.1|AC010924_15 ESTs gb|AI992787, gb|T20398
  misc_feature (49)..(205): Homolog of NCBI NO: 19075814 NR Description: putative short-chain dehydrogenase
  misc_feature (107)..(223): Homolog of NCBI NO: 4505797 NR Description: phosphatidylinositol glycan, class F isoform 1
  misc_feature (107)..(223): Homolog of NCBI NO: 6679315 NR Description: phosphatidylinositol glycan, class F [Mus
  misc_feature (107)..(223): Homolog of NCBI NO: 22135636 NR Description: phosphatidylinositol glycan, class F [Mus
  misc_feature (107)..(191): Homolog of NCBI NO: 27894291 NR Description: phosphatidylinositol glycan, class F isoform 2 sapiens] >gi|18204349|gb|AAH21725.1|AAH21725 Similar to
  misc_feature (107)..(211): Homolog of NCBI NO: 32412938 NR Description: hypothetical protein [Neurospora crassa]
  misc_feature (91)..(222): Homolog of NCBI NO: 40742646 NR Description: hypothetical protein AN7650.2 [Aspergillus
MKEAKEKKNPEISVSITISTWGAFAVYVITGLFLIFGFHVVRNKYSVDLISDPTLTLRLLWIIEFPIVVIIYSLFRRNPEKCSYFRAVGRSLVGLIAGALINALGAVSLGAPIGMQSLSKTIHWSFLMSVFTVVPATAVLGASWIDWHRIFASLKPIGIIEHMLLVPAYGAIIGGWFGAWPMPLDWERPWQEWPICVCYGAIGGYIGGQMVSLLTLLSEHKNLKLA

SEQ ID NO: 107606 - DNA, 1009 bp, Arabidopsis thaliana
  misc_feature (1)..(1009): Ceres Seq. ID no. 13650840
  misc_feature: MA Experiment ID: 108561 Result: Down-regulated in Transcription
  misc_feature: MA Experiment 108561 PARAMETER Experiment Name: At_100uM_ABA_cDNA_P Parameter: Timepoint (hr) Value: 6
  misc_feature: MA Experiment 108561 PARAMETER Experiment Name: At_100uM_ABA_cDNA_P Parameter: Tissue Value: Aerial
  misc_feature: MA Experiment 108561 PARAMETER Experiment Name: At_100uM_ABA_cDNA_P Parameter: Treatment Value: 100uM ABA vs. No Treatment
  misc_feature: MA Experiment ID: 108585 Result: Down-regulated in Transcription
  misc_feature: MA Experiment 108585 PARAMETER Experiment Name: At_5mM_NaNP_cDNA_P Parameter: Timepoint (hr) Value: 6
  misc_feature: MA Experiment 108585 PARAMETER Experiment Name: At_5mM_NaNP_cDNA_P Parameter: Tissue Value: Aerial
  misc_feature: MA Experiment 108585 PARAMETER Experiment Name: At_5mM_NaNP_cDNA_P Parameter: Treatment Value: null
  misc_feature: MA Experiment ID: 108595 Result: Down-regulated in Transcription
  misc_feature: MA Experiment 108595 PARAMETER Experiment Name: At_Ler-pi_Ovule_cDNA_P Parameter: Plant Line Value: null
  misc_feature: MA Experiment ID: 20000087 Result: Down-regulated in Transcription
  misc_feature: MA Experiment 20000087 PARAMETER Experiment Name: At_100uM_ABA_Mutants_cDNA_P Parameter: Plant Line Value: WS
  misc_feature: MA Experiment 20000087 PARAMETER Experiment Name: At_100uM_ABA_Mutants_cDNA_P Parameter: Timepoint (hr) Value: 6
  misc_feature: MA Experiment 20000087 PARAMETER Experiment Name: At_100uM_ABA_Mutants_cDNA_P Parameter: Tissue Value: Aerial
  misc_feature: MA Experiment 20000087 PARAMETER Experiment Name: At_100uM_ABA_Mutants_cDNA_P Parameter: Treatment Value: 100uM ABA vs. No Treatment
  misc_feature: MA Experiment ID: 20000113 Result: Up-regulated in Transcription
  misc_feature: MA Experiment 20000113 PARAMETER Experiment Name: At_42deg_Heat_cDNA_P Parameter: Temperature (deg C) Value: 42 vs. 22
  misc_feature: MA Experiment 20000113 PARAMETER Experiment Name: At_42deg_Heat_cDNA_P Parameter: Timepoint (hr) Value: 8
  misc_feature: MA Experiment 20000113 PARAMETER Experiment Name: At_42deg_Heat_cDNA_P Parameter: Tissue Value: Aerial
  misc_feature: MA Experiment ID: 20000117 Result: Down-regulated in Transcription
  misc_feature: MA Experiment 20000117 PARAMETER Experiment Name: At_100uM_ABA_Mutants_cDNA_P Parameter: Plant Line Value: Columbia
  misc_feature: MA Experiment 20000117 PARAMETER Experiment Name: At_100uM_ABA_Mutants_cDNA_P Parameter: Timepoint (hr) Value: 6
  misc_feature: MA Experiment 20000117 PARAMETER Experiment Name: At_100uM_ABA_Mutants_cDNA_P Parameter: Tissue Value: Aerial
  misc_feature: MA Experiment 20000117 PARAMETER Experiment Name: At_100uM_ABA_Mutants_cDNA_P Parameter: Treatment Value: 100uM ABA vs. No Treatment
  misc_feature: MA Experiment ID: 20000184 Result: Up-regulated in Transcription
  misc_feature: MA Experiment 20000184 PARAMETER Experiment Name: At_Shoots__P Parameter: Age (day) Value: 7
  misc_feature: MA Experiment 20000184 PARAMETER Experiment Name: At_Shoots__P Parameter: Tissue Value: Shoots vs. Whole Plant
  misc_feature: MA Experiment ID: 20000185 Result: Down-regulated in Transcription
  misc_feature: MA Experiment 20000185 PARAMETER Experiment Name: At_Roots__P Parameter: Age (day) Value: 7 vs. 21
  misc_feature: MA Experiment 20000185 PARAMETER Experiment Name: At_Roots__P Parameter: Organism Value: A. thaliana
  misc_feature: MA Experiment 20000185 PARAMETER Experiment Name: At_Roots__P Parameter: Tissue Value: Roots vs. Whole Plant
  misc_feature: MA Experiment ID: 20000234 Result: Up-regulated in Transcription
  misc_feature: MA Experiment 20000234 PARAMETER Experiment Name: At_Siliques_P Parameter: Age (day) Value: 21
  misc_feature: MA Experiment 20000234 PARAMETER Experiment Name: At_Siliques_P Parameter: Organism Value: A. thaliana
  misc_feature: MA Experiment 20000234 PARAMETER Experiment Name: At_Siliques_P Parameter: Plant Line Value: WS
  misc_feature: MA Experiment 20000234 PARAMETER Experiment Name: At_Siliques_P Parameter: Tissue Value: Less Than 5mm Siliques vs. Whole Plant
  misc_feature: MA Experiment ID: 20000235 Result: Up-regulated in Transcription
  misc_feature: MA Experiment 20000235 PARAMETER Experiment Name: At_Siliques_P Parameter: Age (day) Value: 21
  misc_feature: MA Experiment 20000235 PARAMETER Experiment Name: At_Siliques_P Parameter: Organism Value: A. thaliana
  misc_feature: MA Experiment 20000235 PARAMETER Experiment Name: At_Siliques_P Parameter: Plant Line Value: WS
  misc_feature: MA Experiment 20000235 PARAMETER Experiment Name: At_Siliques_P Parameter: Tissue Value: 5-10mm Siliques vs. Whole Plant
  misc_feature: MA Experiment ID: 20000265 Result: Up-regulated in Transcription
  misc_feature: MA Experiment 20000265 PARAMETER Experiment Name: At_Open_Flower_P Parameter: Age (day) Value: 21
  misc_feature: MA Experiment 20000265 PARAMETER Experiment Name: At_Open_Flower_P Parameter: Plant Line Value: WS
  misc_feature: MA Experiment 20000265 PARAMETER Experiment Name: At_Open_Flower_P Parameter: Tissue Value: Closed Flower vs. Whole Plant
  misc_feature: MA Experiment ID: 20000436 Result: Down-regulated in Transcription
  misc_feature: MA Experiment 20000436 PARAMETER Experiment Name: At_Drought_P Parameter: Age (day) Value: 7
  misc_feature: MA Experiment 20000436 PARAMETER Experiment Name: At_Drought_P Parameter: Organism Value: A. thaliana
  misc_feature: MA Experiment 20000436 PARAMETER Experiment Name: At_Drought_P Parameter: Plant Line Value: WS
  misc_feature: MA Experiment 20000436 PARAMETER Experiment Name: At_Drought_P Parameter: Timepoint (hr) Value: 12
  misc_feature: MA Experiment 20000436 PARAMETER Experiment Name: At_Drought_P Parameter: Tissue Value: Whole Plant
  misc_feature: MA Experiment 20000436 PARAMETER Experiment Name: At_Drought_P Parameter: Treatment Value: Drought vs. No Drought
  misc_feature: MA Experiment ID: 20000437 Result: Down-regulated in Transcription
  misc_feature: MA Experiment 20000437 PARAMETER Experiment Name: At_Drought_P Parameter: Age (day) Value: 8
  misc_feature: MA Experiment 20000437 PARAMETER Experiment Name: At_Drought_P Parameter: Organism Value: A. thaliana
  misc_feature: MA Experiment 20000437 PARAMETER Experiment Name: At_Drought_P Parameter: Plant Line Value: WS
  misc_feature: MA Experiment 20000437 PARAMETER Experiment Name: At_Drought_P Parameter: Timepoint (hr) Value: 24
  misc_feature: MA Experiment 20000437 PARAMETER Experiment Name: At_Drought_P Parameter: Tissue Value: Whole Plant
  misc_feature: MA Experiment 20000437 PARAMETER Experiment Name: At_Drought_P Parameter: Treatment Value: Drought vs. No Drought
  misc_feature: MA Experiment ID: 20000438 Result: Up-regulated in Transcription
  misc_feature: MA Experiment 20000438 PARAMETER Experiment Name: At_Shoots__P Parameter: Age (day) Value: 14
  misc_feature: MA Experiment 20000438 PARAMETER Experiment Name: At_Shoots__P Parameter: Tissue Value: Shoots vs. Whole Plant
  misc_feature: MA Experiment ID: 20000439 Result: Down-regulated in Transcription
  misc_feature: MA Experiment 20000439 PARAMETER Experiment Name: At_Roots__P Parameter: Age (day) Value: 14 vs. 21
  misc_feature: MA Experiment 20000439 PARAMETER Experiment Name: At_Roots__P Parameter: Organism Value: A. thaliana
  misc_feature: MA Experiment 20000439 PARAMETER Experiment Name: At_Roots__P Parameter: Tissue Value: Roots vs. Whole Plant
  misc_feature: MA Experiment ID: 20000794 Result: Down-regulated in Transcription
  misc_feature: MA Experiment 20000794 PARAMETER Experiment Name: At_Petals_P Parameter: Age (day) Value: 23-25 days
  misc_feature: MA Experiment 20000794 PARAMETER Experiment Name: At_Petals_P Parameter: Plant Line Value: WS
  misc_feature: MA Experiment 20000794 PARAMETER Experiment Name: At_Petals_P Parameter: Tissue Value: Petals vs. Whole plant
  misc_feature: MA Experiment ID: 20001248 Result: Down-regulated in Transcription
  misc_feature: MA Experiment 20001248 PARAMETER Experiment Name: At_Far-red-induction_P Parameter: Age (day) Value: 7
  misc_feature: MA Experiment 20001248 PARAMETER Experiment Name: At_Far-red-induction_P Parameter: Light Value: Far-red vs. White
  misc_feature: MA Experiment 20001248 PARAMETER Experiment Name: At_Far-red-induction_P Parameter: Organism Value: A. thaliana
  misc_feature: MA Experiment 20001248 PARAMETER Experiment Name: At_Far-red-induction_P Parameter: Plant Line Value: Columbia
  misc_feature: MA Experiment 20001248 PARAMETER Experiment Name: At_Far-red-induction_P Parameter: Timepoint (hr) Value: 4
  misc_feature: MA Experiment 20001248 PARAMETER Experiment Name: At_Far-red-induction_P Parameter: Tissue Value: Whole Plant
  misc_feature: MA Experiment ID: 20001560 Result: Up-regulated in Transcription
  misc_feature: MA Experiment 20001560 PARAMETER Experiment Name: At_Drought_Soil_Dry_P Parameter: Age (day) Value: 28
  misc_feature: MA Experiment 20001560 PARAMETER Experiment Name: At_Drought_Soil_Dry_P Parameter: Organism Value: A. thaliana
  misc_feature: MA Experiment 20001560 PARAMETER Experiment Name: At_Drought_Soil_Dry_P Parameter: Plant Line Value: WS
  misc_feature: MA Experiment 20001560 PARAMETER Experiment Name: At_Drought_Soil_Dry_P Parameter: Post Timepoint (hr) Value: None
  misc_feature: MA Experiment 20001560 PARAMETER Experiment Name: At_Drought_Soil_Dry_P Parameter: Post-Treatment Value: None
  misc_feature: MA Experiment 20001560 PARAMETER Experiment Name: At_Drought_Soil_Dry_P Parameter: Timepoint (day) Value: 14
  misc_feature: MA Experiment 20001560 PARAMETER Experiment Name: At_Drought_Soil_Dry_P Parameter: Treatment Value: Drought vs. No Drought
  misc_feature: MA Experiment ID: 20001757 Result: Up-regulated in Transcription
  misc_feature: MA Experiment 20001757 PARAMETER Experiment Name: At_50mM_NH4NO3_L-to-H_P Parameter: Timepoint (hr) Value: 6
  misc_feature: MA Experiment 20001757 PARAMETER Experiment Name: At_50mM_NH4NO3_L-to-H_P Parameter: Tissue Value: Leaf
  misc_feature: MA Experiment 20001757 PARAMETER Experiment Name: At_50mM_NH4NO3_L-to-H_P Parameter: Treatment Value: 50mM NH4NO3 vs 100mM Mannitol
  misc_feature: MA Experiment ID: 20001906 Result: Down-regulated in Transcription
  misc_feature: MA Experiment 20001906 PARAMETER Experiment Name: At_Drought_Reproduction_P Parameter: Age (day) Value: 35
  misc_feature: MA Experiment 20001906 PARAMETER Experiment Name: At_Drought_Reproduction_P Parameter: Organism Value: A. thaliana
  misc_feature: MA Experiment 20001906 PARAMETER Experiment Name: At_Drought_Reproduction_P Parameter: Plant Line Value: WS
  misc_feature: MA Experiment 20001906 PARAMETER Experiment Name: At_Drought_Reproduction_P Parameter: Timepoint (day) Value: 5
  misc_feature: MA Experiment 20001906 PARAMETER Experiment Name: At_Drought_Reproduction_P Parameter: Tissue Value: Siliques
  misc_feature: MA Experiment 20001906 PARAMETER Experiment Name: At_Drought_Reproduction_P Parameter: Treatment Value: Drought vs. No Drought
catcgctgtctggaacagcgatgaatgaagccttcttctatcttcttcttcttcttcttcttcctcttctcatggccattctacttcactccctctctcttcatccaccaaaccctaaacctcaaaacccttataaacccaaaattctctcttcttctgctacctttcggagagatgtggtgcttagaacagcatcactctgtttcgtctccttcatctttcaaaaccaaattccagagtcattagctgatcctttgaagtctaccaaaccgttacgactcggcattgcgaacactaagtcttggttccagtactttggtagtgggttcgctattagggttcctcctgactttgaagacgtcaatgagcctgaggattactctgcgggattgtctctctatggtgacaaggcaaagccacaaactttcgccgcccggttccaaactcctgatggatcagaagttttgagtgtagtcattcgtccttcaaatcaacttaagatcactttcttagaggctaaagatatatctgatttgggatcattgaaggcagctgcaagactttttgttccaggtgcggcaacaatttactctgctcgtacaatcaaggtaaaggaagaagaaggtttaagaaattactacttctacgagtttggtagagatgaagaacgcatagctctagtagcctctgtgaacagagggaaggtttatatcgctggagcagctgcaccggaatccaaatggaaagacgatgagttgaagctccgatctgctgccatttctttcactattctatagtcaaaaggcagcttcttctaacagaaaactcgaaaatcgctctctagtcgactcgaaaatgtgggactaagaacaaactggccaaatgcgataaccagatattgttttgagacacatttgtcattccattttcgtttatctgtttatttttggttgatgtaatatgttcattgatgttctgtataatgagataacaaatcaagattctttgc

SEQ ID NO: 107607 - protein, 264 aa, Arabidopsis thaliana
  peptide (1)..(264): Ceres Seq. ID no. 13650841
  misc_feature (227)..(264): Pfam Name: PsbP Pfam Description: PsbP
  misc_feature (7)..(264): Homolog of NCBI NO: 26452557 NR Description: unknown protein [Arabidopsis thaliana]
  misc_feature (24)..(210): Homolog of NCBI NO: 15240916 NR Description: expressed protein [Arabidopsis thaliana]
SLSGTAMNEAFFYLLLLLLLPLLMAILLHSLSLHPPNPKPQNPYKPKILSSSATFRRDVVLRTASLCFVSFIFQNQIPESLADPLKSTKPLRLGIANTKSWFQYFGSGFAIRVPPDFEDVNEPEDYSAGLSLYGDKAKPQTFAARFQTPDGSEVLSVVIRPSNQLKITFLEAKDISDLGSLKAAARLFVPGAATIYSARTIKVKEEEGLRNYYFYEFGRDEERIALVASVNRGKVYIAGAAAPESKWKDDELKLRSAAISFTIL

SEQ ID NO: 107608 - protein, 258 aa, Arabidopsis thaliana
  peptide (1)..(258): Ceres Seq. ID no. 13650842
  misc_feature (221)..(258): Pfam Name: PsbP Pfam Description: PsbP
  misc_feature (1)..(258): Homolog of NCBI NO: 26452557 NR Description: unknown protein [Arabidopsis thaliana]
  misc_feature (18)..(204): Homolog of NCBI NO: 15240916 NR Description: expressed protein [Arabidopsis thaliana]
MNEAFFYLLLLLLLPLLMAILLHSLSLHPPNPKPQNPYKPKILSSSATFRRDVVLRTASLCFVSFIFQNQIPESLADPLKSTKPLRLGIANTKSWFQYFGSGFAIRVPPDFEDVNEPEDYSAGLSLYGDKAKPQTFAARFQTPDGSEVLSVVIRPSNQLKITFLEAKDISDLGSLKAAARLFVPGAATIYSARTIKVKEEEGLRNYYFYEFGRDEERIALVASVNRGKVYIAGAAAPESKWKDDELKLRSAAISFTIL

SEQ ID NO: 107609 - protein, 241 aa, Arabidopsis thaliana; identical to SEQ ID NO: 43398
  peptide (1)..(241): Ceres Seq. ID no. 13650843
  misc_feature (204)..(241): Pfam Name: PsbP Pfam Description: PsbP
  misc_feature (1)..(241): Homolog of NCBI NO: 26452557 NR Description: unknown protein [Arabidopsis thaliana]
  misc_feature (1)..(187): Homolog of NCBI NO: 15240916 NR Description: expressed protein [Arabidopsis thaliana]

SEQ ID NO: 107610 - DNA, 1824 bp, Arabidopsis thaliana
  misc_feature (1)..(1824): Ceres Seq. ID no. 13650852
  misc_feature: MA Experiment ID: 20001451 Result: Down-regulated in Transcription
  misc_feature: MA Experiment 20001451 PARAMETER Experiment Name: At_Far-red-induction_P Parameter: Age (day) Value: 7
  misc_feature: MA Experiment 20001451 PARAMETER Experiment Name: At_Far-red-induction_P Parameter: Light Value: Far-red vs. White
  misc_feature: MA Experiment 20001451 PARAMETER Experiment Name: At_Far-red-induction_P Parameter: Organism Value: A. thaliana
  misc_feature: MA Experiment 20001451 PARAMETER Experiment Name: At_Far-red-induction_P Parameter: Plant Line Value: Columbia
  misc_feature: MA Experiment 20001451 PARAMETER Experiment Name: At_Far-red-induction_P Parameter: Timepoint (hr) Value: 24
  misc_feature: MA Experiment 20001451 PARAMETER Experiment Name: At_Far-red-induction_P Parameter: Tissue Value: Whole Plant
acccacactctctctctctctctctctctcaaagaagaagaagatgctgacgagtcccagtaacgcacttcatagtagtactccacacttctggccagttcgccggagcaggctttgccgttcccggaatttccctcgttttcactccggcgaacgcagcagcggcggaggaggaaaattgtgctcgctctctcttctctccggaagtggcgccggtaaattcagtgtcagagctctagttaggcctgatgataccaacgacgctgactccgtcggcgatgggtttctgtcaaaattccactcggaaatagagagattttagttgagactgatctcatggggagacaagcaagttctgcagtcacggtgacagatggagaaactattgtctacacatccgtgtttgtctagctgatgttccaagttagccatcagattttcttcccctttatgttcactatcaggagcgattctcagcttggtggattttttaagcgacaagggagaaccaaagatcacgaggaggacaggaatcgatgaataacaaccccgtcccctgtcaggtgtttcctctggtctctggtggtagttctggtgggaatttgttttcatcttcttccggattctgcaatggtgtctatgtttcatcttcctcccaggcacggccatctgtttctaccgtgccaagagacagaattactgttgctcacgtctctggtgaagggcagaggcaggaatgccctgtggaaacacattccttgcaattgatcaatcaacctcaagaacagaaaattatgacttggtcttcagaccagattcggggcttcttcgattttcctgttccagatccacaagcagcgagcagcagaactatggtttcatccaaggaagtgctttcaaaatgcgaatggccagactgggcggatcagttgatctctgatgatagtcttgaaccaaattggtcggagcttctaggtgatcctaatgtactcaatctatattcaaagatagaaacacagtcttctgatatagcaaggcaagagatcgtctttagaaatcagcatcaggtggatccatcaatggagccgtttaatgccaaaagcccaccagctagttcaatgacatctaagcaaagaatgcgttggacaccagaacttcatgaagcatttgtcgaagctatcaatcagctcggtggtagtgaacgagccacccctaaggctgttttgaagctcatcaatagccctgggttgaccgtttatcatgtcaaaagccatttgcagaaatacagaactgcaaggtataaaccagagctttccaaagatacagaagaacctctagtaaagaatttgaaaaccattgaagatatcaaatctcttgacttgaagacgagcattgaaatcactgaagctctccggttacagatgaaagttcaaaaacaactccacgagcaacttgagatccaaagatcactgcagttacaaatcgaagaacaaggtcggtatcttcagatgatgattgagaaacaacagaagatgcaagagaacaaaaaagactctacttcctcatcatcaatgccagaagctgacccttcagctccatcaccaaacctttcacaacctttcctccataaagcaaccaattcagaaccatcaataactcagaaactgcagaatggttctagcacaatggatcaaagtgaatctacttctgggactagtaatagaaaacgggttagagaagattagacatctcatgagtatgatccaaagatgttgcaaacatatgtaattgtgtatataaaattgaaaatatcacagcagcaag

SEQ ID NO: 107611 - protein, 402 aa, Arabidopsis thaliana; identical to SEQ ID NO: 72290
  peptide (1)..(402): Ceres Seq. ID no. 13650853
  misc_feature (200)..(251): Pfam Name: Myb-like DNA-binding domain Pfam Description: Myb-like DNA-binding domain
  misc_feature (1)..(402): Homolog of NCBI NO: 26452281 NR Description: putative transfactor [Arabidopsis thaliana]
  misc_feature (1)..(402): Homolog of NCBI NO: 15229298 NR Description: transfactor -related [Arabidopsis thaliana]
  misc_feature (1)..(344): Homolog of NCBI NO: 21537366 NR Description: transfactor, putative [Arabidopsis thaliana]
  misc_feature (1)..(344): Homolog of NCBI NO: 30692110 NR Description: expressed protein [Arabidopsis thaliana]
  misc_feature (1)..(344): Homolog of NCBI NO: 21954075 NR Description: unknown protein [Arabidopsis thaliana]
  misc_feature (3)..(344): Homolog of NCBI NO: 30692105 NR Description: expressed protein [Arabidopsis thaliana]
  misc_feature (4)..(402): Homolog of NCBI NO: 6942190 NR Description: CDPK substrate protein 1; CSP1 [Mesembryanthemum
  misc_feature (22)..(345): Homolog of NCBI NO: 22329004 NR Description: expressed protein [Arabidopsis thaliana] phosphate starvation response regulator 1 [Arabidopsis thaliana] putative protein [Arabidopsis thaliana]
  misc_feature (22)..(345): Homolog of NCBI NO: 7487685 NR Description: hypothetical protein T5F17.60 - Arabidopsis >gi|7269716|emb|CAB81449.1| putative protein [Arabidopsis
  misc_feature (135)..(402): Homolog of NCBI NO: 4519671 NR Description: transfactor [Nicotiana tabacum]

SEQ ID NO: 107612 - protein, 316 aa, Arabidopsis thaliana; identical to SEQ ID NO: 72291
  peptide (1)..(316): Ceres Seq. ID no. 13650854
  misc_feature (114)..(165): Pfam Name: Myb-like DNA-binding domain Pfam Description: Myb-like DNA-binding domain
  misc_feature (1)..(316): Homolog of NCBI NO: 26452281 NR Description: putative transfactor [Arabidopsis thaliana]
  misc_feature (1)..(316): Homolog of NCBI NO: 15229298 NR Description: transfactor -related [Arabidopsis thaliana]
  misc_feature (1)..(258): Homolog of NCBI NO: 21537366 NR Description: transfactor, putative [Arabidopsis thaliana]
  misc_feature (1)..(258): Homolog of NCBI NO: 30692110 NR Description: expressed protein [Arabidopsis thaliana]
  misc_feature (1)..(258): Homolog of NCBI NO: 21954075 NR Description: unknown protein [Arabidopsis thaliana]
  misc_feature (1)..(258): Homolog of NCBI NO: 30692105 NR Description: expressed protein [Arabidopsis thaliana]
  misc_feature (1)..(316): Homolog of NCBI NO: 6942190 NR Description: CDPK substrate protein 1; CSP1 [Mesembryanthemum
  misc_feature (1)..(259): Homolog of NCBI NO: 22329004 NR Description: expressed protein [Arabidopsis thaliana] phosphate starvation response regulator 1 [Arabidopsis thaliana] putative protein [Arabidopsis thaliana]
  misc_feature (1)..(259): Homolog of NCBI NO: 7487685 NR Description: hypothetical protein T5F17.60 - Arabidopsis >gi|7269716|emb|CAB81449.1| putative protein [Arabidopsis
  misc_feature (49)..(316): Homolog of NCBI NO: 4519671 NR Description: transfactor [Nicotiana tabacum]

SEQ ID NO: 107613 - protein, 290 aa, Arabidopsis thaliana
  peptide (1)..(290): Ceres Seq. ID no. 13650855
  misc_feature (88)..(139): Pfam Name: Myb-like DNA-binding domain Pfam Description: Myb-like DNA-binding domain
  misc_feature (1)..(290): Homolog of NCBI NO: 26452281 NR Description: putative transfactor [Arabidopsis thaliana]
  misc_feature (1)..(290): Homolog of NCBI NO: 15229298 NR Description: transfactor -related [Arabidopsis thaliana]
  misc_feature (1)..(232): Homolog of NCBI NO: 21537366 NR Description: transfactor, putative [Arabidopsis thaliana]
  misc_feature (1)..(232): Homolog of NCBI NO: 30692110 NR Description: expressed protein [Arabidopsis thaliana]
  misc_feature (1)..(232): Homolog of NCBI NO: 21954075 NR Description: unknown protein [Arabidopsis thaliana]
  misc_feature (1)..(232): Homolog of NCBI NO: 30692105 NR Description: expressed protein [Arabidopsis thaliana]
  misc_feature (1)..(290): Homolog of NCBI NO: 6942190 NR Description: CDPK substrate protein 1; CSP1 [Mesembryanthemum
  misc_feature (1)..(233): Homolog of NCBI NO: 22329004 NR Description: expressed protein [Arabidopsis thaliana] phosphate starvation response regulator 1 [Arabidopsis thaliana] putative protein [Arabidopsis thaliana]
  misc_feature (1)..(233): Homolog of NCBI NO: 7487685 NR Description: hypothetical protein T5F17.60 - Arabidopsis >gi|7269716|emb|CAB81449.1| putative protein [Arabidopsis
  misc_feature (23)..(290): Homolog of NCBI NO: 4519671 NR Description: transfactor [Nicotiana tabacum]
MVSSKEVLSKCEWPDWADQLISDDSLEPNWSELLGDPNVLNLYSKIETQSSDIARQEIVFRNQHQVDPSMEPFNAKSPPASSMTSKQRMRWTPELHEAFVEAINQLGGSERATPKAVLKLINSPGLTVYHVKSHLQKYRTARYKPELSKDTEEPLVKNLKTIEDIKSLDLKTSIEITEALRLQMKVQKQLHEQLEIQRSLQLQIEEQGRYLQMMIEKQQKMQENKKDSTSSSSMPEADPSAPSPNLSQPFLHKATNSEPSITQKLQNGSSTMDQSESTSGTSNRKRVRED

SEQ ID NO: 107614 - DNA, 695 bp, Arabidopsis thaliana
  misc_feature (1)..(695): Ceres Seq. ID no. 13650871
  misc_feature: MA Experiment ID: 20000171 Result: Up-regulated in Transcription
  misc_feature: MA Experiment 20000171 PARAMETER Experiment Name: At_42deg_Heat_P Parameter: Age (day) Value: 14
  misc_feature: MA Experiment 20000171 PARAMETER Experiment Name: At_42deg_Heat_P Parameter: Organism Value: A. thaliana
  misc_feature: MA Experiment 20000171 PARAMETER Experiment Name: At_42deg_Heat_P Parameter: Plant Line Value: WS
  misc_feature: MA Experiment 20000171 PARAMETER Experiment Name: At_42deg_Heat_P Parameter: Temperature (deg C) Value: 42 vs. 22
  misc_feature: MA Experiment 20000171 PARAMETER Experiment Name: At_42deg_Heat_P Parameter: Timepoint (hr) Value: 1
  misc_feature: MA Experiment 20000171 PARAMETER Experiment Name: At_42deg_Heat_P Parameter: Tissue Value: Aerial
  misc_feature: MA Experiment ID: 20000173 Result: Up-regulated in Transcription
  misc_feature: MA Experiment 20000173 PARAMETER Experiment Name: At_42deg_Heat_P Parameter: Age (day) Value: 14
  misc_feature: MA Experiment 20000173 PARAMETER Experiment Name: At_42deg_Heat_P Parameter: Organism Value: A. thaliana
  misc_feature: MA Experiment 20000173 PARAMETER Experiment Name: At_42deg_Heat_P Parameter: Plant Line Value: WS
  misc_feature: MA Experiment 20000173 PARAMETER Experiment Name: At_42deg_Heat_P Parameter: Temperature (deg C) Value: 42 vs. 22
  misc_feature: MA Experiment 20000173 PARAMETER Experiment Name: At_42deg_Heat_P Parameter: Timepoint (hr) Value: 6
  misc_feature: MA Experiment 20000173 PARAMETER Experiment Name: At_42deg_Heat_P Parameter: Tissue Value: Aerial
  misc_feature: MA Experiment ID: 20000182 Result: Down-regulated in Transcription
  misc_feature: MA Experiment 20000182 PARAMETER Experiment Name: At_2mM_SA_P Parameter: Age (day) Value: 14
  misc_feature: MA Experiment 20000182 PARAMETER Experiment Name: At_2mM_SA_P Parameter: Organism Value: A. thaliana
  misc_feature: MA Experiment 20000182 PARAMETER Experiment Name: At_2mM_SA_P Parameter: Plant Line Value: WS
  misc_feature: MA Experiment 20000182 PARAMETER Experiment Name: At_2mM_SA_P Parameter: Timepoint (hr) Value: 6
  misc_feature: MA Experiment 20000182 PARAMETER Experiment Name: At_2mM_SA_P Parameter: Tissue Value: Aerial
  misc_feature: MA Experiment 20000182 PARAMETER Experiment Name: At_2mM_SA_P Parameter: Treatment Value: 2mM SA vs. No Treatment
  misc_feature: Pfam Name: CHCH Pfam Description: CHCH domain
gttagtattgtcaagttttcgccggagaattcatcacttaacacttcaacatctgaaattcaaaatgcctcgaggaagctccggaggaagatctagctaccgtccttctcgccctgcagctgcacgaagcccgcctcctcaatctgtgaaccgtgctcctcctccagcaacagctcagcctagtagcggtggttctttcttaggcaatattggtgcatccataactgaaggtctggcttggggtactggaactgcatttggacacagggttgtggattctgtgatgggtccacgaacctttaagcacgaaaccgttgtttctcaggttccatctgctgcaaataccatgactgcttgtgacattcactccaaggctttccaagattgcgtcaaccattttggaagcgacatcagtaagtgccagttctacatggacatgctgagtgaatgcaagaagaattctggttccgtggtggctgcttaatcaactagtcgagatgtctgtgctaagaacaactctggtgtctttaataattagttgttgaaatctaatggttttcttgttgaaagatttgggatcttttatgttattgtcttttggttttatgggatcttttatgatggagttattatatcacataattaacaagaaacctataatagcaattagatcaatatcaaccaattccttcatt

SEQ ID NO: 107615 - protein, 160 aa, Arabidopsis thaliana
  peptide (1)..(160): Ceres Seq. ID no. 13650872
  misc_feature: Pfam Name: CHCH Pfam Description: CHCH domain
  misc_feature (22)..(160): Homolog of NCBI NO: 15242455 NR Description: expressed protein [Arabidopsis thaliana]
  misc_feature (22)..(160): Homolog of NCBI NO: 15237688 NR Description: expressed protein [Arabidopsis thaliana] unknown protein [Arabidopsis thaliana]
  misc_feature (30)..(156): Homolog of NCBI NO: 13174237 NR Description: unknown protein [Oryza sativa]
  misc_feature (26)..(153): Homolog of NCBI NO: 23509031 NR Description: hypothetical protein, conserved [Plasmodium
LVLSSFRRRIHHLTLQHLKFKMPRGSSGGRSSYRPSRPAAARSPPPQSVNRAPPPATAQPSSGGSFLGNIGASITEGLAWGTGTAFGHRVVDSVMGPRTFKHETVVSQVPSAANTMTACDIHSKAFQDCVNHFGSDISKCQFYMDMLSECKKNSGSVVAA

SEQ ID NO: 107616 - protein, 139 aa, Arabidopsis thaliana; identical to SEQ ID NO: 72697
  peptide (1)..(139): Ceres Seq. ID no. 13650873
  misc_feature: Pfam Name: CHCH Pfam Description: CHCH domain
  misc_feature (1)..(139): Homolog of NCBI NO: 15242455 NR Description: expressed protein [Arabidopsis thaliana]
  misc_feature (1)..(139): Homolog of NCBI NO: 15237688 NR Description: expressed protein [Arabidopsis thaliana] unknown protein [Arabidopsis thaliana]
  misc_feature (9)..(135): Homolog of NCBI NO: 13174237 NR Description: unknown protein [Oryza sativa]
  misc_feature (5)..(132): Homolog of NCBI NO: 23509031 NR Description: hypothetical protein, conserved [Plasmodium

SEQ ID NO: 107617 - DNA, 1339 bp, Arabidopsis thaliana
  misc_feature (1)..(1339): Ceres Seq. ID no. 13650890
  misc_feature: MA Experiment ID: 20000184 Result: Up-regulated in Transcription
  misc_feature: MA Experiment 20000184 PARAMETER Experiment Name: At_Shoots__P Parameter: Age (day) Value: 7
  misc_feature: MA Experiment 20000184 PARAMETER Experiment Name: At_Shoots__P Parameter: Tissue Value: Shoots vs. Whole Plant
  misc_feature: MA Experiment ID: 20000234 Result: Up-regulated in Transcription
  misc_feature: MA Experiment 20000234 PARAMETER Experiment Name: At_Siliques_P Parameter: Age (day) Value: 21
  misc_feature: MA Experiment 20000234 PARAMETER Experiment Name: At_Siliques_P Parameter: Organism Value: A. thaliana
  misc_feature: MA Experiment 20000234 PARAMETER Experiment Name: At_Siliques_P Parameter: Plant Line Value: WS
  misc_feature: MA Experiment 20000234 PARAMETER Experiment Name: At_Siliques_P Parameter: Tissue Value: Less Than 5mm Siliques vs. Whole Plant
  misc_feature: MA Experiment ID: 20000439 Result: Up-regulated in Transcription
  misc_feature: MA Experiment 20000439 PARAMETER Experiment Name: At_Roots__P Parameter: Age (day) Value: 14 vs. 21
  misc_feature: MA Experiment 20000439 PARAMETER Experiment Name: At_Roots__P Parameter: Organism Value: A. thaliana
  misc_feature: MA Experiment 20000439 PARAMETER Experiment Name: At_Roots__P Parameter: Tissue Value: Roots vs. Whole Plant
atcggaatccctagaacactcgatttcagcaaaatcaaatcggattcagtgatcaaaagtcaatttggtcgagaagaaattgagcgttgaagatgacggaggcgatgataggaaataagccaggaatggcgagtgtgaaggatatgccgctgcttcaggatggtccgccaccgggtgggttcgcaccggtccgatatgcccgccggatatccaatacgggtcctagtgcaatggccatgttccttgccgtttctggtgcctttgcttggggaatgtaccaggtcggccagggaaacaaaatccgcaggtaagaacgacttgtaatagctcgttcacatttcaatttttcctctaaaattcgagatcgccttggtaaaattagtgttgtggagtgattgatgaccatagtaatgtagtgaaggatacattttggttaataattgttgaaacttgagtatgtttatcgtaggaattggttaatattattaacctatggaaacataggcttgttgaatcactgttatgtattctgttattagtattccccgacattttggttgaagcttaatcagcatgagtttagccttaaacgaatataaagttcgtcaacaatttgtaaactcttaaagccacaattgcaaagatgtgagaatctgttatgatgaaagcaattatctagttgcatgttttgatagtagttatcgggatactgtttctatgtagatagattgttttagtattatatctggcttgatcattaacttcttatgcatttacaatggtcctaaacaagtctgatttgatatcagtaagtatcaagattaatgctcttatcaagattgatgtgatgtttagggcattgaaggaagagaaatatgctgctcgtagaacaatacttcccattcttcaagcagaagaagatgaaaggtaaaccatattctcaaatttaagtcaatgtgcctgcagcaaccttcagatagcaatcttgtttcaatccccgttttgcattctaggtttgtgtctgagtggaaaaagtatctggaatatgaggctgatgtaatgaaagatgttccgggatggaaagttggcgagaatgtgtacaattctggtcgctggatgcctccggccactggggaactccgtcctgatgtgtggtgatttcctagtttctctcaaatgcatatgatgatgatgaatgatgtttcgctgaggattgatatgttcttgttatatctttttttcttcgggtaataagagaatgattcaacagacagtattcttcttgtattggttttctcttaagtgtttcaatcgtaatatgaggcaaaaacagtttcat

SEQ ID NO: 107618 - protein, 72 aa, Arabidopsis thaliana
  peptide (1)..(72): Ceres Seq. ID no. 13650891
  misc_feature (16)..(72): Pfam Name: GRIM-19 protein Pfam Description: GRIM-19 protein
  misc_feature (1)..(72): Homolog of NCBI NO: 25406799 NR Description: hypothetical protein [imported] - Arabidopsis >gi|2494128|gb|AAB80637.1| EST gb|T43244 comes from this gene.
  misc_feature (1)..(72): Homolog of NCBI NO: 20260652 NR Description: unknown protein [Arabidopsis thaliana]
  misc_feature (1)..(72): Homolog of NCBI NO: 15219769 NR Description: expressed protein [Arabidopsis thaliana]
  misc_feature (1)..(72): Homolog of NCBI NO: 18403216 NR Description: expressed protein [Arabidopsis thaliana]
  misc_feature (1)..(72): Homolog of NCBI NO: 16973316 NR Description: F6 [Gossypium hirsutum]
  misc_feature (1)..(72): Homolog of NCBI NO: 26451954 NR Description: unknown protein [Arabidopsis thaliana]
  misc_feature (1)..(72): Homolog of NCBI NO: 34334020 NR Description: NADH:ubiquinone oxidoreductase B16.6 subunit
  misc_feature (22)..(72): Homolog of NCBI NO: 27668839 NR Description: similar to genes associated with mortality 19; RIKEN cDNA 2700054G14 gene [Mus musculus] [Rattus
  misc_feature (22)..(72): Homolog of NCBI NO: 12963633 NR Description: genes associated with retinoid-IFN-induced
  misc_feature (13)..(72): Homolog of NCBI NO: 34809544 NR Description: GRIM19 protein [Homo sapiens]
MTEAMIGNKPGMASVKDMPLLQDGPPPGGFAPVRYARRISNTGPSAMAMFLAVSGAFAWGMYQVGQGNKIRR

SEQ ID NO: 107619 - protein, 68 aa, Arabidopsis thaliana
  peptide (1)..(68): Ceres Seq. ID no. 13650892
  misc_feature (12)..(68): Pfam Name: GRIM-19 protein Pfam Description: GRIM-19 protein
  misc_feature (1)..(68): Homolog of NCBI NO: 25406799 NR Description: hypothetical protein [imported] - Arabidopsis >gi|2494128|gb|AAB80637.1| EST gb|T43244 comes from this gene.
  misc_feature (1)..(68): Homolog of NCBI NO: 20260652 NR Description: unknown protein [Arabidopsis thaliana]
  misc_feature (1)..(68): Homolog of NCBI NO: 15219769 NR Description: expressed protein [Arabidopsis thaliana]
  misc_feature (1)..(68): Homolog of NCBI NO: 18403216 NR Description: expressed protein [Arabidopsis thaliana]
  misc_feature (1)..(68): Homolog of NCBI NO: 16973316 NR Description: F6 [Gossypium hirsutum]
  misc_feature (1)..(68): Homolog of NCBI NO: 26451954 NR Description: unknown protein [Arabidopsis thaliana]
  misc_feature (1)..(68): Homolog of NCBI NO: 34334020 NR Description: NADH:ubiquinone oxidoreductase B16.6 subunit
  misc_feature (18)..(68): Homolog of NCBI NO: 27668839 NR Description: similar to genes associated with mortality 19; RIKEN cDNA 2700054G14 gene [Mus musculus] [Rattus
  misc_feature (18)..(68): Homolog of NCBI NO: 12963633 NR Description: genes associated with retinoid-IFN-induced
  misc_feature (9)..(68): Homolog of NCBI NO: 34809544 NR Description: GRIM19 protein [Homo sapiens]
MIGNKPGMASVKDMPLLQDGPPPGGFAPVRYARRISNTGPSAMAMFLAVSGAFAWGMYQVGQGNKIRR

SEQ ID NO: 107620 - protein, 67 aa, Arabidopsis thaliana
  peptide (1)..(67): Ceres Seq. ID no. 13650893
  misc_feature (8)..(65): Pfam Name: GRIM-19 protein Pfam Description: GRIM-19 protein
  misc_feature (8)..(65): Homolog of NCBI NO: 25406799 NR Description: hypothetical protein [imported] - Arabidopsis >gi|2494128|gb|AAB80637.1| EST gb|T43244 comes from this gene.
  misc_feature (14)..(67): Homolog of NCBI NO: 20260652 NR Description: unknown protein [Arabidopsis thaliana]
  misc_feature (14)..(66): Homolog of NCBI NO: 15219769 NR Description: expressed protein [Arabidopsis thaliana]
  misc_feature (14)..(67): Homolog of NCBI NO: 18403216 NR Description: expressed protein [Arabidopsis thaliana]
  misc_feature (14)..(63): Homolog of NCBI NO: 16973316 NR Description: F6 [Gossypium hirsutum]
  misc_feature (15)..(64): Homolog of NCBI NO: 34334020 NR Description: NADH:ubiquinone oxidoreductase B16.6 subunit
  misc_feature (8)..(62): Homolog of NCBI NO: 27668839 NR Description: similar to genes associated with mortality 19; RIKEN cDNA 2700054G14 gene [Mus musculus] [Rattus
  misc_feature (26)..(62): Homolog of NCBI NO: 12963633 NR Description: genes associated with retinoid-IFN-induced
  misc_feature (8)..(62): Homolog of NCBI NO: 34809544 NR Description: GRIM19 protein [Homo sapiens]
  misc_feature (8)..(62): Homolog of NCBI NO: 28603804 NR Description: cell death-regulatory protein GRIM19 [Bos taurus]
MCLQQPSDSNLVSIPVLHSRFVSEWKKYLEYEADVMKDVPGWKVGENVYNSGRWMPPATGELRPDVW

SEQ ID NO: 107621 - DNA, 1291 bp, Arabidopsis thaliana
  misc_feature (1)..(1291): Ceres Seq. ID no. 13650902
  misc_feature: MA Experiment ID: 108434 Result: Down-regulated in Transcription
  misc_feature: MA Experiment 108434 PARAMETER Experiment Name: At_Root_Tips_cDNA_P Parameter: Tissue Value: Root Tips
  misc_feature: MA Experiment ID: 108462 Result: Down-regulated in Transcription
  misc_feature: MA Experiment 108462 PARAMETER Experiment Name: At_Germinating_Seeds_cDNA_P Parameter: Age (day) Value: 2 vs. 0
  misc_feature: MA Experiment 108462 PARAMETER Experiment Name: At_Germinating_Seeds_cDNA_P Parameter: Tissue Value: Germinating Seeds
  misc_feature: MA Experiment ID: 108463 Result: Down-regulated in Transcription
  misc_feature: MA Experiment 108463 PARAMETER Experiment Name: At_Germinating_Seeds_cDNA_P Parameter: Age (day) Value: 3 vs. 0
  misc_feature: MA Experiment 108463 PARAMETER Experiment Name: At_Germinating_Seeds_cDNA_P Parameter: Tissue Value: Germinating Seeds
  misc_feature: MA Experiment ID: 108464 Result: Down-regulated in Transcription
  misc_feature: MA Experiment 108464 PARAMETER Experiment Name: At_Germinating_Seeds_cDNA_P Parameter: Age (day) Value: 4 vs. 0
  misc_feature: MA Experiment 108464 PARAMETER Experiment Name: At_Germinating_Seeds_cDNA_P Parameter: Tissue Value: Germinating Seeds
  misc_feature: MA Experiment ID: 108473 Result: Down-regulated in Transcription
  misc_feature: MA Experiment 108473 PARAMETER Experiment Name: At_Drought_Flowers_cDNA_P Parameter: Timepoint (hr) Value: 7 d
  misc_feature: MA Experiment 108473 PARAMETER Experiment Name: At_Drought_Flowers_cDNA_P Parameter: Tissue Value: Flower
  misc_feature: MA Experiment 108473 PARAMETER Experiment Name: At_Drought_Flowers_cDNA_P Parameter: Treatment Value: Drought vs. No Drought
  misc_feature: MA Experiment ID: 108474 Result: Down-regulated in Transcription
  misc_feature: MA Experiment 108474 PARAMETER Experiment Name: At_Drought_Flowers_cDNA_P Parameter: Timepoint (hr) Value: null
  misc_feature: MA Experiment 108474 PARAMETER Experiment Name: At_Drought_Flowers_cDNA_P Parameter: Treatment Value: Drought vs. No Drought
  misc_feature: MA Experiment ID: 108501 Result: Up-regulated in Transcription
  misc_feature: MA Experiment 108501 PARAMETER Experiment Name: At_ap2_floral_buds_cDNA_P Parameter: Plant Line Value: ap2 (Ler.)
  misc_feature: MA Experiment 108501 PARAMETER Experiment Name: At_ap2_floral_buds_cDNA_P Parameter: Tissue Value: Closed Flower
  misc_feature: MA Experiment ID: 108573 Result: Down-regulated in Transcription
  misc_feature: MA Experiment 108573 PARAMETER Experiment Name: At_Drought_cDNA_P Parameter: Timepoint (hr) Value: 6
  misc_feature: MA Experiment 108573 PARAMETER Experiment Name: At_Drought_cDNA_P Parameter: Tissue Value: Aerial
  misc_feature: MA Experiment 108573 PARAMETER Experiment Name: At_Drought_cDNA_P Parameter: Treatment Value: Drought vs. No Drought
  misc_feature: MA Experiment ID: 108595 Result: Up-regulated in Transcription
  misc_feature: MA Experiment 108595 PARAMETER Experiment Name: At_Ler-pi_Ovule_cDNA_P Parameter: Plant Line Value: null
  misc_feature: MA Experiment ID: 108609 Result: Down-regulated in Transcription
  misc_feature: MA Experiment 108609 PARAMETER Experiment Name: At_100uM_ABA_cDNA_P Parameter: Timepoint (hr) Value: 24
  misc_feature: MA Experiment 108609 PARAMETER Experiment Name: At_100uM_ABA_cDNA_P Parameter: Tissue Value: Aerial
  misc_feature: MA Experiment 108609 PARAMETER Experiment Name: At_100uM_ABA_cDNA_P Parameter: Treatment Value: 100uM ABA vs. No Treatment
  misc_feature: MA Experiment ID: 20000070 Result: Down-regulated in Transcription
  misc_feature: MA Experiment 20000070 PARAMETER Experiment Name: At_100uM_ABA_Mutants_cDNA_P Parameter: Plant Line Value: CS24
  misc_feature: MA Experiment 20000070 PARAMETER Experiment Name: At_100uM_ABA_Mutants_cDNA_P Parameter: Timepoint (hr) Value: 6
  misc_feature: MA Experiment 20000070 PARAMETER Experiment Name: At_100uM_ABA_Mutants_cDNA_P Parameter: Tissue Value: Aerial
  misc_feature: MA Experiment 20000070 PARAMETER Experiment Name: At_100uM_ABA_Mutants_cDNA_P Parameter: Treatment Value: 100uM ABA vs. No Treatment
  misc_feature: MA Experiment ID: 20000071 Result: Down-regulated in Transcription
  misc_feature: MA Experiment 20000071 PARAMETER Experiment Name: At_100uM_ABA_Mutants_cDNA_P Parameter: Plant Line Value: CS8104
  misc_feature: MA Experiment 20000071 PARAMETER Experiment Name: At_100uM_ABA_Mutants_cDNA_P Parameter: Timepoint (hr) Value: 6
  misc_feature: MA Experiment 20000071 PARAMETER Experiment Name: At_100uM_ABA_Mutants_cDNA_P Parameter: Tissue Value: Aerial
  misc_feature: MA Experiment 20000071 PARAMETER Experiment Name: At_100uM_ABA_Mutants_cDNA_P Parameter: Treatment Value: 100uM ABA vs. No Treatment
  misc_feature: MA Experiment ID: 20000089 Result: Down-regulated in Transcription
  misc_feature: MA Experiment ID: 20000090 Result: Down-regulated in Transcription
  misc_feature: MA Experiment ID: 20000117 Result: Down-regulated in Transcription
  misc_feature: MA Experiment 20000117 PARAMETER Experiment Name: At_100uM_ABA_Mutants_cDNA_P Parameter: Plant Line Value: Columbia
  misc_feature: MA Experiment 20000117 PARAMETER Experiment Name: At_100uM_ABA_Mutants_cDNA_P Parameter: Timepoint (hr) Value: 6
  misc_feature: MA Experiment 20000117 PARAMETER Experiment Name: At_100uM_ABA_Mutants_cDNA_P Parameter: Tissue Value: Aerial
  misc_feature: MA Experiment 20000117 PARAMETER Experiment Name: At_100uM_ABA_Mutants_cDNA_P Parameter: Treatment Value: 100uM ABA vs. No Treatment
  misc_feature: MA Experiment ID: 20000180 Result: Down-regulated in Transcription
  misc_feature: MA Experiment 20000180 PARAMETER Experiment Name: At_Germinating_Seeds_P Parameter: Age (hr) Value: 24 vs. 0
  misc_feature: MA Experiment 20000180 PARAMETER Experiment Name: At_Germinating_Seeds_P Parameter: Tissue Value: Germinating Seeds
  misc_feature: MA Experiment ID: 20000185 Result: Up-regulated in Transcription
  misc_feature: MA Experiment 20000185 PARAMETER Experiment Name: At_Roots__P Parameter: Age (day) Value: 7 vs. 21
  misc_feature: MA Experiment 20000185 PARAMETER Experiment Name: At_Roots__P Parameter: Organism Value: A. thaliana
  misc_feature: MA Experiment 20000185 PARAMETER Experiment Name: At_Roots__P Parameter: Tissue Value: Roots vs. Whole Plant
  misc_feature: MA Experiment ID: 20000224 Result: Down-regulated in Transcription
  misc_feature: MA Experiment ID: 20000234 Result: Up-regulated in Transcription
  misc_feature: MA Experiment 20000234 PARAMETER Experiment Name: At_Siliques_P Parameter: Age (day) Value: 21
  misc_feature: MA Experiment 20000234 PARAMETER Experiment Name: At_Siliques_P Parameter: Organism Value: A. thaliana
  misc_feature: MA Experiment 20000234 PARAMETER Experiment Name: At_Siliques_P Parameter: Plant Line Value: WS
  misc_feature: MA Experiment 20000234 PARAMETER Experiment Name: At_Siliques_P Parameter: Tissue Value: Less Than 5mm Siliques vs. Whole Plant
  misc_feature: MA Experiment ID: 20000235 Result: Up-regulated in Transcription
  misc_feature: MA Experiment 20000235 PARAMETER Experiment Name: At_Siliques_P Parameter: Age (day) Value: 21
  misc_feature: MA Experiment 20000235 PARAMETER Experiment Name: At_Siliques_P Parameter: Organism Value: A. thaliana
  misc_feature: MA Experiment 20000235 PARAMETER Experiment Name: At_Siliques_P Parameter: Plant Line Value: WS
  misc_feature: MA Experiment 20000235 PARAMETER Experiment Name: At_Siliques_P Parameter: Tissue Value: 5-10mm Siliques vs. Whole Plant
  misc_feature: MA Experiment ID: 20000264 Result: Up-regulated in Transcription
  misc_feature: MA Experiment 20000264 PARAMETER Experiment Name: At_Open_Flower_P Parameter: Age (day) Value: 21
  misc_feature: MA Experiment 20000264 PARAMETER Experiment Name: At_Open_Flower_P Parameter: Plant Line Value: WS
  misc_feature: MA Experiment 20000264 PARAMETER Experiment Name: At_Open_Flower_P Parameter: Tissue Value: Open Flower vs. Whole Plant
  misc_feature: MA Experiment ID: 20000265 Result: Up-regulated in Transcription
  misc_feature: MA Experiment 20000265 PARAMETER Experiment Name: At_Open_Flower_P Parameter: Age (day) Value: 21
  misc_feature: MA Experiment 20000265 PARAMETER Experiment Name: At_Open_Flower_P Parameter: Plant Line Value: WS
  misc_feature: MA Experiment 20000265 PARAMETER Experiment Name: At_Open_Flower_P Parameter: Tissue Value: Closed Flower vs. Whole Plant
  misc_feature: MA Experiment ID: 20000269 Result: Up-regulated in Transcription
  misc_feature: MA Experiment 20000269 PARAMETER Experiment Name: At_1mM_KNO3_L-vs-H_Roots_P Parameter: Age (day) Value: 7,10,12
  misc_feature: MA Experiment 20000269 PARAMETER Experiment Name: At_1mM_KNO3_L-vs-H_Roots_P Parameter: Organism Value: A. thaliana
  misc_feature: MA Experiment 20000269 PARAMETER Experiment Name: At_1mM_KNO3_L-vs-H_Roots_P Parameter: Plant Line Value: WS
  misc_feature: MA Experiment 20000269 PARAMETER Experiment Name: At_1mM_KNO3_L-vs-H_Roots_P Parameter: Timepoint (day) Value: 7,10,12
  misc_feature: MA Experiment 20000269 PARAMETER Experiment Name: At_1mM_KNO3_L-vs-H_Roots_P Parameter: Tissue Value: Roots
  misc_feature: MA Experiment 20000269 PARAMETER Experiment Name: At_1mM_KNO3_L-vs-H_Roots_P Parameter: Treatment Value: 1mM KNO3 vs. 50mM KNO3
  misc_feature: MA Experiment ID: 20000286 Result: Up-regulated in Transcription
  misc_feature: MA Experiment 20000286 PARAMETER Experiment Name: At_Open_Flower_P Parameter: Age (day) Value: 21
  misc_feature: MA Experiment 20000286 PARAMETER Experiment Name: At_Open_Flower_P Parameter: Plant Line Value: WS
  misc_feature: MA Experiment 20000286 PARAMETER Experiment Name: At_Open_Flower_P Parameter: Tissue Value: Half Open vs. Whole Plant
  misc_feature: MA Experiment ID: 20000438 Result: Up-regulated in Transcription
  misc_feature: MA Experiment 20000438 PARAMETER Experiment Name: At_Shoots__P Parameter: Age (day) Value: 14
  misc_feature: MA Experiment 20000438 PARAMETER Experiment Name: At_Shoots__P Parameter: Tissue Value: Shoots vs. Whole Plant
  misc_feature: MA Experiment ID: 20000453 Result: Down-regulated in Transcription
  misc_feature: MA Experiment 20000453 PARAMETER Experiment Name: At_100uM_ABA_P Parameter: Age (day) Value: 15
  misc_feature: MA Experiment 20000453 PARAMETER Experiment Name: At_100uM_ABA_P Parameter: Organism Value: A. thaliana
  misc_feature: MA Experiment 20000453 PARAMETER Experiment Name: At_100uM_ABA_P Parameter: Plant Line Value: WS
  misc_feature: MA Experiment 20000453 PARAMETER Experiment Name: At_100uM_ABA_P Parameter: Timepoint (hr) Value: 24
  misc_feature: MA Experiment 20000453 PARAMETER Experiment Name: At_100uM_ABA_P Parameter: Tissue Value: Aerial
  misc_feature: MA Experiment 20000453 PARAMETER Experiment Name: At_100uM_ABA_P Parameter: Treatment Value: 100uM ABA vs. No Treatment
  misc_feature: MA Experiment ID: 20001458 Result: Down-regulated in Transcription
  misc_feature: MA Experiment 20001458 PARAMETER Experiment Name: At_50mM_NH4NO3_L-to-H_P Parameter: Age (day) Value: Undefined
  misc_feature: MA Experiment 20001458 PARAMETER Experiment Name: At_50mM_NH4NO3_L-to-H_P Parameter: Organism Value: Undefined
  misc_feature: MA Experiment 20001458 PARAMETER Experiment Name: At_50mM_NH4NO3_L-to-H_P Parameter: Plant Line Value: Undefined
  misc_feature: MA Experiment 20001458 PARAMETER Experiment Name: At_50mM_NH4NO3_L-to-H_P Parameter: Timepoint (hr) Value: 2
  misc_feature: MA Experiment 20001458 PARAMETER Experiment Name: At_50mM_NH4NO3_L-to-H_P Parameter: Tissue Value: Siliques
  misc_feature: MA Experiment 20001458 PARAMETER Experiment Name: At_50mM_NH4NO3_L-to-H_P Parameter: Treatment Value: 50mM NH4NO3 vs. 100mM Manitol
  misc_feature: MA Experiment ID: 20001557 Result: Up-regulated in Transcription
  misc_feature: MA Experiment 20001557 PARAMETER Experiment Name: At_Drought_Soil_Dry_P Parameter: Age (day) Value: 27
  misc_feature: MA Experiment 20001557 PARAMETER Experiment Name: At_Drought_Soil_Dry_P Parameter: Organism Value: A. thaliana
  misc_feature: MA Experiment 20001557 PARAMETER Experiment Name: At_Drought_Soil_Dry_P Parameter: Plant Line Value: WS
  misc_feature: MA Experiment 20001557 PARAMETER Experiment Name: At_Drought_Soil_Dry_P Parameter: Post Timepoint (hr) Value: 3
  misc_feature: MA Experiment 20001557 PARAMETER Experiment Name: At_Drought_Soil_Dry_P Parameter: Post-Treatment Value: Re-Water vs. No Drought
  misc_feature: MA Experiment 20001557 PARAMETER Experiment Name: At_Drought_Soil_Dry_P Parameter: Timepoint (day) Value: 13
  misc_feature: MA Experiment 20001557 PARAMETER Experiment Name: At_Drought_Soil_Dry_P Parameter: Treatment Value: Drought vs. No Drought
  misc_feature: MA Experiment ID: 20001761 Result: Down-regulated in Transcription
  misc_feature: MA Experiment 20001761 PARAMETER Experiment Name: At_50mM_NH4NO3_L-to-H_P Parameter: Timepoint (hr) Value: 4
  misc_feature: MA Experiment 20001761 PARAMETER Experiment Name: At_50mM_NH4NO3_L-to-H_P Parameter: Tissue Value: Siliques
  misc_feature: MA Experiment 20001761 PARAMETER Experiment Name: At_50mM_NH4NO3_L-to-H_P Parameter: Treatment Value: 50mM NH4NO3 vs 100mM Mannitol
atcattctcggtttaactgtgaaacacataaataaaacaaagagaaagagagagaatatgggtgggtgggcaatcgcagtacacggtggtgccggtatcgaccctaatcttccggcggagagacaagaagaggctaaacagcttttaactcgttgtctcaacctcggcataatagctttgcgttccaatgtctccgccattgacgtcgttgagctcgtcattagagaattggagacggatcctctgtttaattcaggccgtggatctgctttgacggaaaaaggaacggttgagatggaagctagcattatggacggtacgaagagacgatgcggtgccgtttcggggataaccaccgtgaaaaatcctatatctcttgctcgtctcgtcatggacaaatctccccactcttaccttgctttctcaggtgcagaggatttcgcccgcaaacaggtgtttatttactattttacccttccactttttattctaaaccacttggttagataaatcttctgaccgaagccggtttaatgagaagggagttgaaattgtggacaacgagtactttgtcacggacgacaacgtaggaatgctcaagttggccaaggaagctaactccatcttgtttgattaccggattccgccgatgggatgtgccggtgcagctgcgaccgacagtccaatccaaatgaacggtcttccgatcagcatttacgcaccggagacagtcgggtgcgttgtggttgacgggaaaggacattgtgccgccgggacatccacgggtggtttaatgaacaagatgatgggaaggattggtgactcgccgctgataggagccgggacgtatgcgtcggagttttgtggtgtgtcgtgtaccggagaaggagaagccattataagagcaaccctagctcgtgatgtgtcagctgttatggagtataaaggacttaacctccaagaagcggttgattacgtcatcaagcatcgacttgacgaagggttcgctggactcattgctgtctcgaataaaggagaggtggtttgtggttttaactctaatgggatgttcaggggatgtgcaactgaggatggattcatggaggttgctatttgggagtgagaaatattttagattaagaaaatgtcttactagtatttaatcagtcatcgctctattaatttggttattcattatcataaagctggaggagtaaatttagttatgtcgttatcaccagtcctatattgatttgtgtttaatgcggtttcaaatggttagttcgtgtct

SEQ ID NO: 107622 - protein, 176 aa, Arabidopsis thaliana
  peptide (1)..(176): Ceres Seq. ID no. 13650903
  misc_feature (1)..(176): Pfam Name: Asparaginase Pfam Description: Asparaginase
  misc_feature (1)..(176): Homolog of NCBI NO: 18401029 NR Description: L-asparaginase -related [Arabidopsis thaliana]
MLKLAKEANSILFDYRIPPMGCAGAAATDSPIQMNGLPISIYAPETVGCVVVDGKGHCAAGTSTGGLMNKMMGRIGDSPLIGAGTYASEFCGVSCTGEGEAIIRATLARDVSAVMEYKGLNLQEAVDYVIKHRLDEGFAGLIAVSNKGEVVCGFNSNGMFRGCATEDGFMEVAIWE

SEQ ID NO: 107623 - protein, 169 aa, Arabidopsis thaliana
  peptide (1)..(169): Ceres Seq. ID no. 13650904
  misc_feature (21)..(151): Pfam Name: Asparaginase Pfam Description: Asparaginase
  misc_feature (20)..(151): Homolog of NCBI NO: 18401029 NR Description: L-asparaginase -related [Arabidopsis thaliana]
IILGLTVKHINKTKRKRENMGGWAIAVHGGAGIDPNLPAERQEEAKQLLTRCLNLGIIALRSNVSAIDVVELVIRELETDPLFNSGRGSALTEKGTVEMEASIMDGTKRRCGAVSGITTVKNPISLARLVMDKSPHSYLAFSGAEDFARKQVFIYYFTLPLFILNHLVR

SEQ ID NO: 107624 - protein, 157 aa, Arabidopsis thaliana
  peptide (1)..(157): Ceres Seq. ID no. 13650905
  misc_feature (1)..(157): Pfam Name: Asparaginase Pfam Description: Asparaginase
  misc_feature (1)..(157): Homolog of NCBI NO: 18401029 NR Description: L-asparaginase -related [Arabidopsis thaliana]
MGCAGAAATDSPIQMNGLPISIYAPETVGCVVVDGKGHCAAGTSTGGLMNKMMGRIGDSPLIGAGTYASEFCGVSCTGEGEAIIRATLARDVSAVMEYKGLNLQEAVDYVIKHRLDEGFAGLIAVSNKGEVVCGFNSNGMFRGCATEDGFMEVAIWE

SEQ ID NO: 107625 - DNA, 1077 bp, Arabidopsis thaliana
  misc_feature (1)..(1077): Ceres Seq. ID no. 13650914
  misc_feature: MA Experiment ID: 20000328 Result: Down-regulated in Transcription
  misc_feature: MA Experiment 20000328 PARAMETER Experiment Name: At_42deg_Heat_Sub_P Parameter: Age (day) Value: 14
  misc_feature: MA Experiment 20000328 PARAMETER Experiment Name: At_42deg_Heat_Sub_P Parameter: Organism Value: A. thaliana
  misc_feature: MA Experiment 20000328 PARAMETER Experiment Name: At_42deg_Heat_Sub_P Parameter: Plant Line Value: WS
  misc_feature: MA Experiment 20000328 PARAMETER Experiment Name: At_42deg_Heat_Sub_P Parameter: Temperature (deg C) Value: 42 vs. 22
  misc_feature: MA Experiment 20000328 PARAMETER Experiment Name: At_42deg_Heat_Sub_P Parameter: Timepoint (hr) Value: 6
  misc_feature: MA Experiment 20000328 PARAMETER Experiment Name: At_42deg_Heat_Sub_P Parameter: Tissue Value: Aerial
  misc_feature: MA Experiment ID: 20000355 Result: Up-regulated in Transcription
  misc_feature: MA Experiment 20000355 PARAMETER Experiment Name: At_Siliques_Sub_P Parameter: Age (day) Value: 21
  misc_feature: MA Experiment 20000355 PARAMETER Experiment Name: At_Siliques_Sub_P Parameter: Organism Value: A. thaliana
  misc_feature: MA Experiment 20000355 PARAMETER Experiment Name: At_Siliques_Sub_P Parameter: Plant Line Value: WS
  misc_feature: MA Experiment 20000355 PARAMETER Experiment Name: At_Siliques_Sub_P Parameter: Tissue Value: Less Than 5mm Siliques vs. Whole Plant
  misc_feature: MA Experiment ID: 20000440 Result: Up-regulated in Transcription
  misc_feature: MA Experiment 20000440 PARAMETER Experiment Name: At_Closed-Flower__Sub_P Parameter: Tissue Value: Closed Flower vs. Whole Plant
aaaaataaaaatctctaattttcactgctccgtaattacattcgccggatctccccgtcatccacattccgttatcgccggcgttcatcttctctacagatcgattcggatcttgattattttttagcaagtagtggtttctgggaacgatgagtcaaggtttcgaaagatatgagagacaatactgtgagatttctgcaaatctctcaaagaaatgtacttcagctattgctcttgatggagtttcataggtcgcggactcgctgatgatggatcaccgatgaaaacacgaaacttttcttagtgtacttgaagatttcagagatagtgattgaagattcagttaacctagttatttagcttatgaatgtgactatgagaatgcagaagctttcactatagggttcagagattagttttctaacttgtacaagtctctgtctccttcatgcattaacaaaagaagcagaatctatctgaaataaaatctggggttgaggaagcagaagctttggttaagaaaatggacctcgaggcaagaaaccttccacccaatgttaaatccagtctccttgtcaaattaagggaatacaaatctgatcttaacaatttcaagacggaagtgaagagaatcacatctggaaacttaaacgctactgctcgagatgagttactagaagctggtatggctgacacattgacggcttcagctgatcaaagatcaagattgatgatgtcaacagaccatttaggccgaaccacagacagaatcaaggacagtaggagaacgatactggagacagaagagcttggtgtttcaatccttcaggatttgcacgggcagagacagtctctcttacgggcccatgaaacgcttcatggagtcgatgataacgtcggaaagagcaagaaaatattgacaacaatgactaggagaatgaatagaaacaaatggaccatcggtgcgataatcacagtccttgtcctcgccattatctttatcttgtacttcaaactcaccaggtgaagcctttttctcttcacctgcctgaccaatttctaactgaacaactttct

SEQ ID NO: 107626 - protein, 167 aa, Arabidopsis thaliana; identical to SEQ ID NO: 89257
  peptide (1)..(167): Ceres Seq. ID no. 13650915
  misc_feature (1)..(142): Pfam Name: Vesicle transport v-SNARE protein Pfam Description: Vesicle transport v-SNARE protein
  misc_feature (1)..(167): Homolog of NCBI NO: 15228600 NR Description: SNARE protein AtVTI13 [Arabidopsis thaliana]
  misc_feature (1)..(167): Homolog of NCBI NO: 6690274 NR Description: v-SNARE AtVTI1a [Arabidopsis thaliana]
  misc_feature (1)..(167): Homolog of NCBI NO: 15241780 NR Description: v-SNARE AtVTI1a (ZIG) [Arabidopsis thaliana]
  misc_feature (1)..(167): Homolog of NCBI NO: 26451552 NR Description: putative vesicle transport protein [Arabidopsis
  misc_feature (1)..(165): Homolog of NCBI NO: 34910406 NR Description: putative vesicle transport v-SNARE protein [Oryza
  misc_feature (1)..(164): Homolog of NCBI NO: 34914100 NR Description: similar to vesicle transport protein [Oryza
  misc_feature (1)..(166): Homolog of NCBI NO: 18396008 NR Description: v-SNARE protein AtVTI1b, putative [Arabidopsis >gi|9295720|gb|AAF87026.1|AC006535_4 T24P13.5 [Arabidopsis
  misc_feature (1)..(166): Homolog of NCBI NO: 6690276 NR Description: v-SNARE AtVTI1b [Arabidopsis thaliana]
  misc_feature (1)..(166): Homolog of NCBI NO: 27805772 NR Description: Vesicle transport v-SNARE 12 (AtVTI12) (Vesicle v- SNARE protein VTI1b) (Vesicle soluble NSF attachment protein
  misc_feature (1)..(167): Homolog of NCBI NO: 15241823 NR Description: SNARE protein AtMEMB11 [Arabidopsis thaliana]

SEQ ID NO: 107627 - protein, 113 aa, Arabidopsis thaliana; identical to SEQ ID NO: 89258
  peptide (1)..(113): Ceres Seq. ID no. 13650916
  misc_feature (1)..(88): Pfam Name: Vesicle transport v-SNARE protein Pfam Description: Vesicle transport v-SNARE protein
  misc_feature (1)..(113): Homolog of NCBI NO: 15228600 NR Description: SNARE protein AtVTI13 [Arabidopsis thaliana]
  misc_feature (1)..(113): Homolog of NCBI NO: 6690274 NR Description: v-SNARE AtVTI1a [Arabidopsis thaliana]
  misc_feature (1)..(113): Homolog of NCBI NO: 15241780 NR Description: v-SNARE AtVTI1a (ZIG) [Arabidopsis thaliana]
  misc_feature (1)..(113): Homolog of NCBI NO: 26451552 NR Description: putative vesicle transport protein [Arabidopsis
  misc_feature (1)..(111): Homolog of NCBI NO: 34910406 NR Description: putative vesicle transport v-SNARE protein [Oryza
  misc_feature (1)..(110): Homolog of NCBI NO: 34914100 NR Description: similar to vesicle transport protein [Oryza
  misc_feature (1)..(112): Homolog of NCBI NO: 18396008 NR Description: v-SNARE protein AtVTI1b, putative [Arabidopsis >gi|9295720|gb|AAF87026.1|AC006535_4 T24P13.5 [Arabidopsis
  misc_feature (1)..(112): Homolog of NCBI NO: 6690276 NR Description: v-SNARE AtVTI1b [Arabidopsis thaliana]
  misc_feature (1)..(112): Homolog of NCBI NO: 27805772 NR Description: Vesicle transport v-SNARE 12 (AtVTI12) (Vesicle v- SNARE protein VTI1b) (Vesicle soluble NSF attachment protein
  misc_feature (1)..(113): Homolog of NCBI NO: 15241823 NR Description: SNARE protein AtMEMB11 [Arabidopsis thaliana]

SEQ ID NO: 107628 - protein, 98 aa, Arabidopsis thaliana; identical to SEQ ID NO: 89259
  peptide (1)..(98): Ceres Seq. ID no. 13650917
  misc_feature (1)..(73): Pfam Name: Vesicle transport v-SNARE protein Pfam Description: Vesicle transport v-SNARE protein
  misc_feature (1)..(98): Homolog of NCBI NO: 15228600 NR Description: SNARE protein AtVTI13 [Arabidopsis thaliana]
  misc_feature (1)..(98): Homolog of NCBI NO: 6690274 NR Description: v-SNARE AtVTI1a [Arabidopsis thaliana]
  misc_feature (1)..(98): Homolog of NCBI NO: 15241780 NR Description: v-SNARE AtVTI1a (ZIG) [Arabidopsis thaliana]
  misc_feature (1)..(98): Homolog of NCBI NO: 26451552 NR Description: putative vesicle transport protein [Arabidopsis
  misc_feature (1)..(96): Homolog of NCBI NO: 34910406 NR Description: putative vesicle transport v-SNARE protein [Oryza
  misc_feature (1)..(95): Homolog of NCBI NO: 34914100 NR Description: similar to vesicle transport protein [Oryza
  misc_feature (1)..(97): Homolog of NCBI NO: 18396008 NR Description: v-SNARE protein AtVTI1b, putative [Arabidopsis >gi|9295720|gb|AAF87026.1|AC006535_4 T24P13.5 [Arabidopsis
  misc_feature (1)..(97): Homolog of NCBI NO: 6690276 NR Description: v-SNARE AtVTI1b [Arabidopsis thaliana]
  misc_feature (1)..(97): Homolog of NCBI NO: 27805772 NR Description: Vesicle transport v-SNARE 12 (AtVTI12) (Vesicle v- SNARE protein VTI1b) (Vesicle soluble NSF attachment protein
  misc_feature (1)..(98): Homolog of NCBI NO: 15241823 NR Description: SNARE protein AtMEMB11 [Arabidopsis thaliana]

SEQ ID NO: 107629 - DNA, 1134 bp, Arabidopsis thaliana
  misc_feature (1)..(1134): Ceres Seq. ID no. 13650922
  misc_feature: MA Experiment ID: 20000171 Result: Down-regulated in Transcription
  misc_feature: MA Experiment 20000171 PARAMETER Experiment Name: At_42deg_Heat_P Parameter: Age (day) Value: 14
  misc_feature: MA Experiment 20000171 PARAMETER Experiment Name: At_42deg_Heat_P Parameter: Organism Value: A. thaliana
  misc_feature: MA Experiment 20000171 PARAMETER Experiment Name: At_42deg_Heat_P Parameter: Plant Line Value: WS
  misc_feature: MA Experiment 20000171 PARAMETER Experiment Name: At_42deg_Heat_P Parameter: Temperature (deg C) Value: 42 vs. 22
  misc_feature: MA Experiment 20000171 PARAMETER Experiment Name: At_42deg_Heat_P Parameter: Timepoint (hr) Value: 1
  misc_feature: MA Experiment 20000171 PARAMETER Experiment Name: At_42deg_Heat_P Parameter: Tissue Value: Aerial
  misc_feature: MA Experiment ID: 20000173 Result: Down-regulated in Transcription
  misc_feature: MA Experiment 20000173 PARAMETER Experiment Name: At_42deg_Heat_P Parameter: Age (day) Value: 14
  misc_feature: MA Experiment 20000173 PARAMETER Experiment Name: At_42deg_Heat_P Parameter: Organism Value: A. thaliana
  misc_feature: MA Experiment 20000173 PARAMETER Experiment Name: At_42deg_Heat_P Parameter: Plant Line Value: WS
  misc_feature: MA Experiment 20000173 PARAMETER Experiment Name: At_42deg_Heat_P Parameter: Temperature (deg C) Value: 42 vs. 22
  misc_feature: MA Experiment 20000173 PARAMETER Experiment Name: At_42deg_Heat_P Parameter: Timepoint (hr) Value: 6
  misc_feature: MA Experiment 20000173 PARAMETER Experiment Name: At_42deg_Heat_P Parameter: Tissue Value: Aerial
  misc_feature: MA Experiment ID: 20000180 Result: Up-regulated in Transcription
  misc_feature: MA Experiment 20000180 PARAMETER Experiment Name: At_Germinating_Seeds_P Parameter: Age (hr) Value: 24 vs. 0
  misc_feature: MA Experiment 20000180 PARAMETER Experiment Name: At_Germinating_Seeds_P Parameter: Tissue Value: Germinating Seeds
  misc_feature: MA Experiment ID: 20000184 Result: Down-regulated in Transcription
  misc_feature: MA Experiment 20000184 PARAMETER Experiment Name: At_Shoots__P Parameter: Age (day) Value: 7
  misc_feature: MA Experiment 20000184 PARAMETER Experiment Name: At_Shoots__P Parameter: Tissue Value: Shoots vs. Whole Plant
  misc_feature: MA Experiment ID: 20000234 Result: Up-regulated in Transcription
  misc_feature: MA Experiment 20000234 PARAMETER Experiment Name: At_Siliques_P Parameter: Age (day) Value: 21
  misc_feature: MA Experiment 20000234 PARAMETER Experiment Name: At_Siliques_P Parameter: Organism Value: A. thaliana
  misc_feature: MA Experiment 20000234 PARAMETER Experiment Name: At_Siliques_P Parameter: Plant Line Value: WS
  misc_feature: MA Experiment 20000234 PARAMETER Experiment Name: At_Siliques_P Parameter: Tissue Value: Less Than 5mm Siliques vs. Whole Plant
  misc_feature: MA Experiment ID: 20000265 Result: Up-regulated in Transcription
  misc_feature: MA Experiment 20000265 PARAMETER Experiment Name: At_Open_Flower_P Parameter: Age (day) Value: 21
  misc_feature: MA Experiment 20000265 PARAMETER Experiment Name: At_Open_Flower_P Parameter: Plant Line Value: WS
  misc_feature: MA Experiment 20000265 PARAMETER Experiment Name: At_Open_Flower_P Parameter: Tissue Value: Closed Flower vs. Whole Plant
  misc_feature: MA Experiment ID: 20000286 Result: Up-regulated in Transcription
  misc_feature: MA Experiment 20000286 PARAMETER Experiment Name: At_Open_Flower_P Parameter: Age (day) Value: 21
  misc_feature: MA Experiment 20000286 PARAMETER Experiment Name: At_Open_Flower_P Parameter: Plant Line Value: WS
  misc_feature: MA Experiment 20000286 PARAMETER Experiment Name: At_Open_Flower_P Parameter: Tissue Value: Half Open vs. Whole Plant
  misc_feature: MA Experiment ID: 20000794 Result: Up-regulated in Transcription
  misc_feature: MA Experiment 20000794 PARAMETER Experiment Name: At_Petals_P Parameter: Age (day) Value: 23-25 days
  misc_feature: MA Experiment 20000794 PARAMETER Experiment Name: At_Petals_P Parameter: Plant Line Value: WS
  misc_feature: MA Experiment 20000794 PARAMETER Experiment Name: At_Petals_P Parameter: Tissue Value: Petals vs. Whole plant
ttgtctgtttcttcttcctgtggcttctgggtctttgtcaacatcaaagctctttactttttcaacttactttatcgtgcgtctgtacggaccacaaaaggctctctctttatttctctgtgagatttttttaggatctgagagagccaaagatcatggaggaaagccaagaacttgccttgacccagttgagaaaatcggtcgagaaactctcttcttctactgaggtttgagcctcccatcagaaaccctaacagtagagacagtttagtaaaagtgaatccataatcagaaaatctcatcaatggtttttgttgttgttgtttcctctgaaaagggatatgacaaaccaacattgatgaggttcctggtggcaagatcaatggacccagtcaaggcagcaaagatgtttgtagattggcaaaaatggagagcctccatggttcctccaactggattcatccctgagtcagaagtgcaggatgaattggaattcagaaaggtctgtcttcagggtccgaccaaatccggacacccattggtgcttgtcataacctctaagcattttgcttctaaggatccagctaacttcaagaagtttgttgtttatgcgctagacaaaacaatcgcaagtggcaacaatggcaaagaagttggaggtgagaaattagtagccgttattgatctggcaaacattacatacaagaaccttgatgctcgtggattgatcactggctttcaattcttacaatcttactacccggaacgccttgcaaaatgctacattttgcatatgcccggattcttcgtgaccgtttggaaattcgtctgccgttttctagagaaagcaactcaggaaaagattgtgatagttacggatggagaagaacagagaaaattcgaggaggagatcggagcagatgctttaccggaagagtacggtggccgagctaagctcacagcaatccaagatgttcttcttcctcaggctgctccagtaactctaacaaacaataatgtttagctctttatttttggaagcattaacctgaatatttgtaatggtcagaacataactagtggtacatctctaaatttccaaaagaagcaatgaaaacatgagaaagtaatgcg

SEQ ID NO: 107630 - protein, 239 aa, Arabidopsis thaliana
  peptide (1)..(239): Ceres Seq. ID no. 13650923
  misc_feature (148)..(214): Pfam Name: CRAL/TRIO domain Pfam Description: CRAL/TRIO domain
  misc_feature (1)..(238): Homolog of NCBI NO: 25402783 NR Description: protein F10B6.22 [imported] - Arabidopsis >gi|8778230|gb|AAF79239.1|AC006917_24 F10B6.22 [Arabidopsis
  misc_feature (1)..(239): Homolog of NCBI NO: 30684014 NR Description: SEC14 cytosolic factor, putative [Arabidopsis >gi|26451546|dbj|BAC42870.1| putative
  misc_feature (11)..(223): Homolog of NCBI NO: 15223439 NR Description: SEC14 cytosolic factor, putative [Arabidopsis
  misc_feature (1)..(223): Homolog of NCBI NO: 17226662 NR Description: polyphosphoinositide binding protein [Gossypium
MVFVVVVSSEKGYDKPTLMRFLVARSMDPVKAAKMFVDWQKWRASMVPPTGFIPESEVQDELEFRKVCLQGPTKSGHPLVLVITSKHFASKDPANFKKFVVYALDKTIASGNNGKEVGGEKLVAVIDLANITYKNLDARGLITGFQFLQSYYPERLAKCYILHMPGFFVTVWKFVCRFLEKATQEKIVIVTDGEEQRKFEEEIGADALPEEYGGRAKLTAIQDVLLPQAAPVTLTNNNV

SEQ ID NO: 107631 - protein, 221 aa, Arabidopsis thaliana; identical to SEQ ID NO: 20348
  peptide (1)..(221): Ceres Seq. ID no. 13650924
  misc_feature (130)..(196): Pfam Name: CRAL/TRIO domain Pfam Description: CRAL/TRIO domain
  misc_feature (1)..(220): Homolog of NCBI NO: 25402783 NR Description: protein F10B6.22 [imported] - Arabidopsis >gi|8778230|gb|AAF79239.1|AC006917_24 F10B6.22 [Arabidopsis
  misc_feature (1)..(221): Homolog of NCBI NO: 30684014 NR Description: SEC14 cytosolic factor, putative [Arabidopsis >gi|26451546|dbj|BAC42870.1| putative
  misc_feature (1)..(205): Homolog of NCBI NO: 15223439 NR Description: SEC14 cytosolic factor, putative [Arabidopsis
  misc_feature (1)..(205): Homolog of NCBI NO: 17226662 NR Description: polyphosphoinositide binding protein [Gossypium

SEQ ID NO: 107632 - protein, 213 aa, Arabidopsis thaliana; identical to SEQ ID NO: 20349
  peptide (1)..(213): Ceres Seq. ID no. 13650925
  misc_feature (122)..(188): Pfam Name: CRAL/TRIO domain Pfam Description: CRAL/TRIO domain
  misc_feature (1)..(212): Homolog of NCBI NO: 25402783 NR Description: protein F10B6.22 [imported] - Arabidopsis >gi|8778230|gb|AAF79239.1|AC006917_24 F10B6.22 [Arabidopsis
  misc_feature (1)..(213): Homolog of NCBI NO: 30684014 NR Description: SEC14 cytosolic factor, putative [Arabidopsis >gi|26451546|dbj|BAC42870.1| putative
  misc_feature (1)..(197): Homolog of NCBI NO: 15223439 NR Description: SEC14 cytosolic factor, putative [Arabidopsis
  misc_feature (1)..(197): Homolog of NCBI NO: 17226662 NR Description: polyphosphoinositide binding protein [Gossypium

SEQ ID NO: 107633 - DNA, 1552 bp, Arabidopsis thaliana
  misc_feature (1)..(1552): Ceres Seq. ID no. 13650955
  misc_feature: MA Experiment ID: 20000180 Result: Down-regulated in Transcription
  misc_feature: MA Experiment 20000180 PARAMETER Experiment Name: At_Germinating_Seeds_P Parameter: Age (hr) Value: 24 vs. 0
  misc_feature: MA Experiment 20000180 PARAMETER Experiment Name: At_Germinating_Seeds_P Parameter: Tissue Value: Germinating Seeds
  misc_feature: MA Experiment ID: 20000264 Result: Up-regulated in Transcription
  misc_feature: MA Experiment 20000264 PARAMETER Experiment Name: At_Open_Flower_P Parameter: Age (day) Value: 21
  misc_feature: MA Experiment 20000264 PARAMETER Experiment Name: At_Open_Flower_P Parameter: Plant Line Value: WS
  misc_feature: MA Experiment 20000264 PARAMETER Experiment Name: At_Open_Flower_P Parameter: Tissue Value: Open Flower vs. Whole Plant
  misc_feature: MA Experiment ID: 20000265 Result: Up-regulated in Transcription
  misc_feature: MA Experiment 20000265 PARAMETER Experiment Name: At_Open_Flower_P Parameter: Age (day) Value: 21
  misc_feature: MA Experiment 20000265 PARAMETER Experiment Name: At_Open_Flower_P Parameter: Plant Line Value: WS
  misc_feature: MA Experiment 20000265 PARAMETER Experiment Name: At_Open_Flower_P Parameter: Tissue Value: Closed Flower vs. Whole Plant
  misc_feature: MA Experiment ID: 20000286 Result: Up-regulated in Transcription
  misc_feature: MA Experiment 20000286 PARAMETER Experiment Name: At_Open_Flower_P Parameter: Age (day) Value: 21
  misc_feature: MA Experiment 20000286 PARAMETER Experiment Name: At_Open_Flower_P Parameter: Plant Line Value: WS
  misc_feature: MA Experiment 20000286 PARAMETER Experiment Name: At_Open_Flower_P Parameter: Tissue Value: Half Open vs. Whole Plant
  misc_feature: MA Experiment ID: 20000794 Result: Up-regulated in Transcription
  misc_feature: MA Experiment 20000794 PARAMETER Experiment Name: At_Petals_P Parameter: Age (day) Value: 23-25 days
  misc_feature: MA Experiment 20000794 PARAMETER Experiment Name: At_Petals_P Parameter: Plant Line Value: WS
  misc_feature: MA Experiment 20000794 PARAMETER Experiment Name: At_Petals_P Parameter: Tissue Value: Petals vs. Whole plant
aaaaacctctccgttttttcctctctgtttagctttgaattcacaagagtcatgcgaagattcaactgggttctgcggcatgtacaagctcgaagaacttttgattccgcgatcggattgcgtcaagggtctcagaagccgttgttcgagcgatacattcacgctacaggtataaacaactccagtgctcgtaattactatgatgttctcggtgtttctcctaaagctacacgggaggagattaaaaaatcatttcatgagcttgcgaaaaaattccaccctgatacaaatagaaataatccgtcagcaaaaaggaagttccaggaaataagagaggcatatgagaccctgggaaattcggaaagaagagaagaatatgataagctgcagtatcggaattcggattatgtaaatagtgacggtggtgattcagagaggttcagacgtgcataccagtccaatttctcggatactttccacaagattttttctgagatatttgagaacaatcagataaaacctgatattcgggtggaactgtcgctttctctttccgaagctgcagaagggtgcacaaaacgtttgtcttttgatgcatatgtcttttgtgattcctgtgatgggcttggccaccctagcgatgctgccatgagcatttgtccaacatgcaggggggttggacgagtaactattcctccttttacagcatcatgccagacgtgcaaggggacgggacacattattaaggaatactgcatgtcttgtagaggatcaggtattgtggaaggcacaaagacagctgaacttgtgatccctggaggggtggagtctgaagctacaatcacaatcgtaggtgctggtaatgtaagttcaagaacaagtcaacctgggaacttgtatatcaaactaaaggttgctaatgattcaactttcactagggatggctcagatatatatgtggatgctaatattagctttacacaagctattttggggggcaaagttgtggtgccaacactttcaggcaagatacagctagatataccaaaggggactcagcctgatcaacttcttgttttaagaggcaaaggactaccgaagcaaggcttttttgtagatcatggagatcagtatgttcgcttccgcgttaactttcctactgaagtgaatgaacgtcagcgtgctatactggaagagtttgcaaaggaagaaatcaacaatgagttgagcgactctgctgaaggaagttggctttaccagaagctctctactggttgaacttacaggtggaatctaacgggtcctcagatcatccgcgacttctcgttaatggtgctgctggcgctattgttgagcaggttaatgggatgaagccaccacgagagatgaaagataaaagcattcaacagaagacaaatgaagactaatttcatctattgctggtagaacaaaaagctcaccagcataacagagagtgtcattgtttgacctcataattctattacaaactcatttgatgtgaataataagagacatcaaacaagttaagctg

SEQ ID NO: 107634 - protein, 425 aa, Arabidopsis thaliana
  peptide (1)..(425): Ceres Seq. ID no. 13650956
  misc_feature (279)..(401): Pfam Name: DnaJ C terminal region Pfam Description: DnaJ C terminal region
  misc_feature (18)..(425): Homolog of NCBI NO: 15217871 NR Description: DnaJ protein AtJ1, putative [Arabidopsis thaliana]
  misc_feature (18)..(425): Homolog of NCBI NO: 26451496 NR Description: putative AtJ1 [Arabidopsis thaliana]
  misc_feature (18)..(425): Homolog of NCBI NO: 30690263 NR Description: DnaJ protein AtJ1, putative [Arabidopsis thaliana]
  misc_feature (18)..(371): Homolog of NCBI NO: 2129539 NR Description: heat shock protein dnaJ homolog - Arabidopsis
  misc_feature (51)..(416): Homolog of NCBI NO: 21429604 NR Description: GFA2 [Arabidopsis thaliana]
  misc_feature (51)..(416): Homolog of NCBI NO: 18422864 NR Description: DnaJ protein GFA2, putative [Arabidopsis >gi|26452200|dbj|BAC43188.1| putative DnaJ protein [Arabidopsis
  misc_feature (51)..(416): Homolog of NCBI NO: 21553367 NR Description: DnaJ protein-like [Arabidopsis thaliana]
  misc_feature (51)..(416): Homolog of NCBI NO: 10177754 NR Description: DnaJ protein-like [Arabidopsis thaliana]
  misc_feature (64)..(402): Homolog of NCBI NO: 39995145 NR Description: chaperone protein dnaJ [Geobacter sulfurreducens >gi|39981907|gb|AAR33369.1| chaperone protein dnaJ [Geobacter
  misc_feature (65)..(401): Homolog of NCBI NO: 33519590 NR Description: DnaJ protein [Candidatus Blochmannia floridanus]
KNLSVFSSLFSFEFTRVMRRFNWVLRHVQARRTFDSAIGLRQGSQKPLFERYIHATGINNSSARNYYDVLGVSPKATREEIKKSFHELAKKFHPDTNRNNPSAKRKFQEIREAYETLGNSERREEYDKLQYRNSDYVNSDGGDSERFRRAYQSNFSDTFHKIFSEIFENNQIKPDIRVELSLSLSEAAEGCTKRLSFDAYVFCDSCDGLGHPSDAAMSICPTCRGVGRVTIPPFTASCQTCKGTGHIIKEYCMSCRGSGIVEGTKTAELVIPGGVESEATITIVGAGNVSSRTSQPGNLYIKLKVANDSTFTRDGSDIYVDANISFTQAILGGKVVVPTLSGKIQLDIPKGTQPDQLLVLRGKGLPKQGFFVDHGDQYVRFRVNFPTEVNERQRAILEEFAKEEINNELSDSAEGSWLYQKLSTG

SEQ ID NO: 107635 - protein, 408 aa, Arabidopsis thaliana
  peptide (1)..(408): Ceres Seq. ID no. 13650957
  misc_feature (262)..(384): Pfam Name: DnaJ C terminal region Pfam Description: DnaJ C terminal region
  misc_feature (1)..(408): Homolog of NCBI NO: 15217871 NR Description: DnaJ protein AtJ1, putative [Arabidopsis thaliana]
  misc_feature (1)..(408): Homolog of NCBI NO: 26451496 NR Description: putative AtJ1 [Arabidopsis thaliana]
  misc_feature (1)..(408): Homolog of NCBI NO: 30690263 NR Description: DnaJ protein AtJ1, putative [Arabidopsis thaliana]
  misc_feature (1)..(354): Homolog of NCBI NO: 2129539 NR Description: heat shock protein dnaJ homolog - Arabidopsis
  misc_feature (34)..(399): Homolog of NCBI NO: 21429604 NR Description: GFA2 [Arabidopsis thaliana]
  misc_feature (34)..(399): Homolog of NCBI NO: 18422864 NR Description: DnaJ protein GFA2, putative [Arabidopsis >gi|26452200|dbj|BAC43188.1| putative DnaJ protein [Arabidopsis
  misc_feature (34)..(399): Homolog of NCBI NO: 21553367 NR Description: DnaJ protein-like [Arabidopsis thaliana]
  misc_feature (34)..(399): Homolog of NCBI NO: 10177754 NR Description: DnaJ protein-like [Arabidopsis thaliana]
  misc_feature (47)..(385): Homolog of NCBI NO: 39995145 NR Description: chaperone protein dnaJ [Geobacter sulfurreducens >gi|39981907|gb|AAR33369.1| chaperone protein dnaJ [Geobacter
  misc_feature (48)..(384): Homolog of NCBI NO: 33519590 NR Description: DnaJ protein [Candidatus Blochmannia floridanus]
MRRFNWVLRHVQARRTFDSAIGLRQGSQKPLFERYIHATGINNSSARNYYDVLGVSPKATREEIKKSFHELAKKFHPDTNRNNPSAKRKFQEIREAYETLGNSERREEYDKLQYRNSDYVNSDGGDSERFRRAYQSNFSDTFHKIFSEIFENNQIKPDIRVELSLSLSEAAEGCTKRLSFDAYVFCDSCDGLGHPSDAAMSICPTCRGVGRVTIPPFTASCQTCKGTGHIIKEYCMSCRGSGIVEGTKTAELVIPGGVESEATITIVGAGNVSSRTSQPGNLYIKLKVANDSTFTRDGSDIYVDANISFTQAILGGKVVVPTLSGKIQLDIPKGTQPDQLLVLRGKGLPKQGFFVDHGDQYVRFRVNFPTEVNERQRAILEEFAKEEINNELSDSAEGSWLYQKLSTG

SEQ ID NO: 107636 - DNA, 2003 bp, Arabidopsis thaliana
  misc_feature (1)..(2003): Ceres Seq. ID no. 13651026
  misc_feature: MA Experiment ID: 20000171 Result: Down-regulated in Transcription
  misc_feature: MA Experiment 20000171 PARAMETER Experiment Name: At_42deg_Heat_P Parameter: Age (day) Value: 14
  misc_feature: MA Experiment 20000171 PARAMETER Experiment Name: At_42deg_Heat_P Parameter: Organism Value: A. thaliana
  misc_feature: MA Experiment 20000171 PARAMETER Experiment Name: At_42deg_Heat_P Parameter: Plant Line Value: WS
  misc_feature: MA Experiment 20000171 PARAMETER Experiment Name: At_42deg_Heat_P Parameter: Temperature (deg C) Value: 42 vs. 22
  misc_feature: MA Experiment 20000171 PARAMETER Experiment Name: At_42deg_Heat_P Parameter: Timepoint (hr) Value: 1
  misc_feature: MA Experiment 20000171 PARAMETER Experiment Name: At_42deg_Heat_P Parameter: Tissue Value: Aerial
  misc_feature: MA Experiment ID: 20000173 Result: Down-regulated in Transcription
  misc_feature: MA Experiment 20000173 PARAMETER Experiment Name: At_42deg_Heat_P Parameter: Age (day) Value: 14
  misc_feature: MA Experiment 20000173 PARAMETER Experiment Name: At_42deg_Heat_P Parameter: Organism Value: A. thaliana
  misc_feature: MA Experiment 20000173 PARAMETER Experiment Name: At_42deg_Heat_P Parameter: Plant Line Value: WS
  misc_feature: MA Experiment 20000173 PARAMETER Experiment Name: At_42deg_Heat_P Parameter: Temperature (deg C) Value: 42 vs. 22
  misc_feature: MA Experiment 20000173 PARAMETER Experiment Name: At_42deg_Heat_P Parameter: Timepoint (hr) Value: 6
  misc_feature: MA Experiment 20000173 PARAMETER Experiment Name: At_42deg_Heat_P Parameter: Tissue Value: Aerial
  misc_feature: MA Experiment ID: 20000180 Result: Up-regulated in Transcription
  misc_feature: MA Experiment 20000180 PARAMETER Experiment Name: At_Germinating_Seeds_P Parameter: Age (hr) Value: 24 vs. 0
  misc_feature: MA Experiment 20000180 PARAMETER Experiment Name: At_Germinating_Seeds_P Parameter: Tissue Value: Germinating Seeds
  misc_feature: MA Experiment ID: 20000184 Result: Up-regulated in Transcription
  misc_feature: MA Experiment 20000184 PARAMETER Experiment Name: At_Shoots__P Parameter: Age (day) Value: 7
  misc_feature: MA Experiment 20000184 PARAMETER Experiment Name: At_Shoots__P Parameter: Tissue Value: Shoots vs. Whole Plant
  misc_feature: MA Experiment ID: 20000185 Result: Down-regulated in Transcription
  misc_feature: MA Experiment 20000185 PARAMETER Experiment Name: At_Roots__P Parameter: Age (day) Value: 7 vs. 21
  misc_feature: MA Experiment 20000185 PARAMETER Experiment Name: At_Roots__P Parameter: Organism Value: A. thaliana
  misc_feature: MA Experiment 20000185 PARAMETER Experiment Name: At_Roots__P Parameter: Tissue Value: Roots vs. Whole Plant
  misc_feature: MA Experiment ID: 20000227 Result: Down-regulated in Transcription
  misc_feature: MA Experiment 20000227 PARAMETER Experiment Name: At_Root-Tips-vs-Tops_P Parameter: Tissue Value: Root Tips vs. Root Tops
  misc_feature: MA Experiment ID: 20000265 Result: Up-regulated in Transcription
  misc_feature: MA Experiment 20000265 PARAMETER Experiment Name: At_Open_Flower_P Parameter: Age (day) Value: 21
  misc_feature: MA Experiment 20000265 PARAMETER Experiment Name: At_Open_Flower_P Parameter: Plant Line Value: WS
  misc_feature: MA Experiment 20000265 PARAMETER Experiment Name: At_Open_Flower_P Parameter: Tissue Value: Closed Flower vs. Whole Plant
  misc_feature: MA Experiment ID: 20000438 Result: Up-regulated in Transcription
  misc_feature: MA Experiment 20000438 PARAMETER Experiment Name: At_Shoots__P Parameter: Age (day) Value: 14
  misc_feature: MA Experiment 20000438 PARAMETER Experiment Name: At_Shoots__P Parameter: Tissue Value: Shoots vs. Whole Plant
  misc_feature: MA Experiment ID: 20001248 Result: Down-regulated in Transcription
  misc_feature: MA Experiment 20001248 PARAMETER Experiment Name: At_Far-red-induction_P Parameter: Age (day) Value: 7
  misc_feature: MA Experiment 20001248 PARAMETER Experiment Name: At_Far-red-induction_P Parameter: Light Value: Far-red vs. White
  misc_feature: MA Experiment 20001248 PARAMETER Experiment Name: At_Far-red-induction_P Parameter: Organism Value: A. thaliana
  misc_feature: MA Experiment 20001248 PARAMETER Experiment Name: At_Far-red-induction_P Parameter: Plant Line Value: Columbia
  misc_feature: MA Experiment 20001248 PARAMETER Experiment Name: At_Far-red-induction_P Parameter: Timepoint (hr) Value: 4
  misc_feature: MA Experiment 20001248 PARAMETER Experiment Name: At_Far-red-induction_P Parameter: Tissue Value: Whole Plant
  misc_feature: MA Experiment ID: 20001450 Result: Down-regulated in Transcription
  misc_feature: MA Experiment 20001450 PARAMETER Experiment Name: At_Far-red-induction_P Parameter: Age (day) Value: 7
  misc_feature: MA Experiment 20001450 PARAMETER Experiment Name: At_Far-red-induction_P Parameter: Light Value: Far-red vs. White
  misc_feature: MA Experiment 20001450 PARAMETER Experiment Name: At_Far-red-induction_P Parameter: Organism Value: A. thaliana
  misc_feature: MA Experiment 20001450 PARAMETER Experiment Name: At_Far-red-induction_P Parameter: Plant Line Value: Columbia
  misc_feature: MA Experiment 20001450 PARAMETER Experiment Name: At_Far-red-induction_P Parameter: Timepoint (hr) Value: 8
  misc_feature: MA Experiment 20001450 PARAMETER Experiment Name: At_Far-red-induction_P Parameter: Tissue Value: Whole Plant
  misc_feature: MA Experiment ID: 20001451 Result: Down-regulated in Transcription
  misc_feature: MA Experiment 20001451 PARAMETER Experiment Name: At_Far-red-induction_P Parameter: Age (day) Value: 7
  misc_feature: MA Experiment 20001451 PARAMETER Experiment Name: At_Far-red-induction_P Parameter: Light Value: Far-red vs. White
  misc_feature: MA Experiment 20001451 PARAMETER Experiment Name: At_Far-red-induction_P Parameter: Organism Value: A. thaliana
  misc_feature: MA Experiment 20001451 PARAMETER Experiment Name: At_Far-red-induction_P Parameter: Plant Line Value: Columbia
  misc_feature: MA Experiment 20001451 PARAMETER Experiment Name: At_Far-red-induction_P Parameter: Timepoint (hr) Value: 24
  misc_feature: MA Experiment 20001451 PARAMETER Experiment Name: At_Far-red-induction_P Parameter: Tissue Value: Whole Plant
  misc_feature: MA Experiment ID: 20001757 Result: Up-regulated in Transcription
  misc_feature: MA Experiment 20001757 PARAMETER Experiment Name: At_50mM_NH4NO3_L-to-H_P Parameter: Timepoint (hr) Value: 6
  misc_feature: MA Experiment 20001757 PARAMETER Experiment Name: At_50mM_NH4NO3_L-to-H_P Parameter: Tissue Value: Leaf
  misc_feature: MA Experiment 20001757 PARAMETER Experiment Name: At_50mM_NH4NO3_L-to-H_P Parameter: Treatment Value: 50mM NH4NO3 vs 100mM Mannitol
agtctctctctcggctttatccaaaggttccttcgtttactccgcttctatggaagaagcttgaatccttctctcttcttcttctccttcttcccttgacatttttgttctgagaagcaacatggccctcggtggcttgatttcaaatcggaacttcggttccttcatcggctcaggcaatggttgtcagagacttggaaaaagtggtgcagaggtttccaagctttttccaaatgcattgttgtgccgtaatcatcaacctctgcaagctagtttacatcatgaatcgggacacatgagaagaagttttggatgtttccttcaaccaagaatggacagtgtaattaggtttaggaacagtatcaagatcaacagatctcgtgcttactacaaatcagaggagtcagatatcacggaaggagttgtgccatcggctgatggctcagctgaagctattttagttgaaggaaatctacagaacgcatctccatggtggcagcagtttcctagacgctgggtgatcgtcttgttatgcttttcgtcttttcttctttgcaatatggaccgtgtgaacatgagcattgcaattcttcccatgtcacaagaatataactggagtagtgcaactgttggcttaattcagtcctctttcttctggggctatttacttactcagattctgggaggtatatgggcagataagtttggcgggaaggttgttttaggttttggtgttgtctggtggtcctttgccactattatgacacctattgctgctagacttggtcttccttttttgcttgtagtgcgggcgttcatgggcattggcgagggtgttgcaatgcctgctatgaacaacatgctttctaaatggatccctgtctcagagagaagcagatcgcttgcactggtctatagtggcatgtatcttggttccgtcacaggattggcattctctcctatgctaatcaccaagttcggatggccatctgttttctactcgtttggctccctcggaagtatatggtttttgctatggctaaaatttgcatatagctctcccaaggatgacccggacctaagtgaagaagaaaaaaaggttatactgggaggtagcaaaccaagggaacctgttacagtgattccatggaagctaatactgtctaaacccccagtctgggctctcataatttcccacttctgccataattggggaactttcatactattgacatggatgcccacatattacaatcaggtcttgaagttcaacctcactgaatccgggctactatgcgttttgccatggctaaccatggctgtttttgctaatattggaggttggattgctgatactcttgtgagcagaggtctttcaattacaaacgttcgaaagattatgcaatcaattggttttctaggccctgccttcttcctgagtcagctgagccatgtcaaaactccagcaatggcagttctctgcatggcatgcagtcagggctctgatgcattctctcagtcgggtctctactctaatcatcaagacattggcccacgatacgctggtgtactcttaggactatcaaacacagcaggagtcctagctggtgtctttggcactgcagctactggttacatcctccaacgaggttcatgggatgatgtgttcaaagtagcagttgcactgtatctaattggaactctggtctggaacttgttcgcaaccggagaaaaaattctcgactagaaccaagaaactaatagctgcagtgaaattgtgtgaggaagctttatatttgttctttctctgcttataaatttgatctgatagtgagatcaaaatggttcgctggtctgtttcataaagtaacatgttaaagaaaagatgtatttttttggaacttgactcttttgaagcttacaatttgatggggatggagaaaaagaaaccaaaacaaaaacaatcaaacttttttactttaggaagaagagtatttgcttac

SEQ ID NO: 107637 - protein, 541 aa, Arabidopsis thaliana
  peptide (1)..(541): Ceres Seq. ID no. 13651027
  misc_feature (134)..(533): Pfam Name: Sugar (and other) transporter Pfam Description: Sugar (and other) transporter
  misc_feature (1)..(541): Homolog of NCBI NO: 30678625 NR Description: expressed protein [Arabidopsis thaliana]
  misc_feature (107)..(541): Homolog of NCBI NO: 34903342 NR Description: unnamed protein product [Oryza sativa (japonica group)] >gi|6498428|dbj|BAA87831.1| unnamed protein product
  misc_feature (38)..(541): Homolog of NCBI NO: 15227589 NR Description: inorganic phosphate transporter, putative
  misc_feature (38)..(541): Homolog of NCBI NO: 17064976 NR Description: putative Na+-dependent inorganic phosphate
  misc_feature (236)..(379): Homolog of NCBI NO: 7485271 NR Description: hypothetical protein A_IG005I10.nn - Arabidopsis >gi|2252847|gb|AAB62846.1| A_IG005I10.nn gene product thaliana] >gi|6049889|gb|AAF02804.1|AF195115_24 weak similarity
  misc_feature (455)..(541): Homolog of NCBI NO: 7485271 NR Description: hypothetical protein A_IG005I10.nn - Arabidopsis >gi|2252847|gb|AAB62846.1| A_IG005I10.nn gene product thaliana] >gi|6049889|gb|AAF02804.1|AF195115_24 weak similarity
  misc_feature (376)..(422): Homolog of NCBI NO: 7485271 NR Description: hypothetical protein A_IG005I10.nn - Arabidopsis >gi|2252847|gb|AAB62846.1| A_IG005I10.nn gene product thaliana] >gi|6049889|gb|AAF02804.1|AF195115_24 weak similarity
  misc_feature (38)..(427): Homolog of NCBI NO: 30684317 NR Description: inorganic phosphate transporter, putative
  misc_feature (71)..(270): Homolog of NCBI NO: 7485271 NR Description: hypothetical protein A_IG005I10.nn - Arabidopsis >gi|2252847|gb|AAB62846.1| A_IG005I10.nn gene product thaliana] >gi|6049889|gb|AAF02804.1|AF195115_24 weak similarity
  misc_feature (121)..(539): Homolog of NCBI NO: 17064732 NR Description: putative protein [Arabidopsis thaliana]
MALGGLISNRNFGSFIGSGNGCQRLGKSGAEVSKLFPNALLCRNHQPLQASLHHESGHMRRSFGCFLQPRMDSVIRFRNSIKINRSRAYYKSEESDITEGVVPSADGSAEAILVEGNLQNASPWWQQFPRRWVIVLLCFSSFLLCNMDRVNMSIAILPMSQEYNWSSATVGLIQSSFFWGYLLTQILGGIWADKFGGKVVLGFGVVWWSFATIMTPIAARLGLPFLLVVRAFMGIGEGVAMPAMNNMLSKWIPVSERSRSLALVYSGMYLGSVTGLAFSPMLITKFGWPSVFYSFGSLGSIWFLLWLKFAYSSPKDDPDLSEEEKKVILGGSKPREPVTVIPWKLILSKPPVWALIISHFCHNWGTFILLTWMPTYYNQVLKFNLTESGLLCVLPWLTMAVFANIGGWIADTLVSRGLSITNVRKIMQSIGFLGPAFFLSQLSHVKTPAMAVLCMACSQGSDAFSQSGLYSNHQDIGPRYAGVLLGLSNTAGVLAGVFGTAATGYILQRGSWDDVFKVAVALYLIGTLVWNLFATGEKILD

SEQ ID NO: 107638 - protein, 483 aa, Arabidopsis thaliana
  peptide (1)..(483): Ceres Seq. ID no. 13651028
  misc_feature (76)..(475): Pfam Name: Sugar (and other) transporter Pfam Description: Sugar (and other) transporter
  misc_feature (1)..(483): Homolog of NCBI NO: 30678625 NR Description: expressed protein [Arabidopsis thaliana]
  misc_feature (49)..(483): Homolog of NCBI NO: 34903342 NR Description: unnamed protein product [Oryza sativa (japonica group)] >gi|6498428|dbj|BAA87831.1| unnamed protein product
  misc_feature (1)..(483): Homolog of NCBI NO: 15227589 NR Description: inorganic phosphate transporter, putative
  misc_feature (1)..(483): Homolog of NCBI NO: 17064976 NR Description: putative Na+-dependent inorganic phosphate
  misc_feature (178)..(321): Homolog of NCBI NO: 7485271 NR Description: hypothetical protein A_IG005I10.nn - Arabidopsis >gi|2252847|gb|AAB62846.1| A_IG005I10.nn gene product thaliana] >gi|6049889|gb|AAF02804.1|AF195115_24 weak similarity
  misc_feature (397)..(483): Homolog of NCBI NO: 7485271 NR Description: hypothetical protein A_IG005I10.nn - Arabidopsis >gi|2252847|gb|AAB62846.1| A_IG005I10.nn gene product thaliana] >gi|6049889|gb|AAF02804.1|AF195115_24 weak similarity
  misc_feature (318)..(364): Homolog of NCBI NO: 7485271 NR Description: hypothetical protein A_IG005I10.nn - Arabidopsis >gi|2252847|gb|AAB62846.1| A_IG005I10.nn gene product thaliana] >gi|6049889|gb|AAF02804.1|AF195115_24 weak similarity
  misc_feature (1)..(369): Homolog of NCBI NO: 30684317 NR Description: inorganic phosphate transporter, putative
  misc_feature (13)..(212): Homolog of NCBI NO: 7485271 NR Description: hypothetical protein A_IG005I10.nn - Arabidopsis >gi|2252847|gb|AAB62846.1| A_IG005I10.nn gene product thaliana] >gi|6049889|gb|AAF02804.1|AF195115_24 weak similarity
  misc_feature (63)..(481): Homolog of NCBI NO: 17064732 NR Description: putative protein [Arabidopsis thaliana]
MRRSFGCFLQPRMDSVIRFRNSIKINRSRAYYKSEESDITEGVVPSADGSAEAILVEGNLQNASPWWQQFPRRWVIVLLCFSSFLLCNMDRVNMSIAILPMSQEYNWSSATVGLIQSSFFWGYLLTQILGGIWADKFGGKVVLGFGVVWWSFATIMTPIAARLGLPFLLVVRAFMGIGEGVAMPAMNNMLSKWIPVSERSRSLALVYSGMYLGSVTGLAFSPMLITKFGWPSVFYSFGSLGSIWFLLWLKFAYSSPKDDPDLSEEEKKVILGGSKPREPVTVIPWKLILSKPPVWALIISHFCHNWGTFILLTWMPTYYNQVLKFNLTESGLLCVLPWLTMAVFANIGGWIADTLVSRGLSITNVRKIMQSIGFLGPAFFLSQLSHVKTPAMAVLCMACSQGSDAFSQSGLYSNHQDIGPRYAGVLLGLSNTAGVLAGVFGTAATGYILQRGSWDDVFKVAVALYLIGTLVWNLFATGEKILD

SEQ ID NO: 107639 - protein, 471 aa, Arabidopsis thaliana
  peptide (1)..(471): Ceres Seq. ID no. 13651029
  misc_feature (64)..(463): Pfam Name: Sugar (and other) transporter Pfam Description: Sugar (and other) transporter
  misc_feature (1)..(471): Homolog of NCBI NO: 30678625 NR Description: expressed protein [Arabidopsis thaliana]
  misc_feature (37)..(471): Homolog of NCBI NO: 34903342 NR Description: unnamed protein product [Oryza sativa (japonica group)] >gi|6498428|dbj|BAA87831.1| unnamed protein product
  misc_feature (1)..(471): Homolog of NCBI NO: 15227589 NR Description: inorganic phosphate transporter, putative
  misc_feature (1)..(471): Homolog of NCBI NO: 17064976 NR Description: putative Na+-dependent inorganic phosphate
  misc_feature (166)..(309): Homolog of NCBI NO: 7485271 NR Description: hypothetical protein A_IG005I10.nn - Arabidopsis >gi|2252847|gb|AAB62846.1| A_IG005I10.nn gene product thaliana] >gi|6049889|gb|AAF02804.1|AF195115_24 weak similarity
  misc_feature (385)..(471): Homolog of NCBI NO: 7485271 NR Description: hypothetical protein A_IG005I10.nn - Arabidopsis >gi|2252847|gb|AAB62846.1| A_IG005I10.nn gene product thaliana] >gi|6049889|gb|AAF02804.1|AF195115_24 weak similarity
  misc_feature (306)..(352): Homolog of NCBI NO: 7485271 NR Description: hypothetical protein A_IG005I10.nn - Arabidopsis >gi|2252847|gb|AAB62846.1| A_IG005I10.nn gene product thaliana] >gi|6049889|gb|AAF02804.1|AF195115_24 weak similarity
  misc_feature (1)..(357): Homolog of NCBI NO: 30684317 NR Description: inorganic phosphate transporter, putative
  misc_feature (1)..(200): Homolog of NCBI NO: 7485271 NR Description: hypothetical protein A_IG005I10.nn - Arabidopsis >gi|2252847|gb|AAB62846.1| A_IG005I10.nn gene product thaliana] >gi|6049889|gb|AAF02804.1|AF195115_24 weak similarity
  misc_feature (51)..(469): Homolog of NCBI NO: 17064732 NR Description: putative protein [Arabidopsis thaliana]
MDSVIRFRNSIKINRSRAYYKSEESDITEGVVPSADGSAEAILVEGNLQNASPWWQQFPRRWVIVLLCFSSFLLCNMDRVNMSIAILPMSQEYNWSSATVGLIQSSFFWGYLLTQILGGIWADKFGGKVVLGFGVVWWSFATIMTPIAARLGLPFLLVVRAFMGIGEGVAMPAMNNMLSKWIPVSERSRSLALVYSGMYLGSVTGLAFSPMLITKFGWPSVFYSFGSLGSIWFLLWLKFAYSSPKDDPDLSEEEKKVILGGSKPREPVTVIPWKLILSKPPVWALIISHFCHNWGTFILLTWMPTYYNQVLKFNLTESGLLCVLPWLTMAVFANIGGWIADTLVSRGLSITNVRKIMQSIGFLGPAFFLSQLSHVKTPAMAVLCMACSQGSDAFSQSGLYSNHQDIGPRYAGVLLGLSNTAGVLAGVFGTAATGYILQRGSWDDVFKVAVALYLIGTLVWNLFATGEKILD

SEQ ID NO: 107640 - DNA, 1577 bp, Arabidopsis thaliana
  misc_feature (1)..(1577): Ceres Seq. ID no. 13651034
  misc_feature: MA Experiment ID: 20000439 Result: Up-regulated in Transcription
  misc_feature: MA Experiment 20000439 PARAMETER Experiment Name: At_Roots__P Parameter: Age (day) Value: 14 vs. 21
  misc_feature: MA Experiment 20000439 PARAMETER Experiment Name: At_Roots__P Parameter: Organism Value: A. thaliana
  misc_feature: MA Experiment 20000439 PARAMETER Experiment Name: At_Roots__P Parameter: Tissue Value: Roots vs. Whole Plant
attgaaagaagctctggcatttctctgctacagtgttggttttcagctgcagaattggtgaaaaaagtttggtgaatttcaggagcagagtatttaagtaattttggggaattagtgagaaaatggaggagaaaggtgaaataagtccaagtggggtcgtcacagttaagggagatgaagctttggttccaagaacagagtttcaacaaaaccctagttttctccaattcgtgagtcccacaacggtagtgactcctctccctcctccaccagctccttcttcggctccggtaccaaccaccgtgactcctggctcagccacagcatcaaccggatcagatccgacgaaaaagaagagaggaagaccgaggaagtacgcaccagacggaagcctgaaccctaggtttttgcgaccaactctgtctccaactccaatctcatcttcgattccattgtctggagattatcaatggaaacgaggcaaagctcagcagcagcatcagcctcttgagttcgtcaagaaatctcacaaattcgagtatggaagcccagctcctactcctcctcttcctgggctctcatgctatgtgggtgcaaattttacgacccatcaatttactgtcaatggcggtgaggatgtgacaatgaaggttatgccgtattcgcaacaaggatctcgagctatctgcattctttctgcaactggttcgatctctaatgtcactcttggtcaacctaccaatgcaggtggcactcttacatatgagggtcggtttgagatactatcgctatctggttcctttatgcctactgaaaatggaggaacaaaaggtcgggctggtgggatgagcatttctttagccggaccaaatggcaatatatttggtggtggccttgccggtatgcttatagcagctggtcctgttcaggtggtaatgggaagtttcattgtgatgcatcaagcagaacaaaatcagaagaagaaacctagagttatggaggcttttgctccaccacaaccacaagcaccaccacaactgcaacaacaacaacctcctacttttaccataacaaccgtgaattcaacttctccttcggtgaacaccgtagaggagcagaaaccacaagcttatggtggtggtatagtgagaccgatggctcaaatgccttcttctttccaaaacgacaattcaactatgaacaatttcacaccggcctatcatggatacgggaatatgaacactggtactactcacaaagaagaacatgaagacgaagatggtggtgatgatgatgatgattcaggcgatactaggagccaatctcatagtggttgagcaattctctgatcaaagtcagaaagttttcttgtgtagaaaggaagggagcttaaaggagtgcttttttttagagggttgttttagttgtgtgagggttttcttcttttgtgtgcttttctaatttctagggttattcttctttgtgatcggtttagatttaatcatgtcgaagtcatagactaaacgatgttcttattgttgaggtcattgggattcaaatttagtaagacttttgcg

SEQ ID NO: 107641 - protein, 404 aa, Arabidopsis thaliana
  peptide (1)..(404): Ceres Seq. ID no. 13651035
  misc_feature (1)..(404): Homolog of NCBI NO: 8809639 NR Description: contains similarity to DNA-binding [Arabidopsis thaliana] >gi|26451694|dbj|BAC42942.1| unknown [Arabidopsis thaliana] >gi|28973553|gb|AAO64101.1| unknown
  misc_feature (144)..(404): Homolog of NCBI NO: 15241763 NR Description: expressed protein [Arabidopsis thaliana]
  misc_feature (1)..(143): Homolog of NCBI NO: 15241763 NR Description: expressed protein [Arabidopsis thaliana]
  misc_feature (1)..(288): Homolog of NCBI NO: 22328578 NR Description: DNA-binding protein -related [Arabidopsis >gi|17979485|gb|AAL50079.1| AT4g12080/F16J13_150 [Arabidopsis >gi|23506149|gb|AAN31086.1| At4g12080/F16J13_150 [Arabidopsis
  misc_feature (23)..(400): Homolog of NCBI NO: 15242131 NR Description: expressed protein [Arabidopsis thaliana]
  misc_feature (1)..(286): Homolog of NCBI NO: 15235790 NR Description: DNA binding protein -related [Arabidopsis
  misc_feature (11)..(288): Homolog of NCBI NO: 7485570 NR Description: hypothetical protein F16J13.150 - Arabidopsis
  misc_feature (141)..(306): Homolog of NCBI NO: 14326504 NR Description: At2g33620/F4P9.39 [Arabidopsis thaliana]
  misc_feature (36)..(121): Homolog of NCBI NO: 14326504 NR Description: At2g33620/F4P9.39 [Arabidopsis thaliana]
  misc_feature (141)..(306): Homolog of NCBI NO: 2598227 NR Description: AT-hook protein 1 [Arabidopsis thaliana]
MEEKGEISPSGVVTVKGDEALVPRTEFQQNPSFLQFVSPTTVVTPLPPPPAPSSAPVPTTVTPGSATASTGSDPTKKKRGRPRKYAPDGSLNPRFLRPTLSPTPISSSIPLSGDYQWKRGKAQQQHQPLEFVKKSHKFEYGSPAPTPPLPGLSCYVGANFTTHQFTVNGGEDVTMKVMPYSQQGSRAICILSATGSISNVTLGQPTNAGGTLTYEGRFEILSLSGSFMPTENGGTKGRAGGMSISLAGPNGNIFGGGLAGMLIAAGPVQVVMGSFIVMHQAEQNQKKKPRVMEAFAPPQPQAPPQLQQQQPPTFTITTVNSTSPSVNTVEEQKPQAYGGGIVRPMAQMPSSFQNDNSTMNNFTPAYHGYGNMNTGTTHKEEHEDEDGGDDDDDSGDTRSQSHSG

SEQ ID NO: 107642 - protein, 230 aa, Arabidopsis thaliana; identical to SEQ ID NO: 72979
  peptide (1)..(230): Ceres Seq. ID no. 13651036
  misc_feature (1)..(230): Homolog of NCBI NO: 8809639 NR Description: contains similarity to DNA-binding [Arabidopsis thaliana] >gi|26451694|dbj|BAC42942.1| unknown [Arabidopsis thaliana] >gi|28973553|gb|AAO64101.1| unknown
  misc_feature (1)..(230): Homolog of NCBI NO: 15241763 NR Description: expressed protein [Arabidopsis thaliana]
  misc_feature (1)..(114): Homolog of NCBI NO: 22328578 NR Description: DNA-binding protein -related [Arabidopsis >gi|17979485|gb|AAL50079.1| AT4g12080/F16J13_150 [Arabidopsis >gi|23506149|gb|AAN31086.1| At4g12080/F16J13_150 [Arabidopsis
  misc_feature (1)..(226): Homolog of NCBI NO: 15242131 NR Description: expressed protein [Arabidopsis thaliana]
  misc_feature (1)..(112): Homolog of NCBI NO: 15235790 NR Description: DNA binding protein -related [Arabidopsis
  misc_feature (1)..(114): Homolog of NCBI NO: 7485570 NR Description: hypothetical protein F16J13.150 - Arabidopsis
  misc_feature (1)..(132): Homolog of NCBI NO: 14326504 NR Description: At2g33620/F4P9.39 [Arabidopsis thaliana]
  misc_feature (1)..(132): Homolog of NCBI NO: 2598227 NR Description: AT-hook protein 1 [Arabidopsis thaliana]
  misc_feature (1)..(132): Homolog of NCBI NO: 18403332 NR Description: AT-hook DNA-binding protein (AHP1) [Arabidopsis
  misc_feature (1)..(132): Homolog of NCBI NO: 25408293 NR Description: AT-hook DNA-binding protein (AHP1) [imported] -

SEQ ID NO: 107643 - protein, 227 aa, Arabidopsis thaliana; identical to SEQ ID NO: 72980
  peptide (1)..(227): Ceres Seq. ID no. 13651037
  misc_feature (1)..(227): Homolog of NCBI NO: 8809639 NR Description: contains similarity to DNA-binding [Arabidopsis thaliana] >gi|26451694|dbj|BAC42942.1| unknown [Arabidopsis thaliana] >gi|28973553|gb|AAO64101.1| unknown
  misc_feature (1)..(227): Homolog of NCBI NO: 15241763 NR Description: expressed protein [Arabidopsis thaliana]
  misc_feature (1)..(111): Homolog of NCBI NO: 22328578 NR Description: DNA-binding protein -related [Arabidopsis >gi|17979485|gb|AAL50079.1| AT4g12080/F16J13_150 [Arabidopsis >gi|23506149|gb|AAN31086.1| At4g12080/F16J13_150 [Arabidopsis
  misc_feature (1)..(223): Homolog of NCBI NO: 15242131 NR Description: expressed protein [Arabidopsis thaliana]
  misc_feature (1)..(109): Homolog of NCBI NO: 15235790 NR Description: DNA binding protein -related [Arabidopsis
  misc_feature (1)..(111): Homolog of NCBI NO: 7485570 NR Description: hypothetical protein F16J13.150 - Arabidopsis
  misc_feature (1)..(129): Homolog of NCBI NO: 14326504 NR Description: At2g33620/F4P9.39 [Arabidopsis thaliana]
  misc_feature (1)..(129): Homolog of NCBI NO: 2598227 NR Description: AT-hook protein 1 [Arabidopsis thaliana]
  misc_feature (1)..(129): Homolog of NCBI NO: 18403332 NR Description: AT-hook DNA-binding protein (AHP1) [Arabidopsis
  misc_feature (1)..(129): Homolog of NCBI NO: 25408293 NR Description: AT-hook DNA-binding protein (AHP1) [imported] -

SEQ ID NO: 107644 - DNA, 1500 bp, Arabidopsis thaliana
  misc_feature (1)..(1500): Ceres Seq. ID no. 13651094
  misc_feature: MA Experiment ID: 20001451 Result: Up-regulated in Transcription
  misc_feature: MA Experiment 20001451 PARAMETER Experiment Name: At_Far-red-induction_P Parameter: Age (day) Value: 7
  misc_feature: MA Experiment 20001451 PARAMETER Experiment Name: At_Far-red-induction_P Parameter: Light Value: Far-red vs. White
  misc_feature: MA Experiment 20001451 PARAMETER Experiment Name: At_Far-red-induction_P Parameter: Organism Value: A. thaliana
  misc_feature: MA Experiment 20001451 PARAMETER Experiment Name: At_Far-red-induction_P Parameter: Plant Line Value: Columbia
  misc_feature: MA Experiment 20001451 PARAMETER Experiment Name: At_Far-red-induction_P Parameter: Timepoint (hr) Value: 24
  misc_feature: MA Experiment 20001451 PARAMETER Experiment Name: At_Far-red-induction_P Parameter: Tissue Value: Whole Plant
  misc_feature: Pfam Name: Homeobox Pfam Description: Homeobox domain
gattcacatttttatttatctttccatttagccattctgttccctgtctcttcctcctctctttttgacacatcacatcatcatcacatcatcattcaacatcaatcatcatcatatgcatacacatacatctgtgttctgcggatcgagttaattagttatggcttcttcgaatagacactggccaagcatgttcaagtccaaacctcatccccatcaatgacaacatgacatcaactctcctctcttgccttctgcttctcaccgatcttctcctttctcttcaggatgtgaagtggagaggagtccagagccaaaaccaagatggaatccaaagccagagcagattcggatacttgaagcaatctttaactccgggatggtgaatcctccaagagaggagatcaggaggattagggctcagcttcaagaatacggccaagtcggtgatgctaacgtcttctactggttccaaaaccgtaagtcccgtagtaaacacaaactccgcctcctccacaaccactccaaacactctctccctcaaacgcaaccgcagccgcagccgcaaccttcggcttcctcttcctcttcctcctcctcttcctcctccaaatccaccaaaccccgaaaaagcaagaacaagaacaacactaatctctctttgggtggtagtcaaatgatggggatgtttccaccggaaccggcgtttctcttcccggtctccactgtcggagggtttgaaggtatcaccgtctcatcccaattagggtttctctccggtgatatgattgagcaacaaaaaccggctccaacgtgtaccggactcctgctgagtgagatcatgaacggtagtgtgagttatggaactcatcatcaacaacacttgagtgagaaagaagttgaagaaatgaggatgaagatgttgcaacagccacagactcagatttgttacgctaccactaatcatcaaatagcttcttacaacaacaacaacaacaacaataacatcatgcttcatattcctcccactacttctactgccaccactattactacttcgcattctctcgctactgtcccatcaacttcggaccagcttcaagttcaagcggacgcacgaataagagttttcatcaatgaaatggagcttgaagtgagctcaggaccgttcaatgtgagggatgcatttggggaagaggttgttctgattaattccgcgggtcagcccattgtcaccgatgaatatggcgtcgctcttcaccctcttcaacacggagcctcgtactatctgatctagtcgtgtgggagatttgagtttgaagaagaaattaagacctgtctctttctttcaccatctctcgtacgtaggcttaaatgttaagattttataaagtattggtttcagttacctgttgtgacggtgtttatgtatgagtttcggacaacattcacaaaactctctcgttaaattgttgaccaataatatatgatgtgtgttcc

SEQ ID NO: 107645 - protein, 305 aa, Arabidopsis thaliana
  peptide (1)..(305): Ceres Seq. ID no. 13651095
  misc_feature: Pfam Name: Homeobox Pfam Description: Homeobox domain
  misc_feature (1)..(305): Homolog of NCBI NO: 30685885 NR Description: homeodomain transcription factor -related
  misc_feature (1)..(248): Homolog of NCBI NO: 25408317 NR Description: probable homeodomain transcription factor - Arabidopsis thaliana >gi|2253582|gb|AAC69146.1| putative
  misc_feature (1)..(305): Homolog of NCBI NO: 26452030 NR Description: putative homeodomain transcription factor thaliana] >gi|28950873|gb|AAO63360.1| At2g33880 [Arabidopsis
  misc_feature (1)..(52): Homolog of NCBI NO: 37955180 NR Description: WOX8 protein [Arabidopsis thaliana]
  misc_feature (247)..(305): Homolog of NCBI NO: 37955180 NR Description: WOX8 protein [Arabidopsis thaliana]
  misc_feature (1)..(52): Homolog of NCBI NO: 15237353 NR Description: homeodomain protein [Arabidopsis thaliana] contains similarity to homeodomain transcription
  misc_feature (1)..(43): Homolog of NCBI NO: 34910936 NR Description: OSJNBb0063G05.13 [Oryza sativa (japonica
  misc_feature (1)..(75): Homolog of NCBI NO: 37955223 NR Description: WOX11 protein [Arabidopsis thaliana]
  misc_feature (227)..(305): Homolog of NCBI NO: 37955223 NR Description: WOX11 protein [Arabidopsis thaliana]
  misc_feature (1)..(54): Homolog of NCBI NO: 40253638 NR Description: putative homeodomain protein [Oryza sativa
MVNPPREEIRRIRAQLQEYGQVGDANVFYWFQNRKSRSKHKLRLLHNHSKHSLPQTQPQPQPQPSASSSSSSSSSSSKSTKPRKSKNKNNTNLSLGGSQMMGMFPPEPAFLFPVSTVGGFEGITVSSQLGFLSGDMIEQQKPAPTCTGLLLSEIMNGSVSYGTHHQQHLSEKEVEEMRMKMLQQPQTQICYATTNHQIASYNNNNNNNNIMLHIPPTTSTATTITTSHSLATVPSTSDQLQVQADARIRVFINEMELEVSSGPFNVRDAFGEEVVLINSAGQPIVTDEYGVALHPLQHGASYYLI

SEQ ID NO: 107646 - protein, 206 aa, Arabidopsis thaliana
  peptide (1)..(206): Ceres Seq. ID no. 13651096
  misc_feature: Pfam Name: Homeobox Pfam Description: Homeobox domain
  misc_feature (1)..(206): Homolog of NCBI NO: 30685885 NR Description: homeodomain transcription factor -related
  misc_feature (1)..(149): Homolog of NCBI NO: 25408317 NR Description: probable homeodomain transcription factor - Arabidopsis thaliana >gi|2253582|gb|AAC69146.1| putative
  misc_feature (1)..(206): Homolog of NCBI NO: 26452030 NR Description: putative homeodomain transcription factor thaliana] >gi|28950873|gb|AAO63360.1| At2g33880 [Arabidopsis
  misc_feature (148)..(206): Homolog of NCBI NO: 37955180 NR Description: WOX8 protein [Arabidopsis thaliana]
  misc_feature (128)..(206): Homolog of NCBI NO: 37955223 NR Description: WOX11 protein [Arabidopsis thaliana]
  misc_feature (129)..(206): Homolog of NCBI NO: 40253638 NR Description: putative homeodomain protein [Oryza sativa
  misc_feature (1)..(62): Homolog of NCBI NO: 9759058 NR Description: contains similarity to unknown
  misc_feature (1)..(62): Homolog of NCBI NO: 30686531 NR Description: homeodomain protein [Arabidopsis thaliana] unknown protein [Arabidopsis thaliana]
  misc_feature (1)..(14): Homolog of NCBI NO: 3955019 NR Description: HB1 homeodomain protein [Populus tremula x
  misc_feature (1)..(14): Homolog of NCBI NO: 40233067 NR Description: homeodomain protein HB1 [Populus tomentosa]
MMGMFPPEPAFLFPVSTVGGFEGITVSSQLGFLSGDMIEQQKPAPTCTGLLLSEIMNGSVSYGTHHQQHLSEKEVEEMRMKMLQQPQTQICYATTNHQIASYNNNNNNNNIMLHIPPTTSTATTITTSHSLATVPSTSDQLQVQADARIRVFINEMELEVSSGPFNVRDAFGEEVVLINSAGQPIVTDEYGVALHPLQHGASYYLI

SEQ ID NO: 107647 - protein, 205 aa, Arabidopsis thaliana
  peptide (1)..(205): Ceres Seq. ID no. 13651097
  misc_feature: Pfam Name: Homeobox Pfam Description: Homeobox domain
  misc_feature (1)..(205): Homolog of NCBI NO: 30685885 NR Description: homeodomain transcription factor -related
  misc_feature (1)..(148): Homolog of NCBI NO: 25408317 NR Description: probable homeodomain transcription factor - Arabidopsis thaliana >gi|2253582|gb|AAC69146.1| putative
  misc_feature (1)..(205): Homolog of NCBI NO: 26452030 NR Description: putative homeodomain transcription factor thaliana] >gi|28950873|gb|AAO63360.1| At2g33880 [Arabidopsis
  misc_feature (147)..(205): Homolog of NCBI NO: 37955180 NR Description: WOX8 protein [Arabidopsis thaliana]
  misc_feature (127)..(205): Homolog of NCBI NO: 37955223 NR Description: WOX11 protein [Arabidopsis thaliana]
  misc_feature (128)..(205): Homolog of NCBI NO: 40253638 NR Description: putative homeodomain protein [Oryza sativa
  misc_feature (1)..(61): Homolog of NCBI NO: 9759058 NR Description: contains similarity to unknown
  misc_feature (1)..(61): Homolog of NCBI NO: 30686531 NR Description: homeodomain protein [Arabidopsis thaliana] unknown protein [Arabidopsis thaliana]
  misc_feature (1)..(13): Homolog of NCBI NO: 3955019 NR Description: HB1 homeodomain protein [Populus tremula x
  misc_feature (1)..(13): Homolog of NCBI NO: 40233067 NR Description: homeodomain protein HB1 [Populus tomentosa]
MGMFPPEPAFLFPVSTVGGFEGITVSSQLGFLSGDMIEQQKPAPTCTGLLLSEIMNGSVSYGTHHQQHLSEKEVEEMRMKMLQQPQTQICYATTNHQIASYNNNNNNNNIMLHIPPTTSTATTITTSHSLATVPSTSDQLQVQADARIRVFINEMELEVSSGPFNVRDAFGEEVVLINSAGQPIVTDEYGVALHPLQHGASYYLI

SEQ ID NO: 107648 - DNA, 2320 bp, Arabidopsis thaliana
  misc_feature (1)..(2320): Ceres Seq. ID no. 13651145
  misc_feature: MA Experiment ID: 20001910 Result: Up-regulated in Transcription
  misc_feature: MA Experiment 20001910 PARAMETER Experiment Name: At_Drought_Reproduction_P Parameter: Age (day) Value: 37
  misc_feature: MA Experiment 20001910 PARAMETER Experiment Name: At_Drought_Reproduction_P Parameter: Organism Value: A. thaliana
  misc_feature: MA Experiment 20001910 PARAMETER Experiment Name: At_Drought_Reproduction_P Parameter: Plant Line Value: WS
  misc_feature: MA Experiment 20001910 PARAMETER Experiment Name: At_Drought_Reproduction_P Parameter: Timepoint (day) Value: 7
  misc_feature: MA Experiment 20001910 PARAMETER Experiment Name: At_Drought_Reproduction_P Parameter: Tissue Value: Flowers
  misc_feature: MA Experiment 20001910 PARAMETER Experiment Name: At_Drought_Reproduction_P Parameter: Treatment Value: Drought vs. No Drought
  misc_feature: Pfam Name: Pkinase_Tyr Pfam Description: Protein tyrosine kinase
atttttctttctaatcttcttcatcaggcagttgcgtcgtggatcaccggggagaaggtttctccaccgtttgagaaaccctaataacaacattcaaaatggcggactcaccggtggattcatctcctgcccctgaaacctcaaatgggacaccaccgtcaaacggaacatcgccgtctaatgagtcatcgccgccaacaccaccttcttcaccaccaccatcatcaatatctgctcctccgccagatatctccgcttctttttcaccgccgcctgcaccaccaacgcaagaaacgtcacctcctacatctccgtcctcatcgccgcctgttgtagctaatccgtcaccgcagactccagagaatccttctccacctgcacctgaaggctcaactcctgtaacgccacctgcaccaccacaaacaccgtcgaaccaatcaccggaaagaccaactcctccttctcctggtgccaatgatgaccgaaacagaaccaatggcggaaacaacaacagagacggctccacaccatcaccaccgtcgtcagggaacagaacttccggtgacggtggctcaccttcaccacctcggtcgataagccctcctcagaatagtggagattcagactcatcatcgggtaatcatccacaagccaacattggattgattattggagtccttgtaggagcagggcttttgcttctacttgcagtgtgtatttgcatctgttgcaacaggaagaagaagaagaaatctcctcaggtcaaccacatgcactactacaataacaatccttatggaggagcaccctcaggtaatggtggttattacaagggaacacctcaagatcatgtggtgaatatggctggtcaaggaggtgggaattggggtccacagcaacctgtgtctggtcctcacagtgatgcttccaacttaaccggtcgaactgctataccgtcacctcaagctgcaactcttggtcacaaccaaagcactttcacatacgatgaactgtccattgcaacagaaggtttcgctcagtcaaatttgctaggacaaggaggatttgggtatgttcataaaggagttctgcctagtggcaaagaagttgcagtgaagagtcttaaacttggaagtggacaaggggaacgcgagtttcaagcagaggttgatatcattagccgtgtccatcatcgtcatctcgtttctcttgttggatattgcatctctggtggtcaaagacttttggtttatgagtttatacctaacaacactcttgaatttcatcttcatggaaagggtcgtccggttttggattggcctacaagagtgaagattgcattgggatcagctagaggccttgcatatttgcatgaagactgtcaccctcgcattatccacagagatatcaaagctgcaaacattcttcttgatttcagttttgagaccaaggtggcagattttggattggctaagctatctcaagacaactatactcatgtctccactcgcgtcatgggaacttttggatacttagctccagagtatgcatcaagcggaaagttatccgacaaatctgatgttttctcatttggagtaatgcttcttgagctcataaccggaagacctcctctggatctaactggagaaatggaagatagcttggtagattgggcaaggcctttgtgtttgaaagcagctcaagatggagattacaaccaattggctgatccacgtctagagctaaactacagtcatcaagagatggttcaaatggcttcttgtgcagctgcagcaatcagacattcagcaagaagacggcctaagatgagccagattgtacgagcactagaaggagatatgtcaatggatgatctaagtgagggaacaagaccaggacaaagcacgtacttgagccccgggagcgtgagctcagagtatgacgcaagctcgtacacggcagacatgaaaaagttcaagaaactggcgttagagaataaagaatatcaaagcagtgaatatggtggaacaagtgagtatggcttaaacccttctgcttcaagtagtgaagaaatgaatagaggctcaatgaaacgcaatcctcagctttgaaagaagagacaacacttgtcataatatttcagttttcttctctgtttttctttcattgtttgttcattctgcatcaaagacgtgcagtttttgacagtcacaaaattatgatgtttgtaggagtaatttttgaccaaaagagattagagtgtggttttgttgaaatgtttagtacaaagccttaatccataaatacgtggaatttatct

SEQ ID NO: 107649 - protein, 670 aa, Arabidopsis thaliana
  peptide (1)..(670): Ceres Seq. ID no. 13651146
  misc_feature: Pfam Name: Pkinase_Tyr Pfam Description: Protein tyrosine kinase
  misc_feature (11)..(584): Homolog of NCBI NO: 7488206 NR Description: probable serine/threonine-specific protein kinase
  misc_feature (429)..(670): Homolog of NCBI NO: 7488206 NR Description: probable serine/threonine-specific protein kinase
  misc_feature (1)..(229): Homolog of NCBI NO: 7488206 NR Description: probable serine/threonine-specific protein kinase
  misc_feature (226)..(662): Homolog of NCBI NO: 15222081 NR Description: hypothetical protein [Arabidopsis thaliana]
  misc_feature (21)..(271): Homolog of NCBI NO: 15222081 NR Description: hypothetical protein [Arabidopsis thaliana]
  misc_feature (56)..(645): Homolog of NCBI NO: 15224182 NR Description: protein kinase -related [Arabidopsis thaliana]
  misc_feature (30)..(669): Homolog of NCBI NO: 13447449 NR Description: receptor protein kinase PERK1 [Brassica napus]
  misc_feature (229)..(667): Homolog of NCBI NO: 15230209 NR Description: protein kinase -related [Arabidopsis thaliana]
  misc_feature (24)..(669): Homolog of NCBI NO: 13877617 NR Description: protein kinase-like protein [Arabidopsis
  misc_feature (24)..(669): Homolog of NCBI NO: 15230130 NR Description: protein kinase -related [Arabidopsis thaliana]
MADSPVDSSPAPETSNGTPPSNGTSPSNESSPPTPPSSPPPSSISAPPPDISASFSPPPAPPTQETSPPTSPSSSPPVVANPSPQTPENPSPPAPEGSTPVTPPAPPQTPSNQSPERPTPPSPGANDDRNRTNGGNNNRDGSTPSPPSSGNRTSGDGGSPSPPRSISPPQNSGDSDSSSGNHPQANIGLIIGVLVGAGLLLLLAVCICICCNRKKKKKSPQVNHMHYYNNNPYGGAPSGNGGYYKGTPQDHVVNMAGQGGGNWGPQQPVSGPHSDASNLTGRTAIPSPQAATLGHNQSTFTYDELSIATEGFAQSNLLGQGGFGYVHKGVLPSGKEVAVKSLKLGSGQGEREFQAEVDIISRVHHRHLVSLVGYCISGGQRLLVYEFIPNNTLEFHLHGKGRPVLDWPTRVKIALGSARGLAYLHEDCHPRIIHRDIKAANILLDFSFETKVADFGLAKLSQDNYTHVSTRVMGTFGYLAPEYASSGKLSDKSDVFSFGVMLLELITGRPPLDLTGEMEDSLVDWARPLCLKAAQDGDYNQLADPRLELNYSHQEMVQMASCAAAAIRHSARRRPKMSQIVRALEGDMSMDDLSEGTRPGQSTYLSPGSVSSEYDASSYTADMKKFKKLALENKEYQSSEYGGTSEYGLNPSASSSEEMNRGSMKRNPQL

SEQ ID NO: 107650 - protein, 446 aa, Arabidopsis thaliana
  peptide (1)..(446): Ceres Seq. ID no. 13651147
  misc_feature: Pfam Name: Pkinase_Tyr Pfam Description: Protein tyrosine kinase
  misc_feature (1)..(360): Homolog of NCBI NO: 7488206 NR Description: probable serine/threonine-specific protein kinase
  misc_feature (205)..(446): Homolog of NCBI NO: 7488206 NR Description: probable serine/threonine-specific protein kinase
  misc_feature (2)..(438): Homolog of NCBI NO: 15222081 NR Description: hypothetical protein [Arabidopsis thaliana]
  misc_feature (1)..(47): Homolog of NCBI NO: 15222081 NR Description: hypothetical protein [Arabidopsis thaliana]
  misc_feature (1)..(421): Homolog of NCBI NO: 15224182 NR Description: protein kinase -related [Arabidopsis thaliana]
  misc_feature (1)..(445): Homolog of NCBI NO: 13447449 NR Description: receptor protein kinase PERK1 [Brassica napus]
  misc_feature (5)..(443): Homolog of NCBI NO: 15230209 NR Description: protein kinase -related [Arabidopsis thaliana]
  misc_feature (1)..(445): Homolog of NCBI NO: 13877617 NR Description: protein kinase-like protein [Arabidopsis
  misc_feature (1)..(445): Homolog of NCBI NO: 15230130 NR Description: protein kinase -related [Arabidopsis thaliana]
  misc_feature (1)..(433): Homolog of NCBI NO: 13877617 NR Description: protein kinase-like protein [Arabidopsis
MHYYNNNPYGGAPSGNGGYYKGTPQDHVVNMAGQGGGNWGPQQPVSGPHSDASNLTGRTAIPSPQAATLGHNQSTFTYDELSIATEGFAQSNLLGQGGFGYVHKGVLPSGKEVAVKSLKLGSGQGEREFQAEVDIISRVHHRHLVSLVGYCISGGQRLLVYEFIPNNTLEFHLHGKGRPVLDWPTRVKIALGSARGLAYLHEDCHPRIIHRDIKAANILLDFSFETKVADFGLAKLSQDNYTHVSTRVMGTFGYLAPEYASSGKLSDKSDVFSFGVMLLELITGRPPLDLTGEMEDSLVDWARPLCLKAAQDGDYNQLADPRLELNYSHQEMVQMASCAAAAIRHSARRRPKMSQIVRALEGDMSMDDLSEGTRPGQSTYLSPGSVSSEYDASSYTADMKKFKKLALENKEYQSSEYGGTSEYGLNPSASSSEEMNRGSMKRNPQL

SEQ ID NO: 107651 - protein, 416 aa, Arabidopsis thaliana
  peptide (1)..(416): Ceres Seq. ID no. 13651148
  misc_feature: Pfam Name: Pkinase_Tyr Pfam Description: Protein tyrosine kinase
  misc_feature (1)..(330): Homolog of NCBI NO: 7488206 NR Description: probable serine/threonine-specific protein kinase
  misc_feature (175)..(416): Homolog of NCBI NO: 7488206 NR Description: probable serine/threonine-specific protein kinase
  misc_feature (1)..(408): Homolog of NCBI NO: 15222081 NR Description: hypothetical protein [Arabidopsis thaliana]
  misc_feature (1)..(17): Homolog of NCBI NO: 15222081 NR Description: hypothetical protein [Arabidopsis thaliana]
  misc_feature (1)..(391): Homolog of NCBI NO: 15224182 NR Description: protein kinase -related [Arabidopsis thaliana]
  misc_feature (1)..(415): Homolog of NCBI NO: 13447449 NR Description: receptor protein kinase PERK1 [Brassica napus]
  misc_feature (1)..(413): Homolog of NCBI NO: 15230209 NR Description: protein kinase -related [Arabidopsis thaliana]
  misc_feature (1)..(415): Homolog of NCBI NO: 13877617 NR Description: protein kinase-like protein [Arabidopsis
  misc_feature (1)..(415): Homolog of NCBI NO: 15230130 NR Description: protein kinase -related [Arabidopsis thaliana]
  misc_feature (1)..(403): Homolog of NCBI NO: 13877617 NR Description: protein kinase-like protein [Arabidopsis
MAGQGGGNWGPQQPVSGPHSDASNLTGRTAIPSPQAATLGHNQSTFTYDELSIATEGFAQSNLLGQGGFGYVHKGVLPSGKEVAVKSLKLGSGQGEREFQAEVDIISRVHHRHLVSLVGYCISGGQRLLVYEFIPNNTLEFHLHGKGRPVLDWPTRVKIALGSARGLAYLHEDCHPRIIHRDIKAANILLDFSFETKVADFGLAKLSQDNYTHVSTRVMGTFGYLAPEYASSGKLSDKSDVFSFGVMLLELITGRPPLDLTGEMEDSLVDWARPLCLKAAQDGDYNQLADPRLELNYSHQEMVQMASCAAAAIRHSARRRPKMSQIVRALEGDMSMDDLSEGTRPGQSTYLSPGSVSSEYDASSYTADMKKFKKLALENKEYQSSEYGGTSEYGLNPSASSSEEMNRGSMKRNPQL

SEQ ID NO: 107652 - DNA, 2668 bp, Arabidopsis thaliana
  misc_feature (1)..(2668): Ceres Seq. ID no. 13651152
  misc_feature: MA Experiment ID: 20000171 Result: Down-regulated in Transcription
  misc_feature: MA Experiment 20000171 PARAMETER Experiment Name: At_42deg_Heat_P Parameter: Age (day) Value: 14
  misc_feature: MA Experiment 20000171 PARAMETER Experiment Name: At_42deg_Heat_P Parameter: Organism Value: A. thaliana
  misc_feature: MA Experiment 20000171 PARAMETER Experiment Name: At_42deg_Heat_P Parameter: Plant Line Value: WS
  misc_feature: MA Experiment 20000171 PARAMETER Experiment Name: At_42deg_Heat_P Parameter: Temperature (deg C) Value: 42 vs. 22
  misc_feature: MA Experiment 20000171 PARAMETER Experiment Name: At_42deg_Heat_P Parameter: Timepoint (hr) Value: 1
  misc_feature: MA Experiment 20000171 PARAMETER Experiment Name: At_42deg_Heat_P Parameter: Tissue Value: Aerial
  misc_feature: MA Experiment ID: 20000173 Result: Down-regulated in Transcription
  misc_feature: MA Experiment 20000173 PARAMETER Experiment Name: At_42deg_Heat_P Parameter: Age (day) Value: 14
  misc_feature: MA Experiment 20000173 PARAMETER Experiment Name: At_42deg_Heat_P Parameter: Organism Value: A. thaliana
  misc_feature: MA Experiment 20000173 PARAMETER Experiment Name: At_42deg_Heat_P Parameter: Plant Line Value: WS
  misc_feature: MA Experiment 20000173 PARAMETER Experiment Name: At_42deg_Heat_P Parameter: Temperature (deg C) Value: 42 vs. 22
  misc_feature: MA Experiment 20000173 PARAMETER Experiment Name: At_42deg_Heat_P Parameter: Timepoint (hr) Value: 6
  misc_feature: MA Experiment 20000173 PARAMETER Experiment Name: At_42deg_Heat_P Parameter: Tissue Value: Aerial
  misc_feature: MA Experiment ID: 20000184 Result: Down-regulated in Transcription
  misc_feature: MA Experiment 20000184 PARAMETER Experiment Name: At_Shoots__P Parameter: Age (day) Value: 7
  misc_feature: MA Experiment 20000184 PARAMETER Experiment Name: At_Shoots__P Parameter: Tissue Value: Shoots vs. Whole Plant
  misc_feature: MA Experiment ID: 20000185 Result: Down-regulated in Transcription
  misc_feature: MA Experiment 20000185 PARAMETER Experiment Name: At_Roots__P Parameter: Age (day) Value: 7 vs. 21
  misc_feature: MA Experiment 20000185 PARAMETER Experiment Name: At_Roots__P Parameter: Organism Value: A. thaliana
  misc_feature: MA Experiment 20000185 PARAMETER Experiment Name: At_Roots__P Parameter: Tissue Value: Roots vs. Whole Plant
  misc_feature: MA Experiment ID: 20000264 Result: Down-regulated in Transcription
  misc_feature: MA Experiment 20000264 PARAMETER Experiment Name: At_Open_Flower_P Parameter: Age (day) Value: 21
  misc_feature: MA Experiment 20000264 PARAMETER Experiment Name: At_Open_Flower_P Parameter: Plant Line Value: WS
  misc_feature: MA Experiment 20000264 PARAMETER Experiment Name: At_Open_Flower_P Parameter: Tissue Value: Open Flower vs. Whole Plant
  misc_feature: MA Experiment ID: 20000268 Result: Down-regulated in Transcription
  misc_feature: MA Experiment 20000268 PARAMETER Experiment Name: At_100mM_NaCl__P Parameter: Age (day) Value: 14
  misc_feature: MA Experiment 20000268 PARAMETER Experiment Name: At_100mM_NaCl__P Parameter: Organism Value: A. thaliana
  misc_feature: MA Experiment 20000268 PARAMETER Experiment Name: At_100mM_NaCl__P Parameter: Plant Line Value: WS
  misc_feature: MA Experiment 20000268 PARAMETER Experiment Name: At_100mM_NaCl__P Parameter: Timepoint (hr) Value: 6
  misc_feature: MA Experiment 20000268 PARAMETER Experiment Name: At_100mM_NaCl__P Parameter: Tissue Value: Whole Plant
  misc_feature: MA Experiment 20000268 PARAMETER Experiment Name: At_100mM_NaCl__P Parameter: Treatment Value: 100mM NaCl vs. No Treatment
  misc_feature: MA Experiment ID: 20000286 Result: Down-regulated in Transcription
  misc_feature: MA Experiment 20000286 PARAMETER Experiment Name: At_Open_Flower_P Parameter: Age (day) Value: 21
  misc_feature: MA Experiment 20000286 PARAMETER Experiment Name: At_Open_Flower_P Parameter: Plant Line Value: WS
  misc_feature: MA Experiment 20000286 PARAMETER Experiment Name: At_Open_Flower_P Parameter: Tissue Value: Half Open vs. Whole Plant
  misc_feature: MA Experiment ID: 20000436 Result: Down-regulated in Transcription
  misc_feature: MA Experiment 20000436 PARAMETER Experiment Name: At_Drought_P Parameter: Age (day) Value: 7
  misc_feature: MA Experiment 20000436 PARAMETER Experiment Name: At_Drought_P Parameter: Organism Value: A. thaliana
  misc_feature: MA Experiment 20000436 PARAMETER Experiment Name: At_Drought_P Parameter: Plant Line Value: WS
  misc_feature: MA Experiment 20000436 PARAMETER Experiment Name: At_Drought_P Parameter: Timepoint (hr) Value: 12
  misc_feature: MA Experiment 20000436 PARAMETER Experiment Name: At_Drought_P Parameter: Tissue Value: Whole Plant
  misc_feature: MA Experiment 20000436 PARAMETER Experiment Name: At_Drought_P Parameter: Treatment Value: Drought vs. No Drought
  misc_feature: MA Experiment ID: 20000437 Result: Down-regulated in Transcription
  misc_feature: MA Experiment 20000437 PARAMETER Experiment Name: At_Drought_P Parameter: Age (day) Value: 8
  misc_feature: MA Experiment 20000437 PARAMETER Experiment Name: At_Drought_P Parameter: Organism Value: A. thaliana
  misc_feature: MA Experiment 20000437 PARAMETER Experiment Name: At_Drought_P Parameter: Plant Line Value: WS
  misc_feature: MA Experiment 20000437 PARAMETER Experiment Name: At_Drought_P Parameter: Timepoint (hr) Value: 24
  misc_feature: MA Experiment 20000437 PARAMETER Experiment Name: At_Drought_P Parameter: Tissue Value: Whole Plant
  misc_feature: MA Experiment 20000437 PARAMETER Experiment Name: At_Drought_P Parameter: Treatment Value: Drought vs. No Drought
  misc_feature: MA Experiment ID: 20000439 Result: Down-regulated in Transcription
  misc_feature: MA Experiment 20000439 PARAMETER Experiment Name: At_Roots__P Parameter: Age (day) Value: 14 vs. 21
  misc_feature: MA Experiment 20000439 PARAMETER Experiment Name: At_Roots__P Parameter: Organism Value: A. thaliana
  misc_feature: MA Experiment 20000439 PARAMETER Experiment Name: At_Roots__P Parameter: Tissue Value: Roots vs. Whole Plant
  misc_feature: MA Experiment ID: 20000441 Result: Up-regulated in Transcription
  misc_feature: MA Experiment 20000441 PARAMETER Experiment Name: At_1uM_BR-BRZ__P Parameter: Tissue Value: Shoot Apices
  misc_feature: MA Experiment 20000441 PARAMETER Experiment Name: At_1uM_BR-BRZ__P Parameter: Treatment Value: 1uM BR vs. No Treatment
  misc_feature: MA Experiment ID: 20000573 Result: Down-regulated in Transcription
  misc_feature: MA Experiment 20000573 PARAMETER Experiment Name: At_100uM_ABA_Mutants__P Parameter: Organism Value: A. thaliana
  misc_feature: MA Experiment 20000573 PARAMETER Experiment Name: At_100uM_ABA_Mutants__P Parameter: Plant Line Value: CS22 vs. Ler wt
  misc_feature: MA Experiment 20000573 PARAMETER Experiment Name: At_100uM_ABA_Mutants__P Parameter: Timepoint (hr) Value: N/A
  misc_feature: MA Experiment 20000573 PARAMETER Experiment Name: At_100uM_ABA_Mutants__P Parameter: Tissue Value: Whole Plant
  misc_feature: MA Experiment 20000573 PARAMETER Experiment Name: At_100uM_ABA_Mutants__P Parameter: Treatment Value: None
  misc_feature: MA Experiment ID: 20000574 Result: Down-regulated in Transcription
  misc_feature: MA Experiment 20000574 PARAMETER Experiment Name: At_100uM_ABA_Mutants__P Parameter: Organism Value: A. thaliana
  misc_feature: MA Experiment 20000574 PARAMETER Experiment Name: At_100uM_ABA_Mutants__P Parameter: Plant Line Value: CS23 vs. Ler wt
  misc_feature: MA Experiment 20000574 PARAMETER Experiment Name: At_100uM_ABA_Mutants__P Parameter: Timepoint (hr) Value: N/A
  misc_feature: MA Experiment 20000574 PARAMETER Experiment Name: At_100uM_ABA_Mutants__P Parameter: Tissue Value: Whole Plant
  misc_feature: MA Experiment 20000574 PARAMETER Experiment Name: At_100uM_ABA_Mutants__P Parameter: Treatment Value: None
  misc_feature: MA Experiment ID: 20001247 Result: Up-regulated in Transcription
  misc_feature: MA Experiment 20001247 PARAMETER Experiment Name: At_Far-red-induction_P Parameter: Age (day) Value: 7
  misc_feature: MA Experiment 20001247 PARAMETER Experiment Name: At_Far-red-induction_P Parameter: Light Value: Far-red vs. White
  misc_feature: MA Experiment 20001247 PARAMETER Experiment Name: At_Far-red-induction_P Parameter: Organism Value: A. thaliana
  misc_feature: MA Experiment 20001247 PARAMETER Experiment Name: At_Far-red-induction_P Parameter: Plant Line Value: Columbia
  misc_feature: MA Experiment 20001247 PARAMETER Experiment Name: At_Far-red-induction_P Parameter: Timepoint (hr) Value: 1
  misc_feature: MA Experiment 20001247 PARAMETER Experiment Name: At_Far-red-induction_P Parameter: Tissue Value: Whole Plant
  misc_feature: MA Experiment ID: 20001450 Result: Up-regulated in Transcription
  misc_feature: MA Experiment 20001450 PARAMETER Experiment Name: At_Far-red-induction_P Parameter: Age (day) Value: 7
  misc_feature: MA Experiment 20001450 PARAMETER Experiment Name: At_Far-red-induction_P Parameter: Light Value: Far-red vs. White
  misc_feature: MA Experiment 20001450 PARAMETER Experiment Name: At_Far-red-induction_P Parameter: Organism Value: A. thaliana
  misc_feature: MA Experiment 20001450 PARAMETER Experiment Name: At_Far-red-induction_P Parameter: Plant Line Value: Columbia
  misc_feature: MA Experiment 20001450 PARAMETER Experiment Name: At_Far-red-induction_P Parameter: Timepoint (hr) Value: 8
  misc_feature: MA Experiment 20001450 PARAMETER Experiment Name: At_Far-red-induction_P Parameter: Tissue Value: Whole Plant
  misc_feature: MA Experiment ID: 20001555 Result: Down-regulated in Transcription
  misc_feature: MA Experiment 20001555 PARAMETER Experiment Name: At_Drought_Soil_Dry_P Parameter: Age (day) Value: 24
  misc_feature: MA Experiment 20001555 PARAMETER Experiment Name: At_Drought_Soil_Dry_P Parameter: Organism Value: A. thaliana
  misc_feature: MA Experiment 20001555 PARAMETER Experiment Name: At_Drought_Soil_Dry_P Parameter: Plant Line Value: WS
  misc_feature: MA Experiment 20001555 PARAMETER Experiment Name: At_Drought_Soil_Dry_P Parameter: Post Timepoint (hr) Value: None
  misc_feature: MA Experiment 20001555 PARAMETER Experiment Name: At_Drought_Soil_Dry_P Parameter: Post-Treatment Value: None
  misc_feature: MA Experiment 20001555 PARAMETER Experiment Name: At_Drought_Soil_Dry_P Parameter: Timepoint (day) Value: 10
  misc_feature: MA Experiment 20001555 PARAMETER Experiment Name: At_Drought_Soil_Dry_P Parameter: Treatment Value: Drought vs. No Drought
  misc_feature: MA Experiment ID: 20001556 Result: Down-regulated in Transcription
  misc_feature: MA Experiment 20001556 PARAMETER Experiment Name: At_Drought_Soil_Dry_P Parameter: Age (day) Value: 26
  misc_feature: MA Experiment 20001556 PARAMETER Experiment Name: At_Drought_Soil_Dry_P Parameter: Organism Value: A. thaliana
  misc_feature: MA Experiment 20001556 PARAMETER Experiment Name: At_Drought_Soil_Dry_P Parameter: Plant Line Value: WS
  misc_feature: MA Experiment 20001556 PARAMETER Experiment Name: At_Drought_Soil_Dry_P Parameter: Post Timepoint (hr) Value: None
  misc_feature: MA Experiment 20001556 PARAMETER Experiment Name: At_Drought_Soil_Dry_P Parameter: Post-Treatment Value: None
  misc_feature: MA Experiment 20001556 PARAMETER Experiment Name: At_Drought_Soil_Dry_P Parameter: Timepoint (day) Value: 12
  misc_feature: MA Experiment 20001556 PARAMETER Experiment Name: At_Drought_Soil_Dry_P Parameter: Treatment Value: Drought vs. No Drought
  misc_feature: MA Experiment ID: 20001904 Result: Down-regulated in Transcription
  misc_feature: MA Experiment 20001904 PARAMETER Experiment Name: At_Drought_Reproduction_P Parameter: Age (day) Value: 37
  misc_feature: MA Experiment 20001904 PARAMETER Experiment Name: At_Drought_Reproduction_P Parameter: Organism Value: A. thaliana
  misc_feature: MA Experiment 20001904 PARAMETER Experiment Name: At_Drought_Reproduction_P Parameter: Plant Line Value: WS
  misc_feature: MA Experiment 20001904 PARAMETER Experiment Name: At_Drought_Reproduction_P Parameter: Timepoint (day) Value: 7
  misc_feature: MA Experiment 20001904 PARAMETER Experiment Name: At_Drought_Reproduction_P Parameter: Tissue Value: Rosettes
  misc_feature: MA Experiment 20001904 PARAMETER Experiment Name: At_Drought_Reproduction_P Parameter: Treatment Value: Drought vs. No Drought
  misc_feature: MA Experiment ID: 20001905 Result: Down-regulated in Transcription
  misc_feature: MA Experiment 20001905 PARAMETER Experiment Name: At_Drought_Reproduction_P Parameter: Age (day) Value: 40
  misc_feature: MA Experiment 20001905 PARAMETER Experiment Name: At_Drought_Reproduction_P Parameter: Organism Value: A. thaliana
  misc_feature: MA Experiment 20001905 PARAMETER Experiment Name: At_Drought_Reproduction_P Parameter: Plant Line Value: WS
  misc_feature: MA Experiment 20001905 PARAMETER Experiment Name: At_Drought_Reproduction_P Parameter: Timepoint (day) Value: 10
  misc_feature: MA Experiment 20001905 PARAMETER Experiment Name: At_Drought_Reproduction_P Parameter: Tissue Value: Rosettes
  misc_feature: MA Experiment 20001905 PARAMETER Experiment Name: At_Drought_Reproduction_P Parameter: Treatment Value: Drought vs. No Drought
  misc_feature: MA Experiment ID: 20001906 Result: Down-regulated in Transcription
  misc_feature: MA Experiment 20001906 PARAMETER Experiment Name: At_Drought_Reproduction_P Parameter: Age (day) Value: 35
  misc_feature: MA Experiment 20001906 PARAMETER Experiment Name: At_Drought_Reproduction_P Parameter: Organism Value: A. thaliana
  misc_feature: MA Experiment 20001906 PARAMETER Experiment Name: At_Drought_Reproduction_P Parameter: Plant Line Value: WS
  misc_feature: MA Experiment 20001906 PARAMETER Experiment Name: At_Drought_Reproduction_P Parameter: Timepoint (day) Value: 5
  misc_feature: MA Experiment 20001906 PARAMETER Experiment Name: At_Drought_Reproduction_P Parameter: Tissue Value: Siliques
  misc_feature: MA Experiment 20001906 PARAMETER Experiment Name: At_Drought_Reproduction_P Parameter: Treatment Value: Drought vs. No Drought
  misc_feature: MA Experiment ID: 20001907 Result: Down-regulated in Transcription
  misc_feature: MA Experiment 20001907 PARAMETER Experiment Name: At_Drought_Reproduction_P Parameter: Age (day) Value: 37
  misc_feature: MA Experiment 20001907 PARAMETER Experiment Name: At_Drought_Reproduction_P Parameter: Organism Value: A. thaliana
  misc_feature: MA Experiment 20001907 PARAMETER Experiment Name: At_Drought_Reproduction_P Parameter: Plant Line Value: WS
  misc_feature: MA Experiment 20001907 PARAMETER Experiment Name: At_Drought_Reproduction_P Parameter: Timepoint (day) Value: 7
  misc_feature: MA Experiment 20001907 PARAMETER Experiment Name: At_Drought_Reproduction_P Parameter: Tissue Value: Siliques
  misc_feature: MA Experiment 20001907 PARAMETER Experiment Name: At_Drought_Reproduction_P Parameter: Treatment Value: Drought vs. No Drought
  misc_feature: MA Experiment ID: 20001908 Result: Down-regulated in Transcription
  misc_feature: MA Experiment 20001908 PARAMETER Experiment Name: At_Drought_Reproduction_P Parameter: Age (day) Value: 40
  misc_feature: MA Experiment 20001908 PARAMETER Experiment Name: At_Drought_Reproduction_P Parameter: Organism Value: A. thaliana
  misc_feature: MA Experiment 20001908 PARAMETER Experiment Name: At_Drought_Reproduction_P Parameter: Plant Line Value: WS
  misc_feature: MA Experiment 20001908 PARAMETER Experiment Name: At_Drought_Reproduction_P Parameter: Timepoint (day) Value: 10
  misc_feature: MA Experiment 20001908 PARAMETER Experiment Name: At_Drought_Reproduction_P Parameter: Tissue Value: Siliques
  misc_feature: MA Experiment 20001908 PARAMETER Experiment Name: At_Drought_Reproduction_P Parameter: Treatment Value: Drought vs. No Drought
  misc_feature: MA Experiment ID: 20001910 Result: Down-regulated in Transcription
  misc_feature: MA Experiment 20001910 PARAMETER Experiment Name: At_Drought_Reproduction_P Parameter: Age (day) Value: 37
  misc_feature: MA Experiment 20001910 PARAMETER Experiment Name: At_Drought_Reproduction_P Parameter: Organism Value: A. thaliana
  misc_feature: MA Experiment 20001910 PARAMETER Experiment Name: At_Drought_Reproduction_P Parameter: Plant Line Value: WS
  misc_feature: MA Experiment 20001910 PARAMETER Experiment Name: At_Drought_Reproduction_P Parameter: Timepoint (day) Value: 7
  misc_feature: MA Experiment 20001910 PARAMETER Experiment Name: At_Drought_Reproduction_P Parameter: Tissue Value: Flowers
  misc_feature: MA Experiment 20001910 PARAMETER Experiment Name: At_Drought_Reproduction_P Parameter: Treatment Value: Drought vs. No Drought
  misc_feature: MA Experiment ID: 20001911 Result: Down-regulated in Transcription
  misc_feature: MA Experiment 20001911 PARAMETER Experiment Name: At_Drought_Reproduction_P Parameter: Age (day) Value: 40
  misc_feature: MA Experiment 20001911 PARAMETER Experiment Name: At_Drought_Reproduction_P Parameter: Organism Value: A. thaliana
  misc_feature: MA Experiment 20001911 PARAMETER Experiment Name: At_Drought_Reproduction_P Parameter: Plant Line Value: WS
  misc_feature: MA Experiment 20001911 PARAMETER Experiment Name: At_Drought_Reproduction_P Parameter: Timepoint (day) Value: 10
  misc_feature: MA Experiment 20001911 PARAMETER Experiment Name: At_Drought_Reproduction_P Parameter: Tissue Value: Flowers
  misc_feature: MA Experiment 20001911 PARAMETER Experiment Name: At_Drought_Reproduction_P Parameter: Treatment Value: Drought vs. No Drought
catcgctgtctggaacagcgatccgagaaccgatcttctttctatagtttccatgaagtcttcttcttctcagagctacgatgttttccccaacttcagaggggaagatgtccgccactcattagtcagccaccttcgtaaggaacttgatcgcaaattcatcaatacattcaacgacaacaggatcgaaagaagccgcaaaataaccccagagctgttattggctatagaaaactcaaggatctcacttgtcgtcttctctaaaaactatgcttcttccacgtggtgcttagatgaattggtgaagatccaagagtgctatgagaaattggatcaaatggtgattcctattttctacaaagtagatccttctcatgttagaaaacagaccggagagtttggcatggtctttggggagacctgcaagggcagaacagagaatgagaagcgaaaatggatgcgagctctagcagaggtagcacatctagccggagaagatcttcggaactggcgtagcgaagcagaaatgcttgaaaatatcgccaaggatgtttcaaacaaactcttccccccatcaaataatttcagtgacttcgtcgggattgaagctcatatagaggcattgatatcaatgttgcgcttcgactccaagaaagcacgaatgatagggatttgtgggccttctgaaactggtaagactactataggaagagctttatacagcagactcaaaagcgacttccaccatcgggctttcgtagcatataagagaaaaatacggagcgactatgaccagaagctgtattgggaagaacaatttctatcagaaattctttgtcagaaggatataaagatagaggaatgtggtgcggtggaacaacgactaaagcacacgaaagttcttattgttcttgatgatgttgatgatatagagctactaaaaacgttggtaggacgtatcagatggtttggatctgagagcaaaattgttgtgattactcaaaaaagggaacttctcaaggctcacaacattgcacatgtttatgaagtgggattcccatcagaagaactggctcatcaaatgttttgtcgatatgcttttgggaaaaactctccacctcatggtttcaacgagcttgcagatgaagctgcaaagattgccggtaatcgtcctaaagctctcaagtacgttggttcgtcttttagaagactagacaaggaacaatgggtgaagatgctatcggagttccgtagtaatgggaataaactaaaaatcagctatgatgagttagatggtaaaggtcaagattacgttgcgtgtttaaccaatggttcaaattcccaggtgaaggcagagtggatccacttggcactaggcgtgtctatattacttaacatccgcagtgacggaacgacaattctcaaacatttgagctacaatcgaagcatggcgcaacaagcaaaaatatggtggtatgaaaatttggaaagagtgtgcaagaagtacaatatatgtggcatagatagctcaactgatggtggtggttcaacgtatggacaatgttcaaattcccaatttcaaagaaacatggacgcaagccccgggggaaacaaaaccagtaatcaatccacaaaagattcaccgagagcttctcaagtagagaaggaaaagatcgagtactgtgagccacatgtatatataacacctgccatcttcagtgacggaaccagagctcccaaatacgtggagtctaggattctatatcaatcaatctttcaacaagtggttgtttgtacttagtagccgaagagtaacccaagtgcaccacgccaaaacatggtggccggagaattgtgaaaaagtgtacgagaaccacaacaacatatatggcatagatagatcaattgacggtggtgataagtttgagggaaaaagtaaagttagtgacggtgggttagacggcaaagatcaaggttcaatgtatggacaaagttcaaattccgagcttcaaataaacatggacgcagacaataggagatgtgaacctgtgagtgagatgcttttcaaaaattacaatgtgtgttcgcctaatggtttaaccgatgtaaactgttcaaatccccagtctcaaagaaaattggacgcaagcctaaagaaagacaaaattgtgcatgagtggattcgaaccggtagtggcttcttttttgattttcagggcccaaaatctatagtgagtgctgctcaagtggacgagaaaaatttcgagtactgtgaacaaggtgtgtatataacacttggcatcctcagtggcggaattatagttctcaaacatttggagttcagccgaagaatggcgcaacaagcaaaagtttggtggtcggaaaattggataaaagtgtaccaggagcacaacatatgtggcatagataaatcatttgatggtaggtttgatgatagacgtgtcattcgtcaattaagaccaaactgaagcacggcctggcccttgtaaaagtcaggacttgagctagatacttaagccaagcagatctgtttggctaagtctggtcgggttagcgcgaaattgtcgaaatctgtttaataattgcattcagtgcaagtctttaatttgtacttcatggctttaatacactaattaaacattggacc

SEQ ID NO: 107653 - protein, 599 aa, Arabidopsis thaliana
  peptide (1)..(599): Ceres Seq. ID no. 13651153
  misc_feature (179)..(468): Pfam Name: NB-ARC domain Pfam Description: NB-ARC domain
  misc_feature (18)..(599): Homolog of NCBI NO: 26451875 NR Description: putative disease resistance RPP5 protein thaliana] >gi|29028968|gb|AAO64863.1| At4g16990 [Arabidopsis
  misc_feature (16)..(445): Homolog of NCBI NO: 7488174 NR Description: probable resistance protein - Arabidopsis thaliana
  misc_feature (467)..(591): Homolog of NCBI NO: 7488174 NR Description: probable resistance protein - Arabidopsis thaliana
  misc_feature (18)..(515): Homolog of NCBI NO: 30683889 NR Description: disease resistance protein (TIR-NBS class),
  misc_feature (18)..(515): Homolog of NCBI NO: 27311837 NR Description: Unknown protein [Arabidopsis thaliana]
  misc_feature (18)..(449): Homolog of NCBI NO: 25407556 NR Description: disease resistance RPP5 like protein (partial) - Arabidopsis thaliana >gi|5302809|emb|CAB46050.1| disease RPP5 like protein (fragment) [Arabidopsis thaliana] (fragment)
  misc_feature (506)..(585): Homolog of NCBI NO: 7488174 NR Description: probable resistance protein - Arabidopsis thaliana
  misc_feature (18)..(478): Homolog of NCBI NO: 9758205 NR Description: disease resistance protein; strong similarity to
  misc_feature (18)..(478): Homolog of NCBI NO: 30696077 NR Description: disease resistance protein (TIR-NBS-LRR class),
  misc_feature (20)..(450): Homolog of NCBI NO: 7485210 NR Description: hypothetical protein - Arabidopsis thaliana
IAVWNSDPRTDLLSIVSMKSSSSQSYDVFPNFRGEDVRHSLVSHLRKELDRKFINTFNDNRIERSRKITPELLLAIENSRISLVVFSKNYASSTWCLDELVKIQECYEKLDQMVIPIFYKVDPSHVRKQTGEFGMVFGETCKGRTENEKRKWMRALAEVAHLAGEDLRNWRSEAEMLENIAKDVSNKLFPPSNNFSDFVGIEAHIEALISMLRFDSKKARMIGICGPSETGKTTIGRALYSRLKSDFHHRAFVAYKRKIRSDYDQKLYWEEQFLSEILCQKDIKIEECGAVEQRLKHTKVLIVLDDVDDIELLKTLVGRIRWFGSESKIVVITQKRELLKAHNIAHVYEVGFPSEELAHQMFCRYAFGKNSPPHGFNELADEAAKIAGNRPKALKYVGSSFRRLDKEQWVKMLSEFRSNGNKLKISYDELDGKGQDYVACLTNGSNSQVKAEWIHLALGVSILLNIRSDGTTILKHLSYNRSMAQQAKIWWYENLERVCKKYNICGIDSSTDGGGSTYGQCSNSQFQRNMDASPGGNKTSNQSTKDSPRASQVEKEKIEYCEPHVYITPAIFSDGTRAPKYVESRILYQSIFQQVVVCT

SEQ ID NO: 107654 - protein, 582 aa, Arabidopsis thaliana
  peptide (1)..(582): Ceres Seq. ID no. 13651154
  misc_feature (162)..(451): Pfam Name: NB-ARC domain Pfam Description: NB-ARC domain
  misc_feature (1)..(582): Homolog of NCBI NO: 26451875 NR Description: putative disease resistance RPP5 protein thaliana] >gi|29028968|gb|AAO64863.1| At4g16990 [Arabidopsis
  misc_feature (1)..(428): Homolog of NCBI NO: 7488174 NR Description: probable resistance protein - Arabidopsis thaliana
  misc_feature (450)..(574): Homolog of NCBI NO: 7488174 NR Description: probable resistance protein - Arabidopsis thaliana
  misc_feature (1)..(498): Homolog of NCBI NO: 30683889 NR Description: disease resistance protein (TIR-NBS class),
  misc_feature (1)..(498): Homolog of NCBI NO: 27311837 NR Description: Unknown protein [Arabidopsis thaliana]
  misc_feature (1)..(432): Homolog of NCBI NO: 25407556 NR Description: disease resistance RPP5 like protein (partial) - Arabidopsis thaliana >gi|5302809|emb|CAB46050.1| disease RPP5 like protein (fragment) [Arabidopsis thaliana] (fragment)
  misc_feature (489)..(568): Homolog of NCBI NO: 7488174 NR Description: probable resistance protein - Arabidopsis thaliana
  misc_feature (1)..(461): Homolog of NCBI NO: 9758205 NR Description: disease resistance protein; strong similarity to
  misc_feature (1)..(461): Homolog of NCBI NO: 30696077 NR Description: disease resistance protein (TIR-NBS-LRR class),
  misc_feature (3)..(433): Homolog of NCBI NO: 7485210 NR Description: hypothetical protein - Arabidopsis thaliana
MKSSSSQSYDVFPNFRGEDVRHSLVSHLRKELDRKFINTFNDNRIERSRKITPELLLAIENSRISLVVFSKNYASSTWCLDELVKIQECYEKLDQMVIPIFYKVDPSHVRKQTGEFGMVFGETCKGRTENEKRKWMRALAEVAHLAGEDLRNWRSEAEMLENIAKDVSNKLFPPSNNFSDFVGIEAHIEALISMLRFDSKKARMIGICGPSETGKTTIGRALYSRLKSDFHHRAFVAYKRKIRSDYDQKLYWEEQFLSEILCQKDIKIEECGAVEQRLKHTKVLIVLDDVDDIELLKTLVGRIRWFGSESKIVVITQKRELLKAHNIAHVYEVGFPSEELAHQMFCRYAFGKNSPPHGFNELADEAAKIAGNRPKALKYVGSSFRRLDKEQWVKMLSEFRSNGNKLKISYDELDGKGQDYVACLTNGSNSQVKAEWIHLALGVSILLNIRSDGTTILKHLSYNRSMAQQAKIWWYENLERVCKKYNICGIDSSTDGGGSTYGQCSNSQFQRNMDASPGGNKTSNQSTKDSPRASQVEKEKIEYCEPHVYITPAIFSDGTRAPKYVESRILYQSIFQQVVVCT

SEQ ID NO: 107655 - protein, 487 aa, Arabidopsis thaliana
  peptide (1)..(487): Ceres Seq. ID no. 13651155
  misc_feature (67)..(356): Pfam Name: NB-ARC domain Pfam Description: NB-ARC domain
  misc_feature (1)..(487): Homolog of NCBI NO: 26451875 NR Description: putative disease resistance RPP5 protein thaliana] >gi|29028968|gb|AAO64863.1| At4g16990 [Arabidopsis
  misc_feature (1)..(333): Homolog of NCBI NO: 7488174 NR Description: probable resistance protein - Arabidopsis thaliana
  misc_feature (355)..(479): Homolog of NCBI NO: 7488174 NR Description: probable resistance protein - Arabidopsis thaliana
  misc_feature (1)..(403): Homolog of NCBI NO: 30683889 NR Description: disease resistance protein (TIR-NBS class),
  misc_feature (1)..(403): Homolog of NCBI NO: 27311837 NR Description: Unknown protein [Arabidopsis thaliana]
  misc_feature (1)..(337): Homolog of NCBI NO: 25407556 NR Description: disease resistance RPP5 like protein (partial) - Arabidopsis thaliana >gi|5302809|emb|CAB46050.1| disease RPP5 like protein (fragment) [Arabidopsis thaliana] (fragment)
  misc_feature (394)..(473): Homolog of NCBI NO: 7488174 NR Description: probable resistance protein - Arabidopsis thaliana
  misc_feature (1)..(366): Homolog of NCBI NO: 9758205 NR Description: disease resistance protein; strong similarity to
  misc_feature (1)..(366): Homolog of NCBI NO: 30696077 NR Description: disease resistance protein (TIR-NBS-LRR class),
  misc_feature (1)..(338): Homolog of NCBI NO: 7485210 NR Description: hypothetical protein - Arabidopsis thaliana
MVIPIFYKVDPSHVRKQTGEFGMVFGETCKGRTENEKRKWMRALAEVAHLAGEDLRNWRSEAEMLENIAKDVSNKLFPPSNNFSDFVGIEAHIEALISMLRFDSKKARMIGICGPSETGKTTIGRALYSRLKSDFHHRAFVAYKRKIRSDYDQKLYWEEQFLSEILCQKDIKIEECGAVEQRLKHTKVLIVLDDVDDIELLKTLVGRIRWFGSESKIVVITQKRELLKAHNIAHVYEVGFPSEELAHQMFCRYAFGKNSPPHGFNELADEAAKIAGNRPKALKYVGSSFRRLDKEQWVKMLSEFRSNGNKLKISYDELDGKGQDYVACLTNGSNSQVKAEWIHLALGVSILLNIRSDGTTILKHLSYNRSMAQQAKIWWYENLERVCKKYNICGIDSSTDGGGSTYGQCSNSQFQRNMDASPGGNKTSNQSTKDSPRASQVEKEKIEYCEPHVYITPAIFSDGTRAPKYVESRILYQSIFQQVVVCT

SEQ ID NO: 107656 - DNA, 2225 bp, Arabidopsis thaliana
  misc_feature (1)..(2225): Ceres Seq. ID no. 13651156
  misc_feature: MA Experiment ID: 20000185 Result: Up-regulated in Transcription
  misc_feature: MA Experiment 20000185 PARAMETER Experiment Name: At_Roots__P Parameter: Age (day) Value: 7 vs. 21
  misc_feature: MA Experiment 20000185 PARAMETER Experiment Name: At_Roots__P Parameter: Organism Value: A. thaliana
  misc_feature: MA Experiment 20000185 PARAMETER Experiment Name: At_Roots__P Parameter: Tissue Value: Roots vs. Whole Plant
  misc_feature: MA Experiment ID: 20000227 Result: Down-regulated in Transcription
  misc_feature: MA Experiment 20000227 PARAMETER Experiment Name: At_Root-Tips-vs-Tops_P Parameter: Tissue Value: Root Tips vs. Root Tops
  misc_feature: MA Experiment ID: 20000264 Result: Up-regulated in Transcription
  misc_feature: MA Experiment 20000264 PARAMETER Experiment Name: At_Open_Flower_P Parameter: Age (day) Value: 21
  misc_feature: MA Experiment 20000264 PARAMETER Experiment Name: At_Open_Flower_P Parameter: Plant Line Value: WS
  misc_feature: MA Experiment 20000264 PARAMETER Experiment Name: At_Open_Flower_P Parameter: Tissue Value: Open Flower vs. Whole Plant
  misc_feature: MA Experiment ID: 20000265 Result: Up-regulated in Transcription
  misc_feature: MA Experiment 20000265 PARAMETER Experiment Name: At_Open_Flower_P Parameter: Age (day) Value: 21
  misc_feature: MA Experiment 20000265 PARAMETER Experiment Name: At_Open_Flower_P Parameter: Plant Line Value: WS
  misc_feature: MA Experiment 20000265 PARAMETER Experiment Name: At_Open_Flower_P Parameter: Tissue Value: Closed Flower vs. Whole Plant
  misc_feature: MA Experiment ID: 20000286 Result: Up-regulated in Transcription
  misc_feature: MA Experiment 20000286 PARAMETER Experiment Name: At_Open_Flower_P Parameter: Age (day) Value: 21
  misc_feature: MA Experiment 20000286 PARAMETER Experiment Name: At_Open_Flower_P Parameter: Plant Line Value: WS
  misc_feature: MA Experiment 20000286 PARAMETER Experiment Name: At_Open_Flower_P Parameter: Tissue Value: Half Open vs. Whole Plant
  misc_feature: MA Experiment ID: 20000437 Result: Down-regulated in Transcription
  misc_feature: MA Experiment 20000437 PARAMETER Experiment Name: At_Drought_P Parameter: Age (day) Value: 8
  misc_feature: MA Experiment 20000437 PARAMETER Experiment Name: At_Drought_P Parameter: Organism Value: A. thaliana
  misc_feature: MA Experiment 20000437 PARAMETER Experiment Name: At_Drought_P Parameter: Plant Line Value: WS
  misc_feature: MA Experiment 20000437 PARAMETER Experiment Name: At_Drought_P Parameter: Timepoint (hr) Value: 24
  misc_feature: MA Experiment 20000437 PARAMETER Experiment Name: At_Drought_P Parameter: Tissue Value: Whole Plant
  misc_feature: MA Experiment 20000437 PARAMETER Experiment Name: At_Drought_P Parameter: Treatment Value: Drought vs. No Drought
  misc_feature: MA Experiment ID: 20000439 Result: Up-regulated in Transcription
  misc_feature: MA Experiment 20000439 PARAMETER Experiment Name: At_Roots__P Parameter: Age (day) Value: 14 vs. 21
  misc_feature: MA Experiment 20000439 PARAMETER Experiment Name: At_Roots__P Parameter: Organism Value: A. thaliana
  misc_feature: MA Experiment 20000439 PARAMETER Experiment Name: At_Roots__P Parameter: Tissue Value: Roots vs. Whole Plant
  misc_feature: MA Experiment ID: 20000495 Result: Up-regulated in Transcription
  misc_feature: MA Experiment 20000495 PARAMETER Experiment Name: At_Guard_Cells_P Parameter: Harvest Date Value: 8/2/2002
  misc_feature: MA Experiment 20000495 PARAMETER Experiment Name: At_Guard_Cells_P Parameter: Organism Value: A. thaliana
  misc_feature: MA Experiment 20000495 PARAMETER Experiment Name: At_Guard_Cells_P Parameter: Tissue Value: Guard Cells vs. Leaves
  misc_feature: MA Experiment ID: 20001911 Result: Down-regulated in Transcription
  misc_feature: MA Experiment 20001911 PARAMETER Experiment Name: At_Drought_Reproduction_P Parameter: Age (day) Value: 40
  misc_feature: MA Experiment 20001911 PARAMETER Experiment Name: At_Drought_Reproduction_P Parameter: Organism Value: A. thaliana
  misc_feature: MA Experiment 20001911 PARAMETER Experiment Name: At_Drought_Reproduction_P Parameter: Plant Line Value: WS
  misc_feature: MA Experiment 20001911 PARAMETER Experiment Name: At_Drought_Reproduction_P Parameter: Timepoint (day) Value: 10
  misc_feature: MA Experiment 20001911 PARAMETER Experiment Name: At_Drought_Reproduction_P Parameter: Tissue Value: Flowers
  misc_feature: MA Experiment 20001911 PARAMETER Experiment Name: At_Drought_Reproduction_P Parameter: Treatment Value: Drought vs. No Drought
  misc_feature: Pfam Name: Pkinase Pfam Description: Protein kinase domain
atacggtcatacccaatcactactaacctctctccattctcgaattaggtcactctatttgggttgaaaaaatctcatattttcgtctttggaaccttaagaactttctcttttggaatcggtggaatcagtgaaatgggtatctcgaattgggttttctctgtaatttctgtagctaccctttttgtctcctgctcctttgctctcactcttgatggatttgctctattggaattgaagagtggatttaatgatacgaggaactcactagagaactggaaagattcagatgagtctccttgttcttggactggtgtctcctgtaatcctcaagaccaaagagttgtttctataaacttaccatatatgcaattaggagggataatatctcctagcattgggaagcttagtcgattgcagagactggcacttcatcagaatagcttacatgggaacattcctaatgaaatcaccaactgcactgagctaagagctatgtacttgagggcgaattttctccaaggcgggattccaccggatttaggcaaccttacatttcttactatattggatctatcaagcaatacactcaagggtgctattccttcttcaattagtcgattgacgcggttacgctccttgaacttgtcaaccaactttttctctggtgaaataccggatattggagttctcagcagattcggggtcgaaactttcactggtaatttggatctctgtggccggcaaattcgcaagccatgtagatcatcaatgggtttccctgttgttcttcctcatgcagaaagtgctgatgaatcagattctccaaagcgatcatcacgcttgattaaaggaatcttgatcggcgcaatgtctacaatggctcttgcattcatcgtgatctttgttttcctatggatttggatgctctcaaagaaggaaagaaaagtaaagaagtacacagaagtcaagaaacaaaaggatccatccgaaacaagtaaaaagctgattactttccatggtgatcttccatactcttcaactgagctgattgagaagctagagtctcttgacgaggaagacattgtgggttcgggaggatttggcacggtttatcgaatggttatgaacgatcttggaacctttgcggttaaaaagatagataggagtcgacaaggatcagaccgagtttttgagcgagaagtagagattttaggtagtgtcaaacacatcaatctagtgaacctacgtggatactgccgtttaccatcttcaagacttctcatctatgattatctaaccttaggaagcttagacgatcttcttcacgaacgagctcaagaagacggtttgttgaactggaatgctcggttgaaaattgcgctaggttccgcgaggggtcttgcttatctacaccatgattgtagtcccaaaattgttcaccgtgacataaaatcgagcaatattctactcaatgataaactagaacctcgagtctcggactttggtcttgcaaagcttcttgttgacgaagatgctcatgttaccaccgtggtagctggcacctttggctatcttgctccagagtatctgcaaaatgggagagcgacggagaagtctgatgtgtacagctttggagttcttctccttgagctcgttaccggaaaaagaccaacagacccgatattcgttaaaagaggcttgaacgtcgtcggatggatgaacactgtgttgaaagagaatcgattagaggatgtaatagacaagagatgcaccgatgtcgacgaagagtctgttgaggcattgctcgagatagctgagagatgtacagatgctaacccggagaacaggccggctatgaaccaggtggctcagttgcttgagcaagaagtcatgtcaccttcttctggtatcgattactacgatgattctcattctgattactgttagggacttatgcacggctaaaagtaaccaggagatcattagcctgcgacggttttgttgttgttgctgctgcgttatgaatgttgtgatttaggagcgagggatttgtttgtatattagatatgaaggtggagtcaagattattgagcgtgcactgttcttgtgcactttatatttttgcaacaaaatgatcgatgttattgcgtatgcattgtactatgactctttcaaagggaagacacacatacgaattatcgatgttaatgtcgttaggctac

SEQ ID NO: 107657 - protein, 604 aa, Arabidopsis thaliana
  peptide (1)..(604): Ceres Seq. ID no. 13651157
  misc_feature: Pfam Name: Pkinase Pfam Description: Protein kinase domain
  misc_feature (28)..(604): Homolog of NCBI NO: 10177448 NR Description: receptor-like protein kinase [Arabidopsis
  misc_feature (1)..(602): Homolog of NCBI NO: 25403114 NR Description: probable protein kinase [imported] - Arabidopsis >gi|12322537|gb|AAG51266.1|AC027135_7 protein kinase, putative
  misc_feature (1)..(602): Homolog of NCBI NO: 30692520 NR Description: leucine-rich repeat transmembrane protein kinase,
  misc_feature (90)..(602): Homolog of NCBI NO: 15227455 NR Description: leucine-rich repeat transmembrane protein kinase,
  misc_feature (27)..(583): Homolog of NCBI NO: 21740899 NR Description: OSJNBa0036B21.13 [Oryza sativa (japonica
  misc_feature (6)..(583): Homolog of NCBI NO: 13897308 NR Description: SERK1 protein [Zea mays]
  misc_feature (6)..(583): Homolog of NCBI NO: 13897310 NR Description: SERK2 protein [Zea mays]
  misc_feature (1)..(583): Homolog of NCBI NO: 40253600 NR Description: putative somatic embryogenesis receptor kinase 1
  misc_feature (6)..(583): Homolog of NCBI NO: 13897320 NR Description: somatic embryogenesis receptor-like kinase 2 [Zea
  misc_feature (1)..(583): Homolog of NCBI NO: 38679443 NR Description: benzothiadiazole-induced somatic embryogenesis
MGISNWVFSVISVATLFVSCSFALTLDGFALLELKSGFNDTRNSLENWKDSDESPCSWTGVSCNPQDQRVVSINLPYMQLGGIISPSIGKLSRLQRLALHQNSLHGNIPNEITNCTELRAMYLRANFLQGGIPPDLGNLTFLTILDLSSNTLKGAIPSSISRLTRLRSLNLSTNFFSGEIPDIGVLSRFGVETFTGNLDLCGRQIRKPCRSSMGFPVVLPHAESADESDSPKRSSRLIKGILIGAMSTMALAFIVIFVFLWIWMLSKKERKVKKYTEVKKQKDPSETSKKLITFHGDLPYSSTELIEKLESLDEEDIVGSGGFGTVYRMVMNDLGTFAVKKIDRSRQGSDRVFEREVEILGSVKHINLVNLRGYCRLPSSRLLIYDYLTLGSLDDLLHERAQEDGLLNWNARLKIALGSARGLAYLHHDCSPKIVHRDIKSSNILLNDKLEPRVSDFGLAKLLVDEDAHVTTVVAGTFGYLAPEYLQNGRATEKSDVYSFGVLLLELVTGKRPTDPIFVKRGLNVVGWMNTVLKENRLEDVIDKRCTDVDEESVEALLEIAERCTDANPENRPAMNQVAQLLEQEVMSPSSGIDYYDDSHSDYC

SEQ ID NO: 107658 - protein, 527 aa, Arabidopsis thaliana
  peptide (1)..(527): Ceres Seq. ID no. 13651158
  misc_feature: Pfam Name: Pkinase Pfam Description: Protein kinase domain
  misc_feature (1)..(527): Homolog of NCBI NO: 10177448 NR Description: receptor-like protein kinase [Arabidopsis
  misc_feature (1)..(525): Homolog of NCBI NO: 25403114 NR Description: probable protein kinase [imported] - Arabidopsis >gi|12322537|gb|AAG51266.1|AC027135_7 protein kinase, putative
  misc_feature (1)..(525): Homolog of NCBI NO: 30692520 NR Description: leucine-rich repeat transmembrane protein kinase,
  misc_feature (13)..(525): Homolog of NCBI NO: 15227455 NR Description: leucine-rich repeat transmembrane protein kinase,
  misc_feature (1)..(506): Homolog of NCBI NO: 21740899 NR Description: OSJNBa0036B21.13 [Oryza sativa (japonica
  misc_feature (1)..(506): Homolog of NCBI NO: 13897308 NR Description: SERK1 protein [Zea mays]
  misc_feature (1)..(506): Homolog of NCBI NO: 13897310 NR Description: SERK2 protein [Zea mays]
  misc_feature (1)..(506): Homolog of NCBI NO: 40253600 NR Description: putative somatic embryogenesis receptor kinase 1
  misc_feature (1)..(506): Homolog of NCBI NO: 13897320 NR Description: somatic embryogenesis receptor-like kinase 2 [Zea
  misc_feature (1)..(506): Homolog of NCBI NO: 38679443 NR Description: benzothiadiazole-induced somatic embryogenesis
MQLGGIISPSIGKLSRLQRLALHQNSLHGNIPNEITNCTELRAMYLRANFLQGGIPPDLGNLTFLTILDLSSNTLKGAIPSSISRLTRLRSLNLSTNFFSGEIPDIGVLSRFGVETFTGNLDLCGRQIRKPCRSSMGFPVVLPHAESADESDSPKRSSRLIKGILIGAMSTMALAFIVIFVFLWIWMLSKKERKVKKYTEVKKQKDPSETSKKLITFHGDLPYSSTELIEKLESLDEEDIVGSGGFGTVYRMVMNDLGTFAVKKIDRSRQGSDRVFEREVEILGSVKHINLVNLRGYCRLPSSRLLIYDYLTLGSLDDLLHERAQEDGLLNWNARLKIALGSARGLAYLHHDCSPKIVHRDIKSSNILLNDKLEPRVSDFGLAKLLVDEDAHVTTVVAGTFGYLAPEYLQNGRATEKSDVYSFGVLLLELVTGKRPTDPIFVKRGLNVVGWMNTVLKENRLEDVIDKRCTDVDEESVEALLEIAERCTDANPENRPAMNQVAQLLEQEVMSPSSGIDYYDDSHSDYC

SEQ ID NO: 107659 - protein, 484 aa, Arabidopsis thaliana
  peptide (1)..(484): Ceres Seq. ID no. 13651159
  misc_feature: Pfam Name: Pkinase Pfam Description: Protein kinase domain
  misc_feature (1)..(484): Homolog of NCBI NO: 10177448 NR Description: receptor-like protein kinase [Arabidopsis
  misc_feature (1)..(482): Homolog of NCBI NO: 25403114 NR Description: probable protein kinase [imported] - Arabidopsis >gi|12322537|gb|AAG51266.1|AC027135_7 protein kinase, putative
  misc_feature (1)..(482): Homolog of NCBI NO: 30692520 NR Description: leucine-rich repeat transmembrane protein kinase,
  misc_feature (1)..(482): Homolog of NCBI NO: 15227455 NR Description: leucine-rich repeat transmembrane protein kinase,
  misc_feature (1)..(463): Homolog of NCBI NO: 21740899 NR Description: OSJNBa0036B21.13 [Oryza sativa (japonica
  misc_feature (1)..(463): Homolog of NCBI NO: 13897308 NR Description: SERK1 protein [Zea mays]
  misc_feature (1)..(463): Homolog of NCBI NO: 13897310 NR Description: SERK2 protein [Zea mays]
  misc_feature (1)..(463): Homolog of NCBI NO: 40253600 NR Description: putative somatic embryogenesis receptor kinase 1
  misc_feature (1)..(463): Homolog of NCBI NO: 13897320 NR Description: somatic embryogenesis receptor-like kinase 2 [Zea
  misc_feature (1)..(463): Homolog of NCBI NO: 38679443 NR Description: benzothiadiazole-induced somatic embryogenesis
MYLRANFLQGGIPPDLGNLTFLTILDLSSNTLKGAIPSSISRLTRLRSLNLSTNFFSGEIPDIGVLSRFGVETFTGNLDLCGRQIRKPCRSSMGFPVVLPHAESADESDSPKRSSRLIKGILIGAMSTMALAFIVIFVFLWIWMLSKKERKVKKYTEVKKQKDPSETSKKLITFHGDLPYSSTELIEKLESLDEEDIVGSGGFGTVYRMVMNDLGTFAVKKIDRSRQGSDRVFEREVEILGSVKHINLVNLRGYCRLPSSRLLIYDYLTLGSLDDLLHERAQEDGLLNWNARLKIALGSARGLAYLHHDCSPKIVHRDIKSSNILLNDKLEPRVSDFGLAKLLVDEDAHVTTVVAGTFGYLAPEYLQNGRATEKSDVYSFGVLLLELVTGKRPTDPIFVKRGLNVVGWMNTVLKENRLEDVIDKRCTDVDEESVEALLEIAERCTDANPENRPAMNQVAQLLEQEVMSPSSGIDYYDDSHSDYC

SEQ ID NO: 107660 - DNA, 963 bp, Arabidopsis thaliana
  misc_feature (1)..(963): Ceres Seq. ID no. 13651164
  misc_feature: MA Experiment ID: 20000173 Result: Down-regulated in Transcription
  misc_feature: MA Experiment 20000173 PARAMETER Experiment Name: At_42deg_Heat_P Parameter: Age (day) Value: 14
  misc_feature: MA Experiment 20000173 PARAMETER Experiment Name: At_42deg_Heat_P Parameter: Organism Value: A. thaliana
  misc_feature: MA Experiment 20000173 PARAMETER Experiment Name: At_42deg_Heat_P Parameter: Plant Line Value: WS
  misc_feature: MA Experiment 20000173 PARAMETER Experiment Name: At_42deg_Heat_P Parameter: Temperature (deg C) Value: 42 vs. 22
  misc_feature: MA Experiment 20000173 PARAMETER Experiment Name: At_42deg_Heat_P Parameter: Timepoint (hr) Value: 6
  misc_feature: MA Experiment 20000173 PARAMETER Experiment Name: At_42deg_Heat_P Parameter: Tissue Value: Aerial
  misc_feature: MA Experiment ID: 20000179 Result: Up-regulated in Transcription
  misc_feature: MA Experiment 20000179 PARAMETER Experiment Name: At_Germinating_Seeds_P Parameter: Age (hr) Value: 6 vs. 0
  misc_feature: MA Experiment 20000179 PARAMETER Experiment Name: At_Germinating_Seeds_P Parameter: Tissue Value: Germinating Seeds
  misc_feature: MA Experiment ID: 20000180 Result: Up-regulated in Transcription
  misc_feature: MA Experiment 20000180 PARAMETER Experiment Name: At_Germinating_Seeds_P Parameter: Age (hr) Value: 24 vs. 0
  misc_feature: MA Experiment 20000180 PARAMETER Experiment Name: At_Germinating_Seeds_P Parameter: Tissue Value: Germinating Seeds
gggttttggatcatctcttcttcttctacgtcttcatcatcagtcatcactacgaatggatcttacgtttgatcatagttttgtgaaggttaatggaatcactatgcacgtcgccgagaaaagcccctccgtcgccgggaacggagctatccgacctccggtgatactattcctccacggatttccagaactttggtacacgtggcggcatcagatggtggcactatcttcgttaggttaccggactatagcgccggaccttcgtggttacggagacaccgacgcgccggagagtgtggacgcgtacacaagtctccacgtggttggagatctgattggattgatcgacgccgtggttggagatcgggaaaaggtgttcgtagtgggacatgattggggcgctattatcgcttggcatctctgtctttttcgaccggatagggttaaagctttggttaacatgagtgtggtgtttgatccttggaatcctaaacggaaaccaacctcgacgtttaaagctttctatggagatgactactacatctgcagattccagaacatgggagctgatggggtcactatcaaacgctaaagtgaaagttccggttaagttcataatcggcgaccaagatctgacatatcacattcccggtagcaagaagtacatccacgatggccggtttaagagccatgtcccgttgttggacgaagttgtggtaattaaaggcgtcggtcattttatccacgaggaaaggcctgacgagataagtaaacacattcacgactattttcttactttttagagctaaattgtatttagaaatcacaaacaaaaaggaataaagagttatatacatcttccttatcatgtgaaagggcagagcaaataaaacgctttatttgtcacaaacgaaaacgattaaagcgttatatttcttccttctatagaaatcgttttcttgc

SEQ ID NO: 107661 - protein, 196 aa, Arabidopsis thaliana
  peptide (1)..(196): Ceres Seq. ID no. 13651165
  misc_feature (80)..(188): Pfam Name: alpha/beta hydrolase fold Pfam Description: alpha/beta hydrolase fold
  misc_feature (19)..(196): Homolog of NCBI NO: 30683471 NR Description: epoxide hydrolase -related (ATsEH) [Arabidopsis >gi|26451859|dbj|BAC43022.1| putative epoxide hydrolase thaliana] >gi|28372970|gb|AAO39967.1| At4g15960 [Arabidopsis
  misc_feature (11)..(185): Homolog of NCBI NO: 25407540 NR Description: probable epoxide hydrolase [imported] - thaliana >gi|5302785|emb|CAB46034.1| putative epoxide hydrolase thaliana] >gi|7268344|emb|CAB78638.1| putative epoxide hydrolase
  misc_feature (18)..(188): Homolog of NCBI NO: 30683476 NR Description: epoxide hydrolase, putative [Arabidopsis thaliana]
  misc_feature (24)..(188): Homolog of NCBI NO: 18411917 NR Description: epoxide hydrolase, putative [Arabidopsis thaliana]
  misc_feature (18)..(188): Homolog of NCBI NO: 25407540 NR Description: probable epoxide hydrolase [imported] - thaliana >gi|5302785|emb|CAB46034.1| putative epoxide hydrolase thaliana] >gi|7268344|emb|CAB78638.1| putative epoxide hydrolase
  misc_feature (24)..(188): Homolog of NCBI NO: 7485127 NR Description: hypothetical protein - Arabidopsis thaliana
  misc_feature (24)..(185): Homolog of NCBI NO: 7488060 NR Description: probable ATsEH - Arabidopsis thaliana
  misc_feature (24)..(188): Homolog of NCBI NO: 15230018 NR Description: epoxide hydrolase, putative [Arabidopsis >gi|6714450|gb|AAF26137.1|AC011620_13 putative epoxide hydrolase thaliana] >gi|17979165|gb|AAL49778.1| putative epoxide putative
  misc_feature (25)..(190): Homolog of NCBI NO: 34897302 NR Description: putative hydrolase [Oryza sativa (japonica
  misc_feature (24)..(188): Homolog of NCBI NO: 7489255 NR Description: probable epoxide hydrolase (EC 3.3.2.3) (clone
GFGSSLLLLRLHHQSSLRMDLTFDHSFVKVNGITMHVAEKSPSVAGNGAIRPPVILFLHGFPELWYTWRHQMVALSSLGYRTIAPDLRGYGDTDAPESVDAYTSLHVVGDLIGLIDAVVGDREKVFVVGHDWGAIIAWHLCLFRPDRVKALVNMSVVFDPWNPKRKPTSTFKAFYGDDYYICRFQNMGADGVTIKR

SEQ ID NO: 107662 - protein, 178 aa, Arabidopsis thaliana
  peptide (1)..(178): Ceres Seq. ID no. 13651166
  misc_feature (62)..(170): Pfam Name: alpha/beta hydrolase fold Pfam Description: alpha/beta hydrolase fold
  misc_feature (1)..(178): Homolog of NCBI NO: 30683471 NR Description: epoxide hydrolase -related (ATsEH) [Arabidopsis >gi|26451859|dbj|BAC43022.1| putative epoxide hydrolase thaliana] >gi|28372970|gb|AAO39967.1| At4g15960 [Arabidopsis
  misc_feature (1)..(167): Homolog of NCBI NO: 25407540 NR Description: probable epoxide hydrolase [imported] - thaliana >gi|5302785|emb|CAB46034.1| putative epoxide hydrolase thaliana] >gi|7268344|emb|CAB78638.1| putative epoxide hydrolase
  misc_feature (1)..(170): Homolog of NCBI NO: 30683476 NR Description: epoxide hydrolase, putative [Arabidopsis thaliana]
  misc_feature (6)..(170): Homolog of NCBI NO: 18411917 NR Description: epoxide hydrolase, putative [Arabidopsis thaliana]
  misc_feature (1)..(170): Homolog of NCBI NO: 25407540 NR Description: probable epoxide hydrolase [imported] - thaliana >gi|5302785|emb|CAB46034.1| putative epoxide hydrolase thaliana] >gi|7268344|emb|CAB78638.1| putative epoxide hydrolase
  misc_feature (6)..(170): Homolog of NCBI NO: 7485127 NR Description: hypothetical protein - Arabidopsis thaliana
  misc_feature (6)..(167): Homolog of NCBI NO: 7488060 NR Description: probable ATsEH - Arabidopsis thaliana
  misc_feature (6)..(170): Homolog of NCBI NO: 15230018 NR Description: epoxide hydrolase, putative [Arabidopsis >gi|6714450|gb|AAF26137.1|AC011620_13 putative epoxide hydrolase thaliana] >gi|17979165|gb|AAL49778.1| putative epoxide putative
  misc_feature (7)..(172): Homolog of NCBI NO: 34897302 NR Description: putative hydrolase [Oryza sativa (japonica
  misc_feature (6)..(170): Homolog of NCBI NO: 7489255 NR Description: probable epoxide hydrolase (EC 3.3.2.3) (clone
MDLTFDHSFVKVNGITMHVAEKSPSVAGNGAIRPPVILFLHGFPELWYTWRHQMVALSSLGYRTIAPDLRGYGDTDAPESVDAYTSLHVVGDLIGLIDAVVGDREKVFVVGHDWGAIIAWHLCLFRPDRVKALVNMSVVFDPWNPKRKPTSTFKAFYGDDYYICRFQNMGADGVTIKR

SEQ ID NO: 107663 - protein, 162 aa, Arabidopsis thaliana
  peptide (1)..(162): Ceres Seq. ID no. 13651167
  misc_feature (46)..(154): Pfam Name: alpha/beta hydrolase fold Pfam Description: alpha/beta hydrolase fold
  misc_feature (1)..(162): Homolog of NCBI NO: 30683471 NR Description: epoxide hydrolase -related (ATsEH) [Arabidopsis >gi|26451859|dbj|BAC43022.1| putative epoxide hydrolase thaliana] >gi|28372970|gb|AAO39967.1| At4g15960 [Arabidopsis
  misc_feature (1)..(151): Homolog of NCBI NO: 25407540 NR Description: probable epoxide hydrolase [imported] - thaliana >gi|5302785|emb|CAB46034.1| putative epoxide hydrolase thaliana] >gi|7268344|emb|CAB78638.1| putative epoxide hydrolase
  misc_feature (1)..(154): Homolog of NCBI NO: 30683476 NR Description: epoxide hydrolase, putative [Arabidopsis thaliana]
  misc_feature (1)..(154): Homolog of NCBI NO: 18411917 NR Description: epoxide hydrolase, putative [Arabidopsis thaliana]
  misc_feature (1)..(154): Homolog of NCBI NO: 25407540 NR Description: probable epoxide hydrolase [imported] - thaliana >gi|5302785|emb|CAB46034.1| putative epoxide hydrolase thaliana] >gi|7268344|emb|CAB78638.1| putative epoxide hydrolase
  misc_feature (1)..(154): Homolog of NCBI NO: 7485127 NR Description: hypothetical protein - Arabidopsis thaliana
  misc_feature (1)..(151): Homolog of NCBI NO: 7488060 NR Description: probable ATsEH - Arabidopsis thaliana
  misc_feature (1)..(154): Homolog of NCBI NO: 15230018 NR Description: epoxide hydrolase, putative [Arabidopsis >gi|6714450|gb|AAF26137.1|AC011620_13 putative epoxide hydrolase thaliana] >gi|17979165|gb|AAL49778.1| putative epoxide putative
  misc_feature (1)..(156): Homolog of NCBI NO: 34897302 NR Description: putative hydrolase [Oryza sativa (japonica
  misc_feature (1)..(154): Homolog of NCBI NO: 7489255 NR Description: probable epoxide hydrolase (EC 3.3.2.3) (clone
MHVAEKSPSVAGNGAIRPPVILFLHGFPELWYTWRHQMVALSSLGYRTIAPDLRGYGDTDAPESVDAYTSLHVVGDLIGLIDAVVGDREKVFVVGHDWGAIIAWHLCLFRPDRVKALVNMSVVFDPWNPKRKPTSTFKAFYGDDYYICRFQNMGADGVTIKR

SEQ ID NO: 107664 - DNA, 1567 bp, Arabidopsis thaliana
  misc_feature (1)..(1567): Ceres Seq. ID no. 13651180
  misc_feature: MA Experiment ID: 108569 Result: Up-regulated in Transcription
  misc_feature: MA Experiment 108569 PARAMETER Experiment Name: At_0.001%_MeJA__cDNA_P Parameter: Timepoint (hr) Value: 6
  misc_feature: MA Experiment 108569 PARAMETER Experiment Name: At_0.001%_MeJA__cDNA_P Parameter: Tissue Value: Aerial
  misc_feature: MA Experiment 108569 PARAMETER Experiment Name: At_0.001%_MeJA__cDNA_P Parameter: Treatment Value: 0.001% MeJA vs. No Treatment
  misc_feature: MA Experiment ID: 108574 Result: Up-regulated in Transcription
  misc_feature: MA Experiment 108574 PARAMETER Experiment Name: At_Wounding__cDNA_P Parameter: Timepoint (hr) Value: 1
  misc_feature: MA Experiment 108574 PARAMETER Experiment Name: At_Wounding__cDNA_P Parameter: Tissue Value: Aerial
  misc_feature: MA Experiment 108574 PARAMETER Experiment Name: At_Wounding__cDNA_P Parameter: Treatment Value: Wounding vs. No Wounding
  misc_feature: MA Experiment ID: 108576 Result: Down-regulated in Transcription
  misc_feature: MA Experiment 108576 PARAMETER Experiment Name: At_42deg_Heat_cDNA_P Parameter: Temperature (deg C) Value: 42 vs. 22
  misc_feature: MA Experiment 108576 PARAMETER Experiment Name: At_42deg_Heat_cDNA_P Parameter: Timepoint (hr) Value: 1
  misc_feature: MA Experiment 108576 PARAMETER Experiment Name: At_42deg_Heat_cDNA_P Parameter: Tissue Value: Aerial
  misc_feature: MA Experiment ID: 108577 Result: Down-regulated in Transcription
  misc_feature: MA Experiment 108577 PARAMETER Experiment Name: At_42deg_Heat_cDNA_P Parameter: Temperature (deg C) Value: 42 vs. 22
  misc_feature: MA Experiment 108577 PARAMETER Experiment Name: At_42deg_Heat_cDNA_P Parameter: Timepoint (hr) Value: 6
  misc_feature: MA Experiment 108577 PARAMETER Experiment Name: At_42deg_Heat_cDNA_P Parameter: Tissue Value: Aerial
  misc_feature: MA Experiment ID: 108579 Result: Up-regulated in Transcription
  misc_feature: MA Experiment 108579 PARAMETER Experiment Name: At_4deg_Cold_cDNA_P Parameter: Temperature (deg C) Value: 4 vs. 22
  misc_feature: MA Experiment 108579 PARAMETER Experiment Name: At_4deg_Cold_cDNA_P Parameter: Timepoint (hr) Value: 6
  misc_feature: MA Experiment 108579 PARAMETER Experiment Name: At_4deg_Cold_cDNA_P Parameter: Tissue Value: Aerial
  misc_feature: MA Experiment ID: 20000071 Result: Up-regulated in Transcription
  misc_feature: MA Experiment 20000071 PARAMETER Experiment Name: At_100uM_ABA_Mutants_cDNA_P Parameter: Plant Line Value: CS8104
  misc_feature: MA Experiment 20000071 PARAMETER Experiment Name: At_100uM_ABA_Mutants_cDNA_P Parameter: Timepoint (hr) Value: 6
  misc_feature: MA Experiment 20000071 PARAMETER Experiment Name: At_100uM_ABA_Mutants_cDNA_P Parameter: Tissue Value: Aerial
  misc_feature: MA Experiment 20000071 PARAMETER Experiment Name: At_100uM_ABA_Mutants_cDNA_P Parameter: Treatment Value: 100uM ABA vs. No Treatment
  misc_feature: MA Experiment ID: 20000088 Result: Up-regulated in Transcription
  misc_feature: MA Experiment 20000088 PARAMETER Experiment Name: At_100uM_ABA_Mutants_cDNA_P Parameter: Plant Line Value: Landsberg
  misc_feature: MA Experiment 20000088 PARAMETER Experiment Name: At_100uM_ABA_Mutants_cDNA_P Parameter: Timepoint (hr) Value: 6
  misc_feature: MA Experiment 20000088 PARAMETER Experiment Name: At_100uM_ABA_Mutants_cDNA_P Parameter: Tissue Value: Aerial
  misc_feature: MA Experiment 20000088 PARAMETER Experiment Name: At_100uM_ABA_Mutants_cDNA_P Parameter: Treatment Value: 100uM ABA vs. No Treatment
  misc_feature: MA Experiment ID: 20000315 Result: Down-regulated in Transcription
  misc_feature: MA Experiment 20000315 PARAMETER Experiment Name: At_14day_Shoots-Roots_Sub_P Parameter: Age (day) Value: 14
  misc_feature: MA Experiment 20000315 PARAMETER Experiment Name: At_14day_Shoots-Roots_Sub_P Parameter: Organism Value: A. thaliana
  misc_feature: MA Experiment 20000315 PARAMETER Experiment Name: At_14day_Shoots-Roots_Sub_P Parameter: Plant Line Value: WS
  misc_feature: MA Experiment 20000315 PARAMETER Experiment Name: At_14day_Shoots-Roots_Sub_P Parameter: Tissue Value: Shoots vs. Whole Plant
  misc_feature: MA Experiment ID: 20000327 Result: Down-regulated in Transcription
  misc_feature: MA Experiment 20000327 PARAMETER Experiment Name: At_42deg_Heat_Sub_P Parameter: Age (day) Value: 14
  misc_feature: MA Experiment 20000327 PARAMETER Experiment Name: At_42deg_Heat_Sub_P Parameter: Organism Value: A. thaliana
  misc_feature: MA Experiment 20000327 PARAMETER Experiment Name: At_42deg_Heat_Sub_P Parameter: Plant Line Value: WS
  misc_feature: MA Experiment 20000327 PARAMETER Experiment Name: At_42deg_Heat_Sub_P Parameter: Temperature (deg C) Value: 42 vs. 22
  misc_feature: MA Experiment 20000327 PARAMETER Experiment Name: At_42deg_Heat_Sub_P Parameter: Timepoint (hr) Value: 1
  misc_feature: MA Experiment 20000327 PARAMETER Experiment Name: At_42deg_Heat_Sub_P Parameter: Tissue Value: Aerial
  misc_feature: MA Experiment ID: 20000329 Result: Up-regulated in Transcription
  misc_feature: MA Experiment 20000329 PARAMETER Experiment Name: At_4deg_Cold_Sub_P Parameter: Age (day) Value: 14
  misc_feature: MA Experiment 20000329 PARAMETER Experiment Name: At_4deg_Cold_Sub_P Parameter: Organism Value: A. thaliana
  misc_feature: MA Experiment 20000329 PARAMETER Experiment Name: At_4deg_Cold_Sub_P Parameter: Plant Line Value: WS
  misc_feature: MA Experiment 20000329 PARAMETER Experiment Name: At_4deg_Cold_Sub_P Parameter: Temperature (deg C) Value: 4 vs. 22
  misc_feature: MA Experiment 20000329 PARAMETER Experiment Name: At_4deg_Cold_Sub_P Parameter: Timepoint (hr) Value: 6
  misc_feature: MA Experiment 20000329 PARAMETER Experiment Name: At_4deg_Cold_Sub_P Parameter: Tissue Value: Aerial
  misc_feature: MA Experiment ID: 20000348 Result: Up-regulated in Transcription
  misc_feature: MA Experiment 20000348 PARAMETER Experiment Name: At_100uM_ABA_Sub_P Parameter: Age (day) Value: 14
  misc_feature: MA Experiment 20000348 PARAMETER Experiment Name: At_100uM_ABA_Sub_P Parameter: Organism Value: A. thaliana
  misc_feature: MA Experiment 20000348 PARAMETER Experiment Name: At_100uM_ABA_Sub_P Parameter: Plant Line Value: WS
  misc_feature: MA Experiment 20000348 PARAMETER Experiment Name: At_100uM_ABA_Sub_P Parameter: Timepoint (hr) Value: 1
  misc_feature: MA Experiment 20000348 PARAMETER Experiment Name: At_100uM_ABA_Sub_P Parameter: Tissue Value: Aerial
  misc_feature: MA Experiment 20000348 PARAMETER Experiment Name: At_100uM_ABA_Sub_P Parameter: Treatment Value: 100uM ABA vs. No Treatment
  misc_feature: MA Experiment ID: 20000352 Result: Up-regulated in Transcription
  misc_feature: MA Experiment 20000352 PARAMETER Experiment Name: At_Drought_Sub_P Parameter: Age (day) Value: 7
  misc_feature: MA Experiment 20000352 PARAMETER Experiment Name: At_Drought_Sub_P Parameter: Organism Value: A. thaliana
  misc_feature: MA Experiment 20000352 PARAMETER Experiment Name: At_Drought_Sub_P Parameter: Plant Line Value: WS
  misc_feature: MA Experiment 20000352 PARAMETER Experiment Name: At_Drought_Sub_P Parameter: Timepoint (hr) Value: 6
  misc_feature: MA Experiment 20000352 PARAMETER Experiment Name: At_Drought_Sub_P Parameter: Tissue Value: Whole Plant
  misc_feature: MA Experiment 20000352 PARAMETER Experiment Name: At_Drought_Sub_P Parameter: Treatment Value: Drought vs. No Drought
  misc_feature: MA Experiment ID: 20000440 Result: Up-regulated in Transcription
  misc_feature: MA Experiment 20000440 PARAMETER Experiment Name: At_Closed-Flower__Sub_P Parameter: Tissue Value: Closed Flower vs. Whole Plant
  misc_feature: Pfam Name: UDPGT Pfam Description: UDP-glucoronosyl and UDP-glucosyl transferase
aatagagatacaaagaaacaagaaaacgaaaagaaaatatacagaaatgggtggtttgaagtttcatgtacttatgtatccatggttcgcaacaggccatatgaccccgttcctttttcttgccaacaaattggctgagaaaggtcatacggtcactttcttgcttcccaagaaatctctgaaacagttggaacatttcaatctgtttccacacaacattgtctttcgctctgtcaccgtccctcatgtggatggtctccccgttggcacagagacagcctctgagatccctgtgacatcaactgatctcttgatgtctgctatggatctcacacgtgatcaagttgaagctgtggtccgagccgttgaaccggacctgatcttctttgactttgctcattggattccagaagtagctagggacttcggccttaagactgtaaagtacgtcgtggtgtctgcatcgactatagctagtatgcttgtcccaggtggtgagttaggtgttcctccaccgggatatccatcatcaaaggtgctgcttcgtaaacaagatgcttacactatgaagaaactggagcctacaaatacaatcgatgtcggaccaaacctcttggaacgagtcactacaagtcttatgaactctgatgtcattgcgataaggacagccagagaaatcgaaggaaacttttgcgactatatagaaaaacattgcaggaaaaaggttctcttgacaggtccggtgttccctgagccagacaagactagagagctagaggaacgatgggttaagtggctaagtgggtatgaaccagactcagtggtgttttgtgcactgggctcacaagtcattttagagaaagatcaattccaagaactctgcttaggaatggagctaacaggttcaccgtttcttgtagcggttaagccccctagaggctcatcaacgattcaagaagcacttcctgaaggattcgaagagcgggttaaaggaagaggccttgtttggggaggatgggttcaacaaccattgatattgtctcatccatcagtcgggtgctttgtgagccattgtgggtttggatcaatgtgggagtctttgctgagtgattgtcagatagtcttagtaccacagttgggtgatcaagtcctgaacacaagattgctgagtgacgaactcaaggtttcggttgaagtggcaagagaggaaacaggatggttctcgaaagagagcttgtgcgatgctgtcaatagtgtgatgaaaagggacagcgagctcgggaacctggtgaggaagaatcacaccaagtggagggagacagtagctagtcctggactaatgactggttatgtcgatgctttcgtagagtcattgcaggatcttgtctctgggaccacccatgactgaaagataggaacactatgacgtttctaagtagaagggggtgattaataaggttgatataaaccaaactatcttgaagtgcttatgtttccaagtgtgttttttcttgtttgtatggttcatttattgtttgatgtttctaagttgcagtgagtgatcatt

SEQ ID NO: 107665 - protein, 468 aa, Arabidopsis thaliana
  peptide (1)..(468): Ceres Seq. ID no. 13651181
  misc_feature: Pfam Name: UDPGT Pfam Description: UDP-glucoronosyl and UDP-glucosyl transferase
  misc_feature (16)..(468): Homolog of NCBI NO: 15234196 NR Description: glycosyltransferase family [Arabidopsis thaliana]
  misc_feature (16)..(467): Homolog of NCBI NO: 15234195 NR Description: glycosyltransferase family [Arabidopsis thaliana]
  misc_feature (25)..(467): Homolog of NCBI NO: 21593514 NR Description: UDP rhamnose-anthocyanidin-3-glucoside
  misc_feature (16)..(457): Homolog of NCBI NO: 15982889 NR Description: AT4g27560/T29A15_50 [Arabidopsis thaliana]
  misc_feature (18)..(465): Homolog of NCBI NO: 15239523 NR Description: glycosyltransferase family [Arabidopsis thaliana]
  misc_feature (18)..(463): Homolog of NCBI NO: 15217796 NR Description: glycosyltransferase family [Arabidopsis thaliana]
  misc_feature (20)..(460): Homolog of NCBI NO: 15233903 NR Description: glycosyltransferase family [Arabidopsis thaliana]
  misc_feature (21)..(460): Homolog of NCBI NO: 15227766 NR Description: glycosyltransferase family [Arabidopsis thaliana]
  misc_feature (18)..(462): Homolog of NCBI NO: 15239525 NR Description: glycosyltransferase family [Arabidopsis thaliana]
  misc_feature (18)..(468): Homolog of NCBI NO: 15217773 NR Description: glycosyltransferase family [Arabidopsis thaliana]
IEIQRNKKTKRKYTEMGGLKFHVLMYPWFATGHMTPFLFLANKLAEKGHTVTFLLPKKSLKQLEHFNLFPHNIVFRSVTVPHVDGLPVGTETASEIPVTSTDLLMSAMDLTRDQVEAVVRAVEPDLIFFDFAHWIPEVARDFGLKTVKYVVVSASTIASMLVPGGELGVPPPGYPSSKVLLRKQDAYTMKKLEPTNTIDVGPNLLERVTTSLMNSDVIAIRTAREIEGNFCDYIEKHCRKKVLLTGPVFPEPDKTRELEERWVKWLSGYEPDSVVFCALGSQVILEKDQFQELCLGMELTGSPFLVAVKPPRGSSTIQEALPEGFEERVKGRGLVWGGWVQQPLILSHPSVGCFVSHCGFGSMWESLLSDCQIVLVPQLGDQVLNTRLLSDELKVSVEVAREETGWFSKESLCDAVNSVMKRDSELGNLVRKNHTKWRETVASPGLMTGYVDAFVESLQDLVSGTTHD

SEQ ID NO: 107666 - protein, 453 aa, Arabidopsis thaliana; identical to SEQ ID NO: 87386
  peptide (1)..(453): Ceres Seq. ID no. 13651182
  misc_feature: Pfam Name: UDPGT Pfam Description: UDP-glucoronosyl and UDP-glucosyl transferase
  misc_feature (1)..(453): Homolog of NCBI NO: 15234196 NR Description: glycosyltransferase family [Arabidopsis thaliana]
  misc_feature (1)..(452): Homolog of NCBI NO: 15234195 NR Description: glycosyltransferase family [Arabidopsis thaliana]
  misc_feature (10)..(452): Homolog of NCBI NO: 21593514 NR Description: UDP rhamnose-anthocyanidin-3-glucoside
  misc_feature (1)..(442): Homolog of NCBI NO: 15982889 NR Description: AT4g27560/T29A15_50 [Arabidopsis thaliana]
  misc_feature (3)..(450): Homolog of NCBI NO: 15239523 NR Description: glycosyltransferase family [Arabidopsis thaliana]
  misc_feature (3)..(448): Homolog of NCBI NO: 15217796 NR Description: glycosyltransferase family [Arabidopsis thaliana]
  misc_feature (5)..(445): Homolog of NCBI NO: 15233903 NR Description: glycosyltransferase family [Arabidopsis thaliana]
  misc_feature (6)..(445): Homolog of NCBI NO: 15227766 NR Description: glycosyltransferase family [Arabidopsis thaliana]
  misc_feature (3)..(447): Homolog of NCBI NO: 15239525 NR Description: glycosyltransferase family [Arabidopsis thaliana]
  misc_feature (3)..(453): Homolog of NCBI NO: 15217773 NR Description: glycosyltransferase family [Arabidopsis thaliana]

SEQ ID NO: 107667 - protein, 444 aa, Arabidopsis thaliana; identical to SEQ ID NO: 87387
  peptide (1)..(444): Ceres Seq. ID no. 13651183
  misc_feature: Pfam Name: UDPGT Pfam Description: UDP-glucoronosyl and UDP-glucosyl transferase
  misc_feature (1)..(444): Homolog of NCBI NO: 15234196 NR Description: glycosyltransferase family [Arabidopsis thaliana]
  misc_feature (1)..(443): Homolog of NCBI NO: 15234195 NR Description: glycosyltransferase family [Arabidopsis thaliana]
  misc_feature (1)..(443): Homolog of NCBI NO: 21593514 NR Description: UDP rhamnose-anthocyanidin-3-glucoside
  misc_feature (1)..(433): Homolog of NCBI NO: 15982889 NR Description: AT4g27560/T29A15_50 [Arabidopsis thaliana]
  misc_feature (1)..(441): Homolog of NCBI NO: 15239523 NR Description: glycosyltransferase family [Arabidopsis thaliana]
  misc_feature (1)..(439): Homolog of NCBI NO: 15217796 NR Description: glycosyltransferase family [Arabidopsis thaliana]
  misc_feature (1)..(436): Homolog of NCBI NO: 15233903 NR Description: glycosyltransferase family [Arabidopsis thaliana]
  misc_feature (1)..(436): Homolog of NCBI NO: 15227766 NR Description: glycosyltransferase family [Arabidopsis thaliana]
  misc_feature (1)..(438): Homolog of NCBI NO: 15239525 NR Description: glycosyltransferase family [Arabidopsis thaliana]
  misc_feature (1)..(444): Homolog of NCBI NO: 15217773 NR Description: glycosyltransferase family [Arabidopsis thaliana]

SEQ ID NO: 107668 - DNA, 1011 bp, Arabidopsis thaliana
  misc_feature (1)..(1011): Ceres Seq. ID no. 13651188
  misc_feature: MA Experiment ID: 20000185 Result: Down-regulated in Transcription
  misc_feature: MA Experiment 20000185 PARAMETER Experiment Name: At_Roots__P Parameter: Age (day) Value: 7 vs. 21
  misc_feature: MA Experiment 20000185 PARAMETER Experiment Name: At_Roots__P Parameter: Organism Value: A. thaliana
  misc_feature: MA Experiment 20000185 PARAMETER Experiment Name: At_Roots__P Parameter: Tissue Value: Roots vs. Whole Plant
  misc_feature: MA Experiment ID: 20000439 Result: Down-regulated in Transcription
  misc_feature: MA Experiment 20000439 PARAMETER Experiment Name: At_Roots__P Parameter: Age (day) Value: 14 vs. 21
  misc_feature: MA Experiment 20000439 PARAMETER Experiment Name: At_Roots__P Parameter: Organism Value: A. thaliana
  misc_feature: MA Experiment 20000439 PARAMETER Experiment Name: At_Roots__P Parameter: Tissue Value: Roots vs. Whole Plant
  misc_feature: Pfam Name: Pept_tRNA_hydro Pfam Description: Peptidyl-tRNA hydrolase
agtgttactttccccaaatgtagaattaagggtttagggtttttagttccaaattcaattcttaacgaagcaatttcaaatctttttttcatttcagttacagcgatgttttgtgcatcatcttctccaattacatctcctctctacccaaaagcttataaattttctcaaacaaaatcgaattcgaagagattttcctctctgcgtgcttcgttgcctgtttctgataacaagcttcttaaatttgaatacacaccatggcttattgttgggcttggtaaccctggattaaagtattacggaacaaggcataatattggttttgagatgattgatcatatagctcgagcaacggatatttctatgaacacaattcagtccaaggctttagttgggataggttctgttggagaagttccgattttgttggttaaacctcaaggatacatgaatttcagtggtgaatcggttgggccgttagctgcttactaccaaatacccttacgtcacattcttatgatatatgatgacttgggtttgtctaatggtgtcttgagacttcaaccaaaaggtgggcatagccaacacaatggattgaagaatgtgacagaacatttaaatggttgtcgcggctatccccgcttatcaatcggaattggaaatccaccaggtaacatggacatgaaagcgtttcttctccagaaattcagccccttggagcgcaaacagatggatgagggactggaacaaggtgttgaaggtgtgaagacacttgttgaagaggggtttagtgactcaatatctcgattcaatttgggacagaaatacaagtttcataaagtttgattccttgacatttgcctcatcgtgatacctgtcacagtaacagtagcaacacccatagtccaacattgttcatttgttcttatccttgtggtctttgtttagctgataggtaatattgtaacatttgtattctctaagatcaattttattgatttatattttgtt

SEQ ID NO: 107669 - protein, 281 aa, Arabidopsis thaliana
  peptide (1)..(281): Ceres Seq. ID no. 13651189
  misc_feature: Pfam Name: Pept_tRNA_hydro Pfam Description: Peptidyl-tRNA hydrolase
  misc_feature (36)..(281): Homolog of NCBI NO: 26451849 NR Description: putative CRS2 [Arabidopsis thaliana]
  misc_feature (36)..(281): Homolog of NCBI NO: 15240875 NR Description: CRS2 -related protein [Arabidopsis thaliana]
  misc_feature (47)..(281): Homolog of NCBI NO: 15237280 NR Description: CRS2-related protein [Arabidopsis thaliana]
  misc_feature (33)..(281): Homolog of NCBI NO: 6752919 NR Description: CRS2 [Zea mays]
  misc_feature (83)..(281): Homolog of NCBI NO: 40889730 NR Description: Chain A, Crystal Structure Of The Chloroplast
  misc_feature (83)..(281): Homolog of NCBI NO: 40889731 NR Description: Chain A, Structure Of The Group Ii Intron
  misc_feature (83)..(279): Homolog of NCBI NO: 40889732 NR Description: Chain A, Structure Of The Chloroplast Group Ii
  misc_feature (84)..(280): Homolog of NCBI NO: 30687503 NR Description: expressed protein [Arabidopsis thaliana]
  misc_feature (51)..(271): Homolog of NCBI NO: 30685853 NR Description: expressed protein [Arabidopsis thaliana]
  misc_feature (51)..(271): Homolog of NCBI NO: 26453108 NR Description: unknown protein [Arabidopsis thaliana]
SVTFPKCRIKGLGFLVPNSILNEAISNLFFISVTAMFCASSSPITSPLYPKAYKFSQTKSNSKRFSSLRASLPVSDNKLLKFEYTPWLIVGLGNPGLKYYGTRHNIGFEMIDHIARATDISMNTIQSKALVGIGSVGEVPILLVKPQGYMNFSGESVGPLAAYYQIPLRHILMIYDDLGLSNGVLRLQPKGGHSQHNGLKNVTEHLNGCRGYPRLSIGIGNPPGNMDMKAFLLQKFSPLERKQMDEGLEQGVEGVKTLVEEGFSDSISRFNLGQKYKFHKV

SEQ ID NO: 107670 - protein, 246 aa, Arabidopsis thaliana
  peptide (1)..(246): Ceres Seq. ID no. 13651190
  misc_feature: Pfam Name: Pept_tRNA_hydro Pfam Description: Peptidyl-tRNA hydrolase
  misc_feature (1)..(246): Homolog of NCBI NO: 26451849 NR Description: putative CRS2 [Arabidopsis thaliana]
  misc_feature (1)..(246): Homolog of NCBI NO: 15240875 NR Description: CRS2 -related protein [Arabidopsis thaliana]
  misc_feature (12)..(246): Homolog of NCBI NO: 15237280 NR Description: CRS2-related protein [Arabidopsis thaliana]
  misc_feature (1)..(246): Homolog of NCBI NO: 6752919 NR Description: CRS2 [Zea mays]
  misc_feature (48)..(246): Homolog of NCBI NO: 40889730 NR Description: Chain A, Crystal Structure Of The Chloroplast
  misc_feature (48)..(246): Homolog of NCBI NO: 40889731 NR Description: Chain A, Structure Of The Group Ii Intron
  misc_feature (48)..(244): Homolog of NCBI NO: 40889732 NR Description: Chain A, Structure Of The Chloroplast Group Ii
  misc_feature (49)..(245): Homolog of NCBI NO: 30687503 NR Description: expressed protein [Arabidopsis thaliana]
  misc_feature (16)..(236): Homolog of NCBI NO: 30685853 NR Description: expressed protein [Arabidopsis thaliana]
  misc_feature (16)..(236): Homolog of NCBI NO: 26453108 NR Description: unknown protein [Arabidopsis thaliana]
MFCASSSPITSPLYPKAYKFSQTKSNSKRFSSLRASLPVSDNKLLKFEYTPWLIVGLGNPGLKYYGTRHNIGFEMIDHIARATDISMNTIQSKALVGIGSVGEVPILLVKPQGYMNFSGESVGPLAAYYQIPLRHILMIYDDLGLSNGVLRLQPKGGHSQHNGLKNVTEHLNGCRGYPRLSIGIGNPPGNMDMKAFLLQKFSPLERKQMDEGLEQGVEGVKTLVEEGFSDSISRFNLGQKYKFHKV

SEQ ID NO: 107671 - protein, 172 aa, Arabidopsis thaliana
  peptide (1)..(172): Ceres Seq. ID no. 13651191
  misc_feature: Pfam Name: Pept_tRNA_hydro Pfam Description: Peptidyl-tRNA hydrolase
  misc_feature (1)..(172): Homolog of NCBI NO: 26451849 NR Description: putative CRS2 [Arabidopsis thaliana]
  misc_feature (1)..(172): Homolog of NCBI NO: 15240875 NR Description: CRS2 -related protein [Arabidopsis thaliana]
  misc_feature (1)..(172): Homolog of NCBI NO: 15237280 NR Description: CRS2-related protein [Arabidopsis thaliana]
  misc_feature (1)..(172): Homolog of NCBI NO: 6752919 NR Description: CRS2 [Zea mays]
  misc_feature (1)..(172): Homolog of NCBI NO: 40889730 NR Description: Chain A, Crystal Structure Of The Chloroplast
  misc_feature (1)..(172): Homolog of NCBI NO: 40889731 NR Description: Chain A, Structure Of The Group Ii Intron
  misc_feature (1)..(170): Homolog of NCBI NO: 40889732 NR Description: Chain A, Structure Of The Chloroplast Group Ii
  misc_feature (1)..(171): Homolog of NCBI NO: 30687503 NR Description: expressed protein [Arabidopsis thaliana]
  misc_feature (1)..(162): Homolog of NCBI NO: 30685853 NR Description: expressed protein [Arabidopsis thaliana]
  misc_feature (1)..(162): Homolog of NCBI NO: 26453108 NR Description: unknown protein [Arabidopsis thaliana]
MIDHIARATDISMNTIQSKALVGIGSVGEVPILLVKPQGYMNFSGESVGPLAAYYQIPLRHILMIYDDLGLSNGVLRLQPKGGHSQHNGLKNVTEHLNGCRGYPRLSIGIGNPPGNMDMKAFLLQKFSPLERKQMDEGLEQGVEGVKTLVEEGFSDSISRFNLGQKYKFHKV

SEQ ID NO: 107672 - DNA, 1396 bp, Arabidopsis thaliana
  misc_feature (1)..(1396): Ceres Seq. ID no. 13651192
  misc_feature: MA Experiment ID: 20000173 Result: Down-regulated in Transcription
  misc_feature: MA Experiment 20000173 PARAMETER Experiment Name: At_42deg_Heat_P Parameter: Age (day) Value: 14
  misc_feature: MA Experiment 20000173 PARAMETER Experiment Name: At_42deg_Heat_P Parameter: Organism Value: A. thaliana
  misc_feature: MA Experiment 20000173 PARAMETER Experiment Name: At_42deg_Heat_P Parameter: Plant Line Value: WS
  misc_feature: MA Experiment 20000173 PARAMETER Experiment Name: At_42deg_Heat_P Parameter: Temperature (deg C) Value: 42 vs. 22
  misc_feature: MA Experiment 20000173 PARAMETER Experiment Name: At_42deg_Heat_P Parameter: Timepoint (hr) Value: 6
  misc_feature: MA Experiment 20000173 PARAMETER Experiment Name: At_42deg_Heat_P Parameter: Tissue Value: Aerial
  misc_feature: MA Experiment ID: 20000184 Result: Up-regulated in Transcription
  misc_feature: MA Experiment 20000184 PARAMETER Experiment Name: At_Shoots__P Parameter: Age (day) Value: 7
  misc_feature: MA Experiment 20000184 PARAMETER Experiment Name: At_Shoots__P Parameter: Tissue Value: Shoots vs. Whole Plant
  misc_feature: MA Experiment ID: 20000185 Result: Down-regulated in Transcription
  misc_feature: MA Experiment 20000185 PARAMETER Experiment Name: At_Roots__P Parameter: Age (day) Value: 7 vs. 21
  misc_feature: MA Experiment 20000185 PARAMETER Experiment Name: At_Roots__P Parameter: Organism Value: A. thaliana
  misc_feature: MA Experiment 20000185 PARAMETER Experiment Name: At_Roots__P Parameter: Tissue Value: Roots vs. Whole Plant
  misc_feature: MA Experiment ID: 20000437 Result: Down-regulated in Transcription
  misc_feature: MA Experiment 20000437 PARAMETER Experiment Name: At_Drought_P Parameter: Age (day) Value: 8
  misc_feature: MA Experiment 20000437 PARAMETER Experiment Name: At_Drought_P Parameter: Organism Value: A. thaliana
  misc_feature: MA Experiment 20000437 PARAMETER Experiment Name: At_Drought_P Parameter: Plant Line Value: WS
  misc_feature: MA Experiment 20000437 PARAMETER Experiment Name: At_Drought_P Parameter: Timepoint (hr) Value: 24
  misc_feature: MA Experiment 20000437 PARAMETER Experiment Name: At_Drought_P Parameter: Tissue Value: Whole Plant
  misc_feature: MA Experiment 20000437 PARAMETER Experiment Name: At_Drought_P Parameter: Treatment Value: Drought vs. No Drought
  misc_feature: MA Experiment ID: 20000438 Result: Up-regulated in Transcription
  misc_feature: MA Experiment 20000438 PARAMETER Experiment Name: At_Shoots__P Parameter: Age (day) Value: 14
  misc_feature: MA Experiment 20000438 PARAMETER Experiment Name: At_Shoots__P Parameter: Tissue Value: Shoots vs. Whole Plant
  misc_feature: MA Experiment ID: 20000573 Result: Down-regulated in Transcription
  misc_feature: MA Experiment 20000573 PARAMETER Experiment Name: At_100uM_ABA_Mutants__P Parameter: Organism Value: A. thaliana
  misc_feature: MA Experiment 20000573 PARAMETER Experiment Name: At_100uM_ABA_Mutants__P Parameter: Plant Line Value: CS22 vs. Ler wt
  misc_feature: MA Experiment 20000573 PARAMETER Experiment Name: At_100uM_ABA_Mutants__P Parameter: Timepoint (hr) Value: N/A
  misc_feature: MA Experiment 20000573 PARAMETER Experiment Name: At_100uM_ABA_Mutants__P Parameter: Tissue Value: Whole Plant
  misc_feature: MA Experiment 20000573 PARAMETER Experiment Name: At_100uM_ABA_Mutants__P Parameter: Treatment Value: None
  misc_feature: MA Experiment ID: 20000574 Result: Down-regulated in Transcription
  misc_feature: MA Experiment 20000574 PARAMETER Experiment Name: At_100uM_ABA_Mutants__P Parameter: Organism Value: A. thaliana
  misc_feature: MA Experiment 20000574 PARAMETER Experiment Name: At_100uM_ABA_Mutants__P Parameter: Plant Line Value: CS23 vs. Ler wt
  misc_feature: MA Experiment 20000574 PARAMETER Experiment Name: At_100uM_ABA_Mutants__P Parameter: Timepoint (hr) Value: N/A
  misc_feature: MA Experiment 20000574 PARAMETER Experiment Name: At_100uM_ABA_Mutants__P Parameter: Tissue Value: Whole Plant
  misc_feature: MA Experiment 20000574 PARAMETER Experiment Name: At_100uM_ABA_Mutants__P Parameter: Treatment Value: None
  misc_feature: MA Experiment ID: 20001247 Result: Up-regulated in Transcription
  misc_feature: MA Experiment 20001247 PARAMETER Experiment Name: At_Far-red-induction_P Parameter: Age (day) Value: 7
  misc_feature: MA Experiment 20001247 PARAMETER Experiment Name: At_Far-red-induction_P Parameter: Light Value: Far-red vs. White
  misc_feature: MA Experiment 20001247 PARAMETER Experiment Name: At_Far-red-induction_P Parameter: Organism Value: A. thaliana
  misc_feature: MA Experiment 20001247 PARAMETER Experiment Name: At_Far-red-induction_P Parameter: Plant Line Value: Columbia
  misc_feature: MA Experiment 20001247 PARAMETER Experiment Name: At_Far-red-induction_P Parameter: Timepoint (hr) Value: 1
  misc_feature: MA Experiment 20001247 PARAMETER Experiment Name: At_Far-red-induction_P Parameter: Tissue Value: Whole Plant
  misc_feature: MA Experiment ID: 20001248 Result: Down-regulated in Transcription
  misc_feature: MA Experiment 20001248 PARAMETER Experiment Name: At_Far-red-induction_P Parameter: Age (day) Value: 7
  misc_feature: MA Experiment 20001248 PARAMETER Experiment Name: At_Far-red-induction_P Parameter: Light Value: Far-red vs. White
  misc_feature: MA Experiment 20001248 PARAMETER Experiment Name: At_Far-red-induction_P Parameter: Organism Value: A. thaliana
  misc_feature: MA Experiment 20001248 PARAMETER Experiment Name: At_Far-red-induction_P Parameter: Plant Line Value: Columbia
  misc_feature: MA Experiment 20001248 PARAMETER Experiment Name: At_Far-red-induction_P Parameter: Timepoint (hr) Value: 4
  misc_feature: MA Experiment 20001248 PARAMETER Experiment Name: At_Far-red-induction_P Parameter: Tissue Value: Whole Plant
  misc_feature: MA Experiment ID: 20001451 Result: Up-regulated in Transcription
  misc_feature: MA Experiment 20001451 PARAMETER Experiment Name: At_Far-red-induction_P Parameter: Age (day) Value: 7
  misc_feature: MA Experiment 20001451 PARAMETER Experiment Name: At_Far-red-induction_P Parameter: Light Value: Far-red vs. White
  misc_feature: MA Experiment 20001451 PARAMETER Experiment Name: At_Far-red-induction_P Parameter: Organism Value: A. thaliana
  misc_feature: MA Experiment 20001451 PARAMETER Experiment Name: At_Far-red-induction_P Parameter: Plant Line Value: Columbia
  misc_feature: MA Experiment 20001451 PARAMETER Experiment Name: At_Far-red-induction_P Parameter: Timepoint (hr) Value: 24
  misc_feature: MA Experiment 20001451 PARAMETER Experiment Name: At_Far-red-induction_P Parameter: Tissue Value: Whole Plant
  misc_feature: MA Experiment ID: 20001757 Result: Up-regulated in Transcription
  misc_feature: MA Experiment 20001757 PARAMETER Experiment Name: At_50mM_NH4NO3_L-to-H_P Parameter: Timepoint (hr) Value: 6
  misc_feature: MA Experiment 20001757 PARAMETER Experiment Name: At_50mM_NH4NO3_L-to-H_P Parameter: Tissue Value: Leaf
  misc_feature: MA Experiment 20001757 PARAMETER Experiment Name: At_50mM_NH4NO3_L-to-H_P Parameter: Treatment Value: 50mM NH4NO3 vs 100mM Mannitol
tccagaaaaaaaaatgccggggaatttagagccgttggatctcggaatccaaataccataccatttcagatgcccaatctcacttgacctaatgtctgatcccgtaaccatctccaccggccaaacttacgaccgaaccagcatcgactcatggatcgctatgggcaacaccacttgtccagtcacacgtgtcgctctctccgacttcactctcatccctaaccacactctccgccgtcttatccaagaatggtgcgtcgctaaccgctctaacggcgtcgaacggattcctacacctaaacaaccggcggatccaatctccgttaggtcacttctcagtcaagcatccgcaattaccggaactcacgtctctgttcgttcacgcgccgccgctattcgtcgtttgagaggattagctagagatagtgagaagaatcgcgttttgatcgctggtcataacgcgggggagattttggtgaggattttgttcgccgatattgaaacgacgtcgttgtcttcggagcttgtttctgagtcgcttgctcttttggttttattgcatatgacggagacggagtgtgaagctgttgcgtcggatcctagtcgggtcgggtttatgacccgattgttgtttgattcttcgattgaaattagggttaacgccgccgcgttgattgagatggtgttgaccggagcgaaatccatggatctgaaattgatcatttccggatctgattcgatattcgaaggcgttctcgatcttctcaagaatccgatttcatcgcggcgagctttgaagatcggaatcaaagcgattttcgctctctgtctcgtgaaacaaacgagacatctagcgatctccgccggagttccggggattttaatcgaccgtctcgcggcggatttcgataggtgtgatacggagcgaggtttagcgacagtggagcttctttgccgattaccagaaggatgtgctgcgtttggtgagcatgctttgacggtgccgctaatggtgaagacgatattaagagtttcagatagagcgacggagtacgcggcgggagcgttgttggctttatgtacggcggaggaacggtgtagagatgaagctgcggcggcgggattggtgacgcagttgttgcttctggtgcagagtgattgtacggagagagcgaagagaaaagctcagatgcttttgaagcttctcagagactcttggcctgacgattctaccgttcattccgacgatttcaatcgtagcgaagtggcgccgttttgagttttttttttttttttggtttaacaagttatttattctttcttagaaaatttagagtagtcttaattgtgtaattaatttttaaaacaacaaaaattcatgagtctttttcttcgt

SEQ ID NO: 107673 - protein, 425 aa, Arabidopsis thaliana
  peptide (1)..(425): Ceres Seq. ID no. 13651193
  misc_feature (17)..(91): Pfam Name: U-box domain Pfam Description: U-box domain
  misc_feature (5)..(425): Homolog of NCBI NO: 26451730 NR Description: unknown protein [Arabidopsis thaliana]
  misc_feature (5)..(425): Homolog of NCBI NO: 15222819 NR Description: expressed protein [Arabidopsis thaliana]
  misc_feature (5)..(425): Homolog of NCBI NO: 18402223 NR Description: expressed protein [Arabidopsis thaliana] gb|AAD21464.1~gene_id:MLD14.11~similar to unknown protein thaliana] >gi|21554399|gb|AAM63504.1| unknown [Arabidopsis
  misc_feature (172)..(412): Homolog of NCBI NO: 15231222 NR Description: expressed protein [Arabidopsis thaliana]
  misc_feature (12)..(198): Homolog of NCBI NO: 15231222 NR Description: expressed protein [Arabidopsis thaliana]
  misc_feature (13)..(402): Homolog of NCBI NO: 14582200 NR Description: immediate-early fungal elicitor protein CMPG1
  misc_feature (5)..(408): Homolog of NCBI NO: 30686609 NR Description: expressed protein [Arabidopsis thaliana]
  misc_feature (12)..(408): Homolog of NCBI NO: 25408431 NR Description: hypothetical protein At2g35930 [imported] - thaliana >gi|4510376|gb|AAD21464.1| unknown protein [Arabidopsis
  misc_feature (2)..(425): Homolog of NCBI NO: 30013683 NR Description: Avr9/Cf-9 rapidly elicited protein 74 [Nicotiana
PEKKMPGNLEPLDLGIQIPYHFRCPISLDLMSDPVTISTGQTYDRTSIDSWIAMGNTTCPVTRVALSDFTLIPNHTLRRLIQEWCVANRSNGVERIPTPKQPADPISVRSLLSQASAITGTHVSVRSRAAAIRRLRGLARDSEKNRVLIAGHNAGEILVRILFADIETTSLSSELVSESLALLVLLHMTETECEAVASDPSRVGFMTRLLFDSSIEIRVNAAALIEMVLTGAKSMDLKLIISGSDSIFEGVLDLLKNPISSRRALKIGIKAIFALCLVKQTRHLAISAGVPGILIDRLAADFDRCDTERGLATVELLCRLPEGCAAFGEHALTVPLMVKTILRVSDRATEYAAGALLALCTAEERCRDEAAAAGLVTQLLLLVQSDCTERAKRKAQMLLKLLRDSWPDDSTVHSDDFNRSEVAPF

SEQ ID NO: 107674 - protein, 421 aa, Arabidopsis thaliana
  peptide (1)..(421): Ceres Seq. ID no. 13651194
  misc_feature (13)..(87): Pfam Name: U-box domain Pfam Description: U-box domain
  misc_feature (1)..(421): Homolog of NCBI NO: 26451730 NR Description: unknown protein [Arabidopsis thaliana]
  misc_feature (1)..(421): Homolog of NCBI NO: 15222819 NR Description: expressed protein [Arabidopsis thaliana]
  misc_feature (1)..(421): Homolog of NCBI NO: 18402223 NR Description: expressed protein [Arabidopsis thaliana] gb|AAD21464.1~gene_id:MLD14.11~similar to unknown protein thaliana] >gi|21554399|gb|AAM63504.1| unknown [Arabidopsis
  misc_feature (168)..(408): Homolog of NCBI NO: 15231222 NR Description: expressed protein [Arabidopsis thaliana]
  misc_feature (8)..(194): Homolog of NCBI NO: 15231222 NR Description: expressed protein [Arabidopsis thaliana]
  misc_feature (9)..(398): Homolog of NCBI NO: 14582200 NR Description: immediate-early fungal elicitor protein CMPG1
  misc_feature (1)..(404): Homolog of NCBI NO: 30686609 NR Description: expressed protein [Arabidopsis thaliana]
  misc_feature (8)..(404): Homolog of NCBI NO: 25408431 NR Description: hypothetical protein At2g35930 [imported] - thaliana >gi|4510376|gb|AAD21464.1| unknown protein [Arabidopsis
  misc_feature (1)..(421): Homolog of NCBI NO: 30013683 NR Description: Avr9/Cf-9 rapidly elicited protein 74 [Nicotiana
MPGNLEPLDLGIQIPYHFRCPISLDLMSDPVTISTGQTYDRTSIDSWIAMGNTTCPVTRVALSDFTLIPNHTLRRLIQEWCVANRSNGVERIPTPKQPADPISVRSLLSQASAITGTHVSVRSRAAAIRRLRGLARDSEKNRVLIAGHNAGEILVRILFADIETTSLSSELVSESLALLVLLHMTETECEAVASDPSRVGFMTRLLFDSSIEIRVNAAALIEMVLTGAKSMDLKLIISGSDSIFEGVLDLLKNPISSRRALKIGIKAIFALCLVKQTRHLAISAGVPGILIDRLAADFDRCDTERGLATVELLCRLPEGCAAFGEHALTVPLMVKTILRVSDRATEYAAGALLALCTAEERCRDEAAAAGLVTQLLLLVQSDCTERAKRKAQMLLKLLRDSWPDDSTVHSDDFNRSEVAPF

SEQ ID NO: 107675 - protein, 395 aa, Arabidopsis thaliana
  peptide (1)..(395): Ceres Seq. ID no. 13651195
  misc_feature (1)..(61): Pfam Name: U-box domain Pfam Description: U-box domain
  misc_feature (1)..(395): Homolog of NCBI NO: 26451730 NR Description: unknown protein [Arabidopsis thaliana]
  misc_feature (1)..(395): Homolog of NCBI NO: 15222819 NR Description: expressed protein [Arabidopsis thaliana]
  misc_feature (1)..(395): Homolog of NCBI NO: 18402223 NR Description: expressed protein [Arabidopsis thaliana] gb|AAD21464.1~gene_id:MLD14.11~similar to unknown protein thaliana] >gi|21554399|gb|AAM63504.1| unknown [Arabidopsis
  misc_feature (142)..(382): Homolog of NCBI NO: 15231222 NR Description: expressed protein [Arabidopsis thaliana]
  misc_feature (1)..(168): Homolog of NCBI NO: 15231222 NR Description: expressed protein [Arabidopsis thaliana]
  misc_feature (1)..(372): Homolog of NCBI NO: 14582200 NR Description: immediate-early fungal elicitor protein CMPG1
  misc_feature (1)..(378): Homolog of NCBI NO: 30686609 NR Description: expressed protein [Arabidopsis thaliana]
  misc_feature (1)..(378): Homolog of NCBI NO: 25408431 NR Description: hypothetical protein At2g35930 [imported] - thaliana >gi|4510376|gb|AAD21464.1| unknown protein [Arabidopsis
  misc_feature (1)..(395): Homolog of NCBI NO: 30013683 NR Description: Avr9/Cf-9 rapidly elicited protein 74 [Nicotiana
MSDPVTISTGQTYDRTSIDSWIAMGNTTCPVTRVALSDFTLIPNHTLRRLIQEWCVANRSNGVERIPTPKQPADPISVRSLLSQASAITGTHVSVRSRAAAIRRLRGLARDSEKNRVLIAGHNAGEILVRILFADIETTSLSSELVSESLALLVLLHMTETECEAVASDPSRVGFMTRLLFDSSIEIRVNAAALIEMVLTGAKSMDLKLIISGSDSIFEGVLDLLKNPISSRRALKIGIKAIFALCLVKQTRHLAISAGVPGILIDRLAADFDRCDTERGLATVELLCRLPEGCAAFGEHALTVPLMVKTILRVSDRATEYAAGALLALCTAEERCRDEAAAAGLVTQLLLLVQSDCTERAKRKAQMLLKLLRDSWPDDSTVHSDDFNRSEVAPF

SEQ ID NO: 107676 - DNA, 2637 bp, Arabidopsis thaliana
  misc_feature (1)..(2637): Ceres Seq. ID no. 13651206
  misc_feature: MA Experiment ID: 20000171 Result: Up-regulated in Transcription
  misc_feature: MA Experiment 20000171 PARAMETER Experiment Name: At_42deg_Heat_P Parameter: Age (day) Value: 14
  misc_feature: MA Experiment 20000171 PARAMETER Experiment Name: At_42deg_Heat_P Parameter: Organism Value: A. thaliana
  misc_feature: MA Experiment 20000171 PARAMETER Experiment Name: At_42deg_Heat_P Parameter: Plant Line Value: WS
  misc_feature: MA Experiment 20000171 PARAMETER Experiment Name: At_42deg_Heat_P Parameter: Temperature (deg C) Value: 42 vs. 22
  misc_feature: MA Experiment 20000171 PARAMETER Experiment Name: At_42deg_Heat_P Parameter: Timepoint (hr) Value: 1
  misc_feature: MA Experiment 20000171 PARAMETER Experiment Name: At_42deg_Heat_P Parameter: Tissue Value: Aerial
  misc_feature: MA Experiment ID: 20000173 Result: Up-regulated in Transcription
  misc_feature: MA Experiment 20000173 PARAMETER Experiment Name: At_42deg_Heat_P Parameter: Age (day) Value: 14
  misc_feature: MA Experiment 20000173 PARAMETER Experiment Name: At_42deg_Heat_P Parameter: Organism Value: A. thaliana
  misc_feature: MA Experiment 20000173 PARAMETER Experiment Name: At_42deg_Heat_P Parameter: Plant Line Value: WS
  misc_feature: MA Experiment 20000173 PARAMETER Experiment Name: At_42deg_Heat_P Parameter: Temperature (deg C) Value: 42 vs. 22
  misc_feature: MA Experiment 20000173 PARAMETER Experiment Name: At_42deg_Heat_P Parameter: Timepoint (hr) Value: 6
  misc_feature: MA Experiment 20000173 PARAMETER Experiment Name: At_42deg_Heat_P Parameter: Tissue Value: Aerial
  misc_feature: MA Experiment ID: 20000286 Result: Up-regulated in Transcription
  misc_feature: MA Experiment 20000286 PARAMETER Experiment Name: At_Open_Flower_P Parameter: Age (day) Value: 21
  misc_feature: MA Experiment 20000286 PARAMETER Experiment Name: At_Open_Flower_P Parameter: Plant Line Value: WS
  misc_feature: MA Experiment 20000286 PARAMETER Experiment Name: At_Open_Flower_P Parameter: Tissue Value: Half Open vs. Whole Plant
  misc_feature: MA Experiment ID: 20000709 Result: Up-regulated in Transcription
  misc_feature: MA Experiment 20000709 PARAMETER Experiment Name: At_15mM_NH4NO3_L-to-H_P Parameter: Age (hr) Value: 14
  misc_feature: MA Experiment 20000709 PARAMETER Experiment Name: At_15mM_NH4NO3_L-to-H_P Parameter: Organism Value: A. thaliana
  misc_feature: MA Experiment 20000709 PARAMETER Experiment Name: At_15mM_NH4NO3_L-to-H_P Parameter: Plant Line Value: WS
  misc_feature: MA Experiment 20000709 PARAMETER Experiment Name: At_15mM_NH4NO3_L-to-H_P Parameter: Timepoint (hr) Value: 4
  misc_feature: MA Experiment 20000709 PARAMETER Experiment Name: At_15mM_NH4NO3_L-to-H_P Parameter: Tissue Value: Aerial
  misc_feature: MA Experiment 20000709 PARAMETER Experiment Name: At_15mM_NH4NO3_L-to-H_P Parameter: Treatment Value: 15mM NH4NO3 vs. 30mM Mannitol
atgattgggtcgcataaattcgagacgatggtgagatacactgcacagttagttgtgcatagtcccaaactataaaaactctctagaatcttcaaacgtcagtgtttacataagaaatgacgacttttcagtactcgctagtttttctcgttctcatggcggttatagttgccggagacgtcgcaaacgtaacatacgacggtcgctcgctgatcatcgacggcgaacataagatccttttctccggctcaatccattatactcgcagcactcctcagatgtggccgtccttgatagcaaaggcaaaatctggaggaatagatgtagtagacacatatgtgttctggaacgttcacgagccgcaacaaggccagttcgatttcagtggaagccgtgatatcgtgaagtttatcaaggaagtaaaaaatcatggcttatatgtctgtcttcggattggaccttttatccaaggggaatggtcttatgggggtttgcctttctggttgcataatgtccaagggattgtcttcaggacagataatgagccattcaagtatcacatgaagagatatgcgaaaatgattgttaagctgatgaaatcggaaaacttgtatgcttcccaaggaggacctatcatactctcacagattgagaacgagtatgggatggttggtagagcttttcgacaagaagggaaatcatatgtcaaatggacagcaaaattggctgttgagcttgacacaggagtgccatgggttatgtgcaagcaagatgatgcccctgatcctttggttaatgcttgcaatgggaggcaatgtggagaaacattcaaaggacccaattcacccaacaaacctgcaatatggactgagaactggacgagtttttatcaaacatatggtgaggaaccattgataaggtcagctgaggatatagcgtttcatgttgctcttttcatcgctaagaatggaagctttgtaaactactacatgtatcatggaggaaccaacttcgggagaaatgcttcacagttcgtaatcaccagttattatgatcaggctccacttgatgaatatgggttacttaggcaaccaaaatggggacaccttaaggaattacatgctgcagttaagttgtgtgaagagcctctactttcaggactgcaaactacaatatcattggggaagctacaaactgcttttgtgtttgggaagaaggcgaacctatgcgctgccattctggtgaatcaagacaaatgcgagtctactgtacagtttcgtaattcttcatatcgtttgtctccaaaatctgtaagtgtcctgccagactgcaagaatgtagccttcaacactgccaaggtcaatgcacaatacaacacgagaacaaggaaagcaagacaaaatttgtcgtctcctcaaatgtgggaggaatttacagaaacagtcccaagtttcagtgaaacgtcaataagatcagaatccttgcttgagcacatgaataccacacaggatacttccgactatctgtggcaaacaactaggtttcagcaatctgaaggagctccatcagttcttaaagtcaaccatctcggacatgctctacacgcctttgttaatgggagattcataggttctatgcatggaactttcaaagcgcacagatttttgctggagaaaaatatgtcattgaataatggcacaaataacttggcattactcagcgtaatggtaggattaccgaattcaggagcacatctagaaaggagagtcgttggatcacggagcgtaaagatttggaatggaagatatcaactgtacttcaacaactatagttggggatatcaggttggcctgaaaggggagaaattccatgtttacactgaagatgggtccgcaaaagttcagtggaagcagtacagagactccaaaagtcagcctctaacttggtacaaggcctcatttgacacaccagagggggaagatccggtggccttgaacttaggatcaatgggaaaaggagaagcttgggtgaatggccagagtataggtcggtactgggtctcatttcacacttacaaggggaacccttctcagatatggtaccatataccgagatcttttcttaaaccaaacagtaacttactagtcattttggaagaagaaagagaagggaatcctcttggtataactatagacacagtgtcggtcactgaagtctgtggtcatgtctccaatacaaatcctcatcctgtcatatctccaagaaagaaaggcctcaaccgaaaaaatctaacataccggtatgataggaagcctaaggttcagctccagtgtcctactggcaggaaaatttcaaagatattgtttgcaagctttggcactccaaatggaagttgcgggagctattctattggaagctgtcactcacccaactctttagctgttgtacagaaggcttgtctgaaaaaaagtaggtgttctgtacctgtatggagcaaaacatttggtgtgattcatgtccacacactgttaaatctctgcttgttcgtgcacaatgctcatgagagtccaattcgttagtatagatttctgttccctttttctttcttattatgaacaaataacaaaagtttttgtg

SEQ ID NO: 107677 - protein, 820 aa, Arabidopsis thaliana
  peptide (1)..(820): Ceres Seq. ID no. 13651207
  misc_feature (737)..(797): Pfam Name: Galactose binding lectin domain Pfam Description: Galactose binding lectin domain
  misc_feature (1)..(697): Homolog of NCBI NO: 30697899 NR Description: glycosyl hydrolase family 35 (beta-galactosidase)
  misc_feature (1)..(697): Homolog of NCBI NO: 6686884 NR Description: putative beta-galactosidase [Arabidopsis thaliana]
  misc_feature (9)..(656): Homolog of NCBI NO: 4138137 NR Description: ss-galactosidase [Lycopersicon esculentum]
  misc_feature (573)..(797): Homolog of NCBI NO: 4138137 NR Description: ss-galactosidase [Lycopersicon esculentum]
  misc_feature (24)..(650): Homolog of NCBI NO: 15081596 NR Description: putative beta-galactosidase BG1 [Vitis vinifera]
  misc_feature (573)..(797): Homolog of NCBI NO: 15081596 NR Description: putative beta-galactosidase BG1 [Vitis vinifera]
  misc_feature (4)..(650): Homolog of NCBI NO: 1352077 NR Description: Beta-galactosidase precursor (Lactase) (Acid beta-
  misc_feature (573)..(797): Homolog of NCBI NO: 1352077 NR Description: Beta-galactosidase precursor (Lactase) (Acid beta-
  misc_feature (8)..(796): Homolog of NCBI NO: 25326168 NR Description: probable beta-galactosidase [imported] -
  misc_feature (25)..(797): Homolog of NCBI NO: 6686900 NR Description: putative beta-galactosidase [Arabidopsis thaliana]
MTTFQYSLVFLVLMAVIVAGDVANVTYDGRSLIIDGEHKILFSGSIHYTRSTPQMWPSLIAKAKSGGIDVVDTYVFWNVHEPQQGQFDFSGSRDIVKFIKEVKNHGLYVCLRIGPFIQGEWSYGGLPFWLHNVQGIVFRTDNEPFKYHMKRYAKMIVKLMKSENLYASQGGPIILSQIENEYGMVGRAFRQEGKSYVKWTAKLAVELDTGVPWVMCKQDDAPDPLVNACNGRQCGETFKGPNSPNKPAIWTENWTSFYQTYGEEPLIRSAEDIAFHVALFIAKNGSFVNYYMYHGGTNFGRNASQFVITSYYDQAPLDEYGLLRQPKWGHLKELHAAVKLCEEPLLSGLQTTISLGKLQTAFVFGKKANLCAAILVNQDKCESTVQFRNSSYRLSPKSVSVLPDCKNVAFNTAKVNAQYNTRTRKARQNLSSPQMWEEFTETVPSFSETSIRSESLLEHMNTTQDTSDYLWQTTRFQQSEGAPSVLKVNHLGHALHAFVNGRFIGSMHGTFKAHRFLLEKNMSLNNGTNNLALLSVMVGLPNSGAHLERRVVGSRSVKIWNGRYQLYFNNYSWGYQVGLKGEKFHVYTEDGSAKVQWKQYRDSKSQPLTWYKASFDTPEGEDPVALNLGSMGKGEAWVNGQSIGRYWVSFHTYKGNPSQIWYHIPRSFLKPNSNLLVILEEEREGNPLGITIDTVSVTEVCGHVSNTNPHPVISPRKKGLNRKNLTYRYDRKPKVQLQCPTGRKISKILFASFGTPNGSCGSYSIGSCHSPNSLAVVQKACLKKSRCSVPVWSKTFGVIHVHTLLNLCLFVHNAHESPIR

SEQ ID NO: 107678 - protein, 807 aa, Arabidopsis thaliana
  peptide (1)..(807): Ceres Seq. ID no. 13651208
  misc_feature (724)..(784): Pfam Name: Galactose binding lectin domain Pfam Description: Galactose binding lectin domain
  misc_feature (1)..(684): Homolog of NCBI NO: 30697899 NR Description: glycosyl hydrolase family 35 (beta-galactosidase)
  misc_feature (1)..(684): Homolog of NCBI NO: 6686884 NR Description: putative beta-galactosidase [Arabidopsis thaliana]
  misc_feature (1)..(643): Homolog of NCBI NO: 4138137 NR Description: ss-galactosidase [Lycopersicon esculentum]
  misc_feature (560)..(784): Homolog of NCBI NO: 4138137 NR Description: ss-galactosidase [Lycopersicon esculentum]
  misc_feature (11)..(637): Homolog of NCBI NO: 15081596 NR Description: putative beta-galactosidase BG1 [Vitis vinifera]
  misc_feature (560)..(784): Homolog of NCBI NO: 15081596 NR Description: putative beta-galactosidase BG1 [Vitis vinifera]
  misc_feature (1)..(637): Homolog of NCBI NO: 1352077 NR Description: Beta-galactosidase precursor (Lactase) (Acid beta-
  misc_feature (560)..(784): Homolog of NCBI NO: 1352077 NR Description: Beta-galactosidase precursor (Lactase) (Acid beta-
  misc_feature (1)..(783): Homolog of NCBI NO: 25326168 NR Description: probable beta-galactosidase [imported] -
  misc_feature (12)..(784): Homolog of NCBI NO: 6686900 NR Description: putative beta-galactosidase [Arabidopsis thaliana]
MAVIVAGDVANVTYDGRSLIIDGEHKILFSGSIHYTRSTPQMWPSLIAKAKSGGIDVVDTYVFWNVHEPQQGQFDFSGSRDIVKFIKEVKNHGLYVCLRIGPFIQGEWSYGGLPFWLHNVQGIVFRTDNEPFKYHMKRYAKMIVKLMKSENLYASQGGPIILSQIENEYGMVGRAFRQEGKSYVKWTAKLAVELDTGVPWVMCKQDDAPDPLVNACNGRQCGETFKGPNSPNKPAIWTENWTSFYQTYGEEPLIRSAEDIAFHVALFIAKNGSFVNYYMYHGGTNFGRNASQFVITSYYDQAPLDEYGLLRQPKWGHLKELHAAVKLCEEPLLSGLQTTISLGKLQTAFVFGKKANLCAAILVNQDKCESTVQFRNSSYRLSPKSVSVLPDCKNVAFNTAKVNAQYNTRTRKARQNLSSPQMWEEFTETVPSFSETSIRSESLLEHMNTTQDTSDYLWQTTRFQQSEGAPSVLKVNHLGHALHAFVNGRFIGSMHGTFKAHRFLLEKNMSLNNGTNNLALLSVMVGLPNSGAHLERRVVGSRSVKIWNGRYQLYFNNYSWGYQVGLKGEKFHVYTEDGSAKVQWKQYRDSKSQPLTWYKASFDTPEGEDPVALNLGSMGKGEAWVNGQSIGRYWVSFHTYKGNPSQIWYHIPRSFLKPNSNLLVILEEEREGNPLGITIDTVSVTEVCGHVSNTNPHPVISPRKKGLNRKNLTYRYDRKPKVQLQCPTGRKISKILFASFGTPNGSCGSYSIGSCHSPNSLAVVQKACLKKSRCSVPVWSKTFGVIHVHTLLNLCLFVHNAHESPIR

SEQ ID NO: 107679 - protein, 766 aa, Arabidopsis thaliana
  peptide (1)..(766): Ceres Seq. ID no. 13651209
  misc_feature (683)..(743): Pfam Name: Galactose binding lectin domain Pfam Description: Galactose binding lectin domain
  misc_feature (1)..(643): Homolog of NCBI NO: 30697899 NR Description: glycosyl hydrolase family 35 (beta-galactosidase)
  misc_feature (1)..(643): Homolog of NCBI NO: 6686884 NR Description: putative beta-galactosidase [Arabidopsis thaliana]
  misc_feature (1)..(602): Homolog of NCBI NO: 4138137 NR Description: ss-galactosidase [Lycopersicon esculentum]
  misc_feature (519)..(743): Homolog of NCBI NO: 4138137 NR Description: ss-galactosidase [Lycopersicon esculentum]
  misc_feature (1)..(596): Homolog of NCBI NO: 15081596 NR Description: putative beta-galactosidase BG1 [Vitis vinifera]
  misc_feature (519)..(743): Homolog of NCBI NO: 15081596 NR Description: putative beta-galactosidase BG1 [Vitis vinifera]
  misc_feature (1)..(596): Homolog of NCBI NO: 1352077 NR Description: Beta-galactosidase precursor (Lactase) (Acid beta-
  misc_feature (519)..(743): Homolog of NCBI NO: 1352077 NR Description: Beta-galactosidase precursor (Lactase) (Acid beta-
  misc_feature (1)..(742): Homolog of NCBI NO: 25326168 NR Description: probable beta-galactosidase [imported] -
  misc_feature (1)..(743): Homolog of NCBI NO: 6686900 NR Description: putative beta-galactosidase [Arabidopsis thaliana]
MWPSLIAKAKSGGIDVVDTYVFWNVHEPQQGQFDFSGSRDIVKFIKEVKNHGLYVCLRIGPFIQGEWSYGGLPFWLHNVQGIVFRTDNEPFKYHMKRYAKMIVKLMKSENLYASQGGPIILSQIENEYGMVGRAFRQEGKSYVKWTAKLAVELDTGVPWVMCKQDDAPDPLVNACNGRQCGETFKGPNSPNKPAIWTENWTSFYQTYGEEPLIRSAEDIAFHVALFIAKNGSFVNYYMYHGGTNFGRNASQFVITSYYDQAPLDEYGLLRQPKWGHLKELHAAVKLCEEPLLSGLQTTISLGKLQTAFVFGKKANLCAAILVNQDKCESTVQFRNSSYRLSPKSVSVLPDCKNVAFNTAKVNAQYNTRTRKARQNLSSPQMWEEFTETVPSFSETSIRSESLLEHMNTTQDTSDYLWQTTRFQQSEGAPSVLKVNHLGHALHAFVNGRFIGSMHGTFKAHRFLLEKNMSLNNGTNNLALLSVMVGLPNSGAHLERRVVGSRSVKIWNGRYQLYFNNYSWGYQVGLKGEKFHVYTEDGSAKVQWKQYRDSKSQPLTWYKASFDTPEGEDPVALNLGSMGKGEAWVNGQSIGRYWVSFHTYKGNPSQIWYHIPRSFLKPNSNLLVILEEEREGNPLGITIDTVSVTEVCGHVSNTNPHPVISPRKKGLNRKNLTYRYDRKPKVQLQCPTGRKISKILFASFGTPNGSCGSYSIGSCHSPNSLAVVQKACLKKSRCSVPVWSKTFGVIHVHTLLNLCLFVHNAHESPIR

SEQ ID NO: 107680 - DNA, 899 bp, Arabidopsis thaliana
  misc_feature (1)..(899): Ceres Seq. ID no. 13651216
  misc_feature: MA Experiment ID: 20000169 Result: Up-regulated in Transcription
  misc_feature: MA Experiment 20000169 PARAMETER Experiment Name: At_100uM_ABA_P Parameter: Age (day) Value: 14
  misc_feature: MA Experiment 20000169 PARAMETER Experiment Name: At_100uM_ABA_P Parameter: Organism Value: A. thaliana
  misc_feature: MA Experiment 20000169 PARAMETER Experiment Name: At_100uM_ABA_P Parameter: Plant Line Value: WS
  misc_feature: MA Experiment 20000169 PARAMETER Experiment Name: At_100uM_ABA_P Parameter: Timepoint (hr) Value: 6
  misc_feature: MA Experiment 20000169 PARAMETER Experiment Name: At_100uM_ABA_P Parameter: Tissue Value: Aerial
  misc_feature: MA Experiment 20000169 PARAMETER Experiment Name: At_100uM_ABA_P Parameter: Treatment Value: 100uM ABA vs. No Treatment
  misc_feature: MA Experiment ID: 20000171 Result: Up-regulated in Transcription
  misc_feature: MA Experiment 20000171 PARAMETER Experiment Name: At_42deg_Heat_P Parameter: Age (day) Value: 14
  misc_feature: MA Experiment 20000171 PARAMETER Experiment Name: At_42deg_Heat_P Parameter: Organism Value: A. thaliana
  misc_feature: MA Experiment 20000171 PARAMETER Experiment Name: At_42deg_Heat_P Parameter: Plant Line Value: WS
  misc_feature: MA Experiment 20000171 PARAMETER Experiment Name: At_42deg_Heat_P Parameter: Temperature (deg C) Value: 42 vs. 22
  misc_feature: MA Experiment 20000171 PARAMETER Experiment Name: At_42deg_Heat_P Parameter: Timepoint (hr) Value: 1
  misc_feature: MA Experiment 20000171 PARAMETER Experiment Name: At_42deg_Heat_P Parameter: Tissue Value: Aerial
  misc_feature: MA Experiment ID: 20000173 Result: Up-regulated in Transcription
  misc_feature: MA Experiment 20000173 PARAMETER Experiment Name: At_42deg_Heat_P Parameter: Age (day) Value: 14
  misc_feature: MA Experiment 20000173 PARAMETER Experiment Name: At_42deg_Heat_P Parameter: Organism Value: A. thaliana
  misc_feature: MA Experiment 20000173 PARAMETER Experiment Name: At_42deg_Heat_P Parameter: Plant Line Value: WS
  misc_feature: MA Experiment 20000173 PARAMETER Experiment Name: At_42deg_Heat_P Parameter: Temperature (deg C) Value: 42 vs. 22
  misc_feature: MA Experiment 20000173 PARAMETER Experiment Name: At_42deg_Heat_P Parameter: Timepoint (hr) Value: 6
  misc_feature: MA Experiment 20000173 PARAMETER Experiment Name: At_42deg_Heat_P Parameter: Tissue Value: Aerial
  misc_feature: MA Experiment ID: 20000227 Result: Down-regulated in Transcription
  misc_feature: MA Experiment 20000227 PARAMETER Experiment Name: At_Root-Tips-vs-Tops_P Parameter: Tissue Value: Root Tips vs. Root Tops
  misc_feature: MA Experiment ID: 20000234 Result: Down-regulated in Transcription
  misc_feature: MA Experiment 20000234 PARAMETER Experiment Name: At_Siliques_P Parameter: Age (day) Value: 21
  misc_feature: MA Experiment 20000234 PARAMETER Experiment Name: At_Siliques_P Parameter: Organism Value: A. thaliana
  misc_feature: MA Experiment 20000234 PARAMETER Experiment Name: At_Siliques_P Parameter: Plant Line Value: WS
  misc_feature: MA Experiment 20000234 PARAMETER Experiment Name: At_Siliques_P Parameter: Tissue Value: Less Than 5mm Siliques vs. Whole Plant
  misc_feature: MA Experiment ID: 20000235 Result: Down-regulated in Transcription
  misc_feature: MA Experiment 20000235 PARAMETER Experiment Name: At_Siliques_P Parameter: Age (day) Value: 21
  misc_feature: MA Experiment 20000235 PARAMETER Experiment Name: At_Siliques_P Parameter: Organism Value: A. thaliana
  misc_feature: MA Experiment 20000235 PARAMETER Experiment Name: At_Siliques_P Parameter: Plant Line Value: WS
  misc_feature: MA Experiment 20000235 PARAMETER Experiment Name: At_Siliques_P Parameter: Tissue Value: 5-10mm Siliques vs. Whole Plant
  misc_feature: MA Experiment ID: 20000264 Result: Down-regulated in Transcription
  misc_feature: MA Experiment 20000264 PARAMETER Experiment Name: At_Open_Flower_P Parameter: Age (day) Value: 21
  misc_feature: MA Experiment 20000264 PARAMETER Experiment Name: At_Open_Flower_P Parameter: Plant Line Value: WS
  misc_feature: MA Experiment 20000264 PARAMETER Experiment Name: At_Open_Flower_P Parameter: Tissue Value: Open Flower vs. Whole Plant
  misc_feature: MA Experiment ID: 20000265 Result: Down-regulated in Transcription
  misc_feature: MA Experiment 20000265 PARAMETER Experiment Name: At_Open_Flower_P Parameter: Age (day) Value: 21
  misc_feature: MA Experiment 20000265 PARAMETER Experiment Name: At_Open_Flower_P Parameter: Plant Line Value: WS
  misc_feature: MA Experiment 20000265 PARAMETER Experiment Name: At_Open_Flower_P Parameter: Tissue Value: Closed Flower vs. Whole Plant
  misc_feature: MA Experiment ID: 20000267 Result: Up-regulated in Transcription
  misc_feature: MA Experiment 20000267 PARAMETER Experiment Name: At_Drought_P Parameter: Age (day) Value: 7
  misc_feature: MA Experiment 20000267 PARAMETER Experiment Name: At_Drought_P Parameter: Organism Value: A. thaliana
  misc_feature: MA Experiment 20000267 PARAMETER Experiment Name: At_Drought_P Parameter: Plant Line Value: WS
  misc_feature: MA Experiment 20000267 PARAMETER Experiment Name: At_Drought_P Parameter: Timepoint (hr) Value: 6
  misc_feature: MA Experiment 20000267 PARAMETER Experiment Name: At_Drought_P Parameter: Tissue Value: Whole Plant
  misc_feature: MA Experiment 20000267 PARAMETER Experiment Name: At_Drought_P Parameter: Treatment Value: Drought vs. No Drought
  misc_feature: MA Experiment ID: 20000286 Result: Down-regulated in Transcription
  misc_feature: MA Experiment 20000286 PARAMETER Experiment Name: At_Open_Flower_P Parameter: Age (day) Value: 21
  misc_feature: MA Experiment 20000286 PARAMETER Experiment Name: At_Open_Flower_P Parameter: Plant Line Value: WS
  misc_feature: MA Experiment 20000286 PARAMETER Experiment Name: At_Open_Flower_P Parameter: Tissue Value: Half Open vs. Whole Plant
  misc_feature: MA Experiment ID: 20000436 Result: Up-regulated in Transcription
  misc_feature: MA Experiment 20000436 PARAMETER Experiment Name: At_Drought_P Parameter: Age (day) Value: 7
  misc_feature: MA Experiment 20000436 PARAMETER Experiment Name: At_Drought_P Parameter: Organism Value: A. thaliana
  misc_feature: MA Experiment 20000436 PARAMETER Experiment Name: At_Drought_P Parameter: Plant Line Value: WS
  misc_feature: MA Experiment 20000436 PARAMETER Experiment Name: At_Drought_P Parameter: Timepoint (hr) Value: 12
  misc_feature: MA Experiment 20000436 PARAMETER Experiment Name: At_Drought_P Parameter: Tissue Value: Whole Plant
  misc_feature: MA Experiment 20000436 PARAMETER Experiment Name: At_Drought_P Parameter: Treatment Value: Drought vs. No Drought
  misc_feature: MA Experiment ID: 20000437 Result: Up-regulated in Transcription
  misc_feature: MA Experiment 20000437 PARAMETER Experiment Name: At_Drought_P Parameter: Age (day) Value: 8
  misc_feature: MA Experiment 20000437 PARAMETER Experiment Name: At_Drought_P Parameter: Organism Value: A. thaliana
  misc_feature: MA Experiment 20000437 PARAMETER Experiment Name: At_Drought_P Parameter: Plant Line Value: WS
  misc_feature: MA Experiment 20000437 PARAMETER Experiment Name: At_Drought_P Parameter: Timepoint (hr) Value: 24
  misc_feature: MA Experiment 20000437 PARAMETER Experiment Name: At_Drought_P Parameter: Tissue Value: Whole Plant
  misc_feature: MA Experiment 20000437 PARAMETER Experiment Name: At_Drought_P Parameter: Treatment Value: Drought vs. No Drought
  misc_feature: MA Experiment ID: 20000441 Result: Down-regulated in Transcription
  misc_feature: MA Experiment 20000441 PARAMETER Experiment Name: At_1uM_BR-BRZ__P Parameter: Tissue Value: Shoot Apices
  misc_feature: MA Experiment 20000441 PARAMETER Experiment Name: At_1uM_BR-BRZ__P Parameter: Treatment Value: 1uM BR vs. No Treatment
  misc_feature: MA Experiment ID: 20000451 Result: Down-regulated in Transcription
  misc_feature: MA Experiment 20000451 PARAMETER Experiment Name: At_CS6879_Shoots-Roots_P Parameter: Age (day) Value: 14
  misc_feature: MA Experiment 20000451 PARAMETER Experiment Name: At_CS6879_Shoots-Roots_P Parameter: Organism Value: A. thaliana
  misc_feature: MA Experiment 20000451 PARAMETER Experiment Name: At_CS6879_Shoots-Roots_P Parameter: Plant Line Value: CS6879 vs. WS
  misc_feature: MA Experiment 20000451 PARAMETER Experiment Name: At_CS6879_Shoots-Roots_P Parameter: Tissue Value: Roots
  misc_feature: MA Experiment ID: 20000452 Result: Up-regulated in Transcription
  misc_feature: MA Experiment 20000452 PARAMETER Experiment Name: At_CS6879_Shoots-Roots_P Parameter: Age (day) Value: 14
  misc_feature: MA Experiment 20000452 PARAMETER Experiment Name: At_CS6879_Shoots-Roots_P Parameter: Organism Value: A. thaliana
  misc_feature: MA Experiment 20000452 PARAMETER Experiment Name: At_CS6879_Shoots-Roots_P Parameter: Plant Line Value: CS6879 vs. WS
  misc_feature: MA Experiment 20000452 PARAMETER Experiment Name: At_CS6879_Shoots-Roots_P Parameter: Tissue Value: Shoots
  misc_feature: MA Experiment ID: 20000453 Result: Up-regulated in Transcription
  misc_feature: MA Experiment 20000453 PARAMETER Experiment Name: At_100uM_ABA_P Parameter: Age (day) Value: 15
  misc_feature: MA Experiment 20000453 PARAMETER Experiment Name: At_100uM_ABA_P Parameter: Organism Value: A. thaliana
  misc_feature: MA Experiment 20000453 PARAMETER Experiment Name: At_100uM_ABA_P Parameter: Plant Line Value: WS
  misc_feature: MA Experiment 20000453 PARAMETER Experiment Name: At_100uM_ABA_P Parameter: Timepoint (hr) Value: 24
  misc_feature: MA Experiment 20000453 PARAMETER Experiment Name: At_100uM_ABA_P Parameter: Tissue Value: Aerial
  misc_feature: MA Experiment 20000453 PARAMETER Experiment Name: At_100uM_ABA_P Parameter: Treatment Value: 100uM ABA vs. No Treatment
  misc_feature: MA Experiment ID: 20000573 Result: Down-regulated in Transcription
  misc_feature: MA Experiment 20000573 PARAMETER Experiment Name: At_100uM_ABA_Mutants__P Parameter: Organism Value: A. thaliana
  misc_feature: MA Experiment 20000573 PARAMETER Experiment Name: At_100uM_ABA_Mutants__P Parameter: Plant Line Value: CS22 vs. Ler wt
  misc_feature: MA Experiment 20000573 PARAMETER Experiment Name: At_100uM_ABA_Mutants__P Parameter: Timepoint (hr) Value: N/A
  misc_feature: MA Experiment 20000573 PARAMETER Experiment Name: At_100uM_ABA_Mutants__P Parameter: Tissue Value: Whole Plant
  misc_feature: MA Experiment 20000573 PARAMETER Experiment Name: At_100uM_ABA_Mutants__P Parameter: Treatment Value: None
  misc_feature: MA Experiment ID: 20000574 Result: Down-regulated in Transcription
  misc_feature: MA Experiment 20000574 PARAMETER Experiment Name: At_100uM_ABA_Mutants__P Parameter: Organism Value: A. thaliana
  misc_feature: MA Experiment 20000574 PARAMETER Experiment Name: At_100uM_ABA_Mutants__P Parameter: Plant Line Value: CS23 vs. Ler wt
  misc_feature: MA Experiment 20000574 PARAMETER Experiment Name: At_100uM_ABA_Mutants__P Parameter: Timepoint (hr) Value: N/A
  misc_feature: MA Experiment 20000574 PARAMETER Experiment Name: At_100uM_ABA_Mutants__P Parameter: Tissue Value: Whole Plant
  misc_feature: MA Experiment 20000574 PARAMETER Experiment Name: At_100uM_ABA_Mutants__P Parameter: Treatment Value: None
  misc_feature: MA Experiment ID: 20001248 Result: Down-regulated in Transcription
  misc_feature: MA Experiment 20001248 PARAMETER Experiment Name: At_Far-red-induction_P Parameter: Age (day) Value: 7
  misc_feature: MA Experiment 20001248 PARAMETER Experiment Name: At_Far-red-induction_P Parameter: Light Value: Far-red vs. White
  misc_feature: MA Experiment 20001248 PARAMETER Experiment Name: At_Far-red-induction_P Parameter: Organism Value: A. thaliana
  misc_feature: MA Experiment 20001248 PARAMETER Experiment Name: At_Far-red-induction_P Parameter: Plant Line Value: Columbia
  misc_feature: MA Experiment 20001248 PARAMETER Experiment Name: At_Far-red-induction_P Parameter: Timepoint (hr) Value: 4
  misc_feature: MA Experiment 20001248 PARAMETER Experiment Name: At_Far-red-induction_P Parameter: Tissue Value: Whole Plant
  misc_feature: MA Experiment ID: 20001554 Result: Up-regulated in Transcription
  misc_feature: MA Experiment 20001554 PARAMETER Experiment Name: At_Drought_Soil_Dry_P Parameter: Age (day) Value: 21
  misc_feature: MA Experiment 20001554 PARAMETER Experiment Name: At_Drought_Soil_Dry_P Parameter: Organism Value: A. thaliana
  misc_feature: MA Experiment 20001554 PARAMETER Experiment Name: At_Drought_Soil_Dry_P Parameter: Plant Line Value: WS
  misc_feature: MA Experiment 20001554 PARAMETER Experiment Name: At_Drought_Soil_Dry_P Parameter: Post Timepoint (hr) Value: None
  misc_feature: MA Experiment 20001554 PARAMETER Experiment Name: At_Drought_Soil_Dry_P Parameter: Post-Treatment Value: None
  misc_feature: MA Experiment 20001554 PARAMETER Experiment Name: At_Drought_Soil_Dry_P Parameter: Timepoint (day) Value: 7
  misc_feature: MA Experiment 20001554 PARAMETER Experiment Name: At_Drought_Soil_Dry_P Parameter: Treatment Value: Drought vs. No Drought
  misc_feature: MA Experiment ID: 20001555 Result: Up-regulated in Transcription
  misc_feature: MA Experiment 20001555 PARAMETER Experiment Name: At_Drought_Soil_Dry_P Parameter: Age (day) Value: 24
  misc_feature: MA Experiment 20001555 PARAMETER Experiment Name: At_Drought_Soil_Dry_P Parameter: Organism Value: A. thaliana
  misc_feature: MA Experiment 20001555 PARAMETER Experiment Name: At_Drought_Soil_Dry_P Parameter: Plant Line Value: WS
  misc_feature: MA Experiment 20001555 PARAMETER Experiment Name: At_Drought_Soil_Dry_P Parameter: Post Timepoint (hr) Value: None
  misc_feature: MA Experiment 20001555 PARAMETER Experiment Name: At_Drought_Soil_Dry_P Parameter: Post-Treatment Value: None
  misc_feature: MA Experiment 20001555 PARAMETER Experiment Name: At_Drought_Soil_Dry_P Parameter: Timepoint (day) Value: 10
  misc_feature: MA Experiment 20001555 PARAMETER Experiment Name: At_Drought_Soil_Dry_P Parameter: Treatment Value: Drought vs. No Drought
  misc_feature: MA Experiment ID: 20001556 Result: Up-regulated in Transcription
  misc_feature: MA Experiment 20001556 PARAMETER Experiment Name: At_Drought_Soil_Dry_P Parameter: Age (day) Value: 26
  misc_feature: MA Experiment 20001556 PARAMETER Experiment Name: At_Drought_Soil_Dry_P Parameter: Organism Value: A. thaliana
  misc_feature: MA Experiment 20001556 PARAMETER Experiment Name: At_Drought_Soil_Dry_P Parameter: Plant Line Value: WS
  misc_feature: MA Experiment 20001556 PARAMETER Experiment Name: At_Drought_Soil_Dry_P Parameter: Post Timepoint (hr) Value: None
  misc_feature: MA Experiment 20001556 PARAMETER Experiment Name: At_Drought_Soil_Dry_P Parameter: Post-Treatment Value: None
  misc_feature: MA Experiment 20001556 PARAMETER Experiment Name: At_Drought_Soil_Dry_P Parameter: Timepoint (day) Value: 12
  misc_feature: MA Experiment 20001556 PARAMETER Experiment Name: At_Drought_Soil_Dry_P Parameter: Treatment Value: Drought vs. No Drought
  misc_feature: MA Experiment ID: 20001557 Result: Down-regulated in Transcription
  misc_feature: MA Experiment 20001557 PARAMETER Experiment Name: At_Drought_Soil_Dry_P Parameter: Age (day) Value: 27
  misc_feature: MA Experiment 20001557 PARAMETER Experiment Name: At_Drought_Soil_Dry_P Parameter: Organism Value: A. thaliana
  misc_feature: MA Experiment 20001557 PARAMETER Experiment Name: At_Drought_Soil_Dry_P Parameter: Plant Line Value: WS
  misc_feature: MA Experiment 20001557 PARAMETER Experiment Name: At_Drought_Soil_Dry_P Parameter: Post Timepoint (hr) Value: 3
  misc_feature: MA Experiment 20001557 PARAMETER Experiment Name: At_Drought_Soil_Dry_P Parameter: Post-Treatment Value: Re-Water vs. No Drought
  misc_feature: MA Experiment 20001557 PARAMETER Experiment Name: At_Drought_Soil_Dry_P Parameter: Timepoint (day) Value: 13
  misc_feature: MA Experiment 20001557 PARAMETER Experiment Name: At_Drought_Soil_Dry_P Parameter: Treatment Value: Drought vs. No Drought
  misc_feature: MA Experiment ID: 20001558 Result: Down-regulated in Transcription
  misc_feature: MA Experiment 20001558 PARAMETER Experiment Name: At_Drought_Soil_Dry_P Parameter: Age (day) Value: 27
  misc_feature: MA Experiment 20001558 PARAMETER Experiment Name: At_Drought_Soil_Dry_P Parameter: Organism Value: A. thaliana
  misc_feature: MA Experiment 20001558 PARAMETER Experiment Name: At_Drought_Soil_Dry_P Parameter: Plant Line Value: WS
  misc_feature: MA Experiment 20001558 PARAMETER Experiment Name: At_Drought_Soil_Dry_P Parameter: Post Timepoint (hr) Value: 6
  misc_feature: MA Experiment 20001558 PARAMETER Experiment Name: At_Drought_Soil_Dry_P Parameter: Post-Treatment Value: Re-Water vs. No Drought
  misc_feature: MA Experiment 20001558 PARAMETER Experiment Name: At_Drought_Soil_Dry_P Parameter: Timepoint (day) Value: 13
  misc_feature: MA Experiment 20001558 PARAMETER Experiment Name: At_Drought_Soil_Dry_P Parameter: Treatment Value: Drought vs. No Drought
  misc_feature: MA Experiment ID: 20001904 Result: Up-regulated in Transcription
  misc_feature: MA Experiment 20001904 PARAMETER Experiment Name: At_Drought_Reproduction_P Parameter: Age (day) Value: 37
  misc_feature: MA Experiment 20001904 PARAMETER Experiment Name: At_Drought_Reproduction_P Parameter: Organism Value: A. thaliana
  misc_feature: MA Experiment 20001904 PARAMETER Experiment Name: At_Drought_Reproduction_P Parameter: Plant Line Value: WS
  misc_feature: MA Experiment 20001904 PARAMETER Experiment Name: At_Drought_Reproduction_P Parameter: Timepoint (day) Value: 7
  misc_feature: MA Experiment 20001904 PARAMETER Experiment Name: At_Drought_Reproduction_P Parameter: Tissue Value: Rosettes
  misc_feature: MA Experiment 20001904 PARAMETER Experiment Name: At_Drought_Reproduction_P Parameter: Treatment Value: Drought vs. No Drought
  misc_feature: MA Experiment ID: 20001906 Result: Up-regulated in Transcription
  misc_feature: MA Experiment 20001906 PARAMETER Experiment Name: At_Drought_Reproduction_P Parameter: Age (day) Value: 35
  misc_feature: MA Experiment 20001906 PARAMETER Experiment Name: At_Drought_Reproduction_P Parameter: Organism Value: A. thaliana
  misc_feature: MA Experiment 20001906 PARAMETER Experiment Name: At_Drought_Reproduction_P Parameter: Plant Line Value: WS
  misc_feature: MA Experiment 20001906 PARAMETER Experiment Name: At_Drought_Reproduction_P Parameter: Timepoint (day) Value: 5
  misc_feature: MA Experiment 20001906 PARAMETER Experiment Name: At_Drought_Reproduction_P Parameter: Tissue Value: Siliques
  misc_feature: MA Experiment 20001906 PARAMETER Experiment Name: At_Drought_Reproduction_P Parameter: Treatment Value: Drought vs. No Drought
  misc_feature: MA Experiment ID: 20001907 Result: Up-regulated in Transcription
  misc_feature: MA Experiment 20001907 PARAMETER Experiment Name: At_Drought_Reproduction_P Parameter: Age (day) Value: 37
  misc_feature: MA Experiment 20001907 PARAMETER Experiment Name: At_Drought_Reproduction_P Parameter: Organism Value: A. thaliana
  misc_feature: MA Experiment 20001907 PARAMETER Experiment Name: At_Drought_Reproduction_P Parameter: Plant Line Value: WS
  misc_feature: MA Experiment 20001907 PARAMETER Experiment Name: At_Drought_Reproduction_P Parameter: Timepoint (day) Value: 7
  misc_feature: MA Experiment 20001907 PARAMETER Experiment Name: At_Drought_Reproduction_P Parameter: Tissue Value: Siliques
  misc_feature: MA Experiment 20001907 PARAMETER Experiment Name: At_Drought_Reproduction_P Parameter: Treatment Value: Drought vs. No Drought
  misc_feature: MA Experiment ID: 20001910 Result: Up-regulated in Transcription
  misc_feature: MA Experiment 20001910 PARAMETER Experiment Name: At_Drought_Reproduction_P Parameter: Age (day) Value: 37
  misc_feature: MA Experiment 20001910 PARAMETER Experiment Name: At_Drought_Reproduction_P Parameter: Organism Value: A. thaliana
  misc_feature: MA Experiment 20001910 PARAMETER Experiment Name: At_Drought_Reproduction_P Parameter: Plant Line Value: WS
  misc_feature: MA Experiment 20001910 PARAMETER Experiment Name: At_Drought_Reproduction_P Parameter: Timepoint (day) Value: 7
  misc_feature: MA Experiment 20001910 PARAMETER Experiment Name: At_Drought_Reproduction_P Parameter: Tissue Value: Flowers
  misc_feature: MA Experiment 20001910 PARAMETER Experiment Name: At_Drought_Reproduction_P Parameter: Treatment Value: Drought vs. No Drought
  misc_feature: MA Experiment ID: 20001911 Result: Up-regulated in Transcription
  misc_feature: MA Experiment 20001911 PARAMETER Experiment Name: At_Drought_Reproduction_P Parameter: Age (day) Value: 40
  misc_feature: MA Experiment 20001911 PARAMETER Experiment Name: At_Drought_Reproduction_P Parameter: Organism Value: A. thaliana
  misc_feature: MA Experiment 20001911 PARAMETER Experiment Name: At_Drought_Reproduction_P Parameter: Plant Line Value: WS
  misc_feature: MA Experiment 20001911 PARAMETER Experiment Name: At_Drought_Reproduction_P Parameter: Timepoint (day) Value: 10
  misc_feature: MA Experiment 20001911 PARAMETER Experiment Name: At_Drought_Reproduction_P Parameter: Tissue Value: Flowers
  misc_feature: MA Experiment 20001911 PARAMETER Experiment Name: At_Drought_Reproduction_P Parameter: Treatment Value: Drought vs. No Drought
gtctctattgtgcgccacgtagacttcaccgctacaattcatcatcatcatcatctcagtttctgaatctcaatctctctcgcttctccggtgctctcttcttccacatggagagtggaactggctcgagcggcaagagagggatggtggaaaatttgaagcggtacggtgtgatatcgtcgaaaagagtagctcaagttatggaggctttagatagaggtctctttgtaccagttggttcttcagcttatgttgatactcctgtacctataggttataatgctaccatttctgctccgcatatgcatgctacttgcttgcagctcttggaagataagctccaccccgggatgcgcgctttagatgtcggctcaggaaccgggtacttgactggctgttttgctttgatggttggagctgagggacgtgttgttggcgtggatcatatccctgaattggttgatatgtctatcaagaatatcgaaaagagtgttgctgcttcctttcttaagaaaggatctctctccttacatgttggggatggaagaaaaggttggcaagagtttgcaccgtatgatgcaatacacgtaggagcagcggcatcagaaatccctcagccccttttggatcagctaaaacccggtggacgaatggtgattccactaggaacctattttcaagagctcaaggtaatcgacaaaaacgaggatggttcaatcaaggtacataccgaaacttcagtccggtatgtgcccctcactagccgtgtcgaacagttaggaggattttgacaacaacaacaaagagaaaactctacatcccacgtcttagtgtacatataaaaggttgtgtaatgttttgtaatatgttttgatgggtaataaagaaaatatgtttac

SEQ ID NO: 107681 - protein, 262 aa, Arabidopsis thaliana
  peptide (1)..(262): Ceres Seq. ID no. 13651217
  misc_feature (42)..(257): Pfam Name: Protein-L-isoaspartate(D-aspartate) Pfam Description: Protein-L-isoaspartate(D-aspartate)
  misc_feature (36)..(262): Homolog of NCBI NO: 26451260 NR Description: unknown protein [Arabidopsis thaliana]
  misc_feature (125)..(262): Homolog of NCBI NO: 15240639 NR Description: expressed protein [Arabidopsis thaliana]
  misc_feature (1)..(37): Homolog of NCBI NO: 15240639 NR Description: expressed protein [Arabidopsis thaliana]
  misc_feature (46)..(261): Homolog of NCBI NO: 1322021 NR Description: L-isoaspartyl methyltransferase
  misc_feature (46)..(261): Homolog of NCBI NO: 22331684 NR Description: protein-L-isoaspartate(D-aspartate) -related
  misc_feature (41)..(259): Homolog of NCBI NO: 38345249 NR Description: OSJNBb0011N17.10 [Oryza sativa (japonica
  misc_feature (41)..(259): Homolog of NCBI NO: 2499570 NR Description: PROTEIN-L-ISOASPARTATE O-METHYLTRANSFERASE
  misc_feature (34)..(258): Homolog of NCBI NO: 29436595 NR Description: protein-L-isoaspartate (D-aspartate)
  misc_feature (40)..(258): Homolog of NCBI NO: 417489 NR Description: PROTEIN-L-ISOASPARTATE(D-ASPARTATE)
  misc_feature (40)..(258): Homolog of NCBI NO: 2507187 NR Description: Protein-L-isoaspartate(D-aspartate)
LYCAPRRLHRYNSSSSSSQFLNLNLSRFSGALFFHMESGTGSSGKRGMVENLKRYGVISSKRVAQVMEALDRGLFVPVGSSAYVDTPVPIGYNATISAPHMHATCLQLLEDKLHPGMRALDVGSGTGYLTGCFALMVGAEGRVVGVDHIPELVDMSIKNIEKSVAASFLKKGSLSLHVGDGRKGWQEFAPYDAIHVGAAASEIPQPLLDQLKPGGRMVIPLGTYFQELKVIDKNEDGSIKVHTETSVRYVPLTSRVEQLGGF

SEQ ID NO: 107682 - protein, 227 aa, Arabidopsis thaliana
  peptide (1)..(227): Ceres Seq. ID no. 13651218
  misc_feature (7)..(222): Pfam Name: Protein-L-isoaspartate(D-aspartate) Pfam Description: Protein-L-isoaspartate(D-aspartate)
  misc_feature (1)..(227): Homolog of NCBI NO: 26451260 NR Description: unknown protein [Arabidopsis thaliana]
  misc_feature (90)..(227): Homolog of NCBI NO: 15240639 NR Description: expressed protein [Arabidopsis thaliana]
  misc_feature (11)..(226): Homolog of NCBI NO: 1322021 NR Description: L-isoaspartyl methyltransferase
  misc_feature (11)..(226): Homolog of NCBI NO: 22331684 NR Description: protein-L-isoaspartate(D-aspartate) -related
  misc_feature (6)..(224): Homolog of NCBI NO: 38345249 NR Description: OSJNBb0011N17.10 [Oryza sativa (japonica
  misc_feature (6)..(224): Homolog of NCBI NO: 2499570 NR Description: PROTEIN-L-ISOASPARTATE O-METHYLTRANSFERASE
  misc_feature (1)..(223): Homolog of NCBI NO: 29436595 NR Description: protein-L-isoaspartate (D-aspartate)
  misc_feature (5)..(223): Homolog of NCBI NO: 417489 NR Description: PROTEIN-L-ISOASPARTATE(D-ASPARTATE)
  misc_feature (5)..(223): Homolog of NCBI NO: 2507187 NR Description: Protein-L-isoaspartate(D-aspartate)
  misc_feature (5)..(223): Homolog of NCBI NO: 4885539 NR Description: protein-L-isoaspartate (D-aspartate) [Homo sapiens] >gi|1332399|dbj|BAA05028.1| PIMT isozyme I [Homo
MESGTGSSGKRGMVENLKRYGVISSKRVAQVMEALDRGLFVPVGSSAYVDTPVPIGYNATISAPHMHATCLQLLEDKLHPGMRALDVGSGTGYLTGCFALMVGAEGRVVGVDHIPELVDMSIKNIEKSVAASFLKKGSLSLHVGDGRKGWQEFAPYDAIHVGAAASEIPQPLLDQLKPGGRMVIPLGTYFQELKVIDKNEDGSIKVHTETSVRYVPLTSRVEQLGGF

SEQ ID NO: 107683 - protein, 215 aa, Arabidopsis thaliana; identical to SEQ ID NO: 70145
  peptide (1)..(215): Ceres Seq. ID no. 13651219
  misc_feature (1)..(210): Pfam Name: Protein-L-isoaspartate(D-aspartate) Pfam Description: Protein-L-isoaspartate(D-aspartate)
  misc_feature (1)..(215): Homolog of NCBI NO: 26451260 NR Description: unknown protein [Arabidopsis thaliana]
  misc_feature (78)..(215): Homolog of NCBI NO: 15240639 NR Description: expressed protein [Arabidopsis thaliana]
  misc_feature (1)..(214): Homolog of NCBI NO: 1322021 NR Description: L-isoaspartyl methyltransferase
  misc_feature (1)..(214): Homolog of NCBI NO: 22331684 NR Description: protein-L-isoaspartate(D-aspartate) -related
  misc_feature (1)..(212): Homolog of NCBI NO: 38345249 NR Description: OSJNBb0011N17.10 [Oryza sativa (japonica
  misc_feature (1)..(212): Homolog of NCBI NO: 2499570 NR Description: PROTEIN-L-ISOASPARTATE O-METHYLTRANSFERASE
  misc_feature (1)..(211): Homolog of NCBI NO: 29436595 NR Description: protein-L-isoaspartate (D-aspartate)
  misc_feature (1)..(211): Homolog of NCBI NO: 417489 NR Description: PROTEIN-L-ISOASPARTATE(D-ASPARTATE)
  misc_feature (1)..(211): Homolog of NCBI NO: 2507187 NR Description: Protein-L-isoaspartate(D-aspartate)
  misc_feature (1)..(211): Homolog of NCBI NO: 4885539 NR Description: protein-L-isoaspartate (D-aspartate) [Homo sapiens] >gi|1332399|dbj|BAA05028.1| PIMT isozyme I [Homo

SEQ ID NO: 107684 - DNA, 2428 bp, Arabidopsis thaliana
  misc_feature (1)..(2428): Ceres Seq. ID no. 13651220
  misc_feature: MA Experiment ID: 20000227 Result: Up-regulated in Transcription
  misc_feature: MA Experiment 20000227 PARAMETER Experiment Name: At_Root-Tips-vs-Tops_P Parameter: Tissue Value: Root Tips vs. Root Tops
  misc_feature: MA Experiment ID: 20000234 Result: Up-regulated in Transcription
  misc_feature: MA Experiment 20000234 PARAMETER Experiment Name: At_Siliques_P Parameter: Age (day) Value: 21
  misc_feature: MA Experiment 20000234 PARAMETER Experiment Name: At_Siliques_P Parameter: Organism Value: A. thaliana
  misc_feature: MA Experiment 20000234 PARAMETER Experiment Name: At_Siliques_P Parameter: Plant Line Value: WS
  misc_feature: MA Experiment 20000234 PARAMETER Experiment Name: At_Siliques_P Parameter: Tissue Value: Less Than 5mm Siliques vs. Whole Plant
  misc_feature: MA Experiment ID: 20000235 Result: Up-regulated in Transcription
  misc_feature: MA Experiment 20000235 PARAMETER Experiment Name: At_Siliques_P Parameter: Age (day) Value: 21
  misc_feature: MA Experiment 20000235 PARAMETER Experiment Name: At_Siliques_P Parameter: Organism Value: A. thaliana
  misc_feature: MA Experiment 20000235 PARAMETER Experiment Name: At_Siliques_P Parameter: Plant Line Value: WS
  misc_feature: MA Experiment 20000235 PARAMETER Experiment Name: At_Siliques_P Parameter: Tissue Value: 5-10mm Siliques vs. Whole Plant
  misc_feature: MA Experiment ID: 20000264 Result: Up-regulated in Transcription
  misc_feature: MA Experiment 20000264 PARAMETER Experiment Name: At_Open_Flower_P Parameter: Age (day) Value: 21
  misc_feature: MA Experiment 20000264 PARAMETER Experiment Name: At_Open_Flower_P Parameter: Plant Line Value: WS
  misc_feature: MA Experiment 20000264 PARAMETER Experiment Name: At_Open_Flower_P Parameter: Tissue Value: Open Flower vs. Whole Plant
  misc_feature: MA Experiment ID: 20000265 Result: Up-regulated in Transcription
  misc_feature: MA Experiment 20000265 PARAMETER Experiment Name: At_Open_Flower_P Parameter: Age (day) Value: 21
  misc_feature: MA Experiment 20000265 PARAMETER Experiment Name: At_Open_Flower_P Parameter: Plant Line Value: WS
  misc_feature: MA Experiment 20000265 PARAMETER Experiment Name: At_Open_Flower_P Parameter: Tissue Value: Closed Flower vs. Whole Plant
  misc_feature: MA Experiment ID: 20000286 Result: Up-regulated in Transcription
  misc_feature: MA Experiment 20000286 PARAMETER Experiment Name: At_Open_Flower_P Parameter: Age (day) Value: 21
  misc_feature: MA Experiment 20000286 PARAMETER Experiment Name: At_Open_Flower_P Parameter: Plant Line Value: WS
  misc_feature: MA Experiment 20000286 PARAMETER Experiment Name: At_Open_Flower_P Parameter: Tissue Value: Half Open vs. Whole Plant
  misc_feature: MA Experiment ID: 20000439 Result: Down-regulated in Transcription
  misc_feature: MA Experiment 20000439 PARAMETER Experiment Name: At_Roots__P Parameter: Age (day) Value: 14 vs. 21
  misc_feature: MA Experiment 20000439 PARAMETER Experiment Name: At_Roots__P Parameter: Organism Value: A. thaliana
  misc_feature: MA Experiment 20000439 PARAMETER Experiment Name: At_Roots__P Parameter: Tissue Value: Roots vs. Whole Plant
  misc_feature: MA Experiment ID: 20000573 Result: Down-regulated in Transcription
  misc_feature: MA Experiment 20000573 PARAMETER Experiment Name: At_100uM_ABA_Mutants__P Parameter: Organism Value: A. thaliana
  misc_feature: MA Experiment 20000573 PARAMETER Experiment Name: At_100uM_ABA_Mutants__P Parameter: Plant Line Value: CS22 vs. Ler wt
  misc_feature: MA Experiment 20000573 PARAMETER Experiment Name: At_100uM_ABA_Mutants__P Parameter: Timepoint (hr) Value: N/A
  misc_feature: MA Experiment 20000573 PARAMETER Experiment Name: At_100uM_ABA_Mutants__P Parameter: Tissue Value: Whole Plant
  misc_feature: MA Experiment 20000573 PARAMETER Experiment Name: At_100uM_ABA_Mutants__P Parameter: Treatment Value: None
  misc_feature: MA Experiment ID: 20001248 Result: Down-regulated in Transcription
  misc_feature: MA Experiment 20001248 PARAMETER Experiment Name: At_Far-red-induction_P Parameter: Age (day) Value: 7
  misc_feature: MA Experiment 20001248 PARAMETER Experiment Name: At_Far-red-induction_P Parameter: Light Value: Far-red vs. White
  misc_feature: MA Experiment 20001248 PARAMETER Experiment Name: At_Far-red-induction_P Parameter: Organism Value: A. thaliana
  misc_feature: MA Experiment 20001248 PARAMETER Experiment Name: At_Far-red-induction_P Parameter: Plant Line Value: Columbia
  misc_feature: MA Experiment 20001248 PARAMETER Experiment Name: At_Far-red-induction_P Parameter: Timepoint (hr) Value: 4
  misc_feature: MA Experiment 20001248 PARAMETER Experiment Name: At_Far-red-induction_P Parameter: Tissue Value: Whole Plant
aaaataaaagcttataattaaagaaccataaagacgaacacaaaagaaactctcacattctcaagagtttctttcttctttcaatggctttactaactttcttgccggagaacgcagaggcgccacaaaaacacaagccaacgtctagcaaacgaaagaaacgcgataatcccaccgaccaaacgcagacacagaaacataaaccgcagaaaccgaagaaagcagtacctccgaagcagccatcttcatgggaccaaatcaagaacctattgacttgcaaacaaatcgaagggtcaagagtccatgatccttccaagaactctcaatctggtccgtccatgacaactaacttatctccttccaagcttggctcgtcgtgcagctccatttgcagctttagagacgtggctcacggcaacactcgtgtggttcatagagctgatcactcaccagacgtaggtaactcggctactcctaactcggagactcggcttctgactcggaaacctggtcaacacggttcttcttcgtctcggtctcttacatctggctcaacgagatctaacgccagtgggagttacacgtcatcgtcaacgacttcgtttagagccatgcagttccgtaaactctccggatgttacgaatgtcacatgatcgttgacccgagcaggtatccgatttcgcctagggtttgtgcttgttcccaatgtggagaagttttccccaagcttgaaagcttagagcttcatcaagcagttcgtcacgcaggtaaggctttttttttccttttaacaaaaattgtttgactttatcacttacctcaaattaattaattacgctttagctacaattttttattttttggtgtgtggtagtcacatttttaaatttaaccctaagtatctagtgagattttcgtaaatgcgaatggcttggcaaagtaagattatgttttgtatccttggaaaaaaacttaagatctcagtccatgatttgacttgtgaatgatgatacaacctttgtttgtttagtattgattgaataattagcattaacacatgttttccggcgtataggcccttggatttatcgatagatttaccataatgctaagcaaataattaacgaacatgctttcattaatatatatcttagacttcgttgtttcttaatggaatcaagatctcagtgttattgtcggtgattatatcgatcaaataagttaggatgatttggccgtatgttacagattgtttttggaatagagattcatacgtatttttagagaaagatacaaaagagaataggaatataactggagaacaagatatattctatggtctccaaatccgtcgttttgcttggaaacacttaccatgcgatgggaccattgtactataaaaagaaacagctgtctctgctcttaactaaattcaatgtccccctgaaatattacgtgtcatttttcaattcgacagtatcagaattaaaacccctcacctgacaaaaaccgaattatagaactgtctttaatgtcccaaaaactcagatttttgttttgacttgcatatttttcctgattttatgagcaaaaacgttgtcgtttaattgcagtttcggagttaggtccggaggattcgggtcgaaacatagtggagatcatattcaaatcaagctggcttaaaaaagacagtcccatctgtcagatcgaacggatattaaaagtccacaacactcaacgtacgatccaacggtttgaggattgccgagacgcagtgaaggcgcgtgcacttcaagcaaccagaaaagatgctcgttgtgccgccgacggcaacgagctcttacgttttcactgcaccactctcacttgttcactcggagctcgtggctcttcttctctctgctctaacctccctgtttgtggcgtctgcaccgtgattcgccacggtttccaaggaaaatctggtggcggaggagccaacgtcgcaaacgccggtgtgaggacgacggcgagcagcggaagagctgatgatttgctgaggtgtagcgatgatgcgaggagagtgatgcttgtgtgccgtgtgatcgctgggagagttaagcgagttgatttaccggcggcggatgcttcggctacagcggagaagaagtcaacggtggaggataactcggtggttggagtttcttcgagtggtggtacgtttgactcggtggcggtcaatgctggagtttattcgaatcttgaggagcttgtggtttataacccgagagctatattaccttgcttcgtggttatttacaaagttttagaatcttgaatttgtaattttaacttgagaaataatgtttgttttttgtacttctaactttttaatattatagggagagattagggataatcatcaacctgcatcataattcccatctt

SEQ ID NO: 107685 - protein, 240 aa, Arabidopsis thaliana
  peptide (1)..(240): Ceres Seq. ID no. 13651221
  misc_feature (204)..(227): Pfam Name: Zinc finger, C2H2 type Pfam Description: Zinc finger, C2H2 type
  misc_feature (1)..(228): Homolog of NCBI NO: 15222333 NR Description: expressed protein [Arabidopsis thaliana]
  misc_feature (1)..(240): Homolog of NCBI NO: 26451258 NR Description: unknown protein [Arabidopsis thaliana]
  misc_feature (38)..(228): Homolog of NCBI NO: 9802582 NR Description: T2E6.3 [Arabidopsis thaliana]
  misc_feature (38)..(228): Homolog of NCBI NO: 15220992 NR Description: reverse transcriptase-related [Arabidopsis
  misc_feature (1)..(160): Homolog of NCBI NO: 9802582 NR Description: T2E6.3 [Arabidopsis thaliana]
  misc_feature (1)..(160): Homolog of NCBI NO: 15220992 NR Description: reverse transcriptase-related [Arabidopsis
  misc_feature (128)..(228): Homolog of NCBI NO: 5777616 NR Description: CAA30374.1 protein [Oryza sativa]
  misc_feature (128)..(228): Homolog of NCBI NO: 38345520 NR Description: OSJNBa0039K24.23 [Oryza sativa (japonica
  misc_feature (153)..(230): Homolog of NCBI NO: 38346001 NR Description: OSJNBa0073L13.11 [Oryza sativa (japonica
  misc_feature (200)..(228): Homolog of NCBI NO: 18402112 NR Description: expressed protein [Arabidopsis thaliana]
MALLTFLPENAEAPQKHKPTSSKRKKRDNPTDQTQTQKHKPQKPKKAVPPKQPSSWDQIKNLLTCKQIEGSRVHDPSKNSQSGPSMTTNLSPSKLGSSCSSICSFRDVAHGNTRVVHRADHSPDVGNSATPNSETRLLTRKPGQHGSSSSRSLTSGSTRSNASGSYTSSSTTSFRAMQFRKLSGCYECHMIVDPSRYPISPRVCACSQCGEVFPKLESLELHQAVRHAGKAFFFLLTKIV

SEQ ID NO: 107686 - protein, 155 aa, Arabidopsis thaliana
  peptide (1)..(155): Ceres Seq. ID no. 13651222
  misc_feature (119)..(142): Pfam Name: Zinc finger, C2H2 type Pfam Description: Zinc finger, C2H2 type
  misc_feature (1)..(143): Homolog of NCBI NO: 15222333 NR Description: expressed protein [Arabidopsis thaliana]
  misc_feature (1)..(155): Homolog of NCBI NO: 26451258 NR Description: unknown protein [Arabidopsis thaliana]
  misc_feature (1)..(143): Homolog of NCBI NO: 9802582 NR Description: T2E6.3 [Arabidopsis thaliana]
  misc_feature (1)..(143): Homolog of NCBI NO: 15220992 NR Description: reverse transcriptase-related [Arabidopsis
  misc_feature (1)..(75): Homolog of NCBI NO: 9802582 NR Description: T2E6.3 [Arabidopsis thaliana]
  misc_feature (1)..(75): Homolog of NCBI NO: 15220992 NR Description: reverse transcriptase-related [Arabidopsis
  misc_feature (43)..(143): Homolog of NCBI NO: 5777616 NR Description: CAA30374.1 protein [Oryza sativa]
  misc_feature (43)..(143): Homolog of NCBI NO: 38345520 NR Description: OSJNBa0039K24.23 [Oryza sativa (japonica
  misc_feature (68)..(145): Homolog of NCBI NO: 38346001 NR Description: OSJNBa0073L13.11 [Oryza sativa (japonica
  misc_feature (115)..(143): Homolog of NCBI NO: 18402112 NR Description: expressed protein [Arabidopsis thaliana]
MTTNLSPSKLGSSCSSICSFRDVAHGNTRVVHRADHSPDVGNSATPNSETRLLTRKPGQHGSSSSRSLTSGSTRSNASGSYTSSSTTSFRAMQFRKLSGCYECHMIVDPSRYPISPRVCACSQCGEVFPKLESLELHQAVRHAGKAFFFLLTKIV

SEQ ID NO: 107687 - DNA, 1117 bp, Arabidopsis thaliana
  misc_feature (1)..(1117): Ceres Seq. ID no. 13651223
  misc_feature: MA Experiment ID: 20000179 Result: Up-regulated in Transcription
  misc_feature: MA Experiment 20000179 PARAMETER Experiment Name: At_Germinating_Seeds_P Parameter: Age (hr) Value: 6 vs. 0
  misc_feature: MA Experiment 20000179 PARAMETER Experiment Name: At_Germinating_Seeds_P Parameter: Tissue Value: Germinating Seeds
  misc_feature: MA Experiment ID: 20000182 Result: Down-regulated in Transcription
  misc_feature: MA Experiment 20000182 PARAMETER Experiment Name: At_2mM_SA_P Parameter: Age (day) Value: 14
  misc_feature: MA Experiment 20000182 PARAMETER Experiment Name: At_2mM_SA_P Parameter: Organism Value: A. thaliana
  misc_feature: MA Experiment 20000182 PARAMETER Experiment Name: At_2mM_SA_P Parameter: Plant Line Value: WS
  misc_feature: MA Experiment 20000182 PARAMETER Experiment Name: At_2mM_SA_P Parameter: Timepoint (hr) Value: 6
  misc_feature: MA Experiment 20000182 PARAMETER Experiment Name: At_2mM_SA_P Parameter: Tissue Value: Aerial
  misc_feature: MA Experiment 20000182 PARAMETER Experiment Name: At_2mM_SA_P Parameter: Treatment Value: 2mM SA vs. No Treatment
  misc_feature: MA Experiment ID: 20000185 Result: Up-regulated in Transcription
  misc_feature: MA Experiment 20000185 PARAMETER Experiment Name: At_Roots__P Parameter: Age (day) Value: 7 vs. 21
  misc_feature: MA Experiment 20000185 PARAMETER Experiment Name: At_Roots__P Parameter: Organism Value: A. thaliana
  misc_feature: MA Experiment 20000185 PARAMETER Experiment Name: At_Roots__P Parameter: Tissue Value: Roots vs. Whole Plant
  misc_feature: MA Experiment ID: 20000234 Result: Up-regulated in Transcription
  misc_feature: MA Experiment 20000234 PARAMETER Experiment Name: At_Siliques_P Parameter: Age (day) Value: 21
  misc_feature: MA Experiment 20000234 PARAMETER Experiment Name: At_Siliques_P Parameter: Organism Value: A. thaliana
  misc_feature: MA Experiment 20000234 PARAMETER Experiment Name: At_Siliques_P Parameter: Plant Line Value: WS
  misc_feature: MA Experiment 20000234 PARAMETER Experiment Name: At_Siliques_P Parameter: Tissue Value: Less Than 5mm Siliques vs. Whole Plant
  misc_feature: MA Experiment ID: 20000235 Result: Up-regulated in Transcription
  misc_feature: MA Experiment 20000235 PARAMETER Experiment Name: At_Siliques_P Parameter: Age (day) Value: 21
  misc_feature: MA Experiment 20000235 PARAMETER Experiment Name: At_Siliques_P Parameter: Organism Value: A. thaliana
  misc_feature: MA Experiment 20000235 PARAMETER Experiment Name: At_Siliques_P Parameter: Plant Line Value: WS
  misc_feature: MA Experiment 20000235 PARAMETER Experiment Name: At_Siliques_P Parameter: Tissue Value: 5-10mm Siliques vs. Whole Plant
  misc_feature: MA Experiment ID: 20000439 Result: Up-regulated in Transcription
  misc_feature: MA Experiment 20000439 PARAMETER Experiment Name: At_Roots__P Parameter: Age (day) Value: 14 vs. 21
  misc_feature: MA Experiment 20000439 PARAMETER Experiment Name: At_Roots__P Parameter: Organism Value: A. thaliana
  misc_feature: MA Experiment 20000439 PARAMETER Experiment Name: At_Roots__P Parameter: Tissue Value: Roots vs. Whole Plant
  misc_feature: MA Experiment ID: 20000443 Result: Down-regulated in Transcription
  misc_feature: MA Experiment 20000443 PARAMETER Experiment Name: At_1uM_BR-BRZ__P Parameter: Tissue Value: Shoot Apices
  misc_feature: MA Experiment 20000443 PARAMETER Experiment Name: At_1uM_BR-BRZ__P Parameter: Treatment Value: 1uM BRZ vs. No Treatment
  misc_feature: MA Experiment ID: 20000451 Result: Up-regulated in Transcription
  misc_feature: MA Experiment 20000451 PARAMETER Experiment Name: At_CS6879_Shoots-Roots_P Parameter: Age (day) Value: 14
  misc_feature: MA Experiment 20000451 PARAMETER Experiment Name: At_CS6879_Shoots-Roots_P Parameter: Organism Value: A. thaliana
  misc_feature: MA Experiment 20000451 PARAMETER Experiment Name: At_CS6879_Shoots-Roots_P Parameter: Plant Line Value: CS6879 vs. WS
  misc_feature: MA Experiment 20000451 PARAMETER Experiment Name: At_CS6879_Shoots-Roots_P Parameter: Tissue Value: Roots
  misc_feature: MA Experiment ID: 20000453 Result: Up-regulated in Transcription
  misc_feature: MA Experiment 20000453 PARAMETER Experiment Name: At_100uM_ABA_P Parameter: Age (day) Value: 15
  misc_feature: MA Experiment 20000453 PARAMETER Experiment Name: At_100uM_ABA_P Parameter: Organism Value: A. thaliana
  misc_feature: MA Experiment 20000453 PARAMETER Experiment Name: At_100uM_ABA_P Parameter: Plant Line Value: WS
  misc_feature: MA Experiment 20000453 PARAMETER Experiment Name: At_100uM_ABA_P Parameter: Timepoint (hr) Value: 24
  misc_feature: MA Experiment 20000453 PARAMETER Experiment Name: At_100uM_ABA_P Parameter: Tissue Value: Aerial
  misc_feature: MA Experiment 20000453 PARAMETER Experiment Name: At_100uM_ABA_P Parameter: Treatment Value: 100uM ABA vs. No Treatment
  misc_feature: MA Experiment ID: 20000460 Result: Down-regulated in Transcription
  misc_feature: MA Experiment 20000460 PARAMETER Experiment Name: At_10percent_PEG_P Parameter: Age (day) Value: 12
  misc_feature: MA Experiment 20000460 PARAMETER Experiment Name: At_10percent_PEG_P Parameter: Organism Value: A. thaliana
  misc_feature: MA Experiment 20000460 PARAMETER Experiment Name: At_10percent_PEG_P Parameter: Plant Line Value: WS
  misc_feature: MA Experiment 20000460 PARAMETER Experiment Name: At_10percent_PEG_P Parameter: Timepoint (day) Value: 12
  misc_feature: MA Experiment 20000460 PARAMETER Experiment Name: At_10percent_PEG_P Parameter: Tissue Value: Whole Plant
  misc_feature: MA Experiment 20000460 PARAMETER Experiment Name: At_10percent_PEG_P Parameter: Treatment Value: 10percent PEG vs. No Treatment
  misc_feature: MA Experiment ID: 20000527 Result: Down-regulated in Transcription
  misc_feature: MA Experiment 20000527 PARAMETER Experiment Name: At_10percent_PEG_P Parameter: Age (day) Value: 20
  misc_feature: MA Experiment 20000527 PARAMETER Experiment Name: At_10percent_PEG_P Parameter: Organism Value: A. thaliana
  misc_feature: MA Experiment 20000527 PARAMETER Experiment Name: At_10percent_PEG_P Parameter: Plant Line Value: WS
  misc_feature: MA Experiment 20000527 PARAMETER Experiment Name: At_10percent_PEG_P Parameter: Timepoint (day) Value: 20
  misc_feature: MA Experiment 20000527 PARAMETER Experiment Name: At_10percent_PEG_P Parameter: Tissue Value: Whole Plant
  misc_feature: MA Experiment 20000527 PARAMETER Experiment Name: At_10percent_PEG_P Parameter: Treatment Value: 10percent PEG vs. No Treatment
  misc_feature: MA Experiment ID: 20000573 Result: Down-regulated in Transcription
  misc_feature: MA Experiment 20000573 PARAMETER Experiment Name: At_100uM_ABA_Mutants__P Parameter: Organism Value: A. thaliana
  misc_feature: MA Experiment 20000573 PARAMETER Experiment Name: At_100uM_ABA_Mutants__P Parameter: Plant Line Value: CS22 vs. Ler wt
  misc_feature: MA Experiment 20000573 PARAMETER Experiment Name: At_100uM_ABA_Mutants__P Parameter: Timepoint (hr) Value: N/A
  misc_feature: MA Experiment 20000573 PARAMETER Experiment Name: At_100uM_ABA_Mutants__P Parameter: Tissue Value: Whole Plant
  misc_feature: MA Experiment 20000573 PARAMETER Experiment Name: At_100uM_ABA_Mutants__P Parameter: Treatment Value: None
  misc_feature: MA Experiment ID: 20000574 Result: Down-regulated in Transcription
  misc_feature: MA Experiment 20000574 PARAMETER Experiment Name: At_100uM_ABA_Mutants__P Parameter: Organism Value: A. thaliana
  misc_feature: MA Experiment 20000574 PARAMETER Experiment Name: At_100uM_ABA_Mutants__P Parameter: Plant Line Value: CS23 vs. Ler wt
  misc_feature: MA Experiment 20000574 PARAMETER Experiment Name: At_100uM_ABA_Mutants__P Parameter: Timepoint (hr) Value: N/A
  misc_feature: MA Experiment 20000574 PARAMETER Experiment Name: At_100uM_ABA_Mutants__P Parameter: Tissue Value: Whole Plant
  misc_feature: MA Experiment 20000574 PARAMETER Experiment Name: At_100uM_ABA_Mutants__P Parameter: Treatment Value: None
  misc_feature: MA Experiment ID: 20000606 Result: Up-regulated in Transcription
  misc_feature: MA Experiment 20000606 PARAMETER Experiment Name: At_CS8548_Mutant_P Parameter: Age (day) Value: 14
  misc_feature: MA Experiment 20000606 PARAMETER Experiment Name: At_CS8548_Mutant_P Parameter: Plant Line Value: CS8548 vs. wt
  misc_feature: MA Experiment 20000606 PARAMETER Experiment Name: At_CS8548_Mutant_P Parameter: Tissue Value: Whole Plant
  misc_feature: MA Experiment ID: 20001450 Result: Down-regulated in Transcription
  misc_feature: MA Experiment 20001450 PARAMETER Experiment Name: At_Far-red-induction_P Parameter: Age (day) Value: 7
  misc_feature: MA Experiment 20001450 PARAMETER Experiment Name: At_Far-red-induction_P Parameter: Light Value: Far-red vs. White
  misc_feature: MA Experiment 20001450 PARAMETER Experiment Name: At_Far-red-induction_P Parameter: Organism Value: A. thaliana
  misc_feature: MA Experiment 20001450 PARAMETER Experiment Name: At_Far-red-induction_P Parameter: Plant Line Value: Columbia
  misc_feature: MA Experiment 20001450 PARAMETER Experiment Name: At_Far-red-induction_P Parameter: Timepoint (hr) Value: 8
  misc_feature: MA Experiment 20001450 PARAMETER Experiment Name: At_Far-red-induction_P Parameter: Tissue Value: Whole Plant
  misc_feature: MA Experiment ID: 20001458 Result: Up-regulated in Transcription
  misc_feature: MA Experiment 20001458 PARAMETER Experiment Name: At_50mM_NH4NO3_L-to-H_P Parameter: Age (day) Value: Undefined
  misc_feature: MA Experiment 20001458 PARAMETER Experiment Name: At_50mM_NH4NO3_L-to-H_P Parameter: Organism Value: Undefined
  misc_feature: MA Experiment 20001458 PARAMETER Experiment Name: At_50mM_NH4NO3_L-to-H_P Parameter: Plant Line Value: Undefined
  misc_feature: MA Experiment 20001458 PARAMETER Experiment Name: At_50mM_NH4NO3_L-to-H_P Parameter: Timepoint (hr) Value: 2
  misc_feature: MA Experiment 20001458 PARAMETER Experiment Name: At_50mM_NH4NO3_L-to-H_P Parameter: Tissue Value: Siliques
  misc_feature: MA Experiment 20001458 PARAMETER Experiment Name: At_50mM_NH4NO3_L-to-H_P Parameter: Treatment Value: 50mM NH4NO3 vs. 100mM Manitol
  misc_feature: MA Experiment ID: 20001459 Result: Up-regulated in Transcription
  misc_feature: MA Experiment 20001459 PARAMETER Experiment Name: At_50mM_NH4NO3_L-to-H_P Parameter: Age (day) Value: Undefined
  misc_feature: MA Experiment 20001459 PARAMETER Experiment Name: At_50mM_NH4NO3_L-to-H_P Parameter: Organism Value: Undefined
  misc_feature: MA Experiment 20001459 PARAMETER Experiment Name: At_50mM_NH4NO3_L-to-H_P Parameter: Plant Line Value: Undefined
  misc_feature: MA Experiment 20001459 PARAMETER Experiment Name: At_50mM_NH4NO3_L-to-H_P Parameter: Timepoint (hr) Value: 4
  misc_feature: MA Experiment 20001459 PARAMETER Experiment Name: At_50mM_NH4NO3_L-to-H_P Parameter: Tissue Value: Siliques
  misc_feature: MA Experiment 20001459 PARAMETER Experiment Name: At_50mM_NH4NO3_L-to-H_P Parameter: Treatment Value: 50mM NH4NO3 vs. 100mM Manitol
  misc_feature: MA Experiment ID: 20001554 Result: Up-regulated in Transcription
  misc_feature: MA Experiment 20001554 PARAMETER Experiment Name: At_Drought_Soil_Dry_P Parameter: Age (day) Value: 21
  misc_feature: MA Experiment 20001554 PARAMETER Experiment Name: At_Drought_Soil_Dry_P Parameter: Organism Value: A. thaliana
  misc_feature: MA Experiment 20001554 PARAMETER Experiment Name: At_Drought_Soil_Dry_P Parameter: Plant Line Value: WS
  misc_feature: MA Experiment 20001554 PARAMETER Experiment Name: At_Drought_Soil_Dry_P Parameter: Post Timepoint (hr) Value: None
  misc_feature: MA Experiment 20001554 PARAMETER Experiment Name: At_Drought_Soil_Dry_P Parameter: Post-Treatment Value: None
  misc_feature: MA Experiment 20001554 PARAMETER Experiment Name: At_Drought_Soil_Dry_P Parameter: Timepoint (day) Value: 7
  misc_feature: MA Experiment 20001554 PARAMETER Experiment Name: At_Drought_Soil_Dry_P Parameter: Treatment Value: Drought vs. No Drought
  misc_feature: MA Experiment ID: 20001555 Result: Up-regulated in Transcription
  misc_feature: MA Experiment 20001555 PARAMETER Experiment Name: At_Drought_Soil_Dry_P Parameter: Age (day) Value: 24
  misc_feature: MA Experiment 20001555 PARAMETER Experiment Name: At_Drought_Soil_Dry_P Parameter: Organism Value: A. thaliana
  misc_feature: MA Experiment 20001555 PARAMETER Experiment Name: At_Drought_Soil_Dry_P Parameter: Plant Line Value: WS
  misc_feature: MA Experiment 20001555 PARAMETER Experiment Name: At_Drought_Soil_Dry_P Parameter: Post Timepoint (hr) Value: None
  misc_feature: MA Experiment 20001555 PARAMETER Experiment Name: At_Drought_Soil_Dry_P Parameter: Post-Treatment Value: None
  misc_feature: MA Experiment 20001555 PARAMETER Experiment Name: At_Drought_Soil_Dry_P Parameter: Timepoint (day) Value: 10
  misc_feature: MA Experiment 20001555 PARAMETER Experiment Name: At_Drought_Soil_Dry_P Parameter: Treatment Value: Drought vs. No Drought
  misc_feature: MA Experiment ID: 20001556 Result: Up-regulated in Transcription
  misc_feature: MA Experiment 20001556 PARAMETER Experiment Name: At_Drought_Soil_Dry_P Parameter: Age (day) Value: 26
  misc_feature: MA Experiment 20001556 PARAMETER Experiment Name: At_Drought_Soil_Dry_P Parameter: Organism Value: A. thaliana
  misc_feature: MA Experiment 20001556 PARAMETER Experiment Name: At_Drought_Soil_Dry_P Parameter: Plant Line Value: WS
  misc_feature: MA Experiment 20001556 PARAMETER Experiment Name: At_Drought_Soil_Dry_P Parameter: Post Timepoint (hr) Value: None
  misc_feature: MA Experiment 20001556 PARAMETER Experiment Name: At_Drought_Soil_Dry_P Parameter: Post-Treatment Value: None
  misc_feature: MA Experiment 20001556 PARAMETER Experiment Name: At_Drought_Soil_Dry_P Parameter: Timepoint (day) Value: 12
  misc_feature: MA Experiment 20001556 PARAMETER Experiment Name: At_Drought_Soil_Dry_P Parameter: Treatment Value: Drought vs. No Drought
  misc_feature: MA Experiment ID: 20001558 Result: Down-regulated in Transcription
  misc_feature: MA Experiment 20001558 PARAMETER Experiment Name: At_Drought_Soil_Dry_P Parameter: Age (day) Value: 27
  misc_feature: MA Experiment 20001558 PARAMETER Experiment Name: At_Drought_Soil_Dry_P Parameter: Organism Value: A. thaliana
  misc_feature: MA Experiment 20001558 PARAMETER Experiment Name: At_Drought_Soil_Dry_P Parameter: Plant Line Value: WS
  misc_feature: MA Experiment 20001558 PARAMETER Experiment Name: At_Drought_Soil_Dry_P Parameter: Post Timepoint (hr) Value: 6
  misc_feature: MA Experiment 20001558 PARAMETER Experiment Name: At_Drought_Soil_Dry_P Parameter: Post-Treatment Value: Re-Water vs. No Drought
  misc_feature: MA Experiment 20001558 PARAMETER Experiment Name: At_Drought_Soil_Dry_P Parameter: Timepoint (day) Value: 13
  misc_feature: MA Experiment 20001558 PARAMETER Experiment Name: At_Drought_Soil_Dry_P Parameter: Treatment Value: Drought vs. No Drought
  misc_feature: MA Experiment ID: 20001559 Result: Up-regulated in Transcription
  misc_feature: MA Experiment 20001559 PARAMETER Experiment Name: At_Drought_Soil_Dry_P Parameter: Age (day) Value: 28
  misc_feature: MA Experiment 20001559 PARAMETER Experiment Name: At_Drought_Soil_Dry_P Parameter: Organism Value: A. thaliana
  misc_feature: MA Experiment 20001559 PARAMETER Experiment Name: At_Drought_Soil_Dry_P Parameter: Plant Line Value: WS
  misc_feature: MA Experiment 20001559 PARAMETER Experiment Name: At_Drought_Soil_Dry_P Parameter: Post Timepoint (hr) Value: 29
  misc_feature: MA Experiment 20001559 PARAMETER Experiment Name: At_Drought_Soil_Dry_P Parameter: Post-Treatment Value: Re-Water vs. No Drought
  misc_feature: MA Experiment 20001559 PARAMETER Experiment Name: At_Drought_Soil_Dry_P Parameter: Timepoint (day) Value: 14
  misc_feature: MA Experiment 20001559 PARAMETER Experiment Name: At_Drought_Soil_Dry_P Parameter: Treatment Value: Drought vs. No Drought
  misc_feature: MA Experiment ID: 20001560 Result: Down-regulated in Transcription
  misc_feature: MA Experiment 20001560 PARAMETER Experiment Name: At_Drought_Soil_Dry_P Parameter: Age (day) Value: 28
  misc_feature: MA Experiment 20001560 PARAMETER Experiment Name: At_Drought_Soil_Dry_P Parameter: Organism Value: A. thaliana
  misc_feature: MA Experiment 20001560 PARAMETER Experiment Name: At_Drought_Soil_Dry_P Parameter: Plant Line Value: WS
  misc_feature: MA Experiment 20001560 PARAMETER Experiment Name: At_Drought_Soil_Dry_P Parameter: Post Timepoint (hr) Value: None
  misc_feature: MA Experiment 20001560 PARAMETER Experiment Name: At_Drought_Soil_Dry_P Parameter: Post-Treatment Value: None
  misc_feature: MA Experiment 20001560 PARAMETER Experiment Name: At_Drought_Soil_Dry_P Parameter: Timepoint (day) Value: 14
  misc_feature: MA Experiment 20001560 PARAMETER Experiment Name: At_Drought_Soil_Dry_P Parameter: Treatment Value: Drought vs. No Drought
  misc_feature: MA Experiment ID: 20001756 Result: Up-regulated in Transcription
  misc_feature: MA Experiment 20001756 PARAMETER Experiment Name: At_50mM_NH4NO3_L-to-H_P Parameter: Timepoint (hr) Value: 4
  misc_feature: MA Experiment 20001756 PARAMETER Experiment Name: At_50mM_NH4NO3_L-to-H_P Parameter: Tissue Value: Leaf
  misc_feature: MA Experiment 20001756 PARAMETER Experiment Name: At_50mM_NH4NO3_L-to-H_P Parameter: Treatment Value: 50mM NH4NO3 vs 100mM Mannitol
  misc_feature: MA Experiment ID: 20001761 Result: Up-regulated in Transcription
  misc_feature: MA Experiment 20001761 PARAMETER Experiment Name: At_50mM_NH4NO3_L-to-H_P Parameter: Timepoint (hr) Value: 4
  misc_feature: MA Experiment 20001761 PARAMETER Experiment Name: At_50mM_NH4NO3_L-to-H_P Parameter: Tissue Value: Siliques
  misc_feature: MA Experiment 20001761 PARAMETER Experiment Name: At_50mM_NH4NO3_L-to-H_P Parameter: Treatment Value: 50mM NH4NO3 vs 100mM Mannitol
  misc_feature: MA Experiment ID: 20001771 Result: Up-regulated in Transcription
  misc_feature: MA Experiment 20001771 PARAMETER Experiment Name: At_Far-red-enriched-adult_P Parameter: Age (day) Value: 28
  misc_feature: MA Experiment 20001771 PARAMETER Experiment Name: At_Far-red-enriched-adult_P Parameter: Light Value: Far-red enriched vs. White
  misc_feature: MA Experiment 20001771 PARAMETER Experiment Name: At_Far-red-enriched-adult_P Parameter: Organism Value: A. thaliana
  misc_feature: MA Experiment 20001771 PARAMETER Experiment Name: At_Far-red-enriched-adult_P Parameter: Plant Line Value: Columbia
  misc_feature: MA Experiment 20001771 PARAMETER Experiment Name: At_Far-red-enriched-adult_P Parameter: Timepoint (hr) Value: 16
  misc_feature: MA Experiment 20001771 PARAMETER Experiment Name: At_Far-red-enriched-adult_P Parameter: Tissue Value: Aerial
  misc_feature: MA Experiment ID: 20001906 Result: Up-regulated in Transcription
  misc_feature: MA Experiment 20001906 PARAMETER Experiment Name: At_Drought_Reproduction_P Parameter: Age (day) Value: 35
  misc_feature: MA Experiment 20001906 PARAMETER Experiment Name: At_Drought_Reproduction_P Parameter: Organism Value: A. thaliana
  misc_feature: MA Experiment 20001906 PARAMETER Experiment Name: At_Drought_Reproduction_P Parameter: Plant Line Value: WS
  misc_feature: MA Experiment 20001906 PARAMETER Experiment Name: At_Drought_Reproduction_P Parameter: Timepoint (day) Value: 5
  misc_feature: MA Experiment 20001906 PARAMETER Experiment Name: At_Drought_Reproduction_P Parameter: Tissue Value: Siliques
  misc_feature: MA Experiment 20001906 PARAMETER Experiment Name: At_Drought_Reproduction_P Parameter: Treatment Value: Drought vs. No Drought
  misc_feature: MA Experiment ID: 20001911 Result: Down-regulated in Transcription
  misc_feature: MA Experiment 20001911 PARAMETER Experiment Name: At_Drought_Reproduction_P Parameter: Age (day) Value: 40
  misc_feature: MA Experiment 20001911 PARAMETER Experiment Name: At_Drought_Reproduction_P Parameter: Organism Value: A. thaliana
  misc_feature: MA Experiment 20001911 PARAMETER Experiment Name: At_Drought_Reproduction_P Parameter: Plant Line Value: WS
  misc_feature: MA Experiment 20001911 PARAMETER Experiment Name: At_Drought_Reproduction_P Parameter: Timepoint (day) Value: 10
  misc_feature: MA Experiment 20001911 PARAMETER Experiment Name: At_Drought_Reproduction_P Parameter: Tissue Value: Flowers
  misc_feature: MA Experiment 20001911 PARAMETER Experiment Name: At_Drought_Reproduction_P Parameter: Treatment Value: Drought vs. No Drought
ctgtcaacagacatctttataattaattattgagaaaagagaaaaacagaggaaaaaaagatggagagaagcttgaagaagacgaagaacaattataacaactccataaagagcaatcttatgaaagatgatgaattgtttcatgtgattcacaaagttccctgtggagacactccttatgtcagagccaaacatgctcagttgatagagaagaacccggagatggcaatagtgtggttttggaaagccatcaacactggagacagagtagacagtgccctcaaggacatggctgttgtaatgaaacaacttgaccgttctgaagaagctattgaagctatcaaatctttccgtcctcgttgttccaagaattcccaagattcccttgacaatgtcctcatcgacttatacaagaaatgtgggagaatggaggagcaagttgagttgttgaagaggaaattaaggcagatctatcaaggagaagctttcaatggtaaacctaccaaaaccgctcgctcccacggaaaaaagtttcaagtgactgttcaacaagaaatctcaagattactgggtaacttggggtgggcatatatgcaacaagccaagtacttatcggccgaagcggtatacagaaaagcccagatggttgagccagatgctaacaaatcgtgcaaccttgcgatgtgccttatcaaacaaggcaggtttgaggagggaagattggttcttgacgatgttctcgagtatagggttttgggtgcggatgattgtagaacaaggcaacgggccgaagagcttctgagtgaattagagtcttcgctgccacggatgcgagatgctgagatggaggatgtcttgggaaatatcttagacgatgactttgttcttgggcttgaagagatgacatccactagttttaaatctaagagactcccaatcttcgaacagatctcgtcttttagaaatacattagtttgctagttaattcattctgtgttttcttgtgtatcatcatcatagctttgctgctttatagttttgatgagttgtaaatatatgtttctctttagtaactttgtacatacaacaaataatgggaacaacttcatttaagcac

SEQ ID NO: 107688 - protein, 306 aa, Arabidopsis thaliana; identical to SEQ ID NO: 71121
  peptide (1)..(306): Ceres Seq. ID no. 13651224
  misc_feature (167)..(200): Pfam Name: TPR Domain Pfam Description: TPR Domain
  misc_feature (1)..(306): Homolog of NCBI NO: 9758884 NR Description: gb|AAC72543.1~gene_id:K24G6.19~similar to unknown
  misc_feature (1)..(306): Homolog of NCBI NO: 30695554 NR Description: male sterility MS5 family [Arabidopsis thaliana] unknown protein [Arabidopsis thaliana]
  misc_feature (25)..(306): Homolog of NCBI NO: 3859116 NR Description: unknown [Oryza sativa]
  misc_feature (27)..(306): Homolog of NCBI NO: 25406811 NR Description: hypothetical protein [imported] - Arabidopsis
  misc_feature (27)..(306): Homolog of NCBI NO: 30678993 NR Description: male sterility MS5 family [Arabidopsis thaliana] unknown protein [Arabidopsis thaliana]
  misc_feature (25)..(256): Homolog of NCBI NO: 15230439 NR Description: male sterility MS5, putative [Arabidopsis
  misc_feature (27)..(255): Homolog of NCBI NO: 3859112 NR Description: male sterility MS5 [Arabidopsis thaliana]
  misc_feature (27)..(255): Homolog of NCBI NO: 4028970 NR Description: pollenless3 [Arabidopsis thaliana]
  misc_feature (37)..(252): Homolog of NCBI NO: 29467532 NR Description: P0582D05.25 [Oryza sativa (japonica
  misc_feature (27)..(226): Homolog of NCBI NO: 15233432 NR Description: male sterility MS5/pollenless 3 [Arabidopsis

SEQ ID NO: 107689 - protein, 286 aa, Arabidopsis thaliana; identical to SEQ ID NO: 71122
  peptide (1)..(286): Ceres Seq. ID no. 13651225
  misc_feature (147)..(180): Pfam Name: TPR Domain Pfam Description: TPR Domain
  misc_feature (1)..(286): Homolog of NCBI NO: 9758884 NR Description: gb|AAC72543.1~gene_id:K24G6.19~similar to unknown
  misc_feature (1)..(286): Homolog of NCBI NO: 30695554 NR Description: male sterility MS5 family [Arabidopsis thaliana] unknown protein [Arabidopsis thaliana]
  misc_feature (5)..(286): Homolog of NCBI NO: 3859116 NR Description: unknown [Oryza sativa]
  misc_feature (7)..(286): Homolog of NCBI NO: 25406811 NR Description: hypothetical protein [imported] - Arabidopsis
  misc_feature (7)..(286): Homolog of NCBI NO: 30678993 NR Description: male sterility MS5 family [Arabidopsis thaliana] unknown protein [Arabidopsis thaliana]
  misc_feature (5)..(236): Homolog of NCBI NO: 15230439 NR Description: male sterility MS5, putative [Arabidopsis
  misc_feature (7)..(235): Homolog of NCBI NO: 3859112 NR Description: male sterility MS5 [Arabidopsis thaliana]
  misc_feature (7)..(235): Homolog of NCBI NO: 4028970 NR Description: pollenless3 [Arabidopsis thaliana]
  misc_feature (17)..(232): Homolog of NCBI NO: 29467532 NR Description: P0582D05.25 [Oryza sativa (japonica
  misc_feature (7)..(206): Homolog of NCBI NO: 15233432 NR Description: male sterility MS5/pollenless 3 [Arabidopsis

SEQ ID NO: 107690 - protein, 252 aa, Arabidopsis thaliana; identical to SEQ ID NO: 71123
  peptide (1)..(252): Ceres Seq. ID no. 13651226
  misc_feature (113)..(146): Pfam Name: TPR Domain Pfam Description: TPR Domain
  misc_feature (1)..(252): Homolog of NCBI NO: 9758884 NR Description: gb|AAC72543.1~gene_id:K24G6.19~similar to unknown
  misc_feature (1)..(252): Homolog of NCBI NO: 30695554 NR Description: male sterility MS5 family [Arabidopsis thaliana] unknown protein [Arabidopsis thaliana]
  misc_feature (1)..(252): Homolog of NCBI NO: 3859116 NR Description: unknown [Oryza sativa]
  misc_feature (1)..(252): Homolog of NCBI NO: 25406811 NR Description: hypothetical protein [imported] - Arabidopsis
  misc_feature (1)..(252): Homolog of NCBI NO: 30678993 NR Description: male sterility MS5 family [Arabidopsis thaliana] unknown protein [Arabidopsis thaliana]
  misc_feature (1)..(202): Homolog of NCBI NO: 15230439 NR Description: male sterility MS5, putative [Arabidopsis
  misc_feature (1)..(201): Homolog of NCBI NO: 3859112 NR Description: male sterility MS5 [Arabidopsis thaliana]
  misc_feature (1)..(201): Homolog of NCBI NO: 4028970 NR Description: pollenless3 [Arabidopsis thaliana]
  misc_feature (1)..(198): Homolog of NCBI NO: 29467532 NR Description: P0582D05.25 [Oryza sativa (japonica
  misc_feature (1)..(172): Homolog of NCBI NO: 15233432 NR Description: male sterility MS5/pollenless 3 [Arabidopsis

SEQ ID NO: 107691 - DNA, 3117 bp, Arabidopsis thaliana
  misc_feature (1)..(3117): Ceres Seq. ID no. 13651272
  misc_feature: MA Experiment ID: 20000180 Result: Up-regulated in Transcription
  misc_feature: MA Experiment 20000180 PARAMETER Experiment Name: At_Germinating_Seeds_P Parameter: Age (hr) Value: 24 vs. 0
  misc_feature: MA Experiment 20000180 PARAMETER Experiment Name: At_Germinating_Seeds_P Parameter: Tissue Value: Germinating Seeds
  misc_feature: MA Experiment ID: 20000184 Result: Down-regulated in Transcription
  misc_feature: MA Experiment 20000184 PARAMETER Experiment Name: At_Shoots__P Parameter: Age (day) Value: 7
  misc_feature: MA Experiment 20000184 PARAMETER Experiment Name: At_Shoots__P Parameter: Tissue Value: Shoots vs. Whole Plant
  misc_feature: MA Experiment ID: 20000227 Result: Up-regulated in Transcription
  misc_feature: MA Experiment 20000227 PARAMETER Experiment Name: At_Root-Tips-vs-Tops_P Parameter: Tissue Value: Root Tips vs. Root Tops
  misc_feature: MA Experiment ID: 20000234 Result: Up-regulated in Transcription
  misc_feature: MA Experiment 20000234 PARAMETER Experiment Name: At_Siliques_P Parameter: Age (day) Value: 21
  misc_feature: MA Experiment 20000234 PARAMETER Experiment Name: At_Siliques_P Parameter: Organism Value: A. thaliana
  misc_feature: MA Experiment 20000234 PARAMETER Experiment Name: At_Siliques_P Parameter: Plant Line Value: WS
  misc_feature: MA Experiment 20000234 PARAMETER Experiment Name: At_Siliques_P Parameter: Tissue Value: Less Than 5mm Siliques vs. Whole Plant
  misc_feature: MA Experiment ID: 20000495 Result: Up-regulated in Transcription
  misc_feature: MA Experiment 20000495 PARAMETER Experiment Name: At_Guard_Cells_P Parameter: Harvest Date Value: 8/2/2002
  misc_feature: MA Experiment 20000495 PARAMETER Experiment Name: At_Guard_Cells_P Parameter: Organism Value: A. thaliana
  misc_feature: MA Experiment 20000495 PARAMETER Experiment Name: At_Guard_Cells_P Parameter: Tissue Value: Guard Cells vs. Leaves
  misc_feature: MA Experiment ID: 20000794 Result: Down-regulated in Transcription
  misc_feature: MA Experiment 20000794 PARAMETER Experiment Name: At_Petals_P Parameter: Age (day) Value: 23-25 days
  misc_feature: MA Experiment 20000794 PARAMETER Experiment Name: At_Petals_P Parameter: Plant Line Value: WS
  misc_feature: MA Experiment 20000794 PARAMETER Experiment Name: At_Petals_P Parameter: Tissue Value: Petals vs. Whole plant
  misc_feature: MA Experiment ID: 20001248 Result: Down-regulated in Transcription
  misc_feature: MA Experiment 20001248 PARAMETER Experiment Name: At_Far-red-induction_P Parameter: Age (day) Value: 7
  misc_feature: MA Experiment 20001248 PARAMETER Experiment Name: At_Far-red-induction_P Parameter: Light Value: Far-red vs. White
  misc_feature: MA Experiment 20001248 PARAMETER Experiment Name: At_Far-red-induction_P Parameter: Organism Value: A. thaliana
  misc_feature: MA Experiment 20001248 PARAMETER Experiment Name: At_Far-red-induction_P Parameter: Plant Line Value: Columbia
  misc_feature: MA Experiment 20001248 PARAMETER Experiment Name: At_Far-red-induction_P Parameter: Timepoint (hr) Value: 4
  misc_feature: MA Experiment 20001248 PARAMETER Experiment Name: At_Far-red-induction_P Parameter: Tissue Value: Whole Plant
  misc_feature: MA Experiment ID: 20001556 Result: Down-regulated in Transcription
  misc_feature: MA Experiment 20001556 PARAMETER Experiment Name: At_Drought_Soil_Dry_P Parameter: Age (day) Value: 26
  misc_feature: MA Experiment 20001556 PARAMETER Experiment Name: At_Drought_Soil_Dry_P Parameter: Organism Value: A. thaliana
  misc_feature: MA Experiment 20001556 PARAMETER Experiment Name: At_Drought_Soil_Dry_P Parameter: Plant Line Value: WS
  misc_feature: MA Experiment 20001556 PARAMETER Experiment Name: At_Drought_Soil_Dry_P Parameter: Post Timepoint (hr) Value: None
  misc_feature: MA Experiment 20001556 PARAMETER Experiment Name: At_Drought_Soil_Dry_P Parameter: Post-Treatment Value: None
  misc_feature: MA Experiment 20001556 PARAMETER Experiment Name: At_Drought_Soil_Dry_P Parameter: Timepoint (day) Value: 12
  misc_feature: MA Experiment 20001556 PARAMETER Experiment Name: At_Drought_Soil_Dry_P Parameter: Treatment Value: Drought vs. No Drought
  misc_feature: MA Experiment ID: 20001557 Result: Down-regulated in Transcription
  misc_feature: MA Experiment 20001557 PARAMETER Experiment Name: At_Drought_Soil_Dry_P Parameter: Age (day) Value: 27
  misc_feature: MA Experiment 20001557 PARAMETER Experiment Name: At_Drought_Soil_Dry_P Parameter: Organism Value: A. thaliana
  misc_feature: MA Experiment 20001557 PARAMETER Experiment Name: At_Drought_Soil_Dry_P Parameter: Plant Line Value: WS
  misc_feature: MA Experiment 20001557 PARAMETER Experiment Name: At_Drought_Soil_Dry_P Parameter: Post Timepoint (hr) Value: 3
  misc_feature: MA Experiment 20001557 PARAMETER Experiment Name: At_Drought_Soil_Dry_P Parameter: Post-Treatment Value: Re-Water vs. No Drought
  misc_feature: MA Experiment 20001557 PARAMETER Experiment Name: At_Drought_Soil_Dry_P Parameter: Timepoint (day) Value: 13
  misc_feature: MA Experiment 20001557 PARAMETER Experiment Name: At_Drought_Soil_Dry_P Parameter: Treatment Value: Drought vs. No Drought
  misc_feature: MA Experiment ID: 20001558 Result: Down-regulated in Transcription
  misc_feature: MA Experiment 20001558 PARAMETER Experiment Name: At_Drought_Soil_Dry_P Parameter: Age (day) Value: 27
  misc_feature: MA Experiment 20001558 PARAMETER Experiment Name: At_Drought_Soil_Dry_P Parameter: Organism Value: A. thaliana
  misc_feature: MA Experiment 20001558 PARAMETER Experiment Name: At_Drought_Soil_Dry_P Parameter: Plant Line Value: WS
  misc_feature: MA Experiment 20001558 PARAMETER Experiment Name: At_Drought_Soil_Dry_P Parameter: Post Timepoint (hr) Value: 6
  misc_feature: MA Experiment 20001558 PARAMETER Experiment Name: At_Drought_Soil_Dry_P Parameter: Post-Treatment Value: Re-Water vs. No Drought
  misc_feature: MA Experiment 20001558 PARAMETER Experiment Name: At_Drought_Soil_Dry_P Parameter: Timepoint (day) Value: 13
  misc_feature: MA Experiment 20001558 PARAMETER Experiment Name: At_Drought_Soil_Dry_P Parameter: Treatment Value: Drought vs. No Drought
  misc_feature: MA Experiment ID: 20001773 Result: Up-regulated in Transcription
  misc_feature: MA Experiment 20001773 PARAMETER Experiment Name: At_Far-red-enriched-adult_P Parameter: Age (day) Value: 30
  misc_feature: MA Experiment 20001773 PARAMETER Experiment Name: At_Far-red-enriched-adult_P Parameter: Light Value: Far-red enriched vs. White
  misc_feature: MA Experiment 20001773 PARAMETER Experiment Name: At_Far-red-enriched-adult_P Parameter: Organism Value: A. thaliana
  misc_feature: MA Experiment 20001773 PARAMETER Experiment Name: At_Far-red-enriched-adult_P Parameter: Plant Line Value: Columbia
  misc_feature: MA Experiment 20001773 PARAMETER Experiment Name: At_Far-red-enriched-adult_P Parameter: Timepoint (hr) Value: 48
  misc_feature: MA Experiment 20001773 PARAMETER Experiment Name: At_Far-red-enriched-adult_P Parameter: Tissue Value: Aerial
  misc_feature: MA Experiment ID: 20001906 Result: Down-regulated in Transcription
  misc_feature: MA Experiment 20001906 PARAMETER Experiment Name: At_Drought_Reproduction_P Parameter: Age (day) Value: 35
  misc_feature: MA Experiment 20001906 PARAMETER Experiment Name: At_Drought_Reproduction_P Parameter: Organism Value: A. thaliana
  misc_feature: MA Experiment 20001906 PARAMETER Experiment Name: At_Drought_Reproduction_P Parameter: Plant Line Value: WS
  misc_feature: MA Experiment 20001906 PARAMETER Experiment Name: At_Drought_Reproduction_P Parameter: Timepoint (day) Value: 5
  misc_feature: MA Experiment 20001906 PARAMETER Experiment Name: At_Drought_Reproduction_P Parameter: Tissue Value: Siliques
  misc_feature: MA Experiment 20001906 PARAMETER Experiment Name: At_Drought_Reproduction_P Parameter: Treatment Value: Drought vs. No Drought
  misc_feature: MA Experiment ID: 20001911 Result: Down-regulated in Transcription
  misc_feature: MA Experiment 20001911 PARAMETER Experiment Name: At_Drought_Reproduction_P Parameter: Age (day) Value: 40
  misc_feature: MA Experiment 20001911 PARAMETER Experiment Name: At_Drought_Reproduction_P Parameter: Organism Value: A. thaliana
  misc_feature: MA Experiment 20001911 PARAMETER Experiment Name: At_Drought_Reproduction_P Parameter: Plant Line Value: WS
  misc_feature: MA Experiment 20001911 PARAMETER Experiment Name: At_Drought_Reproduction_P Parameter: Timepoint (day) Value: 10
  misc_feature: MA Experiment 20001911 PARAMETER Experiment Name: At_Drought_Reproduction_P Parameter: Tissue Value: Flowers
  misc_feature: MA Experiment 20001911 PARAMETER Experiment Name: At_Drought_Reproduction_P Parameter: Treatment Value: Drought vs. No Drought
agtacacattttttttgatgagacaattatgaatcttgtctcataaggaagctactttaatctgtttcttctttctctatgatttcacttaaatatcaaacttcaagaactcatgtctcttgaggaacaatatggtgggttccaacaccgtaaccgctacatcgcggttgctcttgatctgttttgcttactcattcactgtcttctcaatgatttcatcagtgactgatcctcgtgatgcggcggctctgcgttctttgatggatcaatgggacaatacgccgcctagttggggaggttctgatgatccttgtggaactccttgggaaggtgtatcttgcaataactccagaatcactgctttgggtttgtcaacaatgggtctcaaaggaagacttagtggagatattggagaactagctgaactaagatcattggatctttcctttaatcgaggactaacaggttcacttacttctcggttaggagacctgcaaaagctaaatatccttattcttgctggttgtggcttcactggtaccatcccaaatgagcttggctatctcaaagatctatctttcttggccttgaactcgaacaacttcacgggtaaaatcccggcgtctctaggaaatctcactaaggtttattggctggatcttgcggataatcagttgacaggacccattccaatttcatcaggctcaagtcctggtcttgatcttcttttgaaagccaaacactttcatttcaacaagaatcagctctctgggaccattccaccaaaacttttcagctctgagatgatactgatccatgtattattcgatggaaatcgattcacaggaagcataccttccactttaggactcattcagacactagaggttcttcggcttgacagaaacactttgaccggaaaagttccagagaatctcagtaatctcacaaacatcattgaactgaacttagctcacaacaagctcgttggatcattaccagatttgtcagacatgaagtccatgaactacgtagatctcagcaataactcatttgatccatcagagtctcctctctggttctcaaccttaccttcactgaccacacttgtgatggaatatggatctcttcaaggaccactacctaataagctctttgggttcccacagcttcaacaagtgagactgaagaagaacgcattcaatggaacactgagcttgggagacacagtaggtccagagctccaacttgttgatctacaagacaacgacatatcctctgtaacactaagctctggatataccaatacattaatactcgaaggaaatcctgtatgcacaacagctctctccaacacaaactactgtcagattcagcagcaacaagtcaaacgaatatactcgaccagtcttgctaactgtggaggaaagtcttgtccattagaccaaaaggtcagccctcagagctgtgaatgcgcctacccttatgaaggcacactctacttccgagggcctatgttcagagacctgtccaatgtgaacacataccattctttggagatgagcttgtgggtgaaattaggactcactccaggctcggtctctctacaaaaccctttcttcaacaatgatgattatcttcagatacagttggcacttttcccacctatgggcaagtattttaacagaactgaagttcagagaattggatttgacttgagtaaccaaacatataaacctcctcctttgtttggaccttactacttcattgcatctccctacacattcccagctgatggtaacggacattccttgagctctcggatggtcactgggataataactggttgcagtgctttggtcctgtgccttgttgcgttaggaatatacgcaatgtggcagaagagacgtgcagagcaagctatcggtttgagtagaccatttgtttcatgggcatcaagtggaaaagacagcggtggcgcaccgcagctgaaaggggcacgatggttctcctacgaagaactcaagaagatcacgaacaatttctctgtgagcagtgagctgggttatggaggttatggaaaggtgtataaaggaatgcttcaagatgggcacatggtggcgatcaaaagagcacaacaaggatcaacacaaggagggctcgagttcaaaacagagattgagttgctttctcgagttcatcacaagaacctagttgggcttgtcgggttctgcttcgagcaaggcgagcagattctagtctacgaatacatgtccaacggatcactaaaagatagcttaaccgggcgatccggaattacgctggattggaaaagaaggctgagagtggctctaggatcggcaagaggactcgcatacctccatgaactggcggatcctccgatcatccacagggacgtgaaatcaactaacattcttttggatgagaatctgacagccaaggttgctgattttggtttgtccaagctggtttcagactgcaccaaaggccatgtttcaacacaagttaaaggaacattgggatatttggacccagagtactacacaacacagaaacttacagagaagagtgatgtgtacagcttcggtgttgtaatgatggagctgatcacagcgaaacagccgatagagaaaggcaagtacattgttagagagatcaagcttgtaatgaacaagagcgacgatgacttctacggactgagagataagatggatcgttcgttaagagacgtcggaactctgccagagctcggccggtatatggaactagccctgaaatgcgtagatgagacggcagatgagaggccaacgatgagtgaagtggtcaaggagattgagattatcatccagaatagtggggcgagtagtagctcctctgcatctgcgtcgtcatccgctacagattttggtgagaagcttttgtacggaggtactttgaagaagaaagaagcaagagacggagatggaggcggagcgtttgattatagtggtggctactctgttccgaccaaaattgagcccaagtaaatatcaacatctcttgtgagattatttgtcgttactttttgtatgaatgaatggaaaagtcatattgatg

SEQ ID NO: 107692 - protein, 971 aa, Arabidopsis thaliana
  peptide (1)..(971): Ceres Seq. ID no. 13651273
  misc_feature (638)..(838): Pfam Name: Protein kinase domain Pfam Description: Protein kinase domain
  misc_feature (8)..(971): Homolog of NCBI NO: 30695748 NR Description: receptor protein kinase-related [Arabidopsis >gi|26449348|dbj|BAC41801.1| putative receptor protein kinase thaliana] >gi|30102752|gb|AAP21294.1| At5g49760 [Arabidopsis
  misc_feature (12)..(940): Homolog of NCBI NO: 15240547 NR Description: leucine-rich repeat transmembrane protein kinase,
  misc_feature (101)..(930): Homolog of NCBI NO: 8978273 NR Description: receptor protein kinase-like [Arabidopsis
  misc_feature (151)..(971): Homolog of NCBI NO: 34909240 NR Description: putative receptor protein kinase [Oryza sativa
  misc_feature (100)..(971): Homolog of NCBI NO: 15240549 NR Description: leucine-rich repeat transmembrane protein kinase,
  misc_feature (115)..(789): Homolog of NCBI NO: 34905792 NR Description: P0401G10.22 [Oryza sativa (japonica
  misc_feature (702)..(937): Homolog of NCBI NO: 34905792 NR Description: P0401G10.22 [Oryza sativa (japonica
  misc_feature (59)..(911): Homolog of NCBI NO: 15222211 NR Description: leucine-rich repeat transmembrane protein kinase,
  misc_feature (32)..(928): Homolog of NCBI NO: 30679474 NR Description: leucine-rich repeat transmembrane protein kinase,
  misc_feature (134)..(928): Homolog of NCBI NO: 11346408 NR Description: hypothetical protein T20L15.220 - Arabidopsis >gi|7329668|emb|CAB82765.1| putative protein [Arabidopsis
MVGSNTVTATSRLLLICFAYSFTVFSMISSVTDPRDAAALRSLMDQWDNTPPSWGGSDDPCGTPWEGVSCNNSRITALGLSTMGLKGRLSGDIGELAELRSLDLSFNRGLTGSLTSRLGDLQKLNILILAGCGFTGTIPNELGYLKDLSFLALNSNNFTGKIPASLGNLTKVYWLDLADNQLTGPIPISSGSSPGLDLLLKAKHFHFNKNQLSGTIPPKLFSSEMILIHVLFDGNRFTGSIPSTLGLIQTLEVLRLDRNTLTGKVPENLSNLTNIIELNLAHNKLVGSLPDLSDMKSMNYVDLSNNSFDPSESPLWFSTLPSLTTLVMEYGSLQGPLPNKLFGFPQLQQVRLKKNAFNGTLSLGDTVGPELQLVDLQDNDISSVTLSSGYTNTLILEGNPVCTTALSNTNYCQIQQQQVKRIYSTSLANCGGKSCPLDQKVSPQSCECAYPYEGTLYFRGPMFRDLSNVNTYHSLEMSLWVKLGLTPGSVSLQNPFFNNDDYLQIQLALFPPMGKYFNRTEVQRIGFDLSNQTYKPPPLFGPYYFIASPYTFPADGNGHSLSSRMVTGIITGCSALVLCLVALGIYAMWQKRRAEQAIGLSRPFVSWASSGKDSGGAPQLKGARWFSYEELKKITNNFSVSSELGYGGYGKVYKGMLQDGHMVAIKRAQQGSTQGGLEFKTEIELLSRVHHKNLVGLVGFCFEQGEQILVYEYMSNGSLKDSLTGRSGITLDWKRRLRVALGSARGLAYLHELADPPIIHRDVKSTNILLDENLTAKVADFGLSKLVSDCTKGHVSTQVKGTLGYLDPEYYTTQKLTEKSDVYSFGVVMMELITAKQPIEKGKYIVREIKLVMNKSDDDFYGLRDKMDRSLRDVGTLPELGRYMELALKCVDETADERPTMSEVVKEIEIIIQNSGASSSSSASASSSATDFGEKLLYGGTLKKKEARDGDGGGAFDYSGGYSVPTKIEPK

SEQ ID NO: 107693 - protein, 945 aa, Arabidopsis thaliana
  peptide (1)..(945): Ceres Seq. ID no. 13651274
  misc_feature (612)..(812): Pfam Name: Protein kinase domain Pfam Description: Protein kinase domain
  misc_feature (1)..(945): Homolog of NCBI NO: 30695748 NR Description: receptor protein kinase-related [Arabidopsis >gi|26449348|dbj|BAC41801.1| putative receptor protein kinase thaliana] >gi|30102752|gb|AAP21294.1| At5g49760 [Arabidopsis
  misc_feature (1)..(914): Homolog of NCBI NO: 15240547 NR Description: leucine-rich repeat transmembrane protein kinase,
  misc_feature (75)..(904): Homolog of NCBI NO: 8978273 NR Description: receptor protein kinase-like [Arabidopsis
  misc_feature (125)..(945): Homolog of NCBI NO: 34909240 NR Description: putative receptor protein kinase [Oryza sativa
  misc_feature (74)..(945): Homolog of NCBI NO: 15240549 NR Description: leucine-rich repeat transmembrane protein kinase,
  misc_feature (89)..(763): Homolog of NCBI NO: 34905792 NR Description: P0401G10.22 [Oryza sativa (japonica
  misc_feature (676)..(911): Homolog of NCBI NO: 34905792 NR Description: P0401G10.22 [Oryza sativa (japonica
  misc_feature (33)..(885): Homolog of NCBI NO: 15222211 NR Description: leucine-rich repeat transmembrane protein kinase,
  misc_feature (6)..(902): Homolog of NCBI NO: 30679474 NR Description: leucine-rich repeat transmembrane protein kinase,
  misc_feature (108)..(902): Homolog of NCBI NO: 11346408 NR Description: hypothetical protein T20L15.220 - Arabidopsis >gi|7329668|emb|CAB82765.1| putative protein [Arabidopsis
MISSVTDPRDAAALRSLMDQWDNTPPSWGGSDDPCGTPWEGVSCNNSRITALGLSTMGLKGRLSGDIGELAELRSLDLSFNRGLTGSLTSRLGDLQKLNILILAGCGFTGTIPNELGYLKDLSFLALNSNNFTGKIPASLGNLTKVYWLDLADNQLTGPIPISSGSSPGLDLLLKAKHFHFNKNQLSGTIPPKLFSSEMILIHVLFDGNRFTGSIPSTLGLIQTLEVLRLDRNTLTGKVPENLSNLTNIIELNLAHNKLVGSLPDLSDMKSMNYVDLSNNSFDPSESPLWFSTLPSLTTLVMEYGSLQGPLPNKLFGFPQLQQVRLKKNAFNGTLSLGDTVGPELQLVDLQDNDISSVTLSSGYTNTLILEGNPVCTTALSNTNYCQIQQQQVKRIYSTSLANCGGKSCPLDQKVSPQSCECAYPYEGTLYFRGPMFRDLSNVNTYHSLEMSLWVKLGLTPGSVSLQNPFFNNDDYLQIQLALFPPMGKYFNRTEVQRIGFDLSNQTYKPPPLFGPYYFIASPYTFPADGNGHSLSSRMVTGIITGCSALVLCLVALGIYAMWQKRRAEQAIGLSRPFVSWASSGKDSGGAPQLKGARWFSYEELKKITNNFSVSSELGYGGYGKVYKGMLQDGHMVAIKRAQQGSTQGGLEFKTEIELLSRVHHKNLVGLVGFCFEQGEQILVYEYMSNGSLKDSLTGRSGITLDWKRRLRVALGSARGLAYLHELADPPIIHRDVKSTNILLDENLTAKVADFGLSKLVSDCTKGHVSTQVKGTLGYLDPEYYTTQKLTEKSDVYSFGVVMMELITAKQPIEKGKYIVREIKLVMNKSDDDFYGLRDKMDRSLRDVGTLPELGRYMELALKCVDETADERPTMSEVVKEIEIIIQNSGASSSSSASASSSATDFGEKLLYGGTLKKKEARDGDGGGAFDYSGGYSVPTKIEPK

SEQ ID NO: 107694 - protein, 928 aa, Arabidopsis thaliana
  peptide (1)..(928): Ceres Seq. ID no. 13651275
  misc_feature (595)..(795): Pfam Name: Protein kinase domain Pfam Description: Protein kinase domain
  misc_feature (1)..(928): Homolog of NCBI NO: 30695748 NR Description: receptor protein kinase-related [Arabidopsis >gi|26449348|dbj|BAC41801.1| putative receptor protein kinase thaliana] >gi|30102752|gb|AAP21294.1| At5g49760 [Arabidopsis
  misc_feature (1)..(897): Homolog of NCBI NO: 15240547 NR Description: leucine-rich repeat transmembrane protein kinase,
  misc_feature (58)..(887): Homolog of NCBI NO: 8978273 NR Description: receptor protein kinase-like [Arabidopsis
  misc_feature (108)..(928): Homolog of NCBI NO: 34909240 NR Description: putative receptor protein kinase [Oryza sativa
  misc_feature (57)..(928): Homolog of NCBI NO: 15240549 NR Description: leucine-rich repeat transmembrane protein kinase,
  misc_feature (72)..(746): Homolog of NCBI NO: 34905792 NR Description: P0401G10.22 [Oryza sativa (japonica
  misc_feature (659)..(894): Homolog of NCBI NO: 34905792 NR Description: P0401G10.22 [Oryza sativa (japonica
  misc_feature (16)..(868): Homolog of NCBI NO: 15222211 NR Description: leucine-rich repeat transmembrane protein kinase,
  misc_feature (1)..(885): Homolog of NCBI NO: 30679474 NR Description: leucine-rich repeat transmembrane protein kinase,
  misc_feature (91)..(885): Homolog of NCBI NO: 11346408 NR Description: hypothetical protein T20L15.220 - Arabidopsis >gi|7329668|emb|CAB82765.1| putative protein [Arabidopsis
MDQWDNTPPSWGGSDDPCGTPWEGVSCNNSRITALGLSTMGLKGRLSGDIGELAELRSLDLSFNRGLTGSLTSRLGDLQKLNILILAGCGFTGTIPNELGYLKDLSFLALNSNNFTGKIPASLGNLTKVYWLDLADNQLTGPIPISSGSSPGLDLLLKAKHFHFNKNQLSGTIPPKLFSSEMILIHVLFDGNRFTGSIPSTLGLIQTLEVLRLDRNTLTGKVPENLSNLTNIIELNLAHNKLVGSLPDLSDMKSMNYVDLSNNSFDPSESPLWFSTLPSLTTLVMEYGSLQGPLPNKLFGFPQLQQVRLKKNAFNGTLSLGDTVGPELQLVDLQDNDISSVTLSSGYTNTLILEGNPVCTTALSNTNYCQIQQQQVKRIYSTSLANCGGKSCPLDQKVSPQSCECAYPYEGTLYFRGPMFRDLSNVNTYHSLEMSLWVKLGLTPGSVSLQNPFFNNDDYLQIQLALFPPMGKYFNRTEVQRIGFDLSNQTYKPPPLFGPYYFIASPYTFPADGNGHSLSSRMVTGIITGCSALVLCLVALGIYAMWQKRRAEQAIGLSRPFVSWASSGKDSGGAPQLKGARWFSYEELKKITNNFSVSSELGYGGYGKVYKGMLQDGHMVAIKRAQQGSTQGGLEFKTEIELLSRVHHKNLVGLVGFCFEQGEQILVYEYMSNGSLKDSLTGRSGITLDWKRRLRVALGSARGLAYLHELADPPIIHRDVKSTNILLDENLTAKVADFGLSKLVSDCTKGHVSTQVKGTLGYLDPEYYTTQKLTEKSDVYSFGVVMMELITAKQPIEKGKYIVREIKLVMNKSDDDFYGLRDKMDRSLRDVGTLPELGRYMELALKCVDETADERPTMSEVVKEIEIIIQNSGASSSSSASASSSATDFGEKLLYGGTLKKKEARDGDGGGAFDYSGGYSVPTKIEPK

SEQ ID NO: 107695 - DNA, 3952 bp, Arabidopsis thaliana
  misc_feature (1)..(3952): Ceres Seq. ID no. 13651276
  misc_feature: MA Experiment ID: 20000180 Result: Down-regulated in Transcription
  misc_feature: MA Experiment 20000180 PARAMETER Experiment Name: At_Germinating_Seeds_P Parameter: Age (hr) Value: 24 vs. 0
  misc_feature: MA Experiment 20000180 PARAMETER Experiment Name: At_Germinating_Seeds_P Parameter: Tissue Value: Germinating Seeds
  misc_feature: Pfam Name: zf-CW Pfam Description: CW-type Zinc Finger
gtttgcaaaaaaaatcggagacgcaaaaccaacttgccgccgaatcttccttaaaccctcaacgctgctcttcgccgccgttgagacgatcacagtgatcgaatcttccttttcaactttctcgtcttttgatcaaacgagtttggttgagtttttgataaacgtgattaagcgattaatttcgcgttttaacaacaatctagattgtcctttggagattgaacaaatttagggtttttggggataatctaagtgtttatgatttgaaactttgtgtgttttgagattgttttgggcaatgttggattttcgagacggtttggtggcggcagagttagtgagtgttggggtttaggaagtagtagtagttattagggtttggaattgggttatgtttagggttttactagtttagaagatgggagaggattatgagcttgaagaaggagagatgaattgttcttctgatgaagctgttgttgatcttgacgttgatctctcttacattgacaagaaggtacagaatgtacttggccacttgcaaaaaggtttcggagaggaagcccgggaccggtttggtccggagatctttgactatggatcatttttgcccacttacaaacgtttgccggctgtaccatcatgtcaaaggagttctctagggaatcatgctgtacaaagaatttccaacagtttacccgggaagaatgtggttcagaagtttcagtcaccccctgctacatcttgtaaactagtaagaaatcaggatcctcagaactatcaaacttcaggatctcttttggctcaagctccaggaaaagttcccataaataaaggaaatgcaagaacaccagccaatgatttgcctcataataagccgatcagagttcggatcaaaatgggttctgaaatcttgtcccaaagtgtcgcgatggtttgcaaggatcttggtctcgatggttctccaaattcaccaccccgaatcagccaggatgatagtagcagaatgctaccgcatacatctctagggaagacaagtgaatctccttcccgcattcttcaggaaatgactgccatttctgttccagaggatctactgatgtcgcctcttcctgatagtctgctcctagtgaaggataagaagaagcaatatactttattagacaatcaacctatgattaagacaggaaagaaatcttctattcagatacagaacaagttctcggatgttttatgttgtgagaaaactccaattggaaggagaaggaaagaggtagactgttttcatgccaccacttggaatgagacgaagaagcataaagttttatccactggtcagctagccagggataactcagcttgtggtttaggtggggcaagtcttactactgatgggtttacaacaaaaagtaacttgcaggaaggttgtagaaaagatggtgaaagtgatcccagagtcgcaaataaaataaagtttgttgggttgcatgctgtgaaagagaaaaaaacatgtccgacaaagttgcaacagaaccgtagcaaatatcgtattggtgataaagttttatcaaagatgcctttgaaggatgccgcatatataggtcacaatagcatggacactgggtttgattttgcggttgcaccttcttccaccagtgttgacctagattattgggcccaatgtgagagttgtgagaaatggcggctactgccctatgacctgaatactgagaagctgcctgataagtggttgtgtagcatgcaaacctggctgcctggaatgaaccactgtggcgtcagcgaggaagagactacaaacgcaattaaatcctttcatgctagtgagggtcatggtcctgacactggtgttaaactcctctctgatgttcgtaatgctgataaaatctaccaacctttaacttctggttcattgcctaatccaattgaaaagaagtctaacgtagaagacttatcgcaaggagtttcaagcaacatccttgttgatgctgcaaagcctatgagaagtaacccacatattttcaagaataaaaacatgaagctgccaggagaaacacctactgctactcagatatctgcagacctttcgcacgatttttttcaggataagattgaccagaaagcaaagaggagagcagcaggtgctggttgtcagataaaggtcaagaagaaaaaggaggctgacaaagaagaaagtgatggttccaagcatatcaagactggtgatggtaacaaacttgccagagttattaaagcagaagaaatacattggaatcaagatcctaaatggactccagcagagagaaaaagaaaacgtcatgacaatgatttttgcactttgaatgtagagcgagacccaaagaaaagattactcgtatctaaaaagaaacctgaccacaaacctcaactgataactgctagtggttccttgtgtacaaaagcccagggaaatatcaatagtactgtgaggaaaataaggttgatgggttacaagcagggtaaggatgggaaaaattcaaaattgtttgcagatggtgaggaaaacgagccctcaatggaaaaggcggtaacaactaagatttcagtccatgaatctaaagcaaaccaaagaaatgaattgtttcaggctgattgctttcaagaacacctgaatggtgatgcctcatgtagatatttctctggtggaagtgggcagatttctgggatagaaacatcaaactcgtcgaaggttttaggatcacataaaagtggacgaatgtatgtggaagaagtaaaagcatcccctgtggaatcagtttcctcttcccctgcaaggtcttcatgccccacgaatgatatacttcaagaggctgaaaagctgagaaagcttgctgactgtttcaagagctctggatttgaatatgaatacaaggagatcaactttaaagcggctctgaggtttctccttggagcttcagttttagaaatgtgcagtacagataatgtggaagtggggaagatgagccatattgaggcttaccatactgctgcaaaactttcagaaagttgtgcccatcaatatgaaacaagccaagaaatggctgcagctactttggcttataaatgcacagaagtggcttgcatgagattagtgtatggcagaagtctaggtctgagtggagaatggaatgaattgcaaaaaatggtacagatgactcctcaaggtgaatcaccgtcatcatctgcatctgatgtcgatagtttcaatcatcaaggggtgattaagaagtctgctaaaaccagaagaggtctttcccatgttgccggaaaccttctccctgttgctagaagccaactaaattttgttccgctattggactttacagggagcatgaatctggcaatggaggcctcagcaaaatcccaaaatgcttttaaagccgtcactgacacctcagaagaaagaaagcatggagactgtatctctgctatcaaaaaagttgtcgattttagtttccatgatgttgaagcgcttataaagatgattgaggttgccatggatgctctaagttcatcaagattcggtggcccaaagtgttgactctattttgtatatagaccctggtcctataaagaatagaatagtgtttcatgaacttccatagaaaaatcttagtaagtagcatagattaggaaaggaagacttggagagaggacactagataaggtctaagtttgctatttgcagtaactctcagggtcctgtttcaggtctttcttctttttggtgtctgggtattcaatattaactaaagcatatttatagaagagtaggaggattcttagatatagtcatttaaaagatcggttagtgataagatttctgacaagacactgctctaatcctgtttcagttctgttcaaagtattttggaattgaaacatatactttctt

SEQ ID NO: 107696 - protein, 1059 aa, Arabidopsis thaliana
  peptide (1)..(1059): Ceres Seq. ID no. 13651277
  misc_feature: Pfam Name: zf-CW Pfam Description: CW-type Zinc Finger
  misc_feature (772)..(1050): Homolog of NCBI NO: 34899330 NR Description: contains ESTs AU056898(S20963)~similar to Arabidopsis thaliana chromosome3,
  misc_feature (4)..(241): Homolog of NCBI NO: 34899330 NR Description: contains ESTs AU056898(S20963)~similar to Arabidopsis thaliana chromosome3,
  misc_feature (409)..(606): Homolog of NCBI NO: 34899330 NR Description: contains ESTs AU056898(S20963)~similar to Arabidopsis thaliana chromosome3,
  misc_feature (792)..(1048): Homolog of NCBI NO: 15229341 NR Description: hypothetical protein [Arabidopsis thaliana]
  misc_feature (384)..(606): Homolog of NCBI NO: 15229341 NR Description: hypothetical protein [Arabidopsis thaliana]
  misc_feature (665)..(819): Homolog of NCBI NO: 15229341 NR Description: hypothetical protein [Arabidopsis thaliana]
  misc_feature (782)..(1050): Homolog of NCBI NO: 25518543 NR Description: hypothetical protein F22D16.1 - Arabidopsis >gi|6056403|gb|AAF02867.1|AC009525_1 Hypothetical protein
  misc_feature (3)..(185): Homolog of NCBI NO: 25518543 NR Description: hypothetical protein F22D16.1 - Arabidopsis >gi|6056403|gb|AAF02867.1|AC009525_1 Hypothetical protein
MGEDYELEEGEMNCSSDEAVVDLDVDLSYIDKKVQNVLGHLQKGFGEEARDRFGPEIFDYGSFLPTYKRLPAVPSCQRSSLGNHAVQRISNSLPGKNVVQKFQSPPATSCKLVRNQDPQNYQTSGSLLAQAPGKVPINKGNARTPANDLPHNKPIRVRIKMGSEILSQSVAMVCKDLGLDGSPNSPPRISQDDSSRMLPHTSLGKTSESPSRILQEMTAISVPEDLLMSPLPDSLLLVKDKKKQYTLLDNQPMIKTGKKSSIQIQNKFSDVLCCEKTPIGRRRKEVDCFHATTWNETKKHKVLSTGQLARDNSACGLGGASLTTDGFTTKSNLQEGCRKDGESDPRVANKIKFVGLHAVKEKKTCPTKLQQNRSKYRIGDKVLSKMPLKDAAYIGHNSMDTGFDFAVAPSSTSVDLDYWAQCESCEKWRLLPYDLNTEKLPDKWLCSMQTWLPGMNHCGVSEEETTNAIKSFHASEGHGPDTGVKLLSDVRNADKIYQPLTSGSLPNPIEKKSNVEDLSQGVSSNILVDAAKPMRSNPHIFKNKNMKLPGETPTATQISADLSHDFFQDKIDQKAKRRAAGAGCQIKVKKKKEADKEESDGSKHIKTGDGNKLARVIKAEEIHWNQDPKWTPAERKRKRHDNDFCTLNVERDPKKRLLVSKKKPDHKPQLITASGSLCTKAQGNINSTVRKIRLMGYKQGKDGKNSKLFADGEENEPSMEKAVTTKISVHESKANQRNELFQADCFQEHLNGDASCRYFSGGSGQISGIETSNSSKVLGSHKSGRMYVEEVKASPVESVSSSPARSSCPTNDILQEAEKLRKLADCFKSSGFEYEYKEINFKAALRFLLGASVLEMCSTDNVEVGKMSHIEAYHTAAKLSESCAHQYETSQEMAAATLAYKCTEVACMRLVYGRSLGLSGEWNELQKMVQMTPQGESPSSSASDVDSFNHQGVIKKSAKTRRGLSHVAGNLLPVARSQLNFVPLLDFTGSMNLAMEASAKSQNAFKAVTDTSEERKHGDCISAIKKVVDFSFHDVEALIKMIEVAMDALSSSRFGGPKC

SEQ ID NO: 107697 - protein, 1048 aa, Arabidopsis thaliana
  peptide (1)..(1048): Ceres Seq. ID no. 13651278
  misc_feature: Pfam Name: zf-CW Pfam Description: CW-type Zinc Finger
  misc_feature (761)..(1039): Homolog of NCBI NO: 34899330 NR Description: contains ESTs AU056898(S20963)~similar to Arabidopsis thaliana chromosome3,
  misc_feature (1)..(230): Homolog of NCBI NO: 34899330 NR Description: contains ESTs AU056898(S20963)~similar to Arabidopsis thaliana chromosome3,
  misc_feature (398)..(595): Homolog of NCBI NO: 34899330 NR Description: contains ESTs AU056898(S20963)~similar to Arabidopsis thaliana chromosome3,
  misc_feature (781)..(1037): Homolog of NCBI NO: 15229341 NR Description: hypothetical protein [Arabidopsis thaliana]
  misc_feature (373)..(595): Homolog of NCBI NO: 15229341 NR Description: hypothetical protein [Arabidopsis thaliana]
  misc_feature (654)..(808): Homolog of NCBI NO: 15229341 NR Description: hypothetical protein [Arabidopsis thaliana]
  misc_feature (771)..(1039): Homolog of NCBI NO: 25518543 NR Description: hypothetical protein F22D16.1 - Arabidopsis >gi|6056403|gb|AAF02867.1|AC009525_1 Hypothetical protein
  misc_feature (1)..(174): Homolog of NCBI NO: 25518543 NR Description: hypothetical protein F22D16.1 - Arabidopsis >gi|6056403|gb|AAF02867.1|AC009525_1 Hypothetical protein
MNCSSDEAVVDLDVDLSYIDKKVQNVLGHLQKGFGEEARDRFGPEIFDYGSFLPTYKRLPAVPSCQRSSLGNHAVQRISNSLPGKNVVQKFQSPPATSCKLVRNQDPQNYQTSGSLLAQAPGKVPINKGNARTPANDLPHNKPIRVRIKMGSEILSQSVAMVCKDLGLDGSPNSPPRISQDDSSRMLPHTSLGKTSESPSRILQEMTAISVPEDLLMSPLPDSLLLVKDKKKQYTLLDNQPMIKTGKKSSIQIQNKFSDVLCCEKTPIGRRRKEVDCFHATTWNETKKHKVLSTGQLARDNSACGLGGASLTTDGFTTKSNLQEGCRKDGESDPRVANKIKFVGLHAVKEKKTCPTKLQQNRSKYRIGDKVLSKMPLKDAAYIGHNSMDTGFDFAVAPSSTSVDLDYWAQCESCEKWRLLPYDLNTEKLPDKWLCSMQTWLPGMNHCGVSEEETTNAIKSFHASEGHGPDTGVKLLSDVRNADKIYQPLTSGSLPNPIEKKSNVEDLSQGVSSNILVDAAKPMRSNPHIFKNKNMKLPGETPTATQISADLSHDFFQDKIDQKAKRRAAGAGCQIKVKKKKEADKEESDGSKHIKTGDGNKLARVIKAEEIHWNQDPKWTPAERKRKRHDNDFCTLNVERDPKKRLLVSKKKPDHKPQLITASGSLCTKAQGNINSTVRKIRLMGYKQGKDGKNSKLFADGEENEPSMEKAVTTKISVHESKANQRNELFQADCFQEHLNGDASCRYFSGGSGQISGIETSNSSKVLGSHKSGRMYVEEVKASPVESVSSSPARSSCPTNDILQEAEKLRKLADCFKSSGFEYEYKEINFKAALRFLLGASVLEMCSTDNVEVGKMSHIEAYHTAAKLSESCAHQYETSQEMAAATLAYKCTEVACMRLVYGRSLGLSGEWNELQKMVQMTPQGESPSSSASDVDSFNHQGVIKKSAKTRRGLSHVAGNLLPVARSQLNFVPLLDFTGSMNLAMEASAKSQNAFKAVTDTSEERKHGDCISAIKKVVDFSFHDVEALIKMIEVAMDALSSSRFGGPKC

SEQ ID NO: 107698 - protein, 899 aa, Arabidopsis thaliana
  peptide (1)..(899): Ceres Seq. ID no. 13651279
  misc_feature: Pfam Name: zf-CW Pfam Description: CW-type Zinc Finger
  misc_feature (612)..(890): Homolog of NCBI NO: 34899330 NR Description: contains ESTs AU056898(S20963)~similar to Arabidopsis thaliana chromosome3,
  misc_feature (1)..(81): Homolog of NCBI NO: 34899330 NR Description: contains ESTs AU056898(S20963)~similar to Arabidopsis thaliana chromosome3,
  misc_feature (249)..(446): Homolog of NCBI NO: 34899330 NR Description: contains ESTs AU056898(S20963)~similar to Arabidopsis thaliana chromosome3,
  misc_feature (632)..(888): Homolog of NCBI NO: 15229341 NR Description: hypothetical protein [Arabidopsis thaliana]
  misc_feature (224)..(446): Homolog of NCBI NO: 15229341 NR Description: hypothetical protein [Arabidopsis thaliana]
  misc_feature (505)..(659): Homolog of NCBI NO: 15229341 NR Description: hypothetical protein [Arabidopsis thaliana]
  misc_feature (622)..(890): Homolog of NCBI NO: 25518543 NR Description: hypothetical protein F22D16.1 - Arabidopsis >gi|6056403|gb|AAF02867.1|AC009525_1 Hypothetical protein
  misc_feature (1)..(25): Homolog of NCBI NO: 25518543 NR Description: hypothetical protein F22D16.1 - Arabidopsis >gi|6056403|gb|AAF02867.1|AC009525_1 Hypothetical protein
MGSEILSQSVAMVCKDLGLDGSPNSPPRISQDDSSRMLPHTSLGKTSESPSRILQEMTAISVPEDLLMSPLPDSLLLVKDKKKQYTLLDNQPMIKTGKKSSIQIQNKFSDVLCCEKTPIGRRRKEVDCFHATTWNETKKHKVLSTGQLARDNSACGLGGASLTTDGFTTKSNLQEGCRKDGESDPRVANKIKFVGLHAVKEKKTCPTKLQQNRSKYRIGDKVLSKMPLKDAAYIGHNSMDTGFDFAVAPSSTSVDLDYWAQCESCEKWRLLPYDLNTEKLPDKWLCSMQTWLPGMNHCGVSEEETTNAIKSFHASEGHGPDTGVKLLSDVRNADKIYQPLTSGSLPNPIEKKSNVEDLSQGVSSNILVDAAKPMRSNPHIFKNKNMKLPGETPTATQISADLSHDFFQDKIDQKAKRRAAGAGCQIKVKKKKEADKEESDGSKHIKTGDGNKLARVIKAEEIHWNQDPKWTPAERKRKRHDNDFCTLNVERDPKKRLLVSKKKPDHKPQLITASGSLCTKAQGNINSTVRKIRLMGYKQGKDGKNSKLFADGEENEPSMEKAVTTKISVHESKANQRNELFQADCFQEHLNGDASCRYFSGGSGQISGIETSNSSKVLGSHKSGRMYVEEVKASPVESVSSSPARSSCPTNDILQEAEKLRKLADCFKSSGFEYEYKEINFKAALRFLLGASVLEMCSTDNVEVGKMSHIEAYHTAAKLSESCAHQYETSQEMAAATLAYKCTEVACMRLVYGRSLGLSGEWNELQKMVQMTPQGESPSSSASDVDSFNHQGVIKKSAKTRRGLSHVAGNLLPVARSQLNFVPLLDFTGSMNLAMEASAKSQNAFKAVTDTSEERKHGDCISAIKKVVDFSFHDVEALIKMIEVAMDALSSSRFGGPKC

SEQ ID NO: 107699 - DNA, 1288 bp, Arabidopsis thaliana
  misc_feature (1)..(1288): Ceres Seq. ID no. 13651288
  misc_feature: MA Experiment ID: 20000328 Result: Down-regulated in Transcription
  misc_feature: MA Experiment 20000328 PARAMETER Experiment Name: At_42deg_Heat_Sub_P Parameter: Age (day) Value: 14
  misc_feature: MA Experiment 20000328 PARAMETER Experiment Name: At_42deg_Heat_Sub_P Parameter: Organism Value: A. thaliana
  misc_feature: MA Experiment 20000328 PARAMETER Experiment Name: At_42deg_Heat_Sub_P Parameter: Plant Line Value: WS
  misc_feature: MA Experiment 20000328 PARAMETER Experiment Name: At_42deg_Heat_Sub_P Parameter: Temperature (deg C) Value: 42 vs. 22
  misc_feature: MA Experiment 20000328 PARAMETER Experiment Name: At_42deg_Heat_Sub_P Parameter: Timepoint (hr) Value: 6
  misc_feature: MA Experiment 20000328 PARAMETER Experiment Name: At_42deg_Heat_Sub_P Parameter: Tissue Value: Aerial
  misc_feature: MA Experiment ID: 20000355 Result: Up-regulated in Transcription
  misc_feature: MA Experiment 20000355 PARAMETER Experiment Name: At_Siliques_Sub_P Parameter: Age (day) Value: 21
  misc_feature: MA Experiment 20000355 PARAMETER Experiment Name: At_Siliques_Sub_P Parameter: Organism Value: A. thaliana
  misc_feature: MA Experiment 20000355 PARAMETER Experiment Name: At_Siliques_Sub_P Parameter: Plant Line Value: WS
  misc_feature: MA Experiment 20000355 PARAMETER Experiment Name: At_Siliques_Sub_P Parameter: Tissue Value: Less Than 5mm Siliques vs. Whole Plant
  misc_feature: MA Experiment ID: 20000440 Result: Up-regulated in Transcription
  misc_feature: MA Experiment 20000440 PARAMETER Experiment Name: At_Closed-Flower__Sub_P Parameter: Tissue Value: Closed Flower vs. Whole Plant
  misc_feature: Pfam Name: Senescence Pfam Description: Senescence-associated protein
aaagaaccgccaagaaacctcaagagtgaaaatgagttttttcagatcaaagacttcaaaaactgaaacacaacaaccatcatcgtatggacaacaacaagacgctatgtactcatcttacggaaccgtgagtgacgaagtgttattacagattcatggatgcagagctcatctcatcaacggatccgaagctgtggagctagccgccggagacttcgagcttgtacaagtcttagacagcaacgtagccttagctatggtcgtgaggatcggaaatgacttacaatggccggtgattaaagacgagccagtggtgaaacttgactctcgtgactacctcttcacgttgccggttaaagatggagagccacttagttacggcatcacgtttttccctattgatgaaaatgacatcgtttttgtgaatagtatcgagttgctagacgatttcttgagagagaattcttgtttctcttcgtctccgtcttcttcttcgtcttcttcttcgtcttcttcttcgagtgttaacaatggaattgattggaaagagtttgcgcctaagattgaagattataacaatgttgtagctaaagctattgcaggaggtacagggcatatcattagagggatgtttaaatgcagtaatgcttacactaatcaggttcataaaggaggtgaaattatgattacgaaggctgagaaaaagaatggtgcctcgtcaaaaagaaatgcaaccacaaacaagaatcaaatcaacaagaaccttcaacgagtaaggaaattgtctagggcgacggagaaattgagcaagacaatgttgaatggtgtgggagtggtgagtggctcggtgatgggtccagttgtaaagtcgaagccagggaaagcttttttctcaatggttccaggggaggttctattggcttcacttgatgctcttaataaattactagacgctgctgaagccgcagagagacaaactctttctgctacgtccaaagctactacaagaatggttagtgagaggttaggtgagagcgcgggagaagctacgaaagatgtactaggcacggttgggcacgcagccggcactgcgtggaacgtcttcaatatccgcaaagctttctctccttcctcttcagtcacatcggggatcctcaaaaacgcttcacgaaagtgatatttggtgtttgtatttatttgtgggcagagaccataaggttaaaattaagtcagaatatgcaaatgtgtaatcttgaatctcaaacaaaggaaacctctcttccttacc

SEQ ID NO: 107700 - protein, 391 aa, Arabidopsis thaliana
  peptide (1)..(391): Ceres Seq. ID no. 13651289
  misc_feature: Pfam Name: Senescence Pfam Description: Senescence-associated protein
  misc_feature (11)..(391): Homolog of NCBI NO: 26450712 NR Description: unknown protein [Arabidopsis thaliana]
  misc_feature (11)..(391): Homolog of NCBI NO: 25407536 NR Description: hypothetical protein AT4g15450 [imported] - thaliana >gi|5281017|emb|CAB45990.1| hypothetical protein thaliana] >gi|7268292|emb|CAB78587.1| hypothetical protein
  misc_feature (13)..(391): Homolog of NCBI NO: 7488048 NR Description: probable allene oxide synthase - Arabidopsis
  misc_feature (11)..(333): Homolog of NCBI NO: 30683270 NR Description: expressed protein [Arabidopsis thaliana]
  misc_feature (13)..(391): Homolog of NCBI NO: 15233098 NR Description: expressed protein [Arabidopsis thaliana]
  misc_feature (43)..(221): Homolog of NCBI NO: 34910728 NR Description: P0690B02.29 [Oryza sativa (japonica
  misc_feature (220)..(390): Homolog of NCBI NO: 34910728 NR Description: P0690B02.29 [Oryza sativa (japonica
  misc_feature (120)..(389): Homolog of NCBI NO: 15230434 NR Description: expressed protein [Arabidopsis thaliana]
  misc_feature (26)..(120): Homolog of NCBI NO: 15230434 NR Description: expressed protein [Arabidopsis thaliana]
  misc_feature (181)..(390): Homolog of NCBI NO: 15227905 NR Description: senescence-associated protein 12 -related
KNRQETSRVKMSFFRSKTSKTETQQPSSYGQQQDAMYSSYGTVSDEVLLQIHGCRAHLINGSEAVELAAGDFELVQVLDSNVALAMVVRIGNDLQWPVIKDEPVVKLDSRDYLFTLPVKDGEPLSYGITFFPIDENDIVFVNSIELLDDFLRENSCFSSSPSSSSSSSSSSSSSVNNGIDWKEFAPKIEDYNNVVAKAIAGGTGHIIRGMFKCSNAYTNQVHKGGEIMITKAEKKNGASSKRNATTNKNQINKNLQRVRKLSRATEKLSKTMLNGVGVVSGSVMGPVVKSKPGKAFFSMVPGEVLLASLDALNKLLDAAEAAERQTLSATSKATTRMVSERLGESAGEATKDVLGTVGHAAGTAWNVFNIRKAFSPSSSVTSGILKNASRK

SEQ ID NO: 107701 - protein, 381 aa, Arabidopsis thaliana
  peptide (1)..(381): Ceres Seq. ID no. 13651290
  misc_feature: Pfam Name: Senescence Pfam Description: Senescence-associated protein
  misc_feature (1)..(381): Homolog of NCBI NO: 26450712 NR Description: unknown protein [Arabidopsis thaliana]
  misc_feature (1)..(381): Homolog of NCBI NO: 25407536 NR Description: hypothetical protein AT4g15450 [imported] - thaliana >gi|5281017|emb|CAB45990.1| hypothetical protein thaliana] >gi|7268292|emb|CAB78587.1| hypothetical protein
  misc_feature (3)..(381): Homolog of NCBI NO: 7488048 NR Description: probable allene oxide synthase - Arabidopsis
  misc_feature (1)..(323): Homolog of NCBI NO: 30683270 NR Description: expressed protein [Arabidopsis thaliana]
  misc_feature (3)..(381): Homolog of NCBI NO: 15233098 NR Description: expressed protein [Arabidopsis thaliana]
  misc_feature (33)..(211): Homolog of NCBI NO: 34910728 NR Description: P0690B02.29 [Oryza sativa (japonica
  misc_feature (210)..(380): Homolog of NCBI NO: 34910728 NR Description: P0690B02.29 [Oryza sativa (japonica
  misc_feature (110)..(379): Homolog of NCBI NO: 15230434 NR Description: expressed protein [Arabidopsis thaliana]
  misc_feature (16)..(110): Homolog of NCBI NO: 15230434 NR Description: expressed protein [Arabidopsis thaliana]
  misc_feature (171)..(380): Homolog of NCBI NO: 15227905 NR Description: senescence-associated protein 12 -related
MSFFRSKTSKTETQQPSSYGQQQDAMYSSYGTVSDEVLLQIHGCRAHLINGSEAVELAAGDFELVQVLDSNVALAMVVRIGNDLQWPVIKDEPVVKLDSRDYLFTLPVKDGEPLSYGITFFPIDENDIVFVNSIELLDDFLRENSCFSSSPSSSSSSSSSSSSSVNNGIDWKEFAPKIEDYNNVVAKAIAGGTGHIIRGMFKCSNAYTNQVHKGGEIMITKAEKKNGASSKRNATTNKNQINKNLQRVRKLSRATEKLSKTMLNGVGVVSGSVMGPVVKSKPGKAFFSMVPGEVLLASLDALNKLLDAAEAAERQTLSATSKATTRMVSERLGESAGEATKDVLGTVGHAAGTAWNVFNIRKAFSPSSSVTSGILKNASRK

SEQ ID NO: 107702 - protein, 356 aa, Arabidopsis thaliana
  peptide (1)..(356): Ceres Seq. ID no. 13651291
  misc_feature: Pfam Name: Senescence Pfam Description: Senescence-associated protein
  misc_feature (1)..(356): Homolog of NCBI NO: 26450712 NR Description: unknown protein [Arabidopsis thaliana]
  misc_feature (1)..(356): Homolog of NCBI NO: 25407536 NR Description: hypothetical protein AT4g15450 [imported] - thaliana >gi|5281017|emb|CAB45990.1| hypothetical protein thaliana] >gi|7268292|emb|CAB78587.1| hypothetical protein
  misc_feature (1)..(356): Homolog of NCBI NO: 7488048 NR Description: probable allene oxide synthase - Arabidopsis
  misc_feature (1)..(298): Homolog of NCBI NO: 30683270 NR Description: expressed protein [Arabidopsis thaliana]
  misc_feature (1)..(356): Homolog of NCBI NO: 15233098 NR Description: expressed protein [Arabidopsis thaliana]
  misc_feature (8)..(186): Homolog of NCBI NO: 34910728 NR Description: P0690B02.29 [Oryza sativa (japonica
  misc_feature (185)..(355): Homolog of NCBI NO: 34910728 NR Description: P0690B02.29 [Oryza sativa (japonica
  misc_feature (85)..(354): Homolog of NCBI NO: 15230434 NR Description: expressed protein [Arabidopsis thaliana]
  misc_feature (1)..(85): Homolog of NCBI NO: 15230434 NR Description: expressed protein [Arabidopsis thaliana]
  misc_feature (146)..(355): Homolog of NCBI NO: 15227905 NR Description: senescence-associated protein 12 -related
MYSSYGTVSDEVLLQIHGCRAHLINGSEAVELAAGDFELVQVLDSNVALAMVVRIGNDLQWPVIKDEPVVKLDSRDYLFTLPVKDGEPLSYGITFFPIDENDIVFVNSIELLDDFLRENSCFSSSPSSSSSSSSSSSSSVNNGIDWKEFAPKIEDYNNVVAKAIAGGTGHIIRGMFKCSNAYTNQVHKGGEIMITKAEKKNGASSKRNATTNKNQINKNLQRVRKLSRATEKLSKTMLNGVGVVSGSVMGPVVKSKPGKAFFSMVPGEVLLASLDALNKLLDAAEAAERQTLSATSKATTRMVSERLGESAGEATKDVLGTVGHAAGTAWNVFNIRKAFSPSSSVTSGILKNASRK

SEQ ID NO: 107703 - DNA, 769 bp, Arabidopsis thaliana
  misc_feature (1)..(769): Ceres Seq. ID no. 13651302
  misc_feature: MA Experiment ID: 20000451 Result: Down-regulated in Transcription
  misc_feature: MA Experiment 20000451 PARAMETER Experiment Name: At_CS6879_Shoots-Roots_P Parameter: Age (day) Value: 14
  misc_feature: MA Experiment 20000451 PARAMETER Experiment Name: At_CS6879_Shoots-Roots_P Parameter: Organism Value: A. thaliana
  misc_feature: MA Experiment 20000451 PARAMETER Experiment Name: At_CS6879_Shoots-Roots_P Parameter: Plant Line Value: CS6879 vs. WS
  misc_feature: MA Experiment 20000451 PARAMETER Experiment Name: At_CS6879_Shoots-Roots_P Parameter: Tissue Value: Roots
  misc_feature: MA Experiment ID: 20000452 Result: Down-regulated in Transcription
  misc_feature: MA Experiment 20000452 PARAMETER Experiment Name: At_CS6879_Shoots-Roots_P Parameter: Age (day) Value: 14
  misc_feature: MA Experiment 20000452 PARAMETER Experiment Name: At_CS6879_Shoots-Roots_P Parameter: Organism Value: A. thaliana
  misc_feature: MA Experiment 20000452 PARAMETER Experiment Name: At_CS6879_Shoots-Roots_P Parameter: Plant Line Value: CS6879 vs. WS
  misc_feature: MA Experiment 20000452 PARAMETER Experiment Name: At_CS6879_Shoots-Roots_P Parameter: Tissue Value: Shoots
gagttggaccagtcggaggattagggtttcaacggagactcactagtcgatctccgatcctttcttctacccgcccgaaatccgtcgaaacttctcttctttaccattgatttgcctcgtctcagctcaattctcttccgttgctgcttcgtttagtactctggtggtgggagagatgaatcacggccaacaatctggtgaggcaaagcatgaagatgatgctgctcttacagagttccttgcttctctgatggattatactcctactattcctgatgatttagtggagcactacttggctaagagtggatttcagtgccccgacgtacgattgataaggctagttgctgtggctacacaaaagtttgttgcagatgttgccagtgacgcccttcagcattgcaaggctagaccagcaccagttgtgaaagacaaaaaacagcaaaaggataagcgtttggtattgacaatggaagatctttcaaaagctttgcgtgagtatggtgtgaacgtgaagcatccagaatattttgctgatagcccttcgactggaatggaccctgtaacaagggacgaatagaaaccaggaattcctcaaaatctttgcctagtaaggacggtcatgtgtctcagatccctgattctctgttgtgtttcagttaaaaacaaaactcacttgtcttgctagtcctcaattactacattacatgtatattcgtttgttgtttgttctctggtgatttttggggttctacatcacttatccacc

SEQ ID NO: 107704 - protein, 134 aa, Arabidopsis thaliana
  peptide (1)..(134): Ceres Seq. ID no. 13651303
  misc_feature (30)..(80): Pfam Name: Transcription initiation factor TFIID 23-30kDa subunit Pfam Description: Transcription initiation factor TFIID 23-30kDa
  misc_feature (1)..(134): Homolog of NCBI NO: 26450720 NR Description: putative transcription factor II [Arabidopsis
  misc_feature (1)..(134): Homolog of NCBI NO: 15236059 NR Description: Transcription factor II homolog [Arabidopsis >gi|30689137|ref|NP_849481.1| Transcription factor II homolog thaliana] >gi|7488383|pir||T05098 transcription factor IID 30K
  misc_feature (1)..(119): Homolog of NCBI NO: 9910576 NR Description: TAF10 RNA polymerase II, TATA box binding protein
  misc_feature (1)..(119): Homolog of NCBI NO: 26338586 NR Description: unnamed protein product [Mus musculus]
  misc_feature (1)..(119): Homolog of NCBI NO: 21619259 NR Description: Ilk protein [Mus musculus]
  misc_feature (1)..(119): Homolog of NCBI NO: 34859827 NR Description: similar to Ilk protein [Rattus norvegicus]
  misc_feature (18)..(119): Homolog of NCBI NO: 5454106 NR Description: TBP-related factor 10; TATA box binding protein associated factor, RNA polymerase II; TAF10 RNA polymerase II,
  misc_feature (1)..(119): Homolog of NCBI NO: 20863106 NR Description: similar to Transcription initiation factor TFIID
  misc_feature (18)..(119): Homolog of NCBI NO: 2136293 NR Description: transcription factor IID 30k chain - human
  misc_feature (1)..(118): Homolog of NCBI NO: 17137648 NR Description: TBP-associated factor 10b CG3069-PA [Drosophila
MNHGQQSGEAKHEDDAALTEFLASLMDYTPTIPDDLVEHYLAKSGFQCPDVRLIRLVAVATQKFVADVASDALQHCKARPAPVVKDKKQQKDKRLVLTMEDLSKALREYGVNVKHPEYFADSPSTGMDPVTRDE

SEQ ID NO: 107705 - protein, 109 aa, Arabidopsis thaliana
  peptide (1)..(109): Ceres Seq. ID no. 13651304
  misc_feature (5)..(55): Pfam Name: Transcription initiation factor TFIID 23-30kDa subunit Pfam Description: Transcription initiation factor TFIID 23-30kDa
  misc_feature (1)..(109): Homolog of NCBI NO: 26450720 NR Description: putative transcription factor II [Arabidopsis
  misc_feature (1)..(109): Homolog of NCBI NO: 15236059 NR Description: Transcription factor II homolog [Arabidopsis >gi|30689137|ref|NP_849481.1| Transcription factor II homolog thaliana] >gi|7488383|pir||T05098 transcription factor IID 30K
  misc_feature (1)..(94): Homolog of NCBI NO: 9910576 NR Description: TAF10 RNA polymerase II, TATA box binding protein
  misc_feature (1)..(94): Homolog of NCBI NO: 26338586 NR Description: unnamed protein product [Mus musculus]
  misc_feature (1)..(94): Homolog of NCBI NO: 21619259 NR Description: Ilk protein [Mus musculus]
  misc_feature (1)..(94): Homolog of NCBI NO: 34859827 NR Description: similar to Ilk protein [Rattus norvegicus]
  misc_feature (1)..(94): Homolog of NCBI NO: 5454106 NR Description: TBP-related factor 10; TATA box binding protein associated factor, RNA polymerase II; TAF10 RNA polymerase II,
  misc_feature (1)..(94): Homolog of NCBI NO: 20863106 NR Description: similar to Transcription initiation factor TFIID
  misc_feature (1)..(94): Homolog of NCBI NO: 2136293 NR Description: transcription factor IID 30k chain - human
  misc_feature (1)..(93): Homolog of NCBI NO: 17137648 NR Description: TBP-associated factor 10b CG3069-PA [Drosophila
MDYTPTIPDDLVEHYLAKSGFQCPDVRLIRLVAVATQKFVADVASDALQHCKARPAPVVKDKKQQKDKRLVLTMEDLSKALREYGVNVKHPEYFADSPSTGMDPVTRDE

SEQ ID NO: 107706 - DNA, 1700 bp, Arabidopsis thaliana
  misc_feature (1)..(1700): Ceres Seq. ID no. 13651312
  misc_feature: MA Experiment ID: 20000180 Result: Down-regulated in Transcription
  misc_feature: MA Experiment 20000180 PARAMETER Experiment Name: At_Germinating_Seeds_P Parameter: Age (hr) Value: 24 vs. 0
  misc_feature: MA Experiment 20000180 PARAMETER Experiment Name: At_Germinating_Seeds_P Parameter: Tissue Value: Germinating Seeds
  misc_feature: MA Experiment ID: 20000184 Result: Down-regulated in Transcription
  misc_feature: MA Experiment 20000184 PARAMETER Experiment Name: At_Shoots__P Parameter: Age (day) Value: 7
  misc_feature: MA Experiment 20000184 PARAMETER Experiment Name: At_Shoots__P Parameter: Tissue Value: Shoots vs. Whole Plant
  misc_feature: MA Experiment ID: 20000227 Result: Down-regulated in Transcription
  misc_feature: MA Experiment 20000227 PARAMETER Experiment Name: At_Root-Tips-vs-Tops_P Parameter: Tissue Value: Root Tips vs. Root Tops
actctgactctcacactcgatactccaaaatctctcatactgttccattgattcttcctctggtttttatttgttcttgtaagaatggttgcgatacccaatattaagataaagtttggtcctcaaggttctgtcagaacattccaaacgttgtctgatagttcgaagaaaattgagcatgtagtgactgaagatttatctcaatcctcggagaaatcaaagaagcgtggtgggcctaaagagctagatgaagttcaacctaagaagaagcagaggctggattgtgattggtctagtcaatgtttggcattgttacgttttttgatggagcaccgtggtggatggctctttaaggagcctgttgatcctgttaaaatggagattcctgattacttcaatgtcatacaaaagccaatggatttaggcactgtcaaatcgaaacttttgaagaatgtctacagtaatgctgatgagtttgcagcggatgttcggttaacttttgccaatgcgatgcattataatcctctgtggaatgaggttcacacgattgcaaaggagattaatgagatttttgaggttagatgggaatcactcatgaagaaaaaggttttgaggttatcctggaatgaagttagagaaggttataagagacagccagttgaacgtgattgttctagacggagcagcactggaacatcagcttcctctggggtgggattgacgaaaccagctaaagagaactccgaaaagggttctctttcgtccaagccagtgaaagtgcagagcaaaaagaatactcctgctgtgacgcctaaagcattagcaacctgtaaatgtggtaggataatttgcatatgcctcaagtcctgtagctcatttggaagtgacgtttgttcgttaacggattgtcaattaaagaacatttcaggtgcacaagcgagcgagttagatcctcaatctaatgggtctgacacttcaaagaaggagagaaatggtagtctcaagtctcagcttgataaaccttcaaacagtgatctgttgggtaatgagttgaaaacggcttttcctgctctgccgccggtacctcctgagaaagctcttcgtgctgcaatactcaaagctcaatatgcaggaaccatcataaaagctaaacacagaatagtccttggccagaataacaaagctgatctgattagaatacagatagaaaaggaacagatggaaagagcacaacgtgaagagaaagctagaattgaagccgagatgagagctgctaaggttgctgaacgaatgagggcacaagacgagttgaaacagaaacgtgagagtcaacggcttgaaatagcaaagatgaaaaaaggcttcgattttgaacggaacaaccactcgaaattgaagaaaaaattcgttaaagtctgtggctgctttagtctgacaaaagctcggttgttacttgaagagttgggtctggttttgaaaaatgattattgtccggaactggaagtgatcgggtcagaaaaatttgatgcaatgagaatggacgatcttgaggaaggagagatcctttagagttttctctataagaaaacctcttggatgtaatttttgaccataaggaatgctttgtaaccttaactttggttttttttttttttttgtgaacaacaaccttaactttgttaatatatgaaaatgctatt

SEQ ID NO: 107707 - protein, 494 aa, Arabidopsis thaliana; identical to SEQ ID NO: 79182
  peptide (1)..(494): Ceres Seq. ID no. 13651313
  misc_feature (69)..(158): Pfam Name: Bromodomain Pfam Description: Bromodomain
  misc_feature (1)..(494): Homolog of NCBI NO: 8885596 NR Description: contains similarity to kinase~gene_id:F10E10.2
  misc_feature (1)..(494): Homolog of NCBI NO: 30694987 NR Description: DNA-binding protein family [Arabidopsis thaliana]
  misc_feature (258)..(436): Homolog of NCBI NO: 11358472 NR Description: kinase-like protein - Arabidopsis thaliana
  misc_feature (72)..(173): Homolog of NCBI NO: 11358472 NR Description: kinase-like protein - Arabidopsis thaliana
  misc_feature (297)..(432): Homolog of NCBI NO: 6016737 NR Description: hypothetical protein [Arabidopsis thaliana]
  misc_feature (72)..(173): Homolog of NCBI NO: 6016737 NR Description: hypothetical protein [Arabidopsis thaliana]
  misc_feature (320)..(432): Homolog of NCBI NO: 18395937 NR Description: DNA-binding protein family [Arabidopsis thaliana] AT3g01770/F28J7_10 [Arabidopsis thaliana] unknown protein [Arabidopsis thaliana]
  misc_feature (72)..(173): Homolog of NCBI NO: 18395937 NR Description: DNA-binding protein family [Arabidopsis thaliana] AT3g01770/F28J7_10 [Arabidopsis thaliana] unknown protein [Arabidopsis thaliana]
  misc_feature (282)..(422): Homolog of NCBI NO: 18417335 NR Description: DNA-binding protein family [Arabidopsis thaliana]
  misc_feature (72)..(173): Homolog of NCBI NO: 18417335 NR Description: DNA-binding protein family [Arabidopsis thaliana]

SEQ ID NO: 107708 - protein, 414 aa, Arabidopsis thaliana; identical to SEQ ID NO: 79183
  peptide (1)..(414): Ceres Seq. ID no. 13651314
  misc_feature (1)..(78): Pfam Name: Bromodomain Pfam Description: Bromodomain
  misc_feature (1)..(414): Homolog of NCBI NO: 8885596 NR Description: contains similarity to kinase~gene_id:F10E10.2
  misc_feature (1)..(414): Homolog of NCBI NO: 30694987 NR Description: DNA-binding protein family [Arabidopsis thaliana]
  misc_feature (178)..(356): Homolog of NCBI NO: 11358472 NR Description: kinase-like protein - Arabidopsis thaliana
  misc_feature (1)..(93): Homolog of NCBI NO: 11358472 NR Description: kinase-like protein - Arabidopsis thaliana
  misc_feature (217)..(352): Homolog of NCBI NO: 6016737 NR Description: hypothetical protein [Arabidopsis thaliana]
  misc_feature (1)..(93): Homolog of NCBI NO: 6016737 NR Description: hypothetical protein [Arabidopsis thaliana]
  misc_feature (240)..(352): Homolog of NCBI NO: 18395937 NR Description: DNA-binding protein family [Arabidopsis thaliana] AT3g01770/F28J7_10 [Arabidopsis thaliana] unknown protein [Arabidopsis thaliana]
  misc_feature (1)..(93): Homolog of NCBI NO: 18395937 NR Description: DNA-binding protein family [Arabidopsis thaliana] AT3g01770/F28J7_10 [Arabidopsis thaliana] unknown protein [Arabidopsis thaliana]
  misc_feature (202)..(342): Homolog of NCBI NO: 18417335 NR Description: DNA-binding protein family [Arabidopsis thaliana]
  misc_feature (1)..(93): Homolog of NCBI NO: 18417335 NR Description: DNA-binding protein family [Arabidopsis thaliana]

SEQ ID NO: 107709 - protein, 397 aa, Arabidopsis thaliana; identical to SEQ ID NO: 79184
  peptide (1)..(397): Ceres Seq. ID no. 13651315
  misc_feature (1)..(61): Pfam Name: Bromodomain Pfam Description: Bromodomain
  misc_feature (1)..(397): Homolog of NCBI NO: 8885596 NR Description: contains similarity to kinase~gene_id:F10E10.2
  misc_feature (1)..(397): Homolog of NCBI NO: 30694987 NR Description: DNA-binding protein family [Arabidopsis thaliana]
  misc_feature (161)..(339): Homolog of NCBI NO: 11358472 NR Description: kinase-like protein - Arabidopsis thaliana
  misc_feature (1)..(76): Homolog of NCBI NO: 11358472 NR Description: kinase-like protein - Arabidopsis thaliana
  misc_feature (200)..(335): Homolog of NCBI NO: 6016737 NR Description: hypothetical protein [Arabidopsis thaliana]
  misc_feature (1)..(76): Homolog of NCBI NO: 6016737 NR Description: hypothetical protein [Arabidopsis thaliana]
  misc_feature (223)..(335): Homolog of NCBI NO: 18395937 NR Description: DNA-binding protein family [Arabidopsis thaliana] AT3g01770/F28J7_10 [Arabidopsis thaliana] unknown protein [Arabidopsis thaliana]
  misc_feature (1)..(76): Homolog of NCBI NO: 18395937 NR Description: DNA-binding protein family [Arabidopsis thaliana] AT3g01770/F28J7_10 [Arabidopsis thaliana] unknown protein [Arabidopsis thaliana]
  misc_feature (185)..(325): Homolog of NCBI NO: 18417335 NR Description: DNA-binding protein family [Arabidopsis thaliana]
  misc_feature (1)..(76): Homolog of NCBI NO: 18417335 NR Description: DNA-binding protein family [Arabidopsis thaliana]

SEQ ID NO: 107710 - DNA, 1778 bp, Arabidopsis thaliana
  misc_feature (1)..(1778): Ceres Seq. ID no. 13651357
  misc_feature: MA Experiment ID: 20000214 Result: Down-regulated in Transcription
  misc_feature: MA Experiment 20000214 PARAMETER Experiment Name: At_4deg_Cold_P Parameter: Timepoint (hr) Value: 6
  misc_feature: MA Experiment ID: 20000437 Result: Down-regulated in Transcription
  misc_feature: MA Experiment 20000437 PARAMETER Experiment Name: At_Drought_P Parameter: Age (day) Value: 8
  misc_feature: MA Experiment 20000437 PARAMETER Experiment Name: At_Drought_P Parameter: Organism Value: A. thaliana
  misc_feature: MA Experiment 20000437 PARAMETER Experiment Name: At_Drought_P Parameter: Plant Line Value: WS
  misc_feature: MA Experiment 20000437 PARAMETER Experiment Name: At_Drought_P Parameter: Timepoint (hr) Value: 24
  misc_feature: MA Experiment 20000437 PARAMETER Experiment Name: At_Drought_P Parameter: Tissue Value: Whole Plant
  misc_feature: MA Experiment 20000437 PARAMETER Experiment Name: At_Drought_P Parameter: Treatment Value: Drought vs. No Drought
  misc_feature: MA Experiment ID: 20000794 Result: Down-regulated in Transcription
  misc_feature: MA Experiment 20000794 PARAMETER Experiment Name: At_Petals_P Parameter: Age (day) Value: 23-25 days
  misc_feature: MA Experiment 20000794 PARAMETER Experiment Name: At_Petals_P Parameter: Plant Line Value: WS
  misc_feature: MA Experiment 20000794 PARAMETER Experiment Name: At_Petals_P Parameter: Tissue Value: Petals vs. Whole plant
  misc_feature: MA Experiment ID: 20001905 Result: Down-regulated in Transcription
  misc_feature: MA Experiment 20001905 PARAMETER Experiment Name: At_Drought_Reproduction_P Parameter: Age (day) Value: 40
  misc_feature: MA Experiment 20001905 PARAMETER Experiment Name: At_Drought_Reproduction_P Parameter: Organism Value: A. thaliana
  misc_feature: MA Experiment 20001905 PARAMETER Experiment Name: At_Drought_Reproduction_P Parameter: Plant Line Value: WS
  misc_feature: MA Experiment 20001905 PARAMETER Experiment Name: At_Drought_Reproduction_P Parameter: Timepoint (day) Value: 10
  misc_feature: MA Experiment 20001905 PARAMETER Experiment Name: At_Drought_Reproduction_P Parameter: Tissue Value: Rosettes
  misc_feature: MA Experiment 20001905 PARAMETER Experiment Name: At_Drought_Reproduction_P Parameter: Treatment Value: Drought vs. No Drought
gttgagcactccccagtctcagtggtgcggtgaggagagcttcgttgtcttccccattgcaattagggttttcaaaacgggtaatcgaattcggtggtgctcggctttgaaattgaggatgagatcctttccacttccttctacctgctgacaatgggcaactgcggtactagagacgaggctgccgtcttcactcctcaagctcaagcccaacagctccagaagaagcactcccgatccgtctcagatctgagcgatccatccactcctcgcttccgagacgactctcgcactcctatttcgtatgcccaagtcatcccctttactttgtttgagcttgagaccatcaccaagagcttccgcccagattatatactcggagaaggtggtttcggtaccgtctacaagggttacattgatgacaatctccgcgtcggcctcaagtctctccctgttgccgtcaaggtccttaacaaggagggactccagggtcaccgtgaatggcttacagaggtcaacttcctcggccaactccgtcatcccaacctcgtcaagcttattggttactgctgcgaggacgatcaccgattacttgtttatgagttcatgctgcgaggcagtcttgagaatcacctatttcgaaaaaccacagctccgctatcttggtctagaaggatgatgattgctcttggagctgcgaaaggccttgctttcctccacaatgctgaaagaccggttatttatagggatttcaagacttccaatatactgcttgactccgactacaccgccaagctttcagattttggcttagctaaagctggaccccagggtgatgaaacccatgtatcaactcgagttatgggtacttatggctatgctgccccagaatatgtgatgactggacacttgacggccagaagtgatgtatacagctttggagttgttcttctagagatgttgacaggaagaaaatcagtggataagacaagacctagcaaagagcagaacttggttgattgggctcggccaaagctgaatgataaaagaaaactgctgcagataattgacccaagactggagaaccaatactctgtcagggcagctcagaaggcatgcagcttggcgtattattgtcttagccagaacccgaaagctaggccattgatgagcgatgtggttgagactttggaacctttgcagtgtactggtgatgccctgatcccttgtgcaactactacagctggagctgcatttgcaatgggaggggtgcctgattacagaatgcaccggaggtttgcaaagaacgttgggccaggtgcaatttgccggtcacccaatccaaattattcaccgggtggacctgcagcatgcagagttcggtgattagtgtcaagtgtatataatccgtttcgctgtgtctccttttccgtaatttctctcagagccaaacatctggttgctaaaaatcgtggatgcacgttgtttttgttgttgttgatgctgctgtttattgccactttactgtgttgatctgtctagagtcttgtatgattatgaatgagtgtggttcttgtttaatccgcactctgatgcagtatgcttgtagtagtcgacacttattcactccaaggtgaattttttttgtgtaagcagatatggttttctaacaagtggacattctccagccataatggtttggtagggttgcacattgtacttactgggcgaagagaagataacatatcaatgaacagtagacatatgatgctattaat

SEQ ID NO: 107711 - protein, 410 aa, Arabidopsis thaliana
  peptide (1)..(410): Ceres Seq. ID no. 13651358
  misc_feature (69)..(346): Pfam Name: Protein kinase domain Pfam Description: Protein kinase domain
  misc_feature (1)..(410): Homolog of NCBI NO: 30679085 NR Description: protein kinase family [Arabidopsis thaliana]
  misc_feature (1)..(410): Homolog of NCBI NO: 9542860 NR Description: protein kinase-like protein [Arabidopsis thaliana]
  misc_feature (15)..(363): Homolog of NCBI NO: 15225019 NR Description: protein kinase, putative [Arabidopsis thaliana]
  misc_feature (9)..(355): Homolog of NCBI NO: 22325532 NR Description: protein kinase, putative [Arabidopsis thaliana]
  misc_feature (9)..(355): Homolog of NCBI NO: 25287636 NR Description: probable protein kinase [imported] - Arabidopsis >gi|3805765|gb|AAC69121.1| putative protein kinase [Arabidopsis
  misc_feature (15)..(350): Homolog of NCBI NO: 30013675 NR Description: Avr9/Cf-9 rapidly elicited protein 264 [Nicotiana
  misc_feature (9)..(355): Homolog of NCBI NO: 19423982 NR Description: putative protein kinase [Arabidopsis thaliana]
  misc_feature (1)..(358): Homolog of NCBI NO: 15241220 NR Description: protein kinase, putative [Arabidopsis thaliana]
  misc_feature (109)..(354): Homolog of NCBI NO: 27436752 NR Description: Putative serine/threonine protein kinase [Oryza
  misc_feature (17)..(118): Homolog of NCBI NO: 27436752 NR Description: Putative serine/threonine protein kinase [Oryza
MGNCGTRDEAAVFTPQAQAQQLQKKHSRSVSDLSDPSTPRFRDDSRTPISYAQVIPFTLFELETITKSFRPDYILGEGGFGTVYKGYIDDNLRVGLKSLPVAVKVLNKEGLQGHREWLTEVNFLGQLRHPNLVKLIGYCCEDDHRLLVYEFMLRGSLENHLFRKTTAPLSWSRRMMIALGAAKGLAFLHNAERPVIYRDFKTSNILLDSDYTAKLSDFGLAKAGPQGDETHVSTRVMGTYGYAAPEYVMTGHLTARSDVYSFGVVLLEMLTGRKSVDKTRPSKEQNLVDWARPKLNDKRKLLQIIDPRLENQYSVRAAQKACSLAYYCLSQNPKARPLMSDVVETLEPLQCTGDALIPCATTTAGAAFAMGGVPDYRMHRRFAKNVGPGAICRSPNPNYSPGGPAACRVR

SEQ ID NO: 107712 - protein, 259 aa, Arabidopsis thaliana
  peptide (1)..(259): Ceres Seq. ID no. 13651359
  misc_feature (1)..(195): Pfam Name: Protein kinase domain Pfam Description: Protein kinase domain
  misc_feature (1)..(259): Homolog of NCBI NO: 30679085 NR Description: protein kinase family [Arabidopsis thaliana]
  misc_feature (1)..(259): Homolog of NCBI NO: 9542860 NR Description: protein kinase-like protein [Arabidopsis thaliana]
  misc_feature (1)..(212): Homolog of NCBI NO: 15225019 NR Description: protein kinase, putative [Arabidopsis thaliana]
  misc_feature (1)..(204): Homolog of NCBI NO: 22325532 NR Description: protein kinase, putative [Arabidopsis thaliana]
  misc_feature (1)..(204): Homolog of NCBI NO: 25287636 NR Description: probable protein kinase [imported] - Arabidopsis >gi|3805765|gb|AAC69121.1| putative protein kinase [Arabidopsis
  misc_feature (1)..(199): Homolog of NCBI NO: 30013675 NR Description: Avr9/Cf-9 rapidly elicited protein 264 [Nicotiana
  misc_feature (1)..(204): Homolog of NCBI NO: 19423982 NR Description: putative protein kinase [Arabidopsis thaliana]
  misc_feature (1)..(207): Homolog of NCBI NO: 15241220 NR Description: protein kinase, putative [Arabidopsis thaliana]
  misc_feature (1)..(203): Homolog of NCBI NO: 27436752 NR Description: Putative serine/threonine protein kinase [Oryza
  misc_feature (1)..(199): Homolog of NCBI NO: 22773239 NR Description: Putative protein kinase [Oryza sativa (japonica
MLRGSLENHLFRKTTAPLSWSRRMMIALGAAKGLAFLHNAERPVIYRDFKTSNILLDSDYTAKLSDFGLAKAGPQGDETHVSTRVMGTYGYAAPEYVMTGHLTARSDVYSFGVVLLEMLTGRKSVDKTRPSKEQNLVDWARPKLNDKRKLLQIIDPRLENQYSVRAAQKACSLAYYCLSQNPKARPLMSDVVETLEPLQCTGDALIPCATTTAGAAFAMGGVPDYRMHRRFAKNVGPGAICRSPNPNYSPGGPAACRVR

SEQ ID NO: 107713 - protein, 236 aa, Arabidopsis thaliana; identical to SEQ ID NO: 71405
  peptide (1)..(236): Ceres Seq. ID no. 13651360
  misc_feature (1)..(172): Pfam Name: Protein kinase domain Pfam Description: Protein kinase domain
  misc_feature (1)..(236): Homolog of NCBI NO: 30679085 NR Description: protein kinase family [Arabidopsis thaliana]
  misc_feature (1)..(236): Homolog of NCBI NO: 9542860 NR Description: protein kinase-like protein [Arabidopsis thaliana]
  misc_feature (1)..(189): Homolog of NCBI NO: 15225019 NR Description: protein kinase, putative [Arabidopsis thaliana]
  misc_feature (1)..(181): Homolog of NCBI NO: 22325532 NR Description: protein kinase, putative [Arabidopsis thaliana]
  misc_feature (1)..(181): Homolog of NCBI NO: 25287636 NR Description: probable protein kinase [imported] - Arabidopsis >gi|3805765|gb|AAC69121.1| putative protein kinase [Arabidopsis
  misc_feature (1)..(176): Homolog of NCBI NO: 30013675 NR Description: Avr9/Cf-9 rapidly elicited protein 264 [Nicotiana
  misc_feature (1)..(181): Homolog of NCBI NO: 19423982 NR Description: putative protein kinase [Arabidopsis thaliana]
  misc_feature (1)..(184): Homolog of NCBI NO: 15241220 NR Description: protein kinase, putative [Arabidopsis thaliana]
  misc_feature (1)..(180): Homolog of NCBI NO: 27436752 NR Description: Putative serine/threonine protein kinase [Oryza
  misc_feature (1)..(176): Homolog of NCBI NO: 22773239 NR Description: Putative protein kinase [Oryza sativa (japonica

SEQ ID NO: 107714 - DNA, 1725 bp, Arabidopsis thaliana
  misc_feature (1)..(1725): Ceres Seq. ID no. 13651361
  misc_feature: MA Experiment ID: 20000234 Result: Up-regulated in Transcription
  misc_feature: MA Experiment 20000234 PARAMETER Experiment Name: At_Siliques_P Parameter: Age (day) Value: 21
  misc_feature: MA Experiment 20000234 PARAMETER Experiment Name: At_Siliques_P Parameter: Organism Value: A. thaliana
  misc_feature: MA Experiment 20000234 PARAMETER Experiment Name: At_Siliques_P Parameter: Plant Line Value: WS
  misc_feature: MA Experiment 20000234 PARAMETER Experiment Name: At_Siliques_P Parameter: Tissue Value: Less Than 5mm Siliques vs. Whole Plant
  misc_feature: MA Experiment ID: 20000235 Result: Up-regulated in Transcription
  misc_feature: MA Experiment 20000235 PARAMETER Experiment Name: At_Siliques_P Parameter: Age (day) Value: 21
  misc_feature: MA Experiment 20000235 PARAMETER Experiment Name: At_Siliques_P Parameter: Organism Value: A. thaliana
  misc_feature: MA Experiment 20000235 PARAMETER Experiment Name: At_Siliques_P Parameter: Plant Line Value: WS
  misc_feature: MA Experiment 20000235 PARAMETER Experiment Name: At_Siliques_P Parameter: Tissue Value: 5-10mm Siliques vs. Whole Plant
  misc_feature: MA Experiment ID: 20000264 Result: Up-regulated in Transcription
  misc_feature: MA Experiment 20000264 PARAMETER Experiment Name: At_Open_Flower_P Parameter: Age (day) Value: 21
  misc_feature: MA Experiment 20000264 PARAMETER Experiment Name: At_Open_Flower_P Parameter: Plant Line Value: WS
  misc_feature: MA Experiment 20000264 PARAMETER Experiment Name: At_Open_Flower_P Parameter: Tissue Value: Open Flower vs. Whole Plant
  misc_feature: MA Experiment ID: 20000265 Result: Up-regulated in Transcription
  misc_feature: MA Experiment 20000265 PARAMETER Experiment Name: At_Open_Flower_P Parameter: Age (day) Value: 21
  misc_feature: MA Experiment 20000265 PARAMETER Experiment Name: At_Open_Flower_P Parameter: Plant Line Value: WS
  misc_feature: MA Experiment 20000265 PARAMETER Experiment Name: At_Open_Flower_P Parameter: Tissue Value: Closed Flower vs. Whole Plant
  misc_feature: MA Experiment ID: 20000286 Result: Up-regulated in Transcription
  misc_feature: MA Experiment 20000286 PARAMETER Experiment Name: At_Open_Flower_P Parameter: Age (day) Value: 21
  misc_feature: MA Experiment 20000286 PARAMETER Experiment Name: At_Open_Flower_P Parameter: Plant Line Value: WS
  misc_feature: MA Experiment 20000286 PARAMETER Experiment Name: At_Open_Flower_P Parameter: Tissue Value: Half Open vs. Whole Plant
  misc_feature: MA Experiment ID: 20000794 Result: Up-regulated in Transcription
  misc_feature: MA Experiment 20000794 PARAMETER Experiment Name: At_Petals_P Parameter: Age (day) Value: 23-25 days
  misc_feature: MA Experiment 20000794 PARAMETER Experiment Name: At_Petals_P Parameter: Plant Line Value: WS
  misc_feature: MA Experiment 20000794 PARAMETER Experiment Name: At_Petals_P Parameter: Tissue Value: Petals vs. Whole plant
  misc_feature: MA Experiment ID: 20001757 Result: Down-regulated in Transcription
  misc_feature: MA Experiment 20001757 PARAMETER Experiment Name: At_50mM_NH4NO3_L-to-H_P Parameter: Timepoint (hr) Value: 6
  misc_feature: MA Experiment 20001757 PARAMETER Experiment Name: At_50mM_NH4NO3_L-to-H_P Parameter: Tissue Value: Leaf
  misc_feature: MA Experiment 20001757 PARAMETER Experiment Name: At_50mM_NH4NO3_L-to-H_P Parameter: Treatment Value: 50mM NH4NO3 vs 100mM Mannitol
  misc_feature: MA Experiment ID: 20001910 Result: Up-regulated in Transcription
  misc_feature: MA Experiment 20001910 PARAMETER Experiment Name: At_Drought_Reproduction_P Parameter: Age (day) Value: 37
  misc_feature: MA Experiment 20001910 PARAMETER Experiment Name: At_Drought_Reproduction_P Parameter: Organism Value: A. thaliana
  misc_feature: MA Experiment 20001910 PARAMETER Experiment Name: At_Drought_Reproduction_P Parameter: Plant Line Value: WS
  misc_feature: MA Experiment 20001910 PARAMETER Experiment Name: At_Drought_Reproduction_P Parameter: Timepoint (day) Value: 7
  misc_feature: MA Experiment 20001910 PARAMETER Experiment Name: At_Drought_Reproduction_P Parameter: Tissue Value: Flowers
  misc_feature: MA Experiment 20001910 PARAMETER Experiment Name: At_Drought_Reproduction_P Parameter: Treatment Value: Drought vs. No Drought
  misc_feature: Pfam Name: Pkinase Pfam Description: Protein kinase domain
gtctcatttcttgtctccaatccatggaaggccttcgagactcatcgtcacaaactatctcttccacgacgtcgtcttcttcgtctccgtcctgcgatgtagacgttgacaatcgtggaaaacaattaactccttctacaagacgatctcgagccggcttctctgattctttctcttctcatgatttatcatcattctgtcgagatgaagaagtaaaaacattctgccccatcaaatcggaatcagacgatgaattattaaggagcatagaagccgaaacttcatcttccgtggtgagcacgtcagactcatcagaaactcatcaccatcaccatcatcatcattcgtctggaggtcccaacaacggtcactggagaagaggtttcttccgtttgcttaagaaaggatcatccgcaatgccattcaacacgttcacacctctcaaaggagttccgaaactgaccagacggaagagcaaacgcataagggacaacatggttcccgttatacctgctcttgacactgatcacttgttctatttcaaaccctcctggaggaacttctctctccgagatattcagaccgcgacaaatgactacagccgtgaaaatctgatcggagaaggaggatatgcggaggtgtataagggacaaatggcagatgggcagatagtagcgataaagaagttgactagaggttctgcagaagagatgacgatggattatctgtccgaactagggatcattgttcatgtagatcatccaaacattgctaagcttattggttattgtgttgaaggaggaatgcatcttgttcttgagctatctcctaatggaagccttgcttctttgctctacgaggcgaaggagaaactgaattggagcatgagatacaaagtggcgatgggaacagcagagggactctactatctccatgaaggttgtcagagaagaatcattcataaagacattaaagcttctaacattcttctcactcagaactttgaggctcagatatcggatttcgggctagcgaaatggctaccagaccaatggactcaccatactgtatcaaaagttgaaggaacattcggttaccttccgccagagtttttcatgcatgggatagtagacgagaaaacagacgtatatgcttatggtgtcctgcttctcgagctcattaccggtagacaagccctcgacagctcacaacatagcattgtcatgtgggctaagccattgatcaaagagaacaagatcaaacaacttgttgatccgattctggaagatgactacgacgtagaagagttggaccgtcttgtcttcatagcttccttgtgtatacatcaaacctccatgaaccggcctcagatgagccaggttgtggagattctgaggggagacaagtgcagcttagataagctaagagagcgagaaaactccaaactccagaggacttactctgaagaactattggataacgaagaatacaactcgacaagatatttaaacgatattaatcgacacatggagaccgttctcggaacatctaaggattaattctgaaatgtcctacttgctaaatgcaagacaaacatttcattgagtccatatatttgttcactatagagtttgtatgactgctgaggattggagatgaatccgatcaggattggatattaagttagtagagaaaaggactgaaaaagttcaatattgccttagc

SEQ ID NO: 107715 - protein, 518 aa, Arabidopsis thaliana
  peptide (1)..(518): Ceres Seq. ID no. 13651362
  misc_feature: Pfam Name: Pkinase Pfam Description: Protein kinase domain
  misc_feature (8)..(518): Homolog of NCBI NO: 30687061 NR Description: protein kinase family [Arabidopsis thaliana] putative protein kinase [Arabidopsis thaliana]
  misc_feature (69)..(515): Homolog of NCBI NO: 22330852 NR Description: protein kinase family [Arabidopsis thaliana] putative serine/threonine protein kinase [Arabidopsis thaliana]
  misc_feature (85)..(467): Homolog of NCBI NO: 15239245 NR Description: protein kinase, putative [Arabidopsis thaliana]
  misc_feature (89)..(513): Homolog of NCBI NO: 30698132 NR Description: protein kinase, putative [Arabidopsis thaliana]
  misc_feature (89)..(510): Homolog of NCBI NO: 26452369 NR Description: unknown protein [Arabidopsis thaliana]
  misc_feature (79)..(513): Homolog of NCBI NO: 15810235 NR Description: putative Pto kinase interactor [Arabidopsis
  misc_feature (79)..(513): Homolog of NCBI NO: 18416299 NR Description: protein kinase family [Arabidopsis thaliana]
  misc_feature (79)..(513): Homolog of NCBI NO: 11358733 NR Description: Pto kinase interactor-like protein - Arabidopsis
  misc_feature (173)..(494): Homolog of NCBI NO: 15224251 NR Description: protein kinase family [Arabidopsis thaliana]
  misc_feature (181)..(469): Homolog of NCBI NO: 40253745 NR Description: SERK1 protein-like [Oryza sativa (japonica
LISCLQSMEGLRDSSSQTISSTTSSSSSPSCDVDVDNRGKQLTPSTRRSRAGFSDSFSSHDLSSFCRDEEVKTFCPIKSESDDELLRSIEAETSSSVVSTSDSSETHHHHHHHHSSGGPNNGHWRRGFFRLLKKGSSAMPFNTFTPLKGVPKLTRRKSKRIRDNMVPVIPALDTDHLFYFKPSWRNFSLRDIQTATNDYSRENLIGEGGYAEVYKGQMADGQIVAIKKLTRGSAEEMTMDYLSELGIIVHVDHPNIAKLIGYCVEGGMHLVLELSPNGSLASLLYEAKEKLNWSMRYKVAMGTAEGLYYLHEGCQRRIIHKDIKASNILLTQNFEAQISDFGLAKWLPDQWTHHTVSKVEGTFGYLPPEFFMHGIVDEKTDVYAYGVLLLELITGRQALDSSQHSIVMWAKPLIKENKIKQLVDPILEDDYDVEELDRLVFIASLCIHQTSMNRPQMSQVVEILRGDKCSLDKLRERENSKLQRTYSEELLDNEEYNSTRYLNDINRHMETVLGTSKD

SEQ ID NO: 107716 - protein, 511 aa, Arabidopsis thaliana
  peptide (1)..(511): Ceres Seq. ID no. 13651363
  misc_feature: Pfam Name: Pkinase Pfam Description: Protein kinase domain
  misc_feature (1)..(511): Homolog of NCBI NO: 30687061 NR Description: protein kinase family [Arabidopsis thaliana] putative protein kinase [Arabidopsis thaliana]
  misc_feature (62)..(508): Homolog of NCBI NO: 22330852 NR Description: protein kinase family [Arabidopsis thaliana] putative serine/threonine protein kinase [Arabidopsis thaliana]
  misc_feature (78)..(460): Homolog of NCBI NO: 15239245 NR Description: protein kinase, putative [Arabidopsis thaliana]
  misc_feature (82)..(506): Homolog of NCBI NO: 30698132 NR Description: protein kinase, putative [Arabidopsis thaliana]
  misc_feature (82)..(503): Homolog of NCBI NO: 26452369 NR Description: unknown protein [Arabidopsis thaliana]
  misc_feature (72)..(506): Homolog of NCBI NO: 15810235 NR Description: putative Pto kinase interactor [Arabidopsis
  misc_feature (72)..(506): Homolog of NCBI NO: 18416299 NR Description: protein kinase family [Arabidopsis thaliana]
  misc_feature (72)..(506): Homolog of NCBI NO: 11358733 NR Description: Pto kinase interactor-like protein - Arabidopsis
  misc_feature (166)..(487): Homolog of NCBI NO: 15224251 NR Description: protein kinase family [Arabidopsis thaliana]
  misc_feature (174)..(462): Homolog of NCBI NO: 40253745 NR Description: SERK1 protein-like [Oryza sativa (japonica
MEGLRDSSSQTISSTTSSSSSPSCDVDVDNRGKQLTPSTRRSRAGFSDSFSSHDLSSFCRDEEVKTFCPIKSESDDELLRSIEAETSSSVVSTSDSSETHHHHHHHHSSGGPNNGHWRRGFFRLLKKGSSAMPFNTFTPLKGVPKLTRRKSKRIRDNMVPVIPALDTDHLFYFKPSWRNFSLRDIQTATNDYSRENLIGEGGYAEVYKGQMADGQIVAIKKLTRGSAEEMTMDYLSELGIIVHVDHPNIAKLIGYCVEGGMHLVLELSPNGSLASLLYEAKEKLNWSMRYKVAMGTAEGLYYLHEGCQRRIIHKDIKASNILLTQNFEAQISDFGLAKWLPDQWTHHTVSKVEGTFGYLPPEFFMHGIVDEKTDVYAYGVLLLELITGRQALDSSQHSIVMWAKPLIKENKIKQLVDPILEDDYDVEELDRLVFIASLCIHQTSMNRPQMSQVVEILRGDKCSLDKLRERENSKLQRTYSEELLDNEEYNSTRYLNDINRHMETVLGTSKD

SEQ ID NO: 107717 - protein, 380 aa, Arabidopsis thaliana
  peptide (1)..(380): Ceres Seq. ID no. 13651364
  misc_feature: Pfam Name: Pkinase Pfam Description: Protein kinase domain
  misc_feature (1)..(380): Homolog of NCBI NO: 30687061 NR Description: protein kinase family [Arabidopsis thaliana] putative protein kinase [Arabidopsis thaliana]
  misc_feature (1)..(377): Homolog of NCBI NO: 22330852 NR Description: protein kinase family [Arabidopsis thaliana] putative serine/threonine protein kinase [Arabidopsis thaliana]
  misc_feature (1)..(329): Homolog of NCBI NO: 15239245 NR Description: protein kinase, putative [Arabidopsis thaliana]
  misc_feature (1)..(375): Homolog of NCBI NO: 30698132 NR Description: protein kinase, putative [Arabidopsis thaliana]
  misc_feature (1)..(372): Homolog of NCBI NO: 26452369 NR Description: unknown protein [Arabidopsis thaliana]
  misc_feature (1)..(375): Homolog of NCBI NO: 15810235 NR Description: putative Pto kinase interactor [Arabidopsis
  misc_feature (1)..(375): Homolog of NCBI NO: 18416299 NR Description: protein kinase family [Arabidopsis thaliana]
  misc_feature (1)..(375): Homolog of NCBI NO: 11358733 NR Description: Pto kinase interactor-like protein - Arabidopsis
  misc_feature (35)..(356): Homolog of NCBI NO: 15224251 NR Description: protein kinase family [Arabidopsis thaliana]
  misc_feature (43)..(331): Homolog of NCBI NO: 40253745 NR Description: SERK1 protein-like [Oryza sativa (japonica
MPFNTFTPLKGVPKLTRRKSKRIRDNMVPVIPALDTDHLFYFKPSWRNFSLRDIQTATNDYSRENLIGEGGYAEVYKGQMADGQIVAIKKLTRGSAEEMTMDYLSELGIIVHVDHPNIAKLIGYCVEGGMHLVLELSPNGSLASLLYEAKEKLNWSMRYKVAMGTAEGLYYLHEGCQRRIIHKDIKASNILLTQNFEAQISDFGLAKWLPDQWTHHTVSKVEGTFGYLPPEFFMHGIVDEKTDVYAYGVLLLELITGRQALDSSQHSIVMWAKPLIKENKIKQLVDPILEDDYDVEELDRLVFIASLCIHQTSMNRPQMSQVVEILRGDKCSLDKLRERENSKLQRTYSEELLDNEEYNSTRYLNDINRHMETVLGTSKD

SEQ ID NO: 107718 - DNA, 3471 bp, Arabidopsis thaliana
  misc_feature (1)..(3471): Ceres Seq. ID no. 13651372
  misc_feature: MA Experiment ID: 20000179 Result: Down-regulated in Transcription
  misc_feature: MA Experiment 20000179 PARAMETER Experiment Name: At_Germinating_Seeds_P Parameter: Age (hr) Value: 6 vs. 0
  misc_feature: MA Experiment 20000179 PARAMETER Experiment Name: At_Germinating_Seeds_P Parameter: Tissue Value: Germinating Seeds
atggagttgtcttcactcttcatcttcagagtctcgtactcttgttgcgttttttcgcgcgcattcttccgctttgctttgttgttccaatatctctctcttacctctgtttcgttattctcaatcatataggttctgctatgtatatactctcagctcttagggttcaaatgtgtatatagtatggttcagcaatcagcacaccacgtgttcgatgatatgcttcaatgaagttttctcaacttgtagtcttattctgctttgatctcaagtagagaagcatattttttgttgtggagctcgaatatggcgcgttgggcatggtgttgttagacagagtatatgccgtatattcttggaggtctcaccatagccgacattgtcaagtttattcccagattatggaaaaagtcgcagtcttgttccaagaactttccaaacccacattgaaccaatgctgagtgagagtcttttcaaatctcttggacatttggccagccacggtcatttgcacgacgctttcaaaacgttttctcttcttcgtcttcaatcttcttctgcagtttcagatgacctcgttttgcattccgcggcttcccttttatccgcttgcgttgatgttcgtgcatttttagcaggggtgcaagttcacgctcactgtatttcgtcgggtgtcgaatatcactctgtgttagtcccaaagctggttaccttttactctgctttcaatctccacaatgaagctcaatcgattattgagaactctgacattttgcatcccttaccttggaatgtgctcattgcttcgtatgccaagaacgagctttttgaggaggttattgctgcttacaagagaatggtgagcaagggaatccgacccgatgccttcacttatccgtctgttcttaaggcttgtggtgaaacacttgacgttgcctttggaagggtggttcatggttccatcgagtgataaactgttatgcttcggaaggcatgtggagtgaagcgtttgagcttttcgataaaatgtggttttcaggtgttgaggtcagtgtcataacttggaatattatttctggaggttgtttgcaaacaggaaattatgtaggagctttgggtttgatctctaggatgagaaattttcctacgagcttagatcctgtggctatgattattggtttgaaggcttgctctctcataggagcaatacgattgggaaaagagattcacggtcttgctattcacagttcttatgatgggattgacaatgttcgaaacacgttgatcacaatgtactcaaaatgcaaagaccttaggcacgccttaatagtgtttcgacagactgaagaaaatagtttgtgtacttggaactctatcatttccggttatgcgcagctgaacaaatcagaagaagcctctcacctgctgagggagatgttggttgctggctttcagccaaattccattacactagcaagcattctccctctttgtgctcggattgcaaacctgcaacatggaaaagagtttcattgctacatcctgaggcgcaagtgcttcaaggactatacaatgctgtggaactcccttgttgatgtttatgcaaaatcgggaaagattgtagctgcaaagcaagtatctgatttgatgagcaaaagagacgaagtaacatacacttccttgatagatggatacggaaatcaaggtgaagggggagtagccttggccctgttcaaggagatgaccagatctggtattaaacctgaccatgtaaccgtggttgcagttctatcagcctgcagtcattccaagttagtccatgaaggtgaaaggctgtttatgaagatgcagtgtgagtatggtatacgtccttgtcttcaacatttttcttgtatggttgatctctatggcagagcaggtttcctagcaaaagccaaagacataattcacaatatgccatataagccatccggtgccacgtgggctaccctactgaacgcgtgtcacatccatgggaacacacagattggtaaatgggcagcagaaaagctcctggagatgaagccagagaacccgggatactacgtgttaattgcaaatatgtatgcagctgctggttcttggagcaagcttgctgaagtgaggactataatgagggacttgggtgtgaaaaaggatcctggctgtgcttggatcgacacagattctggattttcactgttttcggtgggggacacatcaagccctgaagcatgtaatacttatcctctattagatggactgaatcagctgatgaaagacaatgctggttatgccatcaataaggtgcaaagttcagatgaagaacttcttcaagaaatgggatgaaggtgaagagctgaggatgatcaactggagctttatttagttaatagcacatagtctatatacgcctgcatatcaccagactgagaacaagttggatacacatgacaagttctagtatatacattaactaaaattggacaatggtggggattgctgcggaagtatttttcctatataacacaaagaaaacttatattgtgagctgattcacttcatcgagcaagagctttgtaatgccatcagaattggtcggccagttgaggaaatttctgcagcagccaggtttgattgcaggctcaacgcagtctcttccatatctgcaaacaaaacagagaagaaatgtttatcccagcaagacaaaaattggcatctctgtcagtctacacgatctgtcgagaaaagtgtgcttacacgatctgtctcttcccatcaatcacctctaaccgctgaagagtcttctgttgagatatcatctatcacgaattggagatccgtacttgttgattcaatgaattttccgaagaaatcaagaattgcctgtcatggctttatcaaaattaggctctgagacacaacaaagtctgaaaagaagagactttggtttattagaataataatcgtttcacctttcggccaacaaagggagatgagaagacgagatcctcgtagacgcagtcctgagcgatgaggtctgtgacagaggataaatcatggacgttaacggcggcgtagaagctggagacgacctccgacgctgatgtcggagctgtttctggaacaacgtcgttggctgtagcagcttttgcagctggaccataggatgcggacaatctcggaggctgtgaatgagtgaggcttgttggcttgacaagtttggttgggaggaagaaggaaggaggaagatggttgagcgagacgagtgagggagacgtcaaataagagacgagagaagcagtgaagctcatcgtcgtttcttgatatgatgtcttcgtttttgtggctcatttgtgtttgtgattaagagagcaaagagttgaattttgaatttcaattggaatttgtggacagaaattcttattagtagtccctatgattatcgatgcc

SEQ ID NO: 107719 - protein, 457 aa, Arabidopsis thaliana
  peptide (1)..(457): Ceres Seq. ID no. 13651373
  misc_feature (296)..(330): Pfam Name: PPR repeat Pfam Description: PPR repeat
  misc_feature (1)..(405): Homolog of NCBI NO: 15220977 NR Description: pentatricopeptide (PPR) repeat-containing protein
  misc_feature (1)..(436): Homolog of NCBI NO: 34904686 NR Description: P0446G09.7 [Oryza sativa (japonica
  misc_feature (1)..(169): Homolog of NCBI NO: 7487353 NR Description: hypothetical protein T22J18.1 - Arabidopsis
  misc_feature (1)..(455): Homolog of NCBI NO: 15237421 NR Description: pentatricopeptide (PPR) repeat-containing protein
  misc_feature (1)..(456): Homolog of NCBI NO: 15223099 NR Description: pentatricopeptide (PPR) repeat-containing protein thaliana] >gi|8778839|gb|AAF79838.1|AC026875_18 T6D22.15
  misc_feature (1)..(440): Homolog of NCBI NO: 21741755 NR Description: OSJNBa0060B20.9 [Oryza sativa (japonica
  misc_feature (148)..(405): Homolog of NCBI NO: 2462841 NR Description: similar to selenium-binding protein
  misc_feature (18)..(451): Homolog of NCBI NO: 11994419 NR Description: selenium-binding protein-like [Arabidopsis
  misc_feature (18)..(451): Homolog of NCBI NO: 15230593 NR Description: pentatricopeptide (PPR) repeat-containing protein
  misc_feature (1)..(456): Homolog of NCBI NO: 15220337 NR Description: pentatricopeptide (PPR) repeat-containing protein
MWSEAFELFDKMWFSGVEVSVITWNIISGGCLQTGNYVGALGLISRMRNFPTSLDPVAMIIGLKACSLIGAIRLGKEIHGLAIHSSYDGIDNVRNTLITMYSKCKDLRHALIVFRQTEENSLCTWNSIISGYAQLNKSEEASHLLREMLVAGFQPNSITLASILPLCARIANLQHGKEFHCYILRRKCFKDYTMLWNSLVDVYAKSGKIVAAKQVSDLMSKRDEVTYTSLIDGYGNQGEGGVALALFKEMTRSGIKPDHVTVVAVLSACSHSKLVHEGERLFMKMQCEYGIRPCLQHFSCMVDLYGRAGFLAKAKDIIHNMPYKPSGATWATLLNACHIHGNTQIGKWAAEKLLEMKPENPGYYVLIANMYAAAGSWSKLAEVRTIMRDLGVKKDPGCAWIDTDSGFSLFSVGDTSSPEACNTYPLLDGLNQLMKDNAGYAINKVQSSDEELLQEMG

SEQ ID NO: 107720 - protein, 446 aa, Arabidopsis thaliana
  peptide (1)..(446): Ceres Seq. ID no. 13651374
  misc_feature (285)..(319): Pfam Name: PPR repeat Pfam Description: PPR repeat
  misc_feature (1)..(394): Homolog of NCBI NO: 15220977 NR Description: pentatricopeptide (PPR) repeat-containing protein
  misc_feature (1)..(425): Homolog of NCBI NO: 34904686 NR Description: P0446G09.7 [Oryza sativa (japonica
  misc_feature (1)..(158): Homolog of NCBI NO: 7487353 NR Description: hypothetical protein T22J18.1 - Arabidopsis
  misc_feature (1)..(444): Homolog of NCBI NO: 15237421 NR Description: pentatricopeptide (PPR) repeat-containing protein
  misc_feature (1)..(445): Homolog of NCBI NO: 15223099 NR Description: pentatricopeptide (PPR) repeat-containing protein thaliana] >gi|8778839|gb|AAF79838.1|AC026875_18 T6D22.15
  misc_feature (1)..(429): Homolog of NCBI NO: 21741755 NR Description: OSJNBa0060B20.9 [Oryza sativa (japonica
  misc_feature (137)..(394): Homolog of NCBI NO: 2462841 NR Description: similar to selenium-binding protein
  misc_feature (7)..(440): Homolog of NCBI NO: 11994419 NR Description: selenium-binding protein-like [Arabidopsis
  misc_feature (7)..(440): Homolog of NCBI NO: 15230593 NR Description: pentatricopeptide (PPR) repeat-containing protein
  misc_feature (1)..(445): Homolog of NCBI NO: 15220337 NR Description: pentatricopeptide (PPR) repeat-containing protein
MWFSGVEVSVITWNIISGGCLQTGNYVGALGLISRMRNFPTSLDPVAMIIGLKACSLIGAIRLGKEIHGLAIHSSYDGIDNVRNTLITMYSKCKDLRHALIVFRQTEENSLCTWNSIISGYAQLNKSEEASHLLREMLVAGFQPNSITLASILPLCARIANLQHGKEFHCYILRRKCFKDYTMLWNSLVDVYAKSGKIVAAKQVSDLMSKRDEVTYTSLIDGYGNQGEGGVALALFKEMTRSGIKPDHVTVVAVLSACSHSKLVHEGERLFMKMQCEYGIRPCLQHFSCMVDLYGRAGFLAKAKDIIHNMPYKPSGATWATLLNACHIHGNTQIGKWAAEKLLEMKPENPGYYVLIANMYAAAGSWSKLAEVRTIMRDLGVKKDPGCAWIDTDSGFSLFSVGDTSSPEACNTYPLLDGLNQLMKDNAGYAINKVQSSDEELLQEMG

SEQ ID NO: 107721 - protein, 411 aa, Arabidopsis thaliana
  peptide (1)..(411): Ceres Seq. ID no. 13651375
  misc_feature (250)..(284): Pfam Name: PPR repeat Pfam Description: PPR repeat
  misc_feature (1)..(359): Homolog of NCBI NO: 15220977 NR Description: pentatricopeptide (PPR) repeat-containing protein
  misc_feature (1)..(390): Homolog of NCBI NO: 34904686 NR Description: P0446G09.7 [Oryza sativa (japonica
  misc_feature (1)..(123): Homolog of NCBI NO: 7487353 NR Description: hypothetical protein T22J18.1 - Arabidopsis
  misc_feature (1)..(409): Homolog of NCBI NO: 15237421 NR Description: pentatricopeptide (PPR) repeat-containing protein
  misc_feature (1)..(410): Homolog of NCBI NO: 15223099 NR Description: pentatricopeptide (PPR) repeat-containing protein thaliana] >gi|8778839|gb|AAF79838.1|AC026875_18 T6D22.15
  misc_feature (1)..(394): Homolog of NCBI NO: 21741755 NR Description: OSJNBa0060B20.9 [Oryza sativa (japonica
  misc_feature (102)..(359): Homolog of NCBI NO: 2462841 NR Description: similar to selenium-binding protein
  misc_feature (1)..(405): Homolog of NCBI NO: 11994419 NR Description: selenium-binding protein-like [Arabidopsis
  misc_feature (1)..(405): Homolog of NCBI NO: 15230593 NR Description: pentatricopeptide (PPR) repeat-containing protein
  misc_feature (1)..(410): Homolog of NCBI NO: 15220337 NR Description: pentatricopeptide (PPR) repeat-containing protein
MRNFPTSLDPVAMIIGLKACSLIGAIRLGKEIHGLAIHSSYDGIDNVRNTLITMYSKCKDLRHALIVFRQTEENSLCTWNSIISGYAQLNKSEEASHLLREMLVAGFQPNSITLASILPLCARIANLQHGKEFHCYILRRKCFKDYTMLWNSLVDVYAKSGKIVAAKQVSDLMSKRDEVTYTSLIDGYGNQGEGGVALALFKEMTRSGIKPDHVTVVAVLSACSHSKLVHEGERLFMKMQCEYGIRPCLQHFSCMVDLYGRAGFLAKAKDIIHNMPYKPSGATWATLLNACHIHGNTQIGKWAAEKLLEMKPENPGYYVLIANMYAAAGSWSKLAEVRTIMRDLGVKKDPGCAWIDTDSGFSLFSVGDTSSPEACNTYPLLDGLNQLMKDNAGYAINKVQSSDEELLQEMG

SEQ ID NO: 107722 - DNA, 786 bp, Arabidopsis thaliana
  misc_feature (1)..(786): Ceres Seq. ID no. 13651376
  misc_feature: MA Experiment ID: 20000180 Result: Up-regulated in Transcription
  misc_feature: MA Experiment 20000180 PARAMETER Experiment Name: At_Germinating_Seeds_P Parameter: Age (hr) Value: 24 vs. 0
  misc_feature: MA Experiment 20000180 PARAMETER Experiment Name: At_Germinating_Seeds_P Parameter: Tissue Value: Germinating Seeds
  misc_feature: MA Experiment ID: 20000185 Result: Down-regulated in Transcription
  misc_feature: MA Experiment 20000185 PARAMETER Experiment Name: At_Roots__P Parameter: Age (day) Value: 7 vs. 21
  misc_feature: MA Experiment 20000185 PARAMETER Experiment Name: At_Roots__P Parameter: Organism Value: A. thaliana
  misc_feature: MA Experiment 20000185 PARAMETER Experiment Name: At_Roots__P Parameter: Tissue Value: Roots vs. Whole Plant
  misc_feature: MA Experiment ID: 20000265 Result: Up-regulated in Transcription
  misc_feature: MA Experiment 20000265 PARAMETER Experiment Name: At_Open_Flower_P Parameter: Age (day) Value: 21
  misc_feature: MA Experiment 20000265 PARAMETER Experiment Name: At_Open_Flower_P Parameter: Plant Line Value: WS
  misc_feature: MA Experiment 20000265 PARAMETER Experiment Name: At_Open_Flower_P Parameter: Tissue Value: Closed Flower vs. Whole Plant
  misc_feature: MA Experiment ID: 20000288 Result: Up-regulated in Transcription
  misc_feature: MA Experiment 20000288 PARAMETER Experiment Name: At_Drought_P Parameter: Age (day) Value: 7
  misc_feature: MA Experiment 20000288 PARAMETER Experiment Name: At_Drought_P Parameter: Organism Value: A. thaliana
  misc_feature: MA Experiment 20000288 PARAMETER Experiment Name: At_Drought_P Parameter: Plant Line Value: WS
  misc_feature: MA Experiment 20000288 PARAMETER Experiment Name: At_Drought_P Parameter: Timepoint (hr) Value: 1
  misc_feature: MA Experiment 20000288 PARAMETER Experiment Name: At_Drought_P Parameter: Tissue Value: Whole Plant
  misc_feature: MA Experiment 20000288 PARAMETER Experiment Name: At_Drought_P Parameter: Treatment Value: Drought vs. No Drought
  misc_feature: MA Experiment ID: 20000439 Result: Down-regulated in Transcription
  misc_feature: MA Experiment 20000439 PARAMETER Experiment Name: At_Roots__P Parameter: Age (day) Value: 14 vs. 21
  misc_feature: MA Experiment 20000439 PARAMETER Experiment Name: At_Roots__P Parameter: Organism Value: A. thaliana
  misc_feature: MA Experiment 20000439 PARAMETER Experiment Name: At_Roots__P Parameter: Tissue Value: Roots vs. Whole Plant
atatacacgacttccacgatctgttcgtctatctgatcattcgttttctaacaccagagagagattctttaagcacaaaagagagaaaaaagatctaatgttttctccacatgatggaacactctgttctaaaaagagggatcatatgaaagtttttggagaatcgtttcatggttctttcaaaaggagcaaacaaggagatcaaaaacaaaccaaatttgagaagaacactactactctgttctttcaaagatcaaagtcagatagcgccatgttgataaagcctgatgttcagcttcacctagaggctaagacccaatcagagacatttgaagatcataggacagacctggaccttaatttgaacctttattcgtcatcaagttcctctgtcaaaaaaacaatcatggagaaagatgaatgttccaaaggcggaactgtgatcatcagcccaagtaagaaggtgagatcaggtgatatagggctaagtcgatccccgtcttggctagcgtttgaaggtgatgatgatgataatcagaagaagcaagagatgataacaacagtgtgcatgaagtgtcacatgctggttatgctctgcaaatctactcttgtctgtcctaactgcaaattcatgcaccatgatgatcatagctccactaaacagtttcagactttaaatttgtttaagctcttatgctagacttttcagtgtatgttaatgagcccaagaatgtgaaactagatatgtatgagttatgtatatatacaagtactgattgttttatt

SEQ ID NO: 107723 - protein, 232 aa, Arabidopsis thaliana
  peptide (1)..(232): Ceres Seq. ID no. 13651377
  misc_feature (33)..(232): Homolog of NCBI NO: 30687784 NR Description: expressed protein [Arabidopsis thaliana]
  misc_feature (33)..(232): Homolog of NCBI NO: 25372722 NR Description: unknown protein T11I11.11 [imported] -
  misc_feature (110)..(232): Homolog of NCBI NO: 30699311 NR Description: expressed protein [Arabidopsis thaliana] unknown protein [Arabidopsis thaliana]
  misc_feature (108)..(218): Homolog of NCBI NO: 15236641 NR Description: hypothetical protein [Arabidopsis thaliana]
YTRLPRSVRLSDHSFSNTRERFFKHKREKKDLMFSPHDGTLCSKKRDHMKVFGESFHGSFKRSKQGDQKQTKFEKNTTTLFFQRSKSDSAMLIKPDVQLHLEAKTQSETFEDHRTDLDLNLNLYSSSSSSVKKTIMEKDECSKGGTVIISPSKKVRSGDIGLSRSPSWLAFEGDDDDNQKKQEMITTVCMKCHMLVMLCKSTLVCPNCKFMHHDDHSSTKQFQTLNLFKLLC

SEQ ID NO: 107724 - protein, 200 aa, Arabidopsis thaliana; identical to SEQ ID NO: 97919
  peptide (1)..(200): Ceres Seq. ID no. 13651378
  misc_feature (1)..(200): Homolog of NCBI NO: 30687784 NR Description: expressed protein [Arabidopsis thaliana]
  misc_feature (1)..(200): Homolog of NCBI NO: 25372722 NR Description: unknown protein T11I11.11 [imported] -
  misc_feature (78)..(200): Homolog of NCBI NO: 30699311 NR Description: expressed protein [Arabidopsis thaliana] unknown protein [Arabidopsis thaliana]
  misc_feature (76)..(186): Homolog of NCBI NO: 15236641 NR Description: hypothetical protein [Arabidopsis thaliana]

SEQ ID NO: 107725 - protein, 184 aa, Arabidopsis thaliana; identical to SEQ ID NO: 97920
  peptide (1)..(184): Ceres Seq. ID no. 13651379
  misc_feature (1)..(184): Homolog of NCBI NO: 30687784 NR Description: expressed protein [Arabidopsis thaliana]
  misc_feature (1)..(184): Homolog of NCBI NO: 25372722 NR Description: unknown protein T11I11.11 [imported] -
  misc_feature (62)..(184): Homolog of NCBI NO: 30699311 NR Description: expressed protein [Arabidopsis thaliana] unknown protein [Arabidopsis thaliana]
  misc_feature (60)..(170): Homolog of NCBI NO: 15236641 NR Description: hypothetical protein [Arabidopsis thaliana]

SEQ ID NO: 107726 - DNA, 1641 bp, Arabidopsis thaliana
  misc_feature (1)..(1641): Ceres Seq. ID no. 13651387
  misc_feature: MA Experiment ID: 20000234 Result: Down-regulated in Transcription
  misc_feature: MA Experiment 20000234 PARAMETER Experiment Name: At_Siliques_P Parameter: Age (day) Value: 21
  misc_feature: MA Experiment 20000234 PARAMETER Experiment Name: At_Siliques_P Parameter: Organism Value: A. thaliana
  misc_feature: MA Experiment 20000234 PARAMETER Experiment Name: At_Siliques_P Parameter: Plant Line Value: WS
  misc_feature: MA Experiment 20000234 PARAMETER Experiment Name: At_Siliques_P Parameter: Tissue Value: Less Than 5mm Siliques vs. Whole Plant
  misc_feature: MA Experiment ID: 20000438 Result: Up-regulated in Transcription
  misc_feature: MA Experiment 20000438 PARAMETER Experiment Name: At_Shoots__P Parameter: Age (day) Value: 14
  misc_feature: MA Experiment 20000438 PARAMETER Experiment Name: At_Shoots__P Parameter: Tissue Value: Shoots vs. Whole Plant
  misc_feature: MA Experiment ID: 20000574 Result: Down-regulated in Transcription
  misc_feature: MA Experiment 20000574 PARAMETER Experiment Name: At_100uM_ABA_Mutants__P Parameter: Organism Value: A. thaliana
  misc_feature: MA Experiment 20000574 PARAMETER Experiment Name: At_100uM_ABA_Mutants__P Parameter: Plant Line Value: CS23 vs. Ler wt
  misc_feature: MA Experiment 20000574 PARAMETER Experiment Name: At_100uM_ABA_Mutants__P Parameter: Timepoint (hr) Value: N/A
  misc_feature: MA Experiment 20000574 PARAMETER Experiment Name: At_100uM_ABA_Mutants__P Parameter: Tissue Value: Whole Plant
  misc_feature: MA Experiment 20000574 PARAMETER Experiment Name: At_100uM_ABA_Mutants__P Parameter: Treatment Value: None
  misc_feature: MA Experiment ID: 20000794 Result: Down-regulated in Transcription
  misc_feature: MA Experiment 20000794 PARAMETER Experiment Name: At_Petals_P Parameter: Age (day) Value: 23-25 days
  misc_feature: MA Experiment 20000794 PARAMETER Experiment Name: At_Petals_P Parameter: Plant Line Value: WS
  misc_feature: MA Experiment 20000794 PARAMETER Experiment Name: At_Petals_P Parameter: Tissue Value: Petals vs. Whole plant
gaggttccatttctacttctctccaaaattcgaaacttttcccactctctctctctctctactagtttgacatgaacagcgacggtgtttggcttgacggctccggtgaatctccggaagttaataacggtgaagctgcgtcttgggtcagaaacccagatgaagactggttcaataacccaccaccaccacaacacactaatcaaaacgacttcagattcaatggtggctttcctttaaacccctcagagaatctgcttcttcttcttcagcaatcgattgattcttcttcttcttcttctccgttattacatcctttcacactcgacgctgcttcacagcaacaacaacaacaacaacaacaacaggaacagtctttcttagctacgaaagcttgtatagtttctcttctcaacgtcccaaccatcaataacaacactttcgatgacttcggctttgactctggtttcttaggacaacaattccatggaaatcatcaatctccgaactcgatgaatttcactggcttaaaccactcagtaccggattttcttccagctccggaaaacagctcaggatcatgtggattgagtcctctgttctcaaacagagcaaaggttttaaaaccgttacaggtaatggcttcatctggctcgcagccaactctgtttcagaaacgagctgcaatgcgtcagagctcgagtagcaaaatgtgcaattctgagagttcttctgaaatgaggaaatcgagctacgagagagagattgacgatactagtaccggaatcatcgatatctctggattgaattacgaatctgatgaccataatactaataacaacaaaggtaagaagaaaggaatgcctgcaaagaatcttatggctgagagaagaagaaggaagaagcttaatgataggctttacatgcttagatcagttgttcccaagatcagcaaaatggatagagcatcaatacttggagatgctattgattacctcaaagagcttttacaaagaatcaacgatcttcacaccgaacttgaatctactccaccgagttcttcaagcttgcatccgttaacaccgactccacaaacgctgtcttaccgtgttaaggaagagttgtgtccatcttcctccttgccaagtcctaaaggccaacaaccaagagttgaggttagattaagagaaggaaaggcagtgaacatacacatgttctgtggacgtagaccaggtcttttactttccaccatgagagctttggataacttaggattggatgttcaacaagcggtgattagctgtttcaatggttttgctttggatgttttccgcgctgagcaatgtcaagaagaccatgacgtgttacctgaacaaatcaaagcagtgcttttagatacagcaggttacgctggtttggtttgattgcgaagcagaaggaagcatctgtgtggaacagagctagatctaagtccttgttctgttttagtcagcaattttcttacttagtttcatcaatttcaatcatgtatggaagatgataactgttttattttagctatgagaacatgtgtttggggaacaatagttgcaacctttgagcaaaatgccattgtttctcaataattctactttgctttcc

SEQ ID NO: 107727 - protein, 450 aa, Arabidopsis thaliana
  peptide (1)..(450): Ceres Seq. ID no. 13651388
  misc_feature (266)..(313): Pfam Name: Helix-loop-helix DNA-binding domain Pfam Description: Helix-loop-helix DNA-binding domain
  misc_feature (1)..(450): Homolog of NCBI NO: 15222101 NR Description: bHLH protein [Arabidopsis thaliana]
  misc_feature (1)..(450): Homolog of NCBI NO: 25513489 NR Description: F13K23.12 protein - Arabidopsis thaliana
  misc_feature (169)..(450): Homolog of NCBI NO: 22331357 NR Description: bHLH protein family [Arabidopsis thaliana] AT3g26744/MLJ15_15 [Arabidopsis thaliana]
  misc_feature (258)..(445): Homolog of NCBI NO: 34907076 NR Description: OSJNBa0093F16.27 [Oryza sativa (japonica
  misc_feature (2)..(253): Homolog of NCBI NO: 22331357 NR Description: bHLH protein family [Arabidopsis thaliana] AT3g26744/MLJ15_15 [Arabidopsis thaliana]
  misc_feature (104)..(448): Homolog of NCBI NO: 21537346 NR Description: unknown [Arabidopsis thaliana]
  misc_feature (104)..(448): Homolog of NCBI NO: 18424973 NR Description: bHLH protein [Arabidopsis thaliana]
  misc_feature (258)..(448): Homolog of NCBI NO: 22758263 NR Description: Putative bHLH transcription protein [Oryza sativa
  misc_feature (263)..(417): Homolog of NCBI NO: 37536566 NR Description: hypothetical protein [Oryza sativa (japonica group)] >gi|10140754|gb|AAG13585.1| hypothetical protein [Oryza >gi|31433343|gb|AAP54872.1| hypothetical protein [Oryza sativa
  misc_feature (218)..(442): Homolog of NCBI NO: 25411751 NR Description: bHLH transcription factor [imported] - thaliana >gi|3757520|gb|AAC64222.1| bHLH transcription factor
MNSDGVWLDGSGESPEVNNGEAASWVRNPDEDWFNNPPPPQHTNQNDFRFNGGFPLNPSENLLLLLQQSIDSSSSSSPLLHPFTLDAASQQQQQQQQQQEQSFLATKACIVSLLNVPTINNNTFDDFGFDSGFLGQQFHGNHQSPNSMNFTGLNHSVPDFLPAPENSSGSCGLSPLFSNRAKVLKPLQVMASSGSQPTLFQKRAAMRQSSSSKMCNSESSSEMRKSSYEREIDDTSTGIIDISGLNYESDDHNTNNNKGKKKGMPAKNLMAERRRRKKLNDRLYMLRSVVPKISKMDRASILGDAIDYLKELLQRINDLHTELESTPPSSSSLHPLTPTPQTLSYRVKEELCPSSSLPSPKGQQPRVEVRLREGKAVNIHMFCGRRPGLLLSTMRALDNLGLDVQQAVISCFNGFALDVFRAEQCQEDHDVLPEQIKAVLLDTAGYAGLV

SEQ ID NO: 107728 - protein, 303 aa, Arabidopsis thaliana
  peptide (1)..(303): Ceres Seq. ID no. 13651389
  misc_feature (119)..(166): Pfam Name: Helix-loop-helix DNA-binding domain Pfam Description: Helix-loop-helix DNA-binding domain
  misc_feature (1)..(303): Homolog of NCBI NO: 15222101 NR Description: bHLH protein [Arabidopsis thaliana]
  misc_feature (1)..(303): Homolog of NCBI NO: 25513489 NR Description: F13K23.12 protein - Arabidopsis thaliana
  misc_feature (22)..(303): Homolog of NCBI NO: 22331357 NR Description: bHLH protein family [Arabidopsis thaliana] AT3g26744/MLJ15_15 [Arabidopsis thaliana]
  misc_feature (111)..(298): Homolog of NCBI NO: 34907076 NR Description: OSJNBa0093F16.27 [Oryza sativa (japonica
  misc_feature (1)..(106): Homolog of NCBI NO: 22331357 NR Description: bHLH protein family [Arabidopsis thaliana] AT3g26744/MLJ15_15 [Arabidopsis thaliana]
  misc_feature (1)..(301): Homolog of NCBI NO: 21537346 NR Description: unknown [Arabidopsis thaliana]
  misc_feature (1)..(301): Homolog of NCBI NO: 18424973 NR Description: bHLH protein [Arabidopsis thaliana]
  misc_feature (111)..(301): Homolog of NCBI NO: 22758263 NR Description: Putative bHLH transcription protein [Oryza sativa
  misc_feature (116)..(270): Homolog of NCBI NO: 37536566 NR Description: hypothetical protein [Oryza sativa (japonica group)] >gi|10140754|gb|AAG13585.1| hypothetical protein [Oryza >gi|31433343|gb|AAP54872.1| hypothetical protein [Oryza sativa
  misc_feature (71)..(295): Homolog of NCBI NO: 25411751 NR Description: bHLH transcription factor [imported] - thaliana >gi|3757520|gb|AAC64222.1| bHLH transcription factor
MNFTGLNHSVPDFLPAPENSSGSCGLSPLFSNRAKVLKPLQVMASSGSQPTLFQKRAAMRQSSSSKMCNSESSSEMRKSSYEREIDDTSTGIIDISGLNYESDDHNTNNNKGKKKGMPAKNLMAERRRRKKLNDRLYMLRSVVPKISKMDRASILGDAIDYLKELLQRINDLHTELESTPPSSSSLHPLTPTPQTLSYRVKEELCPSSSLPSPKGQQPRVEVRLREGKAVNIHMFCGRRPGLLLSTMRALDNLGLDVQQAVISCFNGFALDVFRAEQCQEDHDVLPEQIKAVLLDTAGYAGLV

SEQ ID NO: 107729 - protein, 261 aa, Arabidopsis thaliana
  peptide (1)..(261): Ceres Seq. ID no. 13651390
  misc_feature (77)..(124): Pfam Name: Helix-loop-helix DNA-binding domain Pfam Description: Helix-loop-helix DNA-binding domain
  misc_feature (1)..(261): Homolog of NCBI NO: 15222101 NR Description: bHLH protein [Arabidopsis thaliana]
  misc_feature (1)..(261): Homolog of NCBI NO: 25513489 NR Description: F13K23.12 protein - Arabidopsis thaliana
  misc_feature (1)..(261): Homolog of NCBI NO: 22331357 NR Description: bHLH protein family [Arabidopsis thaliana] AT3g26744/MLJ15_15 [Arabidopsis thaliana]
  misc_feature (69)..(256): Homolog of NCBI NO: 34907076 NR Description: OSJNBa0093F16.27 [Oryza sativa (japonica
  misc_feature (1)..(64): Homolog of NCBI NO: 22331357 NR Description: bHLH protein family [Arabidopsis thaliana] AT3g26744/MLJ15_15 [Arabidopsis thaliana]
  misc_feature (1)..(259): Homolog of NCBI NO: 21537346 NR Description: unknown [Arabidopsis thaliana]
  misc_feature (1)..(259): Homolog of NCBI NO: 18424973 NR Description: bHLH protein [Arabidopsis thaliana]
  misc_feature (69)..(259): Homolog of NCBI NO: 22758263 NR Description: Putative bHLH transcription protein [Oryza sativa
  misc_feature (74)..(228): Homolog of NCBI NO: 37536566 NR Description: hypothetical protein [Oryza sativa (japonica group)] >gi|10140754|gb|AAG13585.1| hypothetical protein [Oryza >gi|31433343|gb|AAP54872.1| hypothetical protein [Oryza sativa
  misc_feature (29)..(253): Homolog of NCBI NO: 25411751 NR Description: bHLH transcription factor [imported] - thaliana >gi|3757520|gb|AAC64222.1| bHLH transcription factor
MASSGSQPTLFQKRAAMRQSSSSKMCNSESSSEMRKSSYEREIDDTSTGIIDISGLNYESDDHNTNNNKGKKKGMPAKNLMAERRRRKKLNDRLYMLRSVVPKISKMDRASILGDAIDYLKELLQRINDLHTELESTPPSSSSLHPLTPTPQTLSYRVKEELCPSSSLPSPKGQQPRVEVRLREGKAVNIHMFCGRRPGLLLSTMRALDNLGLDVQQAVISCFNGFALDVFRAEQCQEDHDVLPEQIKAVLLDTAGYAGLV

SEQ ID NO: 107730 - DNA, 2332 bp, Arabidopsis thaliana
  misc_feature (1)..(2332): Ceres Seq. ID no. 13651395
  misc_feature: MA Experiment ID: 20000234 Result: Up-regulated in Transcription
  misc_feature: MA Experiment 20000234 PARAMETER Experiment Name: At_Siliques_P Parameter: Age (day) Value: 21
  misc_feature: MA Experiment 20000234 PARAMETER Experiment Name: At_Siliques_P Parameter: Organism Value: A. thaliana
  misc_feature: MA Experiment 20000234 PARAMETER Experiment Name: At_Siliques_P Parameter: Plant Line Value: WS
  misc_feature: MA Experiment 20000234 PARAMETER Experiment Name: At_Siliques_P Parameter: Tissue Value: Less Than 5mm Siliques vs. Whole Plant
  misc_feature: MA Experiment ID: 20000235 Result: Up-regulated in Transcription
  misc_feature: MA Experiment 20000235 PARAMETER Experiment Name: At_Siliques_P Parameter: Age (day) Value: 21
  misc_feature: MA Experiment 20000235 PARAMETER Experiment Name: At_Siliques_P Parameter: Organism Value: A. thaliana
  misc_feature: MA Experiment 20000235 PARAMETER Experiment Name: At_Siliques_P Parameter: Plant Line Value: WS
  misc_feature: MA Experiment 20000235 PARAMETER Experiment Name: At_Siliques_P Parameter: Tissue Value: 5-10mm Siliques vs. Whole Plant
  misc_feature: MA Experiment ID: 20000264 Result: Up-regulated in Transcription
  misc_feature: MA Experiment 20000264 PARAMETER Experiment Name: At_Open_Flower_P Parameter: Age (day) Value: 21
  misc_feature: MA Experiment 20000264 PARAMETER Experiment Name: At_Open_Flower_P Parameter: Plant Line Value: WS
  misc_feature: MA Experiment 20000264 PARAMETER Experiment Name: At_Open_Flower_P Parameter: Tissue Value: Open Flower vs. Whole Plant
  misc_feature: MA Experiment ID: 20000439 Result: Up-regulated in Transcription
  misc_feature: MA Experiment 20000439 PARAMETER Experiment Name: At_Roots__P Parameter: Age (day) Value: 14 vs. 21
  misc_feature: MA Experiment 20000439 PARAMETER Experiment Name: At_Roots__P Parameter: Organism Value: A. thaliana
  misc_feature: MA Experiment 20000439 PARAMETER Experiment Name: At_Roots__P Parameter: Tissue Value: Roots vs. Whole Plant
  misc_feature: MA Experiment ID: 20000794 Result: Up-regulated in Transcription
  misc_feature: MA Experiment 20000794 PARAMETER Experiment Name: At_Petals_P Parameter: Age (day) Value: 23-25 days
  misc_feature: MA Experiment 20000794 PARAMETER Experiment Name: At_Petals_P Parameter: Plant Line Value: WS
  misc_feature: MA Experiment 20000794 PARAMETER Experiment Name: At_Petals_P Parameter: Tissue Value: Petals vs. Whole plant
gtggccaaaccatttctcttattcatgtcctctgcagatctcattcttcttcagatcttgaagaaggaacgccacaacagaaacagcaaatggagaagatagctaaagatctctttgtatccttccactgctattgttcccgtaaagagataaattgtcgagacattttgctggaagacgcagacaaagttcgagccattaccgaatatgtttcatcttctgcaattgagaacttagtcgttggatctgcatcacgtaatggcttcatgagaagattcaagacggatttgccaacaacagtgtcaaaatcagctccagatttctgcaatgtttatgtcatttcaaaaggcaaaattgcttcagtacgaaatgcatcacgtcctgctccttaccaaaattcgatgcagcaatgtgaaattgacaatcatcacccacatactcctgacaaagcaccaaagtaccatgaccatcccaattctgcaggtagtacaccatctagaccgcgcaaatcagttgaagcagatagatcgccgttggtgaaaaggaagccatatggggacttctatgattcagatagtgacctttcgtttatcagtccgtcttctcatcgtgactctgacatttccttcatcagctcaggaagaccaagcgttgagcggtcttcctttagccttgattttcctgaatctgcaaggacttcaagaatgtcaacgagctcagagcaaagcattggctcaaatcgtttgggaattaagttcagtgatcctgatttccttaacgaatcctctacattctctgaagagagtggtagaacatcctcctattcatctcagagcttggatgatgttgaagctgaaatgaagaggctgcgtctagagctgaaacaaaccatggatatgtatagcacagcttgtaaagaagctttaagcgctagacaacaggcaacggagctgcaaaagctgagaaccgaagaggagagacggttggaagaagcaaaaagttcagaggaagcagcaatgtcaatagtggaaaaggagagagctaaagccaaagcagcgttggaagctgctaaagctgcaaagagattagcagaagtggaatctaaaagaaggttgactgcagagatgaagacaatgaaggaatcagattcattctctcgcggatttgttcggtataggaaatacacggttgacgaaatcgaagaagctacttcaaattttgcagagtctcaaaaggtaggagaaggaggttatggtcctgtctttagaggctttcttgatcacacaagtgttgctgttaaagttctacgcccagacgcagctcaagggagatcacagtttcagaaagaggttgaagtgttaagctgcataaggcatccaaacatggtgcttcttcttggagcttgtccagaatttgggattcttgtttatgaatacatggccaaaggaagtttagaagaccggcttttcatgcgaggaaacacaccgccgattacctggcagctacgtttcagaatcgctgctgagatcgccacgggactcctcttcctccaccagaccaaacctgaaccaattgtccacagagaccttaaaccaggaaatgttctgctcgattacaactatgtgagcaagatcagtgatgtcgggctagcgagattagtccctgcagtagcggaaaacgttacacagtacagagtcacttcagctgcaggaactttctgttacattgatcctgagtaccaacaaacaggaatgttgggtgtgaagtcagatgtttattctcttggaatcatgcttttgcagatcttaaccgcaaaacagccaatgggtttggcttattacgttgaacaagcgatcgaagaagggactcttaaggatatgcttgatccagcagtaccggactggcctatagaagaagctctatctttagcaaagctttcgcttcaatgcgcggaactaagaagaaaagatagacctgacctcgggaaagagatattgcctgagctcaatcgattaagagagataggtgaagagagtttagagagtgtgttttatgcaggaaatcaaggaaagtctccaaacactagccaagtctcgattccggaatctccagctgcagaatctcaatcctagttttgatatgagggaagcaaatgtgctctaacactcaatttgcaggagttataaacaaaagcagagcaagtttctttgctgattagtgtatagcattagaggaatttggtattctgttaaataatcagttatgtaaccgcctttttgttaggcccataacggttttgaacaatcaatactgtatttattaaagaatcgac

SEQ ID NO: 107731 - protein, 709 aa, Arabidopsis thaliana
  peptide (1)..(709): Ceres Seq. ID no. 13651396
  misc_feature (1)..(102): Pfam Name: Universal stress protein family Pfam Description: Universal stress protein family
  misc_feature (1)..(698): Homolog of NCBI NO: 15219360 NR Description: protein kinase family [Arabidopsis thaliana]
  misc_feature (182)..(698): Homolog of NCBI NO: 25518361 NR Description: hypothetical protein F17F16.3 [imported] - thaliana >gi|9954729|gb|AAG09082.1|AC026237_3 Similar to protein
  misc_feature (1)..(700): Homolog of NCBI NO: 9293976 NR Description: Ser/Thr protein kinaseroteinase) [Arabidopsis
  misc_feature (1)..(700): Homolog of NCBI NO: 30685668 NR Description: protein kinase family [Arabidopsis thaliana] putative protein kinase [Arabidopsis thaliana]
  misc_feature (1)..(695): Homolog of NCBI NO: 18092335 NR Description: serine threonine kinase [Zea mays]
  misc_feature (1)..(680): Homolog of NCBI NO: 14719286 NR Description: serine threonine kinase 1 [Zea mays]
  misc_feature (162)..(699): Homolog of NCBI NO: 15224129 NR Description: protein kinase family [Arabidopsis thaliana]
  misc_feature (232)..(678): Homolog of NCBI NO: 15239834 NR Description: protein kinase family [Arabidopsis thaliana]
  misc_feature (53)..(680): Homolog of NCBI NO: 15239600 NR Description: protein kinase family [Arabidopsis thaliana]
  misc_feature (144)..(709): Homolog of NCBI NO: 8778472 NR Description: F1L3.25 [Arabidopsis thaliana]
GQTISLIHVLCRSHSSSDLEEGTPQQKQQMEKIAKDLFVSFHCYCSRKEINCRDILLEDADKVRAITEYVSSSAIENLVVGSASRNGFMRRFKTDLPTTVSKSAPDFCNVYVISKGKIASVRNASRPAPYQNSMQQCEIDNHHPHTPDKAPKYHDHPNSAGSTPSRPRKSVEADRSPLVKRKPYGDFYDSDSDLSFISPSSHRDSDISFISSGRPSVERSSFSLDFPESARTSRMSTSSEQSIGSNRLGIKFSDPDFLNESSTFSEESGRTSSYSSQSLDDVEAEMKRLRLELKQTMDMYSTACKEALSARQQATELQKLRTEEERRLEEAKSSEEAAMSIVEKERAKAKAALEAAKAAKRLAEVESKRRLTAEMKTMKESDSFSRGFVRYRKYTVDEIEEATSNFAESQKVGEGGYGPVFRGFLDHTSVAVKVLRPDAAQGRSQFQKEVEVLSCIRHPNMVLLLGACPEFGILVYEYMAKGSLEDRLFMRGNTPPITWQLRFRIAAEIATGLLFLHQTKPEPIVHRDLKPGNVLLDYNYVSKISDVGLARLVPAVAENVTQYRVTSAAGTFCYIDPEYQQTGMLGVKSDVYSLGIMLLQILTAKQPMGLAYYVEQAIEEGTLKDMLDPAVPDWPIEEALSLAKLSLQCAELRRKDRPDLGKEILPELNRLREIGEESLESVFYAGNQGKSPNTSQVSIPESPAAESQS

SEQ ID NO: 107732 - protein, 680 aa, Arabidopsis thaliana
  peptide (1)..(680): Ceres Seq. ID no. 13651397
  misc_feature (1)..(73): Pfam Name: Universal stress protein family Pfam Description: Universal stress protein family
  misc_feature (1)..(669): Homolog of NCBI NO: 15219360 NR Description: protein kinase family [Arabidopsis thaliana]
  misc_feature (153)..(669): Homolog of NCBI NO: 25518361 NR Description: hypothetical protein F17F16.3 [imported] - thaliana >gi|9954729|gb|AAG09082.1|AC026237_3 Similar to protein
  misc_feature (1)..(671): Homolog of NCBI NO: 9293976 NR Description: Ser/Thr protein kinaseroteinase) [Arabidopsis
  misc_feature (1)..(671): Homolog of NCBI NO: 30685668 NR Description: protein kinase family [Arabidopsis thaliana] putative protein kinase [Arabidopsis thaliana]
  misc_feature (1)..(666): Homolog of NCBI NO: 18092335 NR Description: serine threonine kinase [Zea mays]
  misc_feature (1)..(651): Homolog of NCBI NO: 14719286 NR Description: serine threonine kinase 1 [Zea mays]
  misc_feature (133)..(670): Homolog of NCBI NO: 15224129 NR Description: protein kinase family [Arabidopsis thaliana]
  misc_feature (203)..(649): Homolog of NCBI NO: 15239834 NR Description: protein kinase family [Arabidopsis thaliana]
  misc_feature (24)..(651): Homolog of NCBI NO: 15239600 NR Description: protein kinase family [Arabidopsis thaliana]
  misc_feature (115)..(680): Homolog of NCBI NO: 8778472 NR Description: F1L3.25 [Arabidopsis thaliana]
MEKIAKDLFVSFHCYCSRKEINCRDILLEDADKVRAITEYVSSSAIENLVVGSASRNGFMRRFKTDLPTTVSKSAPDFCNVYVISKGKIASVRNASRPAPYQNSMQQCEIDNHHPHTPDKAPKYHDHPNSAGSTPSRPRKSVEADRSPLVKRKPYGDFYDSDSDLSFISPSSHRDSDISFISSGRPSVERSSFSLDFPESARTSRMSTSSEQSIGSNRLGIKFSDPDFLNESSTFSEESGRTSSYSSQSLDDVEAEMKRLRLELKQTMDMYSTACKEALSARQQATELQKLRTEEERRLEEAKSSEEAAMSIVEKERAKAKAALEAAKAAKRLAEVESKRRLTAEMKTMKESDSFSRGFVRYRKYTVDEIEEATSNFAESQKVGEGGYGPVFRGFLDHTSVAVKVLRPDAAQGRSQFQKEVEVLSCIRHPNMVLLLGACPEFGILVYEYMAKGSLEDRLFMRGNTPPITWQLRFRIAAEIATGLLFLHQTKPEPIVHRDLKPGNVLLDYNYVSKISDVGLARLVPAVAENVTQYRVTSAAGTFCYIDPEYQQTGMLGVKSDVYSLGIMLLQILTAKQPMGLAYYVEQAIEEGTLKDMLDPAVPDWPIEEALSLAKLSLQCAELRRKDRPDLGKEILPELNRLREIGEESLESVFYAGNQGKSPNTSQVSIPESPAAESQS

SEQ ID NO: 107733 - protein, 621 aa, Arabidopsis thaliana
  peptide (1)..(621): Ceres Seq. ID no. 13651398
  misc_feature (1)..(610): Homolog of NCBI NO: 15219360 NR Description: protein kinase family [Arabidopsis thaliana]
  misc_feature (94)..(610): Homolog of NCBI NO: 25518361 NR Description: hypothetical protein F17F16.3 [imported] - thaliana >gi|9954729|gb|AAG09082.1|AC026237_3 Similar to protein
  misc_feature (1)..(612): Homolog of NCBI NO: 9293976 NR Description: Ser/Thr protein kinaseroteinase) [Arabidopsis
  misc_feature (1)..(612): Homolog of NCBI NO: 30685668 NR Description: protein kinase family [Arabidopsis thaliana] putative protein kinase [Arabidopsis thaliana]
  misc_feature (1)..(607): Homolog of NCBI NO: 18092335 NR Description: serine threonine kinase [Zea mays]
  misc_feature (1)..(592): Homolog of NCBI NO: 14719286 NR Description: serine threonine kinase 1 [Zea mays]
  misc_feature (74)..(611): Homolog of NCBI NO: 15224129 NR Description: protein kinase family [Arabidopsis thaliana]
  misc_feature (144)..(590): Homolog of NCBI NO: 15239834 NR Description: protein kinase family [Arabidopsis thaliana]
  misc_feature (1)..(592): Homolog of NCBI NO: 15239600 NR Description: protein kinase family [Arabidopsis thaliana]
  misc_feature (56)..(621): Homolog of NCBI NO: 8778472 NR Description: F1L3.25 [Arabidopsis thaliana]
MRRFKTDLPTTVSKSAPDFCNVYVISKGKIASVRNASRPAPYQNSMQQCEIDNHHPHTPDKAPKYHDHPNSAGSTPSRPRKSVEADRSPLVKRKPYGDFYDSDSDLSFISPSSHRDSDISFISSGRPSVERSSFSLDFPESARTSRMSTSSEQSIGSNRLGIKFSDPDFLNESSTFSEESGRTSSYSSQSLDDVEAEMKRLRLELKQTMDMYSTACKEALSARQQATELQKLRTEEERRLEEAKSSEEAAMSIVEKERAKAKAALEAAKAAKRLAEVESKRRLTAEMKTMKESDSFSRGFVRYRKYTVDEIEEATSNFAESQKVGEGGYGPVFRGFLDHTSVAVKVLRPDAAQGRSQFQKEVEVLSCIRHPNMVLLLGACPEFGILVYEYMAKGSLEDRLFMRGNTPPITWQLRFRIAAEIATGLLFLHQTKPEPIVHRDLKPGNVLLDYNYVSKISDVGLARLVPAVAENVTQYRVTSAAGTFCYIDPEYQQTGMLGVKSDVYSLGIMLLQILTAKQPMGLAYYVEQAIEEGTLKDMLDPAVPDWPIEEALSLAKLSLQCAELRRKDRPDLGKEILPELNRLREIGEESLESVFYAGNQGKSPNTSQVSIPESPAAESQS

SEQ ID NO: 107734 - DNA, 2046 bp, Arabidopsis thaliana
  misc_feature (1)..(2046): Ceres Seq. ID no. 13651427
  misc_feature: MA Experiment ID: 20000171 Result: Up-regulated in Transcription
  misc_feature: MA Experiment 20000171 PARAMETER Experiment Name: At_42deg_Heat_P Parameter: Age (day) Value: 14
  misc_feature: MA Experiment 20000171 PARAMETER Experiment Name: At_42deg_Heat_P Parameter: Organism Value: A. thaliana
  misc_feature: MA Experiment 20000171 PARAMETER Experiment Name: At_42deg_Heat_P Parameter: Plant Line Value: WS
  misc_feature: MA Experiment 20000171 PARAMETER Experiment Name: At_42deg_Heat_P Parameter: Temperature (deg C) Value: 42 vs. 22
  misc_feature: MA Experiment 20000171 PARAMETER Experiment Name: At_42deg_Heat_P Parameter: Timepoint (hr) Value: 1
  misc_feature: MA Experiment 20000171 PARAMETER Experiment Name: At_42deg_Heat_P Parameter: Tissue Value: Aerial
  misc_feature: MA Experiment ID: 20000185 Result: Up-regulated in Transcription
  misc_feature: MA Experiment 20000185 PARAMETER Experiment Name: At_Roots__P Parameter: Age (day) Value: 7 vs. 21
  misc_feature: MA Experiment 20000185 PARAMETER Experiment Name: At_Roots__P Parameter: Organism Value: A. thaliana
  misc_feature: MA Experiment 20000185 PARAMETER Experiment Name: At_Roots__P Parameter: Tissue Value: Roots vs. Whole Plant
  misc_feature: MA Experiment ID: 20000264 Result: Up-regulated in Transcription
  misc_feature: MA Experiment 20000264 PARAMETER Experiment Name: At_Open_Flower_P Parameter: Age (day) Value: 21
  misc_feature: MA Experiment 20000264 PARAMETER Experiment Name: At_Open_Flower_P Parameter: Plant Line Value: WS
  misc_feature: MA Experiment 20000264 PARAMETER Experiment Name: At_Open_Flower_P Parameter: Tissue Value: Open Flower vs. Whole Plant
  misc_feature: MA Experiment ID: 20000265 Result: Up-regulated in Transcription
  misc_feature: MA Experiment 20000265 PARAMETER Experiment Name: At_Open_Flower_P Parameter: Age (day) Value: 21
  misc_feature: MA Experiment 20000265 PARAMETER Experiment Name: At_Open_Flower_P Parameter: Plant Line Value: WS
  misc_feature: MA Experiment 20000265 PARAMETER Experiment Name: At_Open_Flower_P Parameter: Tissue Value: Closed Flower vs. Whole Plant
  misc_feature: MA Experiment ID: 20000286 Result: Up-regulated in Transcription
  misc_feature: MA Experiment 20000286 PARAMETER Experiment Name: At_Open_Flower_P Parameter: Age (day) Value: 21
  misc_feature: MA Experiment 20000286 PARAMETER Experiment Name: At_Open_Flower_P Parameter: Plant Line Value: WS
  misc_feature: MA Experiment 20000286 PARAMETER Experiment Name: At_Open_Flower_P Parameter: Tissue Value: Half Open vs. Whole Plant
  misc_feature: MA Experiment ID: 20000439 Result: Up-regulated in Transcription
  misc_feature: MA Experiment 20000439 PARAMETER Experiment Name: At_Roots__P Parameter: Age (day) Value: 14 vs. 21
  misc_feature: MA Experiment 20000439 PARAMETER Experiment Name: At_Roots__P Parameter: Organism Value: A. thaliana
  misc_feature: MA Experiment 20000439 PARAMETER Experiment Name: At_Roots__P Parameter: Tissue Value: Roots vs. Whole Plant
  misc_feature: MA Experiment ID: 20000451 Result: Down-regulated in Transcription
  misc_feature: MA Experiment 20000451 PARAMETER Experiment Name: At_CS6879_Shoots-Roots_P Parameter: Age (day) Value: 14
  misc_feature: MA Experiment 20000451 PARAMETER Experiment Name: At_CS6879_Shoots-Roots_P Parameter: Organism Value: A. thaliana
  misc_feature: MA Experiment 20000451 PARAMETER Experiment Name: At_CS6879_Shoots-Roots_P Parameter: Plant Line Value: CS6879 vs. WS
  misc_feature: MA Experiment 20000451 PARAMETER Experiment Name: At_CS6879_Shoots-Roots_P Parameter: Tissue Value: Roots
  misc_feature: MA Experiment ID: 20000495 Result: Up-regulated in Transcription
  misc_feature: MA Experiment 20000495 PARAMETER Experiment Name: At_Guard_Cells_P Parameter: Harvest Date Value: 8/2/2002
  misc_feature: MA Experiment 20000495 PARAMETER Experiment Name: At_Guard_Cells_P Parameter: Organism Value: A. thaliana
  misc_feature: MA Experiment 20000495 PARAMETER Experiment Name: At_Guard_Cells_P Parameter: Tissue Value: Guard Cells vs. Leaves
  misc_feature: MA Experiment ID: 20000794 Result: Up-regulated in Transcription
  misc_feature: MA Experiment 20000794 PARAMETER Experiment Name: At_Petals_P Parameter: Age (day) Value: 23-25 days
  misc_feature: MA Experiment 20000794 PARAMETER Experiment Name: At_Petals_P Parameter: Plant Line Value: WS
  misc_feature: MA Experiment 20000794 PARAMETER Experiment Name: At_Petals_P Parameter: Tissue Value: Petals vs. Whole plant
  misc_feature: MA Experiment ID: 20001558 Result: Down-regulated in Transcription
  misc_feature: MA Experiment 20001558 PARAMETER Experiment Name: At_Drought_Soil_Dry_P Parameter: Age (day) Value: 27
  misc_feature: MA Experiment 20001558 PARAMETER Experiment Name: At_Drought_Soil_Dry_P Parameter: Organism Value: A. thaliana
  misc_feature: MA Experiment 20001558 PARAMETER Experiment Name: At_Drought_Soil_Dry_P Parameter: Plant Line Value: WS
  misc_feature: MA Experiment 20001558 PARAMETER Experiment Name: At_Drought_Soil_Dry_P Parameter: Post Timepoint (hr) Value: 6
  misc_feature: MA Experiment 20001558 PARAMETER Experiment Name: At_Drought_Soil_Dry_P Parameter: Post-Treatment Value: Re-Water vs. No Drought
  misc_feature: MA Experiment 20001558 PARAMETER Experiment Name: At_Drought_Soil_Dry_P Parameter: Timepoint (day) Value: 13
  misc_feature: MA Experiment 20001558 PARAMETER Experiment Name: At_Drought_Soil_Dry_P Parameter: Treatment Value: Drought vs. No Drought
  misc_feature: MA Experiment ID: 20001757 Result: Down-regulated in Transcription
  misc_feature: MA Experiment 20001757 PARAMETER Experiment Name: At_50mM_NH4NO3_L-to-H_P Parameter: Timepoint (hr) Value: 6
  misc_feature: MA Experiment 20001757 PARAMETER Experiment Name: At_50mM_NH4NO3_L-to-H_P Parameter: Tissue Value: Leaf
  misc_feature: MA Experiment 20001757 PARAMETER Experiment Name: At_50mM_NH4NO3_L-to-H_P Parameter: Treatment Value: 50mM NH4NO3 vs 100mM Mannitol
caaaagggttctcgactcatcgctgttccagacagcgatgactcgagaaccgatcagaattttctctcaggtgatcggaatcgttactggaattttagttcatatatagacgatcaatcaaacctctttagttttccttaggaaagaaataaatgagcagccgttcgagtagaacgatttacgtcgggaaccttcccggcgatatccgtgaaagagaagttgaagacttgttcagtaagtatggacctgttgttcaaatcgatttgaagattccgccgaggcctccaggctatgcattcgtcgagtttgaggatgctcgtgatgctgatgatgcaatttatggccgtgatggttatgactttgatgggcatcatttacgggtggaactagctcatggtgggaggcgttcatcacatgatgcacgcggtagttatagtggtcgtggtcgtggcggtcgtggtggtggtgacggtggtggtcgtgaacgtggaccatctaggagatcagagtaccgcgttgtagtgtcaggtttgccttcatctgcgtcctggcaagacctcaaggatcacatgcgtaaaggaggagaagtttgtttttctcaagtgtttcgtgatggtagaggtacaactggaattgtagattataccagctacgaggacatgaaatatgcgataaaaaaagctcgatgacacagagtttcggaatgcgttttctcatgaatatgttcgggttagagaatatgattcaaggagggattcgaggagccccagccgtggaagatcctattctaagagccgcagccgtggacggagtcccagccgtagtcgtagccgcagcagaagcaggagcaagagcagaagtccaaaggctaaatctttgcgtagatcgcctgcaaaatctacatcgagatctcctcgctctcgctcccgctctaagtcgaggtcactgtctccacgagggtatgcttcatttcttctataatgtttatgctaaaatatccaacataaaacataacataggctctatttagctcttcccttgaagtttggtgacatcacattaaaagatgtcactgggatgactccgagttgttgattgagaatgatgattgcttctagttaagggtacacgatttatttcctttgaaagtctggtcttttataattatagtgttgagaatggttttgtttcttagatatggatatacatacaatcaactaaaatatgggaaatagtatctggatcatggatgtcttggttggttgtacacaactgtttcgtctctcaggtatatgctctttcttagatgggcaagttcgttttctgataatatccattgctgctagatgggtaacagtggggagacattggatcgcattgatatagtgtcatcaaaatggacccatcgagctaggacagatattttcattacctgctaatcgacaagcgatctggattctcatggaaccgatgctgttctggacacagggtttgatagaattagatttgctttgatattctccatctctaccatctgttttaacgaaaagcaggcttgtgttggtttgattttctgctagaaatagtctgaagatatgtttttttcttttttgcttcttgtgattgtgttttgatgtctgacatggaatgaggcatcaagggtcttggtgaaacagctattaaacacggaaatattggatttttaaaactggatttgtttctcggacttttgcagatctcgttcaaggttcagaaggaagcaagtaagagccctagcaagcagctgagccctatccgtggtaggagcaagagcagaagcaggagtccatctcggtaaagaaacatctcatatcaggtaaaaagctgggtctgttggaagattctcataaagatgatctctcttatgtatgagaagttgaaaaactagttgtgtatttcattcttattagcttgggtttgcacatgggaatgatatatactcagtcatcatcagtttatgagctaagctcagctgatttatatgacttgctaatatagttagtgctt

SEQ ID NO: 107735 - protein, 178 aa, Arabidopsis thaliana; identical to SEQ ID NO: 82681
  peptide (1)..(178): Ceres Seq. ID no. 13651428
  misc_feature (9)..(77): Pfam Name: RNA recognition motif. (a.k.a. RRM, RBD, or RNP domain) Pfam Description: RNA recognition motif. (a.k.a. RRM, RBD, or RNP
  misc_feature (1)..(175): Homolog of NCBI NO: 7484802 NR Description: alternative splicing factor ASF-2 homolog - Arabidopsis thaliana >gi|3193304|gb|AAC19288.1| contains
  misc_feature (1)..(174): Homolog of NCBI NO: 30679143 NR Description: arginine/serine-rich splicing factor (atSRp34),
  misc_feature (1)..(176): Homolog of NCBI NO: 2443473 NR Description: ASF/SF2 homolog [Arabidopsis thaliana]
  misc_feature (1)..(176): Homolog of NCBI NO: 5815237 NR Description: splicing factor SR1C [Arabidopsis thaliana]
  misc_feature (1)..(176): Homolog of NCBI NO: 30678391 NR Description: pre-mRNA splicing factor SF2 (SR1 protein)
  misc_feature (1)..(176): Homolog of NCBI NO: 30678395 NR Description: pre-mRNA splicing factor SF2 (SR1 protein)
  misc_feature (1)..(176): Homolog of NCBI NO: 5815235 NR Description: splicing factor SR1 [Arabidopsis thaliana]
  misc_feature (1)..(176): Homolog of NCBI NO: 5815236 NR Description: splicing factor SR1B [Arabidopsis thaliana]
  misc_feature (1)..(176): Homolog of NCBI NO: 5815239 NR Description: splicing factor SR1E [Arabidopsis thaliana]
  misc_feature (1)..(176): Homolog of NCBI NO: 2129717 NR Description: splicing factor SF-2 homolog - Arabidopsis

SEQ ID NO: 107736 - protein, 114 aa, Arabidopsis thaliana
  peptide (1)..(114): Ceres Seq. ID no. 13651429
  misc_feature (1)..(114): Homolog of NCBI NO: 7484802 NR Description: alternative splicing factor ASF-2 homolog - Arabidopsis thaliana >gi|3193304|gb|AAC19288.1| contains
MTQSFGMRFLMNMFGLENMIQGGIRGAPAVEDPILRAAAVDGVPAVVVAAAEAGARAEVQRLNLCVDRLQNLHRDLLALAPALSRGHCLHEGMLHFFYNVYAKISNIKHNIGSI

SEQ ID NO: 107737 - protein, 108 aa, Arabidopsis thaliana
  peptide (1)..(108): Ceres Seq. ID no. 13651430
  misc_feature (1)..(108): Homolog of NCBI NO: 7484802 NR Description: alternative splicing factor ASF-2 homolog - Arabidopsis thaliana >gi|3193304|gb|AAC19288.1| contains
MRFLMNMFGLENMIQGGIRGAPAVEDPILRAAAVDGVPAVVVAAAEAGARAEVQRLNLCVDRLQNLHRDLLALAPALSRGHCLHEGMLHFFYNVYAKISNIKHNIGSI

SEQ ID NO: 107738 - DNA, 1690 bp, Arabidopsis thaliana
  misc_feature (1)..(1690): Ceres Seq. ID no. 13651467
  misc_feature: Pfam Name: p450 Pfam Description: Cytochrome P450
catcgctgtctggaacagcgatgactcgagaacaaaacaaaaagaatgattaatcaattaacaaagaacgagttaatcggattatttacatcgattgccgtcctcatatacgttacatgtctcttctacaccaaacgatgtcgtacgagactacctccgggaccaaatccatggccggtgattggaaacattttccagctcgctggtttaccgccacacgactcattgactaaactttcacggcgtcacgggccaatcatgactttacggatcgggtcgatgctgacggttgtgatctcttcgagtgaagtggctcgggagatcttcaagaagcatgacgcagctttggctggccgggagatttacgaggcgatgaaaggagggaagagtagtgacggctcgctcatcacggctcagtatggtgcgtattggcggatgctgcggaggctttgcaccactcagttctttgtcacgcgccgtcttgatgctatgagtgatgtacgctctaggtgtgttgatcagatgcttcggtttgtcgaggaaggtggccaaaacggtacaaaaacaatcgatgtggggagatatttcttcttgatggcatttaatctcataggaaacctcatgttctcgagagatttgcttgatcctgattcaaaaagaggatccgaattcttttaccacaccgggaaagtgatggagttcgccggaaaaccaaacgttgccgatttcttcccgttgctaaggtttcttgaccctcaaggaatcaggagaaaaacgcaattccacgtggaaaaagcgtttgagatcgccggagagttcatcagagaacgaacggaggttagggagagagaaaagagcgacgagaagacgaaagattacttagatgttcttttggagtttcgtggtggcgatggagtcgacgaagaaccttctagcttctcatcaagagatatcaacgttattgttttcgaaatgtttacggctggaacggatacgacaacgagcacgttggagtgggcactagcggagcttctacacaacccaagaacactgaccaaactccaaaccgaactccggacctacttcaagtcctcgaaccaaaagctccaagaagaagacctaccaaaccttccctatctctcagctgttatcatggaaaccttaaggctacacccacctctgcctttcctcgtcccacacaaagccatgtcaacttgtcacatcttcgatcaatacactatccccaaggaaacacaagtcttggtcaatgtatgggccatcggacgcgatcctaaaacatgggtcgacccgataatgttcaaacccgagagatttatatccgaccctgacgcccgagacttcaagggacaagattacgagttcttgccgttcgggtcgggtcgaaggatgtgtccagctttgcctttggcatcacgggttttgccgttggccattgggtcaatggtgagatcgtttgattgggctttagaaaatgggcttaatgcagaagaaatggatatgggagaaaggattggtataacattgaaaaaagctgttcctttggaagccattccaattccttatcgagggacttaatttcttttcttcttttctctttgttttctttacatgcatgtgtacagtgtacttgaacacttcaaatcatcaaagcaatccgatatttgtaccc

SEQ ID NO: 107739 - protein, 516 aa, Arabidopsis thaliana
  peptide (1)..(516): Ceres Seq. ID no. 13651468
  misc_feature: Pfam Name: p450 Pfam Description: Cytochrome P450
  misc_feature (1)..(516): Homolog of NCBI NO: 26451157 NR Description: putative cytochrome P450 [Arabidopsis thaliana]
  misc_feature (1)..(516): Homolog of NCBI NO: 30693743 NR Description: cytochrome p450 family [Arabidopsis thaliana]
  misc_feature (1)..(516): Homolog of NCBI NO: 11249509 NR Description: cytochrome P450 homolog F8J2.140 [similarity] -
  misc_feature (14)..(511): Homolog of NCBI NO: 27529726 NR Description: cytochrome P450 [Petunia x hybrida]
  misc_feature (13)..(510): Homolog of NCBI NO: 584865 NR Description: Cytochrome P450 76A2 (CYPLXXVIA2) (P-450EG7)
  misc_feature (5)..(510): Homolog of NCBI NO: 27529724 NR Description: cytochrome P450 [Petunia x hybrida]
  misc_feature (47)..(510): Homolog of NCBI NO: 584864 NR Description: Cytochrome P450 76A1 (CYPLXXVIA1) (P-450EG8)
  misc_feature (15)..(510): Homolog of NCBI NO: 17065916 NR Description: geraniol 10-hydroxylase [Catharanthus roseus]
  misc_feature (9)..(511): Homolog of NCBI NO: 7406712 NR Description: putative ripening-related P-450 enzyme [Vitis
  misc_feature (20)..(513): Homolog of NCBI NO: 27529728 NR Description: cytochrome P450 [Petunia x hybrida]
MINQLTKNELIGLFTSIAVLIYVTCLFYTKRCRTRLPPGPNPWPVIGNIFQLAGLPPHDSLTKLSRRHGPIMTLRIGSMLTVVISSSEVAREIFKKHDAALAGREIYEAMKGGKSSDGSLITAQYGAYWRMLRRLCTTQFFVTRRLDAMSDVRSRCVDQMLRFVEEGGQNGTKTIDVGRYFFLMAFNLIGNLMFSRDLLDPDSKRGSEFFYHTGKVMEFAGKPNVADFFPLLRFLDPQGIRRKTQFHVEKAFEIAGEFIRERTEVREREKSDEKTKDYLDVLLEFRGGDGVDEEPSSFSSRDINVIVFEMFTAGTDTTTSTLEWALAELLHNPRTLTKLQTELRTYFKSSNQKLQEEDLPNLPYLSAVIMETLRLHPPLPFLVPHKAMSTCHIFDQYTIPKETQVLVNVWAIGRDPKTWVDPIMFKPERFISDPDARDFKGQDYEFLPFGSGRRMCPALPLASRVLPLAIGSMVRSFDWALENGLNAEEMDMGERIGITLKKAVPLEAIPIPYRGT

SEQ ID NO: 107740 - protein, 445 aa, Arabidopsis thaliana
  peptide (1)..(445): Ceres Seq. ID no. 13651469
  misc_feature: Pfam Name: p450 Pfam Description: Cytochrome P450
  misc_feature (1)..(445): Homolog of NCBI NO: 26451157 NR Description: putative cytochrome P450 [Arabidopsis thaliana]
  misc_feature (1)..(445): Homolog of NCBI NO: 30693743 NR Description: cytochrome p450 family [Arabidopsis thaliana]
  misc_feature (1)..(445): Homolog of NCBI NO: 11249509 NR Description: cytochrome P450 homolog F8J2.140 [similarity] -
  misc_feature (1)..(440): Homolog of NCBI NO: 27529726 NR Description: cytochrome P450 [Petunia x hybrida]
  misc_feature (1)..(439): Homolog of NCBI NO: 584865 NR Description: Cytochrome P450 76A2 (CYPLXXVIA2) (P-450EG7)
  misc_feature (1)..(439): Homolog of NCBI NO: 27529724 NR Description: cytochrome P450 [Petunia x hybrida]
  misc_feature (1)..(439): Homolog of NCBI NO: 584864 NR Description: Cytochrome P450 76A1 (CYPLXXVIA1) (P-450EG8)
  misc_feature (1)..(439): Homolog of NCBI NO: 17065916 NR Description: geraniol 10-hydroxylase [Catharanthus roseus]
  misc_feature (1)..(440): Homolog of NCBI NO: 7406712 NR Description: putative ripening-related P-450 enzyme [Vitis
  misc_feature (1)..(442): Homolog of NCBI NO: 27529728 NR Description: cytochrome P450 [Petunia x hybrida]
MTLRIGSMLTVVISSSEVAREIFKKHDAALAGREIYEAMKGGKSSDGSLITAQYGAYWRMLRRLCTTQFFVTRRLDAMSDVRSRCVDQMLRFVEEGGQNGTKTIDVGRYFFLMAFNLIGNLMFSRDLLDPDSKRGSEFFYHTGKVMEFAGKPNVADFFPLLRFLDPQGIRRKTQFHVEKAFEIAGEFIRERTEVREREKSDEKTKDYLDVLLEFRGGDGVDEEPSSFSSRDINVIVFEMFTAGTDTTTSTLEWALAELLHNPRTLTKLQTELRTYFKSSNQKLQEEDLPNLPYLSAVIMETLRLHPPLPFLVPHKAMSTCHIFDQYTIPKETQVLVNVWAIGRDPKTWVDPIMFKPERFISDPDARDFKGQDYEFLPFGSGRRMCPALPLASRVLPLAIGSMVRSFDWALENGLNAEEMDMGERIGITLKKAVPLEAIPIPYRGT

SEQ ID NO: 107741 - protein, 438 aa, Arabidopsis thaliana
  peptide (1)..(438): Ceres Seq. ID no. 13651470
  misc_feature: Pfam Name: p450 Pfam Description: Cytochrome P450
  misc_feature (1)..(438): Homolog of NCBI NO: 26451157 NR Description: putative cytochrome P450 [Arabidopsis thaliana]
  misc_feature (1)..(438): Homolog of NCBI NO: 30693743 NR Description: cytochrome p450 family [Arabidopsis thaliana]
  misc_feature (1)..(438): Homolog of NCBI NO: 11249509 NR Description: cytochrome P450 homolog F8J2.140 [similarity] -
  misc_feature (1)..(433): Homolog of NCBI NO: 27529726 NR Description: cytochrome P450 [Petunia x hybrida]
  misc_feature (1)..(432): Homolog of NCBI NO: 584865 NR Description: Cytochrome P450 76A2 (CYPLXXVIA2) (P-450EG7)
  misc_feature (1)..(432): Homolog of NCBI NO: 27529724 NR Description: cytochrome P450 [Petunia x hybrida]
  misc_feature (1)..(432): Homolog of NCBI NO: 584864 NR Description: Cytochrome P450 76A1 (CYPLXXVIA1) (P-450EG8)
  misc_feature (1)..(432): Homolog of NCBI NO: 17065916 NR Description: geraniol 10-hydroxylase [Catharanthus roseus]
  misc_feature (1)..(433): Homolog of NCBI NO: 7406712 NR Description: putative ripening-related P-450 enzyme [Vitis
  misc_feature (1)..(435): Homolog of NCBI NO: 27529728 NR Description: cytochrome P450 [Petunia x hybrida]
MLTVVISSSEVAREIFKKHDAALAGREIYEAMKGGKSSDGSLITAQYGAYWRMLRRLCTTQFFVTRRLDAMSDVRSRCVDQMLRFVEEGGQNGTKTIDVGRYFFLMAFNLIGNLMFSRDLLDPDSKRGSEFFYHTGKVMEFAGKPNVADFFPLLRFLDPQGIRRKTQFHVEKAFEIAGEFIRERTEVREREKSDEKTKDYLDVLLEFRGGDGVDEEPSSFSSRDINVIVFEMFTAGTDTTTSTLEWALAELLHNPRTLTKLQTELRTYFKSSNQKLQEEDLPNLPYLSAVIMETLRLHPPLPFLVPHKAMSTCHIFDQYTIPKETQVLVNVWAIGRDPKTWVDPIMFKPERFISDPDARDFKGQDYEFLPFGSGRRMCPALPLASRVLPLAIGSMVRSFDWALENGLNAEEMDMGERIGITLKKAVPLEAIPIPYRGT

SEQ ID NO: 107742 - DNA, 1792 bp, Arabidopsis thaliana
  misc_feature (1)..(1792): Ceres Seq. ID no. 13651479
  misc_feature: MA Experiment ID: 20001451 Result: Up-regulated in Transcription
  misc_feature: MA Experiment 20001451 PARAMETER Experiment Name: At_Far-red-induction_P Parameter: Age (day) Value: 7
  misc_feature: MA Experiment 20001451 PARAMETER Experiment Name: At_Far-red-induction_P Parameter: Light Value: Far-red vs. White
  misc_feature: MA Experiment 20001451 PARAMETER Experiment Name: At_Far-red-induction_P Parameter: Organism Value: A. thaliana
  misc_feature: MA Experiment 20001451 PARAMETER Experiment Name: At_Far-red-induction_P Parameter: Plant Line Value: Columbia
  misc_feature: MA Experiment 20001451 PARAMETER Experiment Name: At_Far-red-induction_P Parameter: Timepoint (hr) Value: 24
  misc_feature: MA Experiment 20001451 PARAMETER Experiment Name: At_Far-red-induction_P Parameter: Tissue Value: Whole Plant
  misc_feature: MA Experiment ID: 20001910 Result: Up-regulated in Transcription
  misc_feature: MA Experiment 20001910 PARAMETER Experiment Name: At_Drought_Reproduction_P Parameter: Age (day) Value: 37
  misc_feature: MA Experiment 20001910 PARAMETER Experiment Name: At_Drought_Reproduction_P Parameter: Organism Value: A. thaliana
  misc_feature: MA Experiment 20001910 PARAMETER Experiment Name: At_Drought_Reproduction_P Parameter: Plant Line Value: WS
  misc_feature: MA Experiment 20001910 PARAMETER Experiment Name: At_Drought_Reproduction_P Parameter: Timepoint (day) Value: 7
  misc_feature: MA Experiment 20001910 PARAMETER Experiment Name: At_Drought_Reproduction_P Parameter: Tissue Value: Flowers
  misc_feature: MA Experiment 20001910 PARAMETER Experiment Name: At_Drought_Reproduction_P Parameter: Treatment Value: Drought vs. No Drought
  misc_feature: Pfam Name: PP2C Pfam Description: Protein phosphatase 2C
ttttttgcaggtcatggtggatccagagcagctgagtatgtgaagcgtcaccttttcagcaatcttattactcatcctaagttcatctctgacaccaaatctgcaataggtttactttcaatttcttttcgtttggacttactattattgttgctctaaatcttgggatcatatatatttgctttgtgtttttggttcagctgatgcctatactcatacagactctgaacttctcaagtcagaaaatagtcatactagagatgctggttcaactgcttccacagctattctcgttggtgatcgtttacttgttgctaatgttggtgattccagagctgttatatgtcgtggcggaaatggtacttttattgacatttttgattaagtcatgactcttggtatctattgaaatcttctgaaatgaattcatgtgctcttgtagcatttgctgtttcaagagaccataaacctgaccaaagtgatgagcgtgaacggattgagaatgctggtggttttgtgatgtgggcaggtaacaagaaaccgtagagttatttcccgctttgtggcttattttccggtgtgcctaactcctagattgaacagggacttggagagttggaggagttcttgcagtttcccgcgcgtttggtgatcgattgcttaaacaatatgttgttgctgatccagaaattcaggtttgtatcttcatttgctttgtaaaccacacacaacatctacttgtgttcacttaaggtcatgtcttcaacttcaggaagagaagattgatgattctcttgagtttctgattcttgccagcgatggactatgggatgttttctccaatgaggtttgtaaaattaagttcttcttcgaaaaactactttcatgttccgataagtatcacatcaaactcaatgattgagatctctctgatggtctttcaggaagcagttgcagtagtaaaagaagttgaagatccggaagagtccaccaagaaacttgtgggagaagcaattaaaagaggaagtgcagacaatattacatgtgtagttgtacgtttcttggagagcaagtcagctaacaacaacggttccagctcatccgaggaagcaaatcaagtgccaaccgctgttagaaatgactcagaccacaagatctcagccaaagaaaccaatcaagaccataccacagtaaacaaggacttggaccgcaacactgacagtcaaagcctgaaccaaaagccgattgcagctagaagtgccgataactcgaaccaaaaaccaatcgcgactacagcaacaggacacagcgtttcttcagaacagagtggtttaaccggggaaaagagtcaaatgccaatcaaaattcgcagcgactcagagcctaagagttcagccaaggtacctaatcaaacgcaaagcacagtacacaacgacttggacagtagcactgcgaagaagccggccgcaacagaacagagcggatcaacgggtgaaaggaatcgaaaaccaatcaaagttcatagtgattccgccgcaagaaagacaactccctctatctttaactaaaacgtccactaccttcttttgataaatgaatgtatcatcttcatttaactttgaactatttagtgtccaaagattttgcctcgaaactgatttatctcgttcatgtaagtttcttctctttgtcacccttttttctgaggtctttaacttcaacaatgtaatttctttttgcagtgtaccaaattttgtaaacttgttgattctaaatagtttgagtacataac

SEQ ID NO: 107743 - protein, 249 aa, Arabidopsis thaliana
  peptide (1)..(249): Ceres Seq. ID no. 13651480
  misc_feature: Pfam Name: PP2C Pfam Description: Protein phosphatase 2C
  misc_feature (42)..(249): Homolog of NCBI NO: 15238651 NR Description: protein phosphatase 2C (PP2C), putative
  misc_feature (1)..(249): Homolog of NCBI NO: 26451149 NR Description: putative Protein phosphatase 2C [Arabidopsis
  misc_feature (42)..(143): Homolog of NCBI NO: 18416366 NR Description: protein phosphatase 2C (PP2C) -related
  misc_feature (42)..(143): Homolog of NCBI NO: 11358728 NR Description: protein phosphatase 2C-like protein - Arabidopsis
  misc_feature (42)..(109): Homolog of NCBI NO: 30689144 NR Description: protein phosphatase 2C (PP2C), putative thaliana] >gi|19347765|gb|AAL86334.1| unknown protein thaliana] >gi|22136752|gb|AAM91695.1| unknown protein
  misc_feature (42)..(116): Homolog of NCBI NO: 20146110 NR Description: protein phosphatase 2C [Mesembryanthemum
  misc_feature (118)..(232): Homolog of NCBI NO: 15238651 NR Description: protein phosphatase 2C (PP2C), putative
  misc_feature (42)..(88): Homolog of NCBI NO: 19387276 NR Description: putative protein phosphatase 2C [Oryza sativa
  misc_feature (1)..(109): Homolog of NCBI NO: 7486331 NR Description: hypothetical protein F28M20.60 - Arabidopsis >gi|3281853|emb|CAA19748.1| putative protein [Arabidopsis >gi|7270078|emb|CAB79893.1| putative protein [Arabidopsis
  misc_feature (42)..(88): Homolog of NCBI NO: 38345197 NR Description: OSJNBa0015K02.7 [Oryza sativa (japonica
MDYGMFSPMRFVKLSSSSKNYFHVPISITSNSMIEISLMVFQEAVAVVKEVEDPEESTKKLVGEAIKRGSADNITCVVVRFLESKSANNNGSSSSEEANQVPTAVRNDSDHKISAKETNQDHTTVNKDLDRNTDSQSLNQKPIAARSADNSNQKPIATTATGHSVSSEQSGLTGEKSQMPIKIRSDSEPKSSAKVPNQTQSTVHNDLDSSTAKKPAATEQSGSTGERNRKPIKVHSDSAARKTTPSIFN

SEQ ID NO: 107744 - protein, 245 aa, Arabidopsis thaliana
  peptide (1)..(245): Ceres Seq. ID no. 13651481
  misc_feature: Pfam Name: PP2C Pfam Description: Protein phosphatase 2C
  misc_feature (38)..(245): Homolog of NCBI NO: 15238651 NR Description: protein phosphatase 2C (PP2C), putative
  misc_feature (1)..(245): Homolog of NCBI NO: 26451149 NR Description: putative Protein phosphatase 2C [Arabidopsis
  misc_feature (38)..(139): Homolog of NCBI NO: 18416366 NR Description: protein phosphatase 2C (PP2C) -related
  misc_feature (38)..(139): Homolog of NCBI NO: 11358728 NR Description: protein phosphatase 2C-like protein - Arabidopsis
  misc_feature (38)..(105): Homolog of NCBI NO: 30689144 NR Description: protein phosphatase 2C (PP2C), putative thaliana] >gi|19347765|gb|AAL86334.1| unknown protein thaliana] >gi|22136752|gb|AAM91695.1| unknown protein
  misc_feature (38)..(112): Homolog of NCBI NO: 20146110 NR Description: protein phosphatase 2C [Mesembryanthemum
  misc_feature (114)..(228): Homolog of NCBI NO: 15238651 NR Description: protein phosphatase 2C (PP2C), putative
  misc_feature (38)..(84): Homolog of NCBI NO: 19387276 NR Description: putative protein phosphatase 2C [Oryza sativa
  misc_feature (1)..(105): Homolog of NCBI NO: 7486331 NR Description: hypothetical protein F28M20.60 - Arabidopsis >gi|3281853|emb|CAA19748.1| putative protein [Arabidopsis >gi|7270078|emb|CAB79893.1| putative protein [Arabidopsis
  misc_feature (38)..(84): Homolog of NCBI NO: 38345197 NR Description: OSJNBa0015K02.7 [Oryza sativa (japonica
MFSPMRFVKLSSSSKNYFHVPISITSNSMIEISLMVFQEAVAVVKEVEDPEESTKKLVGEAIKRGSADNITCVVVRFLESKSANNNGSSSSEEANQVPTAVRNDSDHKISAKETNQDHTTVNKDLDRNTDSQSLNQKPIAARSADNSNQKPIATTATGHSVSSEQSGLTGEKSQMPIKIRSDSEPKSSAKVPNQTQSTVHNDLDSSTAKKPAATEQSGSTGERNRKPIKVHSDSAARKTTPSIFN

SEQ ID NO: 107745 - protein, 241 aa, Arabidopsis thaliana
  peptide (1)..(241): Ceres Seq. ID no. 13651482
  misc_feature: Pfam Name: PP2C Pfam Description: Protein phosphatase 2C
  misc_feature (34)..(241): Homolog of NCBI NO: 15238651 NR Description: protein phosphatase 2C (PP2C), putative
  misc_feature (1)..(241): Homolog of NCBI NO: 26451149 NR Description: putative Protein phosphatase 2C [Arabidopsis
  misc_feature (34)..(135): Homolog of NCBI NO: 18416366 NR Description: protein phosphatase 2C (PP2C) -related
  misc_feature (34)..(135): Homolog of NCBI NO: 11358728 NR Description: protein phosphatase 2C-like protein - Arabidopsis
  misc_feature (34)..(101): Homolog of NCBI NO: 30689144 NR Description: protein phosphatase 2C (PP2C), putative thaliana] >gi|19347765|gb|AAL86334.1| unknown protein thaliana] >gi|22136752|gb|AAM91695.1| unknown protein
  misc_feature (34)..(108): Homolog of NCBI NO: 20146110 NR Description: protein phosphatase 2C [Mesembryanthemum
  misc_feature (110)..(224): Homolog of NCBI NO: 15238651 NR Description: protein phosphatase 2C (PP2C), putative
  misc_feature (34)..(80): Homolog of NCBI NO: 19387276 NR Description: putative protein phosphatase 2C [Oryza sativa
  misc_feature (1)..(101): Homolog of NCBI NO: 7486331 NR Description: hypothetical protein F28M20.60 - Arabidopsis >gi|3281853|emb|CAA19748.1| putative protein [Arabidopsis >gi|7270078|emb|CAB79893.1| putative protein [Arabidopsis
  misc_feature (34)..(80): Homolog of NCBI NO: 38345197 NR Description: OSJNBa0015K02.7 [Oryza sativa (japonica
MRFVKLSSSSKNYFHVPISITSNSMIEISLMVFQEAVAVVKEVEDPEESTKKLVGEAIKRGSADNITCVVVRFLESKSANNNGSSSSEEANQVPTAVRNDSDHKISAKETNQDHTTVNKDLDRNTDSQSLNQKPIAARSADNSNQKPIATTATGHSVSSEQSGLTGEKSQMPIKIRSDSEPKSSAKVPNQTQSTVHNDLDSSTAKKPAATEQSGSTGERNRKPIKVHSDSAARKTTPSIFN

SEQ ID NO: 107746 - DNA, 1117 bp, Arabidopsis thaliana
  misc_feature (1)..(1117): Ceres Seq. ID no. 13651489
  misc_feature: MA Experiment ID: 108577 Result: Down-regulated in Transcription
  misc_feature: MA Experiment 108577 PARAMETER Experiment Name: At_42deg_Heat_cDNA_P Parameter: Temperature (deg C) Value: 42 vs. 22
  misc_feature: MA Experiment 108577 PARAMETER Experiment Name: At_42deg_Heat_cDNA_P Parameter: Timepoint (hr) Value: 6
  misc_feature: MA Experiment 108577 PARAMETER Experiment Name: At_42deg_Heat_cDNA_P Parameter: Tissue Value: Aerial
  misc_feature: MA Experiment ID: 20000179 Result: Up-regulated in Transcription
  misc_feature: MA Experiment 20000179 PARAMETER Experiment Name: At_Germinating_Seeds_P Parameter: Age (hr) Value: 6 vs. 0
  misc_feature: MA Experiment 20000179 PARAMETER Experiment Name: At_Germinating_Seeds_P Parameter: Tissue Value: Germinating Seeds
  misc_feature: MA Experiment ID: 20000180 Result: Up-regulated in Transcription
  misc_feature: MA Experiment 20000180 PARAMETER Experiment Name: At_Germinating_Seeds_P Parameter: Age (hr) Value: 24 vs. 0
  misc_feature: MA Experiment 20000180 PARAMETER Experiment Name: At_Germinating_Seeds_P Parameter: Tissue Value: Germinating Seeds
catcgctgtctggaacagcgatgactcggatgatgatgatgataaacccaatagaattttaaaaggataagaatcgcaaagctcatatcacaaaactttgagatctcatttcatctttcttcgattctacctactccgattcaatcgatcttatcgagacatggatgctcgtaagagaggacgccctgaagctgctgcctctcacaactccaatggcggattcaagaggtctaagcaagagatggaatcaatttcaactggtttaggaagcaaatccaagccatgcactaaatttttcagcacttctggatgtccatttggtgacaattgccacttcttgcactatgtgcccggtgggtacaatgctgcagcgcagatgacaaatctccgaccaccggtttctcaagtttccagaaatatgcaaggatctggtggtcccggcggcagattctcagggagaggagatccaggatcaggccctgtttcaatctttggtgcttctacttccaagatcagtgtagatgcttctttagccggtgccatcattggaaaaggtggaatccattccaaacagatatgccgtgaaacaggagcaaaattatcgattaaagatcatgaaagagacccaaacttgaagattatcgagctggaaggaacatttgaacagatcaatgtagcgagtgggatggtgagagagcttatagggaggcttggatcagtgaagaaacctcaagggattggtggtcctgaagggaaaccacatcctgggagcaactacaaaaccaagatctgtgataggtactctaaagggaactgtacatatggagatagatgccattttgctcatggtgaatctgagctgcgcaggtcaggaatcgcttagttatgtctttagactcttgagaacagattatgcattgttagctccattatcattgtgactttttgctctctctttttgttttatcaatttgttttatgcgactcgctttgaaaactttagcccattctgtattgagctctgaagattcgacgagttctgtaagttaccgatcacagttaaaagactttgatatgttaaaacccttatattacagctacatactatttttgtcct

SEQ ID NO: 107747 - protein, 240 aa, Arabidopsis thaliana; identical to SEQ ID NO: 105314
  peptide (1)..(240): Ceres Seq. ID no. 13651490
  misc_feature (117)..(165): Pfam Name: KH domain Pfam Description: KH domain
  misc_feature (1)..(240): Homolog of NCBI NO: 15240145 NR Description: KH domain/zinc finger protein [Arabidopsis >gi|9759305|dbj|BAB09811.1| contains similarity to unknown [Arabidopsis thaliana] >gi|26451009|dbj|BAC42611.1| unknown
  misc_feature (1)..(240): Homolog of NCBI NO: 21555233 NR Description: unknown [Arabidopsis thaliana]
  misc_feature (1)..(239): Homolog of NCBI NO: 18399496 NR Description: KH domain/zinc finger protein [Arabidopsis
  misc_feature (23)..(239): Homolog of NCBI NO: 9294110 NR Description: contains similarity to unknown
  misc_feature (38)..(240): Homolog of NCBI NO: 5441893 NR Description: ESTs C99174(E10437),D22295(C10709) correspond to region of the predicted gene.~Similar to Arabidopsis thaliana BAC
  misc_feature (38)..(240): Homolog of NCBI NO: 32488659 NR Description: OSJNBa0087O24.9 [Oryza sativa (japonica
  misc_feature (1)..(95): Homolog of NCBI NO: 5441893 NR Description: ESTs C99174(E10437),D22295(C10709) correspond to region of the predicted gene.~Similar to Arabidopsis thaliana BAC
  misc_feature (3)..(79): Homolog of NCBI NO: 32488659 NR Description: OSJNBa0087O24.9 [Oryza sativa (japonica
  misc_feature (33)..(98): Homolog of NCBI NO: 34905220 NR Description: P0672D01.12 [Oryza sativa (japonica >gi|29467558|dbj|BAC66728.1| putative zinc finger protein [Oryza
  misc_feature (195)..(238): Homolog of NCBI NO: 34905220 NR Description: P0672D01.12 [Oryza sativa (japonica >gi|29467558|dbj|BAC66728.1| putative zinc finger protein [Oryza

SEQ ID NO: 107748 - protein, 213 aa, Arabidopsis thaliana; identical to SEQ ID NO: 105315
  peptide (1)..(213): Ceres Seq. ID no. 13651491
  misc_feature (90)..(138): Pfam Name: KH domain Pfam Description: KH domain
  misc_feature (1)..(213): Homolog of NCBI NO: 15240145 NR Description: KH domain/zinc finger protein [Arabidopsis >gi|9759305|dbj|BAB09811.1| contains similarity to unknown [Arabidopsis thaliana] >gi|26451009|dbj|BAC42611.1| unknown
  misc_feature (1)..(213): Homolog of NCBI NO: 21555233 NR Description: unknown [Arabidopsis thaliana]
  misc_feature (1)..(212): Homolog of NCBI NO: 18399496 NR Description: KH domain/zinc finger protein [Arabidopsis
  misc_feature (1)..(212): Homolog of NCBI NO: 9294110 NR Description: contains similarity to unknown
  misc_feature (11)..(213): Homolog of NCBI NO: 5441893 NR Description: ESTs C99174(E10437),D22295(C10709) correspond to region of the predicted gene.~Similar to Arabidopsis thaliana BAC
  misc_feature (11)..(213): Homolog of NCBI NO: 32488659 NR Description: OSJNBa0087O24.9 [Oryza sativa (japonica
  misc_feature (1)..(68): Homolog of NCBI NO: 5441893 NR Description: ESTs C99174(E10437),D22295(C10709) correspond to region of the predicted gene.~Similar to Arabidopsis thaliana BAC
  misc_feature (1)..(52): Homolog of NCBI NO: 32488659 NR Description: OSJNBa0087O24.9 [Oryza sativa (japonica
  misc_feature (6)..(71): Homolog of NCBI NO: 34905220 NR Description: P0672D01.12 [Oryza sativa (japonica >gi|29467558|dbj|BAC66728.1| putative zinc finger protein [Oryza
  misc_feature (168)..(211): Homolog of NCBI NO: 34905220 NR Description: P0672D01.12 [Oryza sativa (japonica >gi|29467558|dbj|BAC66728.1| putative zinc finger protein [Oryza

SEQ ID NO: 107749 - protein, 168 aa, Arabidopsis thaliana; identical to SEQ ID NO: 105316
  peptide (1)..(168): Ceres Seq. ID no. 13651492
  misc_feature (45)..(93): Pfam Name: KH domain Pfam Description: KH domain
  misc_feature (1)..(168): Homolog of NCBI NO: 15240145 NR Description: KH domain/zinc finger protein [Arabidopsis >gi|9759305|dbj|BAB09811.1| contains similarity to unknown [Arabidopsis thaliana] >gi|26451009|dbj|BAC42611.1| unknown
  misc_feature (1)..(168): Homolog of NCBI NO: 21555233 NR Description: unknown [Arabidopsis thaliana]
  misc_feature (1)..(167): Homolog of NCBI NO: 18399496 NR Description: KH domain/zinc finger protein [Arabidopsis
  misc_feature (1)..(167): Homolog of NCBI NO: 9294110 NR Description: contains similarity to unknown
  misc_feature (1)..(168): Homolog of NCBI NO: 5441893 NR Description: ESTs C99174(E10437),D22295(C10709) correspond to region of the predicted gene.~Similar to Arabidopsis thaliana BAC
  misc_feature (1)..(168): Homolog of NCBI NO: 32488659 NR Description: OSJNBa0087O24.9 [Oryza sativa (japonica
  misc_feature (1)..(23): Homolog of NCBI NO: 5441893 NR Description: ESTs C99174(E10437),D22295(C10709) correspond to region of the predicted gene.~Similar to Arabidopsis thaliana BAC
  misc_feature (1)..(26): Homolog of NCBI NO: 34905220 NR Description: P0672D01.12 [Oryza sativa (japonica >gi|29467558|dbj|BAC66728.1| putative zinc finger protein [Oryza
  misc_feature (123)..(166): Homolog of NCBI NO: 34905220 NR Description: P0672D01.12 [Oryza sativa (japonica >gi|29467558|dbj|BAC66728.1| putative zinc finger protein [Oryza
  misc_feature (1)..(130): Homolog of NCBI NO: 1082624 NR Description: myc far upstream element-binding protein - human

SEQ ID NO: 107750 - DNA, 1254 bp, Arabidopsis thaliana
  misc_feature (1)..(1254): Ceres Seq. ID no. 13651497
  misc_feature: MA Experiment ID: 108433 Result: Up-regulated in Transcription
  misc_feature: MA Experiment 108433 PARAMETER Experiment Name: At_rhl_Mutant2_cDNA_P Parameter: Age (day) Value: 7
  misc_feature: MA Experiment 108433 PARAMETER Experiment Name: At_rhl_Mutant2_cDNA_P Parameter: Organism Value: A. thaliana
  misc_feature: MA Experiment 108433 PARAMETER Experiment Name: At_rhl_Mutant2_cDNA_P Parameter: Plant Line Value: rhl Mutant vs. wt landsburg
  misc_feature: MA Experiment 108433 PARAMETER Experiment Name: At_rhl_Mutant2_cDNA_P Parameter: Tissue Value: Roots
  misc_feature: MA Experiment ID: 108434 Result: Down-regulated in Transcription
  misc_feature: MA Experiment 108434 PARAMETER Experiment Name: At_Root_Tips_cDNA_P Parameter: Tissue Value: Root Tips
  misc_feature: MA Experiment ID: 108435 Result: Down-regulated in Transcription
  misc_feature: MA Experiment 108435 PARAMETER Experiment Name: At_stm_Mutants_cDNA_P Parameter: Plant Line Value: wt Landsburg vs stm
  misc_feature: MA Experiment 108435 PARAMETER Experiment Name: At_stm_Mutants_cDNA_P Parameter: Tissue Value: Shoot Apical Meristem Region
  misc_feature: MA Experiment ID: 108462 Result: Down-regulated in Transcription
  misc_feature: MA Experiment 108462 PARAMETER Experiment Name: At_Germinating_Seeds_cDNA_P Parameter: Age (day) Value: 2 vs. 0
  misc_feature: MA Experiment 108462 PARAMETER Experiment Name: At_Germinating_Seeds_cDNA_P Parameter: Tissue Value: Germinating Seeds
  misc_feature: MA Experiment ID: 108463 Result: Down-regulated in Transcription
  misc_feature: MA Experiment 108463 PARAMETER Experiment Name: At_Germinating_Seeds_cDNA_P Parameter: Age (day) Value: 3 vs. 0
  misc_feature: MA Experiment 108463 PARAMETER Experiment Name: At_Germinating_Seeds_cDNA_P Parameter: Tissue Value: Germinating Seeds
  misc_feature: MA Experiment ID: 108464 Result: Down-regulated in Transcription
  misc_feature: MA Experiment 108464 PARAMETER Experiment Name: At_Germinating_Seeds_cDNA_P Parameter: Age (day) Value: 4 vs. 0
  misc_feature: MA Experiment 108464 PARAMETER Experiment Name: At_Germinating_Seeds_cDNA_P Parameter: Tissue Value: Germinating Seeds
  misc_feature: MA Experiment ID: 108489 Result: Up-regulated in Transcription
  misc_feature: MA Experiment ID: 108501 Result: Down-regulated in Transcription
  misc_feature: MA Experiment 108501 PARAMETER Experiment Name: At_ap2_floral_buds_cDNA_P Parameter: Plant Line Value: ap2 (Ler.)
  misc_feature: MA Experiment 108501 PARAMETER Experiment Name: At_ap2_floral_buds_cDNA_P Parameter: Tissue Value: Closed Flower
  misc_feature: MA Experiment ID: 108574 Result: Down-regulated in Transcription
  misc_feature: MA Experiment 108574 PARAMETER Experiment Name: At_Wounding__cDNA_P Parameter: Timepoint (hr) Value: 1
  misc_feature: MA Experiment 108574 PARAMETER Experiment Name: At_Wounding__cDNA_P Parameter: Tissue Value: Aerial
  misc_feature: MA Experiment 108574 PARAMETER Experiment Name: At_Wounding__cDNA_P Parameter: Treatment Value: Wounding vs. No Wounding
  misc_feature: MA Experiment ID: 108576 Result: Up-regulated in Transcription
  misc_feature: MA Experiment 108576 PARAMETER Experiment Name: At_42deg_Heat_cDNA_P Parameter: Temperature (deg C) Value: 42 vs. 22
  misc_feature: MA Experiment 108576 PARAMETER Experiment Name: At_42deg_Heat_cDNA_P Parameter: Timepoint (hr) Value: 1
  misc_feature: MA Experiment 108576 PARAMETER Experiment Name: At_42deg_Heat_cDNA_P Parameter: Tissue Value: Aerial
  misc_feature: MA Experiment ID: 108579 Result: Down-regulated in Transcription
  misc_feature: MA Experiment 108579 PARAMETER Experiment Name: At_4deg_Cold_cDNA_P Parameter: Temperature (deg C) Value: 4 vs. 22
  misc_feature: MA Experiment 108579 PARAMETER Experiment Name: At_4deg_Cold_cDNA_P Parameter: Timepoint (hr) Value: 6
  misc_feature: MA Experiment 108579 PARAMETER Experiment Name: At_4deg_Cold_cDNA_P Parameter: Tissue Value: Aerial
  misc_feature: MA Experiment ID: 108595 Result: Down-regulated in Transcription
  misc_feature: MA Experiment 108595 PARAMETER Experiment Name: At_Ler-pi_Ovule_cDNA_P Parameter: Plant Line Value: null
  misc_feature: MA Experiment ID: 108607 Result: Down-regulated in Transcription
  misc_feature: MA Experiment 108607 PARAMETER Experiment Name: At_100uM_ABA_cDNA_P Parameter: Timepoint (hr) Value: 4
  misc_feature: MA Experiment 108607 PARAMETER Experiment Name: At_100uM_ABA_cDNA_P Parameter: Tissue Value: Aerial
  misc_feature: MA Experiment 108607 PARAMETER Experiment Name: At_100uM_ABA_cDNA_P Parameter: Treatment Value: 100uM ABA vs. No Treatment
  misc_feature: MA Experiment ID: 108668 Result: Up-regulated in Transcription
  misc_feature: MA Experiment 108668 PARAMETER Experiment Name: At_2mM_SA_cDNA_P Parameter: Plant Line Value: WS
  misc_feature: MA Experiment 108668 PARAMETER Experiment Name: At_2mM_SA_cDNA_P Parameter: Timepoint (hr) Value: 6
  misc_feature: MA Experiment 108668 PARAMETER Experiment Name: At_2mM_SA_cDNA_P Parameter: Treatment Value: 2mM SA vs. No Treatment
  misc_feature: MA Experiment ID: 20000089 Result: Up-regulated in Transcription
  misc_feature: MA Experiment ID: 20000307 Result: Down-regulated in Transcription
  misc_feature: MA Experiment 20000307 PARAMETER Experiment Name: At_Germinating_Seeds_Sub_P Parameter: Age (hr) Value: 24 vs. 0
  misc_feature: MA Experiment 20000307 PARAMETER Experiment Name: At_Germinating_Seeds_Sub_P Parameter: Organism Value: A. thaliana
  misc_feature: MA Experiment 20000307 PARAMETER Experiment Name: At_Germinating_Seeds_Sub_P Parameter: Plant Line Value: WS
  misc_feature: MA Experiment 20000307 PARAMETER Experiment Name: At_Germinating_Seeds_Sub_P Parameter: Tissue Value: Germinating Seeds
  misc_feature: MA Experiment ID: 20000315 Result: Down-regulated in Transcription
  misc_feature: MA Experiment 20000315 PARAMETER Experiment Name: At_14day_Shoots-Roots_Sub_P Parameter: Age (day) Value: 14
  misc_feature: MA Experiment 20000315 PARAMETER Experiment Name: At_14day_Shoots-Roots_Sub_P Parameter: Organism Value: A. thaliana
  misc_feature: MA Experiment 20000315 PARAMETER Experiment Name: At_14day_Shoots-Roots_Sub_P Parameter: Plant Line Value: WS
  misc_feature: MA Experiment 20000315 PARAMETER Experiment Name: At_14day_Shoots-Roots_Sub_P Parameter: Tissue Value: Shoots vs. Whole Plant
  misc_feature: MA Experiment ID: 20000347 Result: Up-regulated in Transcription
  misc_feature: MA Experiment 20000347 PARAMETER Experiment Name: At_2mM_SA_Sub_P Parameter: Age (day) Value: 14
  misc_feature: MA Experiment 20000347 PARAMETER Experiment Name: At_2mM_SA_Sub_P Parameter: Organism Value: A. thaliana
  misc_feature: MA Experiment 20000347 PARAMETER Experiment Name: At_2mM_SA_Sub_P Parameter: Plant Line Value: WS
  misc_feature: MA Experiment 20000347 PARAMETER Experiment Name: At_2mM_SA_Sub_P Parameter: Timepoint (hr) Value: 6
  misc_feature: MA Experiment 20000347 PARAMETER Experiment Name: At_2mM_SA_Sub_P Parameter: Tissue Value: Aerial
  misc_feature: MA Experiment 20000347 PARAMETER Experiment Name: At_2mM_SA_Sub_P Parameter: Treatment Value: 2mM SA vs. No Treatment
  misc_feature: MA Experiment ID: 20000355 Result: Down-regulated in Transcription
  misc_feature: MA Experiment 20000355 PARAMETER Experiment Name: At_Siliques_Sub_P Parameter: Age (day) Value: 21
  misc_feature: MA Experiment 20000355 PARAMETER Experiment Name: At_Siliques_Sub_P Parameter: Organism Value: A. thaliana
  misc_feature: MA Experiment 20000355 PARAMETER Experiment Name: At_Siliques_Sub_P Parameter: Plant Line Value: WS
  misc_feature: MA Experiment 20000355 PARAMETER Experiment Name: At_Siliques_Sub_P Parameter: Tissue Value: Less Than 5mm Siliques vs. Whole Plant
cagcgctgtctggaagagcgatgactcgagaaccgggggtttgttcgaaaaatgggttcttctgtggaacagaacattttggtgactggtggtgctggattcattggaacacatactgttgttcagcttttgaatcagggttttaaggttacgatcattgataatcttgataactctgtcgttgaagctgttcatagggttagggaacttgttggtcctgatctctctaccaagcttgaattcaatctgggtgatctaagaaacaaaggagatattgagaaactcttttccaatcagagatttgatgctgtgattcactttgctggtcttaaagctgtgggagaaagtgttggaaaccctcgtcgttactttgataataacttagttggaactatcaatctatatgagaccatggcaaaatacaactgcaaaatgatggtgttttcgtcgtctgcaacagtttatggtcaacctgaaatagtcccatgtgtggaagactttgagttacaggctatgaatccttatggtcgtactaagctgtttcttgaagagatagctagagacattcacgctgcggaaccagaatggaagataattcttctgaggtacttcaatccggttggagctcacgagagtggaagaattggagaagatccaaagggcataccgaataatctcatgccttatatccaacaagtggcggttggaagattacctgaactcaatgtatttggacatgattatcctaccatggatggtagcgcggttagagactacatccatgtaatggatttagcagatggccatgtggctgcgttaaacaaattgttttcagactcaaagattggctgtactgcttataatcttggcactggtcaaggaacttctgtcttagaaatggtttcttcttttgaaaaagcttctggcaagaaaatacctatcaagctatgtccaagaagagctggagatgcaacagctgtttatgcttcaactcagaaagctgagaaggaacttggctggaaggcaaaatatggagttgatgagatgtgcagagatcaatggaactgggcaaataagaatccatggggtttccagaagaagccttgattgattttgttttgtttcaccactcaatataaagaaaaaaaaagatatagatgtcgttttattttcctgcatctatttgatttctctcttcaaaaaaagttgtattgaactcgtcatctttcggttaataaagtataaagtttatct

SEQ ID NO: 107751 - protein, 351 aa, Arabidopsis thaliana; identical to SEQ ID NO: 102703
  peptide (1)..(351): Ceres Seq. ID no. 13651498
  misc_feature (9)..(344): Pfam Name: NAD dependent epimerase/dehydratase family Pfam Description: NAD dependent epimerase/dehydratase family
  misc_feature (1)..(351): Homolog of NCBI NO: 18407751 NR Description: UDP-glucose 4-epimerase (UDP-galactose (Galactowaldenase), putative [Arabidopsis thaliana] uridine diphosphate glucose epimerase, putative [Arabidopsis
  misc_feature (1)..(351): Homolog of NCBI NO: 25292327 NR Description: hypothetical protein F16M19.8 [imported] - thaliana >gi|12323247|gb|AAG51599.1|AC010795_3 uridine
  misc_feature (1)..(350): Homolog of NCBI NO: 15222072 NR Description: UDP-glucose 4-epimerase (UDP-galactose
  misc_feature (1)..(350): Homolog of NCBI NO: 2129759 NR Description: UDPglucose 4-epimerase (EC 5.1.3.2) - Arabidopsis >gi|1143392|emb|CAA90941.1| uridine diphosphate glucose epimerase
  misc_feature (7)..(351): Homolog of NCBI NO: 11386762 NR Description: UDP-glucose 4-epimerase (Galactowaldenase)
  misc_feature (7)..(350): Homolog of NCBI NO: 11386774 NR Description: UDP-glucose 4-epimerase GEPI42 (Galactowaldenase)
  misc_feature (8)..(347): Homolog of NCBI NO: 26106014 NR Description: putative UDP-glucose 4-epimerase [Oryza sativa
  misc_feature (7)..(347): Homolog of NCBI NO: 11386775 NR Description: UDP-glucose 4-epimerase GEPI48 (Galactowaldenase)
  misc_feature (1)..(347): Homolog of NCBI NO: 32130594 NR Description: UDP-glucose-4-epimerase [Zea mays]
  misc_feature (7)..(350): Homolog of NCBI NO: 21553659 NR Description: UDP-galactose 4-epimerase-like protein

SEQ ID NO: 107752 - protein, 231 aa, Arabidopsis thaliana; identical to SEQ ID NO: 102704
  peptide (1)..(231): Ceres Seq. ID no. 13651499
  misc_feature (1)..(224): Pfam Name: NAD dependent epimerase/dehydratase family Pfam Description: NAD dependent epimerase/dehydratase family
  misc_feature (1)..(231): Homolog of NCBI NO: 18407751 NR Description: UDP-glucose 4-epimerase (UDP-galactose (Galactowaldenase), putative [Arabidopsis thaliana] uridine diphosphate glucose epimerase, putative [Arabidopsis
  misc_feature (1)..(231): Homolog of NCBI NO: 25292327 NR Description: hypothetical protein F16M19.8 [imported] - thaliana >gi|12323247|gb|AAG51599.1|AC010795_3 uridine
  misc_feature (1)..(230): Homolog of NCBI NO: 15222072 NR Description: UDP-glucose 4-epimerase (UDP-galactose
  misc_feature (1)..(230): Homolog of NCBI NO: 2129759 NR Description: UDPglucose 4-epimerase (EC 5.1.3.2) - Arabidopsis >gi|1143392|emb|CAA90941.1| uridine diphosphate glucose epimerase
  misc_feature (1)..(231): Homolog of NCBI NO: 11386762 NR Description: UDP-glucose 4-epimerase (Galactowaldenase)
  misc_feature (1)..(230): Homolog of NCBI NO: 11386774 NR Description: UDP-glucose 4-epimerase GEPI42 (Galactowaldenase)
  misc_feature (1)..(227): Homolog of NCBI NO: 26106014 NR Description: putative UDP-glucose 4-epimerase [Oryza sativa
  misc_feature (1)..(227): Homolog of NCBI NO: 11386775 NR Description: UDP-glucose 4-epimerase GEPI48 (Galactowaldenase)
  misc_feature (1)..(227): Homolog of NCBI NO: 32130594 NR Description: UDP-glucose-4-epimerase [Zea mays]
  misc_feature (1)..(230): Homolog of NCBI NO: 21553659 NR Description: UDP-galactose 4-epimerase-like protein

SEQ ID NO: 107753 - protein, 224 aa, Arabidopsis thaliana; identical to SEQ ID NO: 102705
  peptide (1)..(224): Ceres Seq. ID no. 13651500
  misc_feature (1)..(217): Pfam Name: NAD dependent epimerase/dehydratase family Pfam Description: NAD dependent epimerase/dehydratase family
  misc_feature (1)..(224): Homolog of NCBI NO: 18407751 NR Description: UDP-glucose 4-epimerase (UDP-galactose (Galactowaldenase), putative [Arabidopsis thaliana] uridine diphosphate glucose epimerase, putative [Arabidopsis
  misc_feature (1)..(224): Homolog of NCBI NO: 25292327 NR Description: hypothetical protein F16M19.8 [imported] - thaliana >gi|12323247|gb|AAG51599.1|AC010795_3 uridine
  misc_feature (1)..(223): Homolog of NCBI NO: 15222072 NR Description: UDP-glucose 4-epimerase (UDP-galactose
  misc_feature (1)..(223): Homolog of NCBI NO: 2129759 NR Description: UDPglucose 4-epimerase (EC 5.1.3.2) - Arabidopsis >gi|1143392|emb|CAA90941.1| uridine diphosphate glucose epimerase
  misc_feature (1)..(224): Homolog of NCBI NO: 11386762 NR Description: UDP-glucose 4-epimerase (Galactowaldenase)
  misc_feature (1)..(223): Homolog of NCBI NO: 11386774 NR Description: UDP-glucose 4-epimerase GEPI42 (Galactowaldenase)
  misc_feature (1)..(220): Homolog of NCBI NO: 26106014 NR Description: putative UDP-glucose 4-epimerase [Oryza sativa
  misc_feature (1)..(220): Homolog of NCBI NO: 11386775 NR Description: UDP-glucose 4-epimerase GEPI48 (Galactowaldenase)
  misc_feature (1)..(220): Homolog of NCBI NO: 32130594 NR Description: UDP-glucose-4-epimerase [Zea mays]
  misc_feature (1)..(223): Homolog of NCBI NO: 21553659 NR Description: UDP-galactose 4-epimerase-like protein

SEQ ID NO: 107754 - DNA, 1686 bp, Arabidopsis thaliana
  misc_feature (1)..(1686): Ceres Seq. ID no. 13651507
agtttctcgtttgctttcttccggtaaagtcgttgatcgattcattatcgttaattcttttttcttccgttggccatccttgaaattggaaacctaagaactcacggcttgtcgcttatggctgtgatctgcctccgagccctccatctcttccgattataggccatgttcaccttctcctctcttccctagctcataaatctttacagaaactctcatccaagtatggacctcttctctatctccgcgtcttcaacttccctgtagtcctcgtctcctcggcgtctgtggcctacgagatctttaaggctcatgacttgaacatctcatctcgtgacaacccttcaatcgatgattccctcttgattggatcttctgtctttggtagtgctccttatggagattactttaagttcatgaagaagctcctggttactaagctgcttggaccacaggcacttgagcggtcaagaggcatccgtgcagatgagcttgagcggtttcactcaagcctgcttgataaggcggtaaagaaggagatcgttgagattgggaaggaagcaacgaagcttagtaataacagcctctggaggatgagcattgggagaagtttttcagagaagaatggtgaggctgagagagtcaggggactggttactgagttagatggcttgacaaagaaggtcttgtttgcaactttgctgcacaggccccttgagaagcttggaatctctctgttcaaaaaggagatcatgtgtgtttctgacagcttcgatgaggtccttgagagggttcttgtggaacatgaacagaaactggacgatcatcaagatagggacatgatggacgtgttgttggcagcttatggagatgaaaacgcagggcataaaatcagcaggaaccacatcaaagcatttttcgtggagcttttctttgcgggtactgatacctcggcgcaatcaatacagtggacaatggcagagatcattaacaaccccaacattcttaaaagattgagagaagaaatcgattctgtggtagggaaaacaaggttgattcaagaaactgatctaccaaagctcccctatttgcaagctgtggttaaggaaggacttagattgcacccgccattgcctctctttgtaaggacgttccaagaagggtgtaagattggaggtttctatgtaccagaaaagacaacacttattggtaatgcttatgttatgatgagagatccgagtgtctgggaagaccctgaggagtttaaacctgagaggtttctatcttcttcaagatcaacgcaagaagaggaaagaagagagcaagcacttaagtacattcctttcggtagtggacggagaggctgtcctggatcaagtctgggttatatctttgttggcaccgcagttggaatgatggtgcaatgctttgactggagtatcaaaggagacaaggtccaaatggatgaggctggaggactaaacttgagtatggctcattccctgaagtgcactcctgttcctcgaaaccggcctttacttgctgatcagtagatgccaagtttgtaattttcagatgtcactgaactcgcaaacatagaaaagtgctgaattcagatgtttactactggtatgttttaattccgtttactgtatgaatataaataaaatagaaaattgtcccacc

SEQ ID NO: 107755 - protein, 378 aa, Arabidopsis thaliana
  peptide (1)..(378): Ceres Seq. ID no. 13651508
  misc_feature (1)..(365): Pfam Name: Cytochrome P450 Pfam Description: Cytochrome P450
  misc_feature (1)..(378): Homolog of NCBI NO: 9293969 NR Description: cytochrome P450-like protein [Arabidopsis
  misc_feature (1)..(378): Homolog of NCBI NO: 26451135 NR Description: putative cytochrome P450 [Arabidopsis thaliana]
  misc_feature (1)..(378): Homolog of NCBI NO: 30685634 NR Description: cytochrome P450 family [Arabidopsis thaliana]
  misc_feature (1)..(378): Homolog of NCBI NO: 15231050 NR Description: cytochrome P450 family [Arabidopsis thaliana]
  misc_feature (1)..(370): Homolog of NCBI NO: 15231049 NR Description: cytochrome P450 family [Arabidopsis thaliana]
  misc_feature (1)..(373): Homolog of NCBI NO: 15231047 NR Description: cytochrome P450 family [Arabidopsis thaliana]
  misc_feature (1)..(370): Homolog of NCBI NO: 21553521 NR Description: cytochrome P450, putative [Arabidopsis thaliana]
  misc_feature (1)..(374): Homolog of NCBI NO: 15231052 NR Description: cytochrome P450 family [Arabidopsis thaliana]
  misc_feature (1)..(375): Homolog of NCBI NO: 9294003 NR Description: cytochrome P450-like protein [Arabidopsis
  misc_feature (1)..(370): Homolog of NCBI NO: 18402480 NR Description: cytochrome P450 family [Arabidopsis thaliana]
MKKLLVTKLLGPQALERSRGIRADELERFHSSLLDKAVKKEIVEIGKEATKLSNNSLWRMSIGRSFSEKNGEAERVRGLVTELDGLTKKVLFATLLHRPLEKLGISLFKKEIMCVSDSFDEVLERVLVEHEQKLDDHQDRDMMDVLLAAYGDENAGHKISRNHIKAFFVELFFAGTDTSAQSIQWTMAEIINNPNILKRLREEIDSVVGKTRLIQETDLPKLPYLQAVVKEGLRLHPPLPLFVRTFQEGCKIGGFYVPEKTTLIGNAYVMMRDPSVWEDPEEFKPERFLSSSRSTQEEERREQALKYIPFGSGRRGCPGSSLGYIFVGTAVGMMVQCFDWSIKGDKVQMDEAGGLNLSMAHSLKCTPVPRNRPLLADQ

SEQ ID NO: 107756 - protein, 319 aa, Arabidopsis thaliana
  peptide (1)..(319): Ceres Seq. ID no. 13651509
  misc_feature (1)..(306): Pfam Name: Cytochrome P450 Pfam Description: Cytochrome P450
  misc_feature (1)..(319): Homolog of NCBI NO: 9293969 NR Description: cytochrome P450-like protein [Arabidopsis
  misc_feature (1)..(319): Homolog of NCBI NO: 26451135 NR Description: putative cytochrome P450 [Arabidopsis thaliana]
  misc_feature (1)..(319): Homolog of NCBI NO: 30685634 NR Description: cytochrome P450 family [Arabidopsis thaliana]
  misc_feature (1)..(319): Homolog of NCBI NO: 15231050 NR Description: cytochrome P450 family [Arabidopsis thaliana]
  misc_feature (1)..(311): Homolog of NCBI NO: 15231049 NR Description: cytochrome P450 family [Arabidopsis thaliana]
  misc_feature (1)..(314): Homolog of NCBI NO: 15231047 NR Description: cytochrome P450 family [Arabidopsis thaliana]
  misc_feature (1)..(311): Homolog of NCBI NO: 21553521 NR Description: cytochrome P450, putative [Arabidopsis thaliana]
  misc_feature (1)..(315): Homolog of NCBI NO: 15231052 NR Description: cytochrome P450 family [Arabidopsis thaliana]
  misc_feature (1)..(316): Homolog of NCBI NO: 9294003 NR Description: cytochrome P450-like protein [Arabidopsis
  misc_feature (1)..(311): Homolog of NCBI NO: 18402480 NR Description: cytochrome P450 family [Arabidopsis thaliana]
MSIGRSFSEKNGEAERVRGLVTELDGLTKKVLFATLLHRPLEKLGISLFKKEIMCVSDSFDEVLERVLVEHEQKLDDHQDRDMMDVLLAAYGDENAGHKISRNHIKAFFVELFFAGTDTSAQSIQWTMAEIINNPNILKRLREEIDSVVGKTRLIQETDLPKLPYLQAVVKEGLRLHPPLPLFVRTFQEGCKIGGFYVPEKTTLIGNAYVMMRDPSVWEDPEEFKPERFLSSSRSTQEEERREQALKYIPFGSGRRGCPGSSLGYIFVGTAVGMMVQCFDWSIKGDKVQMDEAGGLNLSMAHSLKCTPVPRNRPLLADQ

SEQ ID NO: 107757 - protein, 266 aa, Arabidopsis thaliana
  peptide (1)..(266): Ceres Seq. ID no. 13651510
  misc_feature (1)..(253): Pfam Name: Cytochrome P450 Pfam Description: Cytochrome P450
  misc_feature (1)..(266): Homolog of NCBI NO: 9293969 NR Description: cytochrome P450-like protein [Arabidopsis
  misc_feature (1)..(266): Homolog of NCBI NO: 26451135 NR Description: putative cytochrome P450 [Arabidopsis thaliana]
  misc_feature (1)..(266): Homolog of NCBI NO: 30685634 NR Description: cytochrome P450 family [Arabidopsis thaliana]
  misc_feature (1)..(266): Homolog of NCBI NO: 15231050 NR Description: cytochrome P450 family [Arabidopsis thaliana]
  misc_feature (1)..(258): Homolog of NCBI NO: 15231049 NR Description: cytochrome P450 family [Arabidopsis thaliana]
  misc_feature (1)..(261): Homolog of NCBI NO: 15231047 NR Description: cytochrome P450 family [Arabidopsis thaliana]
  misc_feature (1)..(258): Homolog of NCBI NO: 21553521 NR Description: cytochrome P450, putative [Arabidopsis thaliana]
  misc_feature (1)..(262): Homolog of NCBI NO: 15231052 NR Description: cytochrome P450 family [Arabidopsis thaliana]
  misc_feature (1)..(263): Homolog of NCBI NO: 9294003 NR Description: cytochrome P450-like protein [Arabidopsis
  misc_feature (1)..(258): Homolog of NCBI NO: 18402480 NR Description: cytochrome P450 family [Arabidopsis thaliana]
MCVSDSFDEVLERVLVEHEQKLDDHQDRDMMDVLLAAYGDENAGHKISRNHIKAFFVELFFAGTDTSAQSIQWTMAEIINNPNILKRLREEIDSVVGKTRLIQETDLPKLPYLQAVVKEGLRLHPPLPLFVRTFQEGCKIGGFYVPEKTTLIGNAYVMMRDPSVWEDPEEFKPERFLSSSRSTQEEERREQALKYIPFGSGRRGCPGSSLGYIFVGTAVGMMVQCFDWSIKGDKVQMDEAGGLNLSMAHSLKCTPVPRNRPLLADQ

SEQ ID NO: 107758 - DNA, 2024 bp, Arabidopsis thaliana
  misc_feature (1)..(2024): Ceres Seq. ID no. 13651521
  misc_feature: MA Experiment ID: 20000184 Result: Down-regulated in Transcription
  misc_feature: MA Experiment 20000184 PARAMETER Experiment Name: At_Shoots__P Parameter: Age (day) Value: 7
  misc_feature: MA Experiment 20000184 PARAMETER Experiment Name: At_Shoots__P Parameter: Tissue Value: Shoots vs. Whole Plant
  misc_feature: MA Experiment ID: 20000185 Result: Down-regulated in Transcription
  misc_feature: MA Experiment 20000185 PARAMETER Experiment Name: At_Roots__P Parameter: Age (day) Value: 7 vs. 21
  misc_feature: MA Experiment 20000185 PARAMETER Experiment Name: At_Roots__P Parameter: Organism Value: A. thaliana
  misc_feature: MA Experiment 20000185 PARAMETER Experiment Name: At_Roots__P Parameter: Tissue Value: Roots vs. Whole Plant
  misc_feature: MA Experiment ID: 20000227 Result: Down-regulated in Transcription
  misc_feature: MA Experiment 20000227 PARAMETER Experiment Name: At_Root-Tips-vs-Tops_P Parameter: Tissue Value: Root Tips vs. Root Tops
  misc_feature: MA Experiment ID: 20000234 Result: Down-regulated in Transcription
  misc_feature: MA Experiment 20000234 PARAMETER Experiment Name: At_Siliques_P Parameter: Age (day) Value: 21
  misc_feature: MA Experiment 20000234 PARAMETER Experiment Name: At_Siliques_P Parameter: Organism Value: A. thaliana
  misc_feature: MA Experiment 20000234 PARAMETER Experiment Name: At_Siliques_P Parameter: Plant Line Value: WS
  misc_feature: MA Experiment 20000234 PARAMETER Experiment Name: At_Siliques_P Parameter: Tissue Value: Less Than 5mm Siliques vs. Whole Plant
  misc_feature: MA Experiment ID: 20000235 Result: Down-regulated in Transcription
  misc_feature: MA Experiment 20000235 PARAMETER Experiment Name: At_Siliques_P Parameter: Age (day) Value: 21
  misc_feature: MA Experiment 20000235 PARAMETER Experiment Name: At_Siliques_P Parameter: Organism Value: A. thaliana
  misc_feature: MA Experiment 20000235 PARAMETER Experiment Name: At_Siliques_P Parameter: Plant Line Value: WS
  misc_feature: MA Experiment 20000235 PARAMETER Experiment Name: At_Siliques_P Parameter: Tissue Value: 5-10mm Siliques vs. Whole Plant
  misc_feature: MA Experiment ID: 20000264 Result: Down-regulated in Transcription
  misc_feature: MA Experiment 20000264 PARAMETER Experiment Name: At_Open_Flower_P Parameter: Age (day) Value: 21
  misc_feature: MA Experiment 20000264 PARAMETER Experiment Name: At_Open_Flower_P Parameter: Plant Line Value: WS
  misc_feature: MA Experiment 20000264 PARAMETER Experiment Name: At_Open_Flower_P Parameter: Tissue Value: Open Flower vs. Whole Plant
  misc_feature: MA Experiment ID: 20000437 Result: Up-regulated in Transcription
  misc_feature: MA Experiment 20000437 PARAMETER Experiment Name: At_Drought_P Parameter: Age (day) Value: 8
  misc_feature: MA Experiment 20000437 PARAMETER Experiment Name: At_Drought_P Parameter: Organism Value: A. thaliana
  misc_feature: MA Experiment 20000437 PARAMETER Experiment Name: At_Drought_P Parameter: Plant Line Value: WS
  misc_feature: MA Experiment 20000437 PARAMETER Experiment Name: At_Drought_P Parameter: Timepoint (hr) Value: 24
  misc_feature: MA Experiment 20000437 PARAMETER Experiment Name: At_Drought_P Parameter: Tissue Value: Whole Plant
  misc_feature: MA Experiment 20000437 PARAMETER Experiment Name: At_Drought_P Parameter: Treatment Value: Drought vs. No Drought
  misc_feature: MA Experiment ID: 20000438 Result: Down-regulated in Transcription
  misc_feature: MA Experiment 20000438 PARAMETER Experiment Name: At_Shoots__P Parameter: Age (day) Value: 14
  misc_feature: MA Experiment 20000438 PARAMETER Experiment Name: At_Shoots__P Parameter: Tissue Value: Shoots vs. Whole Plant
  misc_feature: MA Experiment ID: 20000439 Result: Down-regulated in Transcription
  misc_feature: MA Experiment 20000439 PARAMETER Experiment Name: At_Roots__P Parameter: Age (day) Value: 14 vs. 21
  misc_feature: MA Experiment 20000439 PARAMETER Experiment Name: At_Roots__P Parameter: Organism Value: A. thaliana
  misc_feature: MA Experiment 20000439 PARAMETER Experiment Name: At_Roots__P Parameter: Tissue Value: Roots vs. Whole Plant
  misc_feature: MA Experiment ID: 20000794 Result: Down-regulated in Transcription
  misc_feature: MA Experiment 20000794 PARAMETER Experiment Name: At_Petals_P Parameter: Age (day) Value: 23-25 days
  misc_feature: MA Experiment 20000794 PARAMETER Experiment Name: At_Petals_P Parameter: Plant Line Value: WS
  misc_feature: MA Experiment 20000794 PARAMETER Experiment Name: At_Petals_P Parameter: Tissue Value: Petals vs. Whole plant
  misc_feature: MA Experiment ID: 20001248 Result: Up-regulated in Transcription
  misc_feature: MA Experiment 20001248 PARAMETER Experiment Name: At_Far-red-induction_P Parameter: Age (day) Value: 7
  misc_feature: MA Experiment 20001248 PARAMETER Experiment Name: At_Far-red-induction_P Parameter: Light Value: Far-red vs. White
  misc_feature: MA Experiment 20001248 PARAMETER Experiment Name: At_Far-red-induction_P Parameter: Organism Value: A. thaliana
  misc_feature: MA Experiment 20001248 PARAMETER Experiment Name: At_Far-red-induction_P Parameter: Plant Line Value: Columbia
  misc_feature: MA Experiment 20001248 PARAMETER Experiment Name: At_Far-red-induction_P Parameter: Timepoint (hr) Value: 4
  misc_feature: MA Experiment 20001248 PARAMETER Experiment Name: At_Far-red-induction_P Parameter: Tissue Value: Whole Plant
  misc_feature: MA Experiment ID: 20001450 Result: Up-regulated in Transcription
  misc_feature: MA Experiment 20001450 PARAMETER Experiment Name: At_Far-red-induction_P Parameter: Age (day) Value: 7
  misc_feature: MA Experiment 20001450 PARAMETER Experiment Name: At_Far-red-induction_P Parameter: Light Value: Far-red vs. White
  misc_feature: MA Experiment 20001450 PARAMETER Experiment Name: At_Far-red-induction_P Parameter: Organism Value: A. thaliana
  misc_feature: MA Experiment 20001450 PARAMETER Experiment Name: At_Far-red-induction_P Parameter: Plant Line Value: Columbia
  misc_feature: MA Experiment 20001450 PARAMETER Experiment Name: At_Far-red-induction_P Parameter: Timepoint (hr) Value: 8
  misc_feature: MA Experiment 20001450 PARAMETER Experiment Name: At_Far-red-induction_P Parameter: Tissue Value: Whole Plant
  misc_feature: MA Experiment ID: 20001558 Result: Down-regulated in Transcription
  misc_feature: MA Experiment 20001558 PARAMETER Experiment Name: At_Drought_Soil_Dry_P Parameter: Age (day) Value: 27
  misc_feature: MA Experiment 20001558 PARAMETER Experiment Name: At_Drought_Soil_Dry_P Parameter: Organism Value: A. thaliana
  misc_feature: MA Experiment 20001558 PARAMETER Experiment Name: At_Drought_Soil_Dry_P Parameter: Plant Line Value: WS
  misc_feature: MA Experiment 20001558 PARAMETER Experiment Name: At_Drought_Soil_Dry_P Parameter: Post Timepoint (hr) Value: 6
  misc_feature: MA Experiment 20001558 PARAMETER Experiment Name: At_Drought_Soil_Dry_P Parameter: Post-Treatment Value: Re-Water vs. No Drought
  misc_feature: MA Experiment 20001558 PARAMETER Experiment Name: At_Drought_Soil_Dry_P Parameter: Timepoint (day) Value: 13
  misc_feature: MA Experiment 20001558 PARAMETER Experiment Name: At_Drought_Soil_Dry_P Parameter: Treatment Value: Drought vs. No Drought
  misc_feature: MA Experiment ID: 20001560 Result: Down-regulated in Transcription
  misc_feature: MA Experiment 20001560 PARAMETER Experiment Name: At_Drought_Soil_Dry_P Parameter: Age (day) Value: 28
  misc_feature: MA Experiment 20001560 PARAMETER Experiment Name: At_Drought_Soil_Dry_P Parameter: Organism Value: A. thaliana
  misc_feature: MA Experiment 20001560 PARAMETER Experiment Name: At_Drought_Soil_Dry_P Parameter: Plant Line Value: WS
  misc_feature: MA Experiment 20001560 PARAMETER Experiment Name: At_Drought_Soil_Dry_P Parameter: Post Timepoint (hr) Value: None
  misc_feature: MA Experiment 20001560 PARAMETER Experiment Name: At_Drought_Soil_Dry_P Parameter: Post-Treatment Value: None
  misc_feature: MA Experiment 20001560 PARAMETER Experiment Name: At_Drought_Soil_Dry_P Parameter: Timepoint (day) Value: 14
  misc_feature: MA Experiment 20001560 PARAMETER Experiment Name: At_Drought_Soil_Dry_P Parameter: Treatment Value: Drought vs. No Drought
  misc_feature: MA Experiment ID: 20001905 Result: Down-regulated in Transcription
  misc_feature: MA Experiment 20001905 PARAMETER Experiment Name: At_Drought_Reproduction_P Parameter: Age (day) Value: 40
  misc_feature: MA Experiment 20001905 PARAMETER Experiment Name: At_Drought_Reproduction_P Parameter: Organism Value: A. thaliana
  misc_feature: MA Experiment 20001905 PARAMETER Experiment Name: At_Drought_Reproduction_P Parameter: Plant Line Value: WS
  misc_feature: MA Experiment 20001905 PARAMETER Experiment Name: At_Drought_Reproduction_P Parameter: Timepoint (day) Value: 10
  misc_feature: MA Experiment 20001905 PARAMETER Experiment Name: At_Drought_Reproduction_P Parameter: Tissue Value: Rosettes
  misc_feature: MA Experiment 20001905 PARAMETER Experiment Name: At_Drought_Reproduction_P Parameter: Treatment Value: Drought vs. No Drought
  misc_feature: Pfam Name: Pkinase Pfam Description: Protein kinase domain
catcgctgtctggaacagcgatgactcgagaaccgtatctcatcttcgtcttcttcgtcttcactctaaccgttgctacacaaaccaccggttcggttaagtgcaaaacaagtttgctccgttacccgtttggtttctccgacggttatccgatccgattcaactgctctgagataaccggagaggccgtgatcggtgaattcgctgtgcaagaagtgacaaactccaacatctacgtcgaaatcccgccggtttgcaaacgcaacatccgtaaaatcgaacaacttttccgggaaaatcttgctccgtcgaaattacagaacataattctcgtccaaggatgcaagaaacagaacaagtcttctaattgcttaatccgcaataaattcgttgaaaaccggttaaatctcagcaaatgtaaatctccggttagctgtctcgacggagcaacaacgacaactgccgatgtgatgagtttaggcgacgttgtgaacggaagtggatgtaagtattggttctcttctatttctcaatcgcaagtttcggtcaatttgggtcgactcaagcttgattggtggcttaagggaagttgcagtaacaccacttgctcggagaacgcagactgtgccaaagttaagctcgacgacggtggactcggtcatcgctgcacttgtcgtgaaggatttagcggtaaagccttcaccgtgcctggtggttgccaccgattagtttacaaacgcaaaggactacacaaactcgttgttcttggtactgcggggattttggttggagttttagtaatcgtggtcttgatagctacatatttcttccggaacaagcaatctgcgtcatctgaaagagcatcaatcgcgaatcgcttgctttgcgagctagccgaaaactcaagtgttcctttctacacctacaaagagattgagaaagctaccgatagtttctccgacaagaacatgctcggaaccggagcatacggaacagtctacgcaggcgaattcccaaacagctcatgcgtcgctataaaacgtctcaaacacaaagacactacaagcattgaccaagttgtgaacgagatcaagcttctttcctctgtgagccacccaaatctagtacgtctcttaggttgttgctttgcagatggagaaccgtttctagtctatgagttcatgccaaacggaactctttatcagcatttacaacacgagagaggccaaccaccactttcttggcagctccgactcgccattgcgtgtcaaaccgcaaacgcaatcgcacatctccactcttcagtaaaccctcctatctaccaccgagacataaaatctagtaacatcctccttgaccacgaattcaactccaagatatctgatttcggactctctaggctcggcatgtctaccgatttcgaagcctctcatatctccacggctccacaaggcactccaggatacttagatcctcaatatcaccaagattttcagctctcggacaagagtgatgtctatagctttggagttgttctcgtagaaatcatctcaggctttaaagtcatagacttcactcgtccctactctgaagtgaacctagcctctcttgccgtcgacaggatcggaagagggcgtgtggtagatatcatcgatccctgcttaaacaaagaaatcaatccgaaaatgtttgcatctatccacaacttagcagaattggcgtttcgctgcttatcctttcacagaaacatgaggcctacgatggtagaaattacggaagatctccaccggattaagcttatgcactatggtacagagtcaggtaagttcaaaaaccgatccgaaatagatatgaagagacaacaatcatttccgagagaatgaaaagtaaacacttggcagaaattatgtatagtttagtattcaagtttttttattcgaattttaagctctatatacatagaggtaaaactctgtcttttggttttattggttccttgtgtatgaagtaaacagtcggcagag

SEQ ID NO: 107759 - protein, 626 aa, Arabidopsis thaliana
  peptide (1)..(626): Ceres Seq. ID no. 13651522
  misc_feature: Pfam Name: Pkinase Pfam Description: Protein kinase domain
  misc_feature (157)..(626): Homolog of NCBI NO: 30698255 NR Description: protein kinase family [Arabidopsis thaliana]
  misc_feature (33)..(599): Homolog of NCBI NO: 7486158 NR Description: probable protein kinase [imported] - Arabidopsis
  misc_feature (33)..(599): Homolog of NCBI NO: 18400282 NR Description: protein kinase family [Arabidopsis thaliana] protein kinase family [Arabidopsis thaliana]
  misc_feature (33)..(599): Homolog of NCBI NO: 19715597 NR Description: At2g23450/F26B6.10 [Arabidopsis thaliana]
  misc_feature (34)..(599): Homolog of NCBI NO: 34902300 NR Description: Putative protein kinase [Oryza sativa (japonica group)] >gi|24308627|gb|AAN52750.1| Putative protein kinase
  misc_feature (187)..(597): Homolog of NCBI NO: 15241674 NR Description: protein kinase-related [Arabidopsis thaliana]
  misc_feature (202)..(597): Homolog of NCBI NO: 15232348 NR Description: protein kinase family [Arabidopsis thaliana]
  misc_feature (255)..(610): Homolog of NCBI NO: 34911340 NR Description: P0034C09.1 [Oryza sativa (japonica
  misc_feature (255)..(598): Homolog of NCBI NO: 15222572 NR Description: protein kinase family [Arabidopsis thaliana]
  misc_feature (218)..(600): Homolog of NCBI NO: 15408730 NR Description: P0443D08.12 [Oryza sativa (japonica
SLSGTAMTREPYLIFVFFVFTLTVATQTTGSVKCKTSLLRYPFGFSDGYPIRFNCSEITGEAVIGEFAVQEVTNSNIYVEIPPVCKRNIRKIEQLFRENLAPSKLQNIILVQGCKKQNKSSNCLIRNKFVENRLNLSKCKSPVSCLDGATTTTADVMSLGDVVNGSGCKYWFSSISQSQVSVNLGRLKLDWWLKGSCSNTTCSENADCAKVKLDDGGLGHRCTCREGFSGKAFTVPGGCHRLVYKRKGLHKLVVLGTAGILVGVLVIVVLIATYFFRNKQSASSERASIANRLLCELAENSSVPFYTYKEIEKATDSFSDKNMLGTGAYGTVYAGEFPNSSCVAIKRLKHKDTTSIDQVVNEIKLLSSVSHPNLVRLLGCCFADGEPFLVYEFMPNGTLYQHLQHERGQPPLSWQLRLAIACQTANAIAHLHSSVNPPIYHRDIKSSNILLDHEFNSKISDFGLSRLGMSTDFEASHISTAPQGTPGYLDPQYHQDFQLSDKSDVYSFGVVLVEIISGFKVIDFTRPYSEVNLASLAVDRIGRGRVVDIIDPCLNKEINPKMFASIHNLAELAFRCLSFHRNMRPTMVEITEDLHRIKLMHYGTESGKFKNRSEIDMKRQQSFPRE

SEQ ID NO: 107760 - protein, 620 aa, Arabidopsis thaliana
  peptide (1)..(620): Ceres Seq. ID no. 13651523
  misc_feature: Pfam Name: Pkinase Pfam Description: Protein kinase domain
  misc_feature (151)..(620): Homolog of NCBI NO: 30698255 NR Description: protein kinase family [Arabidopsis thaliana]
  misc_feature (27)..(593): Homolog of NCBI NO: 7486158 NR Description: probable protein kinase [imported] - Arabidopsis
  misc_feature (27)..(593): Homolog of NCBI NO: 18400282 NR Description: protein kinase family [Arabidopsis thaliana] protein kinase family [Arabidopsis thaliana]
  misc_feature (27)..(593): Homolog of NCBI NO: 19715597 NR Description: At2g23450/F26B6.10 [Arabidopsis thaliana]
  misc_feature (28)..(593): Homolog of NCBI NO: 34902300 NR Description: Putative protein kinase [Oryza sativa (japonica group)] >gi|24308627|gb|AAN52750.1| Putative protein kinase
  misc_feature (181)..(591): Homolog of NCBI NO: 15241674 NR Description: protein kinase-related [Arabidopsis thaliana]
  misc_feature (196)..(591): Homolog of NCBI NO: 15232348 NR Description: protein kinase family [Arabidopsis thaliana]
  misc_feature (249)..(604): Homolog of NCBI NO: 34911340 NR Description: P0034C09.1 [Oryza sativa (japonica
  misc_feature (249)..(592): Homolog of NCBI NO: 15222572 NR Description: protein kinase family [Arabidopsis thaliana]
  misc_feature (212)..(594): Homolog of NCBI NO: 15408730 NR Description: P0443D08.12 [Oryza sativa (japonica
MTREPYLIFVFFVFTLTVATQTTGSVKCKTSLLRYPFGFSDGYPIRFNCSEITGEAVIGEFAVQEVTNSNIYVEIPPVCKRNIRKIEQLFRENLAPSKLQNIILVQGCKKQNKSSNCLIRNKFVENRLNLSKCKSPVSCLDGATTTTADVMSLGDVVNGSGCKYWFSSISQSQVSVNLGRLKLDWWLKGSCSNTTCSENADCAKVKLDDGGLGHRCTCREGFSGKAFTVPGGCHRLVYKRKGLHKLVVLGTAGILVGVLVIVVLIATYFFRNKQSASSERASIANRLLCELAENSSVPFYTYKEIEKATDSFSDKNMLGTGAYGTVYAGEFPNSSCVAIKRLKHKDTTSIDQVVNEIKLLSSVSHPNLVRLLGCCFADGEPFLVYEFMPNGTLYQHLQHERGQPPLSWQLRLAIACQTANAIAHLHSSVNPPIYHRDIKSSNILLDHEFNSKISDFGLSRLGMSTDFEASHISTAPQGTPGYLDPQYHQDFQLSDKSDVYSFGVVLVEIISGFKVIDFTRPYSEVNLASLAVDRIGRGRVVDIIDPCLNKEINPKMFASIHNLAELAFRCLSFHRNMRPTMVEITEDLHRIKLMHYGTESGKFKNRSEIDMKRQQSFPRE

SEQ ID NO: 107761 - protein, 470 aa, Arabidopsis thaliana
  peptide (1)..(470): Ceres Seq. ID no. 13651524
  misc_feature: Pfam Name: Pkinase Pfam Description: Protein kinase domain
  misc_feature (1)..(470): Homolog of NCBI NO: 30698255 NR Description: protein kinase family [Arabidopsis thaliana]
  misc_feature (1)..(443): Homolog of NCBI NO: 7486158 NR Description: probable protein kinase [imported] - Arabidopsis
  misc_feature (1)..(443): Homolog of NCBI NO: 18400282 NR Description: protein kinase family [Arabidopsis thaliana] protein kinase family [Arabidopsis thaliana]
  misc_feature (1)..(443): Homolog of NCBI NO: 19715597 NR Description: At2g23450/F26B6.10 [Arabidopsis thaliana]
  misc_feature (1)..(443): Homolog of NCBI NO: 34902300 NR Description: Putative protein kinase [Oryza sativa (japonica group)] >gi|24308627|gb|AAN52750.1| Putative protein kinase
  misc_feature (31)..(441): Homolog of NCBI NO: 15241674 NR Description: protein kinase-related [Arabidopsis thaliana]
  misc_feature (46)..(441): Homolog of NCBI NO: 15232348 NR Description: protein kinase family [Arabidopsis thaliana]
  misc_feature (99)..(454): Homolog of NCBI NO: 34911340 NR Description: P0034C09.1 [Oryza sativa (japonica
  misc_feature (99)..(442): Homolog of NCBI NO: 15222572 NR Description: protein kinase family [Arabidopsis thaliana]
  misc_feature (62)..(444): Homolog of NCBI NO: 15408730 NR Description: P0443D08.12 [Oryza sativa (japonica
MSLGDVVNGSGCKYWFSSISQSQVSVNLGRLKLDWWLKGSCSNTTCSENADCAKVKLDDGGLGHRCTCREGFSGKAFTVPGGCHRLVYKRKGLHKLVVLGTAGILVGVLVIVVLIATYFFRNKQSASSERASIANRLLCELAENSSVPFYTYKEIEKATDSFSDKNMLGTGAYGTVYAGEFPNSSCVAIKRLKHKDTTSIDQVVNEIKLLSSVSHPNLVRLLGCCFADGEPFLVYEFMPNGTLYQHLQHERGQPPLSWQLRLAIACQTANAIAHLHSSVNPPIYHRDIKSSNILLDHEFNSKISDFGLSRLGMSTDFEASHISTAPQGTPGYLDPQYHQDFQLSDKSDVYSFGVVLVEIISGFKVIDFTRPYSEVNLASLAVDRIGRGRVVDIIDPCLNKEINPKMFASIHNLAELAFRCLSFHRNMRPTMVEITEDLHRIKLMHYGTESGKFKNRSEIDMKRQQSFPRE

SEQ ID NO: 107762 - DNA, 1814 bp, Arabidopsis thaliana
  misc_feature (1)..(1814): Ceres Seq. ID no. 13651541
  misc_feature: MA Experiment ID: 20000314 Result: Down-regulated in Transcription
  misc_feature: MA Experiment 20000314 PARAMETER Experiment Name: At_14day_Shoots-Roots_Sub_P Parameter: Age (day) Value: 14
  misc_feature: MA Experiment 20000314 PARAMETER Experiment Name: At_14day_Shoots-Roots_Sub_P Parameter: Organism Value: A. thaliana
  misc_feature: MA Experiment 20000314 PARAMETER Experiment Name: At_14day_Shoots-Roots_Sub_P Parameter: Plant Line Value: WS
  misc_feature: MA Experiment 20000314 PARAMETER Experiment Name: At_14day_Shoots-Roots_Sub_P Parameter: Tissue Value: Roots vs. Whole Plant
  misc_feature: MA Experiment ID: 20000315 Result: Down-regulated in Transcription
  misc_feature: MA Experiment 20000315 PARAMETER Experiment Name: At_14day_Shoots-Roots_Sub_P Parameter: Age (day) Value: 14
  misc_feature: MA Experiment 20000315 PARAMETER Experiment Name: At_14day_Shoots-Roots_Sub_P Parameter: Organism Value: A. thaliana
  misc_feature: MA Experiment 20000315 PARAMETER Experiment Name: At_14day_Shoots-Roots_Sub_P Parameter: Plant Line Value: WS
  misc_feature: MA Experiment 20000315 PARAMETER Experiment Name: At_14day_Shoots-Roots_Sub_P Parameter: Tissue Value: Shoots vs. Whole Plant
  misc_feature: MA Experiment ID: 20000328 Result: Down-regulated in Transcription
  misc_feature: MA Experiment 20000328 PARAMETER Experiment Name: At_42deg_Heat_Sub_P Parameter: Age (day) Value: 14
  misc_feature: MA Experiment 20000328 PARAMETER Experiment Name: At_42deg_Heat_Sub_P Parameter: Organism Value: A. thaliana
  misc_feature: MA Experiment 20000328 PARAMETER Experiment Name: At_42deg_Heat_Sub_P Parameter: Plant Line Value: WS
  misc_feature: MA Experiment 20000328 PARAMETER Experiment Name: At_42deg_Heat_Sub_P Parameter: Temperature (deg C) Value: 42 vs. 22
  misc_feature: MA Experiment 20000328 PARAMETER Experiment Name: At_42deg_Heat_Sub_P Parameter: Timepoint (hr) Value: 6
  misc_feature: MA Experiment 20000328 PARAMETER Experiment Name: At_42deg_Heat_Sub_P Parameter: Tissue Value: Aerial
  misc_feature: MA Experiment ID: 20000440 Result: Up-regulated in Transcription
  misc_feature: MA Experiment 20000440 PARAMETER Experiment Name: At_Closed-Flower__Sub_P Parameter: Tissue Value: Closed Flower vs. Whole Plant
agtctcttcttgagaatcaatggtctctcataattccaagaacaccaacatactgtcatcttcaagttgagatttatcacactctttccttcaagaagctgtactgtagactttggaagatttaggacttctcaagattttgaaaatggcgaatcaacatttcttcaagcctcttcttcctggcttccacacccacttgagaatacctgtagccttcttcttgaagaatatagaaggaagatatgagcagaagacggcggagctgagatcagatgcgtcaaagataacttgggaagtgaagatagatggacagagactcactgacggttggaaagagtttgctctctcacatgatcttcgaatcggtgacattgttgttttcagacaagagagagatatgtctttccacgttacaatgttgggacctagttgttgtgagatccaatatggttcgtgttcagacgaggagagaaacctcgagaagaagaagaatccaaatggagaagcaaagtcttcttcactagatccttcttgtttttcggctaatgtggcgccttcgagtctacgttatgacttaatgctttttccaatgggttttgtgagggaaaatggtgtagtcggatctggaaagattgttctgatgaatgaaaagggcagatcatggaattttaacttgagacaaaagccatcatgcggaacagtttatgttagaggagggtgggtgagtttttgtgatgccaatggacttcaagctggagatatctacactttcaaactgatcaaaagaggaggaactcttgttctacgtttgttacccaaaggggcagagtcttgttcactagatccctcttgttttgtggctaatgttgcgccttcgactctacgctatgacacactgtatcttccaaagcgttttatgagggaaaatggtgtagacaaaagacgtggagagatgattctgatgaatgaaaagggcaaatcatggactttagatttgaaactaaagaaatcatgcggaacttccctcatcagacgaggatggagaagtttctgtagtgccaatggactaagagctggaagtatcattactttcaaactgattaagaaaagtggaactcttgttctatgtttgctctccaacgagccagaaaaagaagtgtgctcagaagctaatgaagtagagtctctttcgacagatcaagaaagccatgaagagagtagccacaacgagaaaatctcaagaagaaaggaaaagaagggtagaatgatatggaaagcttcgtcttcaccatccgaaaaccgatttgtgacattaaatcttacaccttataacatcctacgttctgcactgcgtcttccgatacccttcacgaggatgaatggtatcaatgaagaaactaaaatgactctgttggataaacatggtatgaagtggttaacgactctgcggttggtggactacaaaagaaaaagactgggaatggtaggaggctggaaaggattcatccaagctaacggtgtgaaggcaaacgaatccatcatgttggaactgatttgggaagaagaaacaagttgcgtccttaagttctgctccaaggtgaagctagcaatcaaatgaaaatgtatatgagtgtaatattgaaatgaatcaatgtttgactcttttatttggtaagatataactcttaaggtctaattgtactattgtagtatgttttctaagtatgttgtaattgtatgatcattggccttacggtgtgggatttgtgaatgtttgtttagcaaagaaaaggagagttcaactttatcagttt

SEQ ID NO: 107763 - protein, 490 aa, Arabidopsis thaliana
  peptide (1)..(490): Ceres Seq. ID no. 13651542
  misc_feature (387)..(488): Pfam Name: B3 DNA binding domain Pfam Description: B3 DNA binding domain
  misc_feature (1)..(490): Homolog of NCBI NO: 26450115 NR Description: unknown protein [Arabidopsis thaliana]
  misc_feature (19)..(490): Homolog of NCBI NO: 15224180 NR Description: transcriptional factor B3 family [Arabidopsis
  misc_feature (219)..(490): Homolog of NCBI NO: 18411270 NR Description: transcriptional factor B3 family [Arabidopsis
  misc_feature (20)..(111): Homolog of NCBI NO: 18411270 NR Description: transcriptional factor B3 family [Arabidopsis
  misc_feature (147)..(224): Homolog of NCBI NO: 18411270 NR Description: transcriptional factor B3 family [Arabidopsis
  misc_feature (227)..(362): Homolog of NCBI NO: 15224604 NR Description: transcriptional factor B3 family [Arabidopsis
  misc_feature (104)..(228): Homolog of NCBI NO: 15224604 NR Description: transcriptional factor B3 family [Arabidopsis
  misc_feature (354)..(460): Homolog of NCBI NO: 15224604 NR Description: transcriptional factor B3 family [Arabidopsis
  misc_feature (3)..(108): Homolog of NCBI NO: 15224604 NR Description: transcriptional factor B3 family [Arabidopsis
  misc_feature (3)..(222): Homolog of NCBI NO: 27754629 NR Description: unknown protein [Arabidopsis thaliana]
MANQHFFKPLLPGFHTHLRIPVAFFLKNIEGRYEQKTAELRSDASKITWEVKIDGQRLTDGWKEFALSHDLRIGDIVVFRQERDMSFHVTMLGPSCCEIQYGSCSDEERNLEKKKNPNGEAKSSSLDPSCFSANVAPSSLRYDLMLFPMGFVRENGVVGSGKIVLMNEKGRSWNFNLRQKPSCGTVYVRGGWVSFCDANGLQAGDIYTFKLIKRGGTLVLRLLPKGAESCSLDPSCFVANVAPSTLRYDTLYLPKRFMRENGVDKRRGEMILMNEKGKSWTLDLKLKKSCGTSLIRRGWRSFCSANGLRAGSIITFKLIKKSGTLVLCLLSNEPEKEVCSEANEVESLSTDQESHEESSHNEKISRRKEKKGRMIWKASSSPSENRFVTLNLTPYNILRSALRLPIPFTRMNGINEETKMTLLDKHGMKWLTTLRLVDYKRKRLGMVGGWKGFIQANGVKANESIMLELIWEEETSCVLKFCSKVKLAIK

SEQ ID NO: 107764 - protein, 406 aa, Arabidopsis thaliana
  peptide (1)..(406): Ceres Seq. ID no. 13651543
  misc_feature (303)..(404): Pfam Name: B3 DNA binding domain Pfam Description: B3 DNA binding domain
  misc_feature (1)..(406): Homolog of NCBI NO: 26450115 NR Description: unknown protein [Arabidopsis thaliana]
  misc_feature (1)..(406): Homolog of NCBI NO: 15224180 NR Description: transcriptional factor B3 family [Arabidopsis
  misc_feature (135)..(406): Homolog of NCBI NO: 18411270 NR Description: transcriptional factor B3 family [Arabidopsis
  misc_feature (1)..(27): Homolog of NCBI NO: 18411270 NR Description: transcriptional factor B3 family [Arabidopsis
  misc_feature (63)..(140): Homolog of NCBI NO: 18411270 NR Description: transcriptional factor B3 family [Arabidopsis
  misc_feature (143)..(278): Homolog of NCBI NO: 15224604 NR Description: transcriptional factor B3 family [Arabidopsis
  misc_feature (20)..(144): Homolog of NCBI NO: 15224604 NR Description: transcriptional factor B3 family [Arabidopsis
  misc_feature (270)..(376): Homolog of NCBI NO: 15224604 NR Description: transcriptional factor B3 family [Arabidopsis
  misc_feature (1)..(24): Homolog of NCBI NO: 15224604 NR Description: transcriptional factor B3 family [Arabidopsis
  misc_feature (1)..(138): Homolog of NCBI NO: 27754629 NR Description: unknown protein [Arabidopsis thaliana]
MSFHVTMLGPSCCEIQYGSCSDEERNLEKKKNPNGEAKSSSLDPSCFSANVAPSSLRYDLMLFPMGFVRENGVVGSGKIVLMNEKGRSWNFNLRQKPSCGTVYVRGGWVSFCDANGLQAGDIYTFKLIKRGGTLVLRLLPKGAESCSLDPSCFVANVAPSTLRYDTLYLPKRFMRENGVDKRRGEMILMNEKGKSWTLDLKLKKSCGTSLIRRGWRSFCSANGLRAGSIITFKLIKKSGTLVLCLLSNEPEKEVCSEANEVESLSTDQESHEESSHNEKISRRKEKKGRMIWKASSSPSENRFVTLNLTPYNILRSALRLPIPFTRMNGINEETKMTLLDKHGMKWLTTLRLVDYKRKRLGMVGGWKGFIQANGVKANESIMLELIWEEETSCVLKFCSKVKLAIK

SEQ ID NO: 107765 - protein, 400 aa, Arabidopsis thaliana
  peptide (1)..(400): Ceres Seq. ID no. 13651544
  misc_feature (297)..(398): Pfam Name: B3 DNA binding domain Pfam Description: B3 DNA binding domain
  misc_feature (1)..(400): Homolog of NCBI NO: 26450115 NR Description: unknown protein [Arabidopsis thaliana]
  misc_feature (1)..(400): Homolog of NCBI NO: 15224180 NR Description: transcriptional factor B3 family [Arabidopsis
  misc_feature (129)..(400): Homolog of NCBI NO: 18411270 NR Description: transcriptional factor B3 family [Arabidopsis
  misc_feature (1)..(21): Homolog of NCBI NO: 18411270 NR Description: transcriptional factor B3 family [Arabidopsis
  misc_feature (57)..(134): Homolog of NCBI NO: 18411270 NR Description: transcriptional factor B3 family [Arabidopsis
  misc_feature (137)..(272): Homolog of NCBI NO: 15224604 NR Description: transcriptional factor B3 family [Arabidopsis
  misc_feature (14)..(138): Homolog of NCBI NO: 15224604 NR Description: transcriptional factor B3 family [Arabidopsis
  misc_feature (264)..(370): Homolog of NCBI NO: 15224604 NR Description: transcriptional factor B3 family [Arabidopsis
  misc_feature (1)..(18): Homolog of NCBI NO: 15224604 NR Description: transcriptional factor B3 family [Arabidopsis
  misc_feature (1)..(132): Homolog of NCBI NO: 27754629 NR Description: unknown protein [Arabidopsis thaliana]
MLGPSCCEIQYGSCSDEERNLEKKKNPNGEAKSSSLDPSCFSANVAPSSLRYDLMLFPMGFVRENGVVGSGKIVLMNEKGRSWNFNLRQKPSCGTVYVRGGWVSFCDANGLQAGDIYTFKLIKRGGTLVLRLLPKGAESCSLDPSCFVANVAPSTLRYDTLYLPKRFMRENGVDKRRGEMILMNEKGKSWTLDLKLKKSCGTSLIRRGWRSFCSANGLRAGSIITFKLIKKSGTLVLCLLSNEPEKEVCSEANEVESLSTDQESHEESSHNEKISRRKEKKGRMIWKASSSPSENRFVTLNLTPYNILRSALRLPIPFTRMNGINEETKMTLLDKHGMKWLTTLRLVDYKRKRLGMVGGWKGFIQANGVKANESIMLELIWEEETSCVLKFCSKVKLAIK

SEQ ID NO: 107766 - DNA, 1090 bp, Arabidopsis thaliana
  misc_feature (1)..(1090): Ceres Seq. ID no. 13651582
  misc_feature: MA Experiment ID: 20000306 Result: Up-regulated in Transcription
  misc_feature: MA Experiment 20000306 PARAMETER Experiment Name: At_Germinating_Seeds_Sub_P Parameter: Age (hr) Value: 6 vs. 0
  misc_feature: MA Experiment 20000306 PARAMETER Experiment Name: At_Germinating_Seeds_Sub_P Parameter: Organism Value: A. thaliana
  misc_feature: MA Experiment 20000306 PARAMETER Experiment Name: At_Germinating_Seeds_Sub_P Parameter: Plant Line Value: WS
  misc_feature: MA Experiment 20000306 PARAMETER Experiment Name: At_Germinating_Seeds_Sub_P Parameter: Tissue Value: Germinating Seeds
  misc_feature: MA Experiment ID: 20000307 Result: Up-regulated in Transcription
  misc_feature: MA Experiment 20000307 PARAMETER Experiment Name: At_Germinating_Seeds_Sub_P Parameter: Age (hr) Value: 24 vs. 0
  misc_feature: MA Experiment 20000307 PARAMETER Experiment Name: At_Germinating_Seeds_Sub_P Parameter: Organism Value: A. thaliana
  misc_feature: MA Experiment 20000307 PARAMETER Experiment Name: At_Germinating_Seeds_Sub_P Parameter: Plant Line Value: WS
  misc_feature: MA Experiment 20000307 PARAMETER Experiment Name: At_Germinating_Seeds_Sub_P Parameter: Tissue Value: Germinating Seeds
  misc_feature: MA Experiment ID: 20000314 Result: Up-regulated in Transcription
  misc_feature: MA Experiment 20000314 PARAMETER Experiment Name: At_14day_Shoots-Roots_Sub_P Parameter: Age (day) Value: 14
  misc_feature: MA Experiment 20000314 PARAMETER Experiment Name: At_14day_Shoots-Roots_Sub_P Parameter: Organism Value: A. thaliana
  misc_feature: MA Experiment 20000314 PARAMETER Experiment Name: At_14day_Shoots-Roots_Sub_P Parameter: Plant Line Value: WS
  misc_feature: MA Experiment 20000314 PARAMETER Experiment Name: At_14day_Shoots-Roots_Sub_P Parameter: Tissue Value: Roots vs. Whole Plant
  misc_feature: Pfam Name: LisH Pfam Description: LisH
gctccaaagtctccagaattttccttctcattcccggaaaatttctacagttccttggatttgctcgatttcggaagagaacgaagaagatagtatggaaactccgaagatcgtagtaacgagtgaagattgggaatcgaagctaagtgatgtggaaattttgatagaagacatgaacagactcgtgatgaatcttcttgtggctgaaggatatagagaagctgctgagaaattcaaagaggagtctataactatgccagaggaagatcttgctagcatgaatgagcgattggaggtgataaaagctatcgaatcccgaaatctcgaggatgcaattgagaagttgaatgcactaaaccctgagattatcaaaacaagttttcacctccaccagcaaatgttgatcgagttgatccgtgagaagaagaccgaggaggctgttgcgtttgcacaggaaaaactcgcgccactagctgaggagaatgaggccttacaaagagaactggaaaaaacagtgtgtatactcgttactgaaggtctccctaactgcccgtccagggagcttttccacaactcgcagtggattaggactgctagccacgtaaacgaagcaatccatacaagccagactggagaaaaaggtcctgaattggagcgcttgttgaaggagctgatttggactcagaatcaactggatgaaaaaacagtctatgtgtatccacgcatgaatgatttttccactggccagctcatataccgaccagaatgattcttcttccctttcaacaactaacggctctgcaaaagggaacatatatagtgatatataactgatctgtcgcaagaacatgatgaccatttcttcctagtgagtattttgagtgaggggggagtttttagccttgctcttatgatttagggattttcttattcatgacaatattggacccctaggtagtactaataacaagagagggtttttgttttcaaatgttggtttactggttaggcttttattctccaccatggtatggttcctataaagctacataagaattcattttgaagtttgtttggtgtgtgaccgaag

SEQ ID NO: 107767 - protein, 255 aa, Arabidopsis thaliana
  peptide (1)..(255): Ceres Seq. ID no. 13651583
  misc_feature: Pfam Name: LisH Pfam Description: LisH
  misc_feature (32)..(255): Homolog of NCBI NO: 30681030 NR Description: expressed protein [Arabidopsis thaliana]
  misc_feature (33)..(246): Homolog of NCBI NO: 7487558 NR Description: hypothetical protein T30A10.60 - Arabidopsis >gi|5881775|emb|CAB55693.1| putative protein [Arabidopsis >gi|7267572|emb|CAB78053.1| putative protein [Arabidopsis
  misc_feature (25)..(250): Homolog of NCBI NO: 15219873 NR Description: expressed protein [Arabidopsis thaliana]
  misc_feature (25)..(247): Homolog of NCBI NO: 25404311 NR Description: hypothetical protein F11P17.12 [imported] - thaliana >gi|2443886|gb|AAB71479.1| Unknown protein [Arabidopsis
  misc_feature (32)..(250): Homolog of NCBI NO: 31296710 NR Description: PG4 [Hordeum vulgare]
  misc_feature (23)..(250): Homolog of NCBI NO: 26451919 NR Description: unknown protein [Arabidopsis thaliana]
  misc_feature (39)..(255): Homolog of NCBI NO: 8923557 NR Description: chromosome 20 open reading frame 11; two hybrid protein 1 [Homo sapiens] >gi|28201788|sp|Q9NWU2|CT11_HUMAN C20orf11 >gi|7020818|dbj|BAA91285.1| unnamed protein product
  misc_feature (39)..(255): Homolog of NCBI NO: 21594655 NR Description: chromosome 20 open reading frame 11 [Homo sapiens]
  misc_feature (39)..(255): Homolog of NCBI NO: 20863687 NR Description: RIKEN cDNA 2310003C23 [Mus musculus] similar to RIKEN cDNA 2310003C23 [Mus musculus] [Rattus >gi|28201785|sp|Q9D7M1|CT11_MOUSE Protein C20orf11 homolog
  misc_feature (39)..(250): Homolog of NCBI NO: 37748055 NR Description: Unknown (protein for MGC:73100) [Danio rerio]
LQSLQNFPSHSRKISTVPWICSISEENEEDSMETPKIVVTSEDWESKLSDVEILIEDMNRLVMNLLVAEGYREAAEKFKEESITMPEEDLASMNERLEVIKAIESRNLEDAIEKLNALNPEIIKTSFHLHQQMLIELIREKKTEEAVAFAQEKLAPLAEENEALQRELEKTVCILVTEGLPNCPSRELFHNSQWIRTASHVNEAIHTSQTGEKGPELERLLKELIWTQNQLDEKTVYVYPRMNDFSTGQLIYRPE

SEQ ID NO: 107768 - protein, 224 aa, Arabidopsis thaliana
  peptide (1)..(224): Ceres Seq. ID no. 13651584
  misc_feature: Pfam Name: LisH Pfam Description: LisH
  misc_feature (1)..(224): Homolog of NCBI NO: 30681030 NR Description: expressed protein [Arabidopsis thaliana]
  misc_feature (2)..(215): Homolog of NCBI NO: 7487558 NR Description: hypothetical protein T30A10.60 - Arabidopsis >gi|5881775|emb|CAB55693.1| putative protein [Arabidopsis >gi|7267572|emb|CAB78053.1| putative protein [Arabidopsis
  misc_feature (1)..(219): Homolog of NCBI NO: 15219873 NR Description: expressed protein [Arabidopsis thaliana]
  misc_feature (1)..(216): Homolog of NCBI NO: 25404311 NR Description: hypothetical protein F11P17.12 [imported] - thaliana >gi|2443886|gb|AAB71479.1| Unknown protein [Arabidopsis
  misc_feature (1)..(219): Homolog of NCBI NO: 31296710 NR Description: PG4 [Hordeum vulgare]
  misc_feature (1)..(219): Homolog of NCBI NO: 26451919 NR Description: unknown protein [Arabidopsis thaliana]
  misc_feature (8)..(224): Homolog of NCBI NO: 8923557 NR Description: chromosome 20 open reading frame 11; two hybrid protein 1 [Homo sapiens] >gi|28201788|sp|Q9NWU2|CT11_HUMAN C20orf11 >gi|7020818|dbj|BAA91285.1| unnamed protein product
  misc_feature (8)..(224): Homolog of NCBI NO: 21594655 NR Description: chromosome 20 open reading frame 11 [Homo sapiens]
  misc_feature (8)..(224): Homolog of NCBI NO: 20863687 NR Description: RIKEN cDNA 2310003C23 [Mus musculus] similar to RIKEN cDNA 2310003C23 [Mus musculus] [Rattus >gi|28201785|sp|Q9D7M1|CT11_MOUSE Protein C20orf11 homolog
  misc_feature (8)..(219): Homolog of NCBI NO: 37748055 NR Description: Unknown (protein for MGC:73100) [Danio rerio]
METPKIVVTSEDWESKLSDVEILIEDMNRLVMNLLVAEGYREAAEKFKEESITMPEEDLASMNERLEVIKAIESRNLEDAIEKLNALNPEIIKTSFHLHQQMLIELIREKKTEEAVAFAQEKLAPLAEENEALQRELEKTVCILVTEGLPNCPSRELFHNSQWIRTASHVNEAIHTSQTGEKGPELERLLKELIWTQNQLDEKTVYVYPRMNDFSTGQLIYRPE

SEQ ID NO: 107769 - protein, 198 aa, Arabidopsis thaliana; identical to SEQ ID NO: 88848
  peptide (1)..(198): Ceres Seq. ID no. 13651585
  misc_feature: Pfam Name: LisH Pfam Description: LisH
  misc_feature (1)..(198): Homolog of NCBI NO: 30681030 NR Description: expressed protein [Arabidopsis thaliana]
  misc_feature (1)..(189): Homolog of NCBI NO: 7487558 NR Description: hypothetical protein T30A10.60 - Arabidopsis >gi|5881775|emb|CAB55693.1| putative protein [Arabidopsis >gi|7267572|emb|CAB78053.1| putative protein [Arabidopsis
  misc_feature (1)..(193): Homolog of NCBI NO: 15219873 NR Description: expressed protein [Arabidopsis thaliana]
  misc_feature (1)..(190): Homolog of NCBI NO: 25404311 NR Description: hypothetical protein F11P17.12 [imported] - thaliana >gi|2443886|gb|AAB71479.1| Unknown protein [Arabidopsis
  misc_feature (1)..(193): Homolog of NCBI NO: 31296710 NR Description: PG4 [Hordeum vulgare]
  misc_feature (1)..(193): Homolog of NCBI NO: 26451919 NR Description: unknown protein [Arabidopsis thaliana]
  misc_feature (1)..(198): Homolog of NCBI NO: 8923557 NR Description: chromosome 20 open reading frame 11; two hybrid protein 1 [Homo sapiens] >gi|28201788|sp|Q9NWU2|CT11_HUMAN C20orf11 >gi|7020818|dbj|BAA91285.1| unnamed protein product
  misc_feature (1)..(198): Homolog of NCBI NO: 21594655 NR Description: chromosome 20 open reading frame 11 [Homo sapiens]
  misc_feature (1)..(198): Homolog of NCBI NO: 20863687 NR Description: RIKEN cDNA 2310003C23 [Mus musculus] similar to RIKEN cDNA 2310003C23 [Mus musculus] [Rattus >gi|28201785|sp|Q9D7M1|CT11_MOUSE Protein C20orf11 homolog
  misc_feature (1)..(193): Homolog of NCBI NO: 37748055 NR Description: Unknown (protein for MGC:73100) [Danio rerio]

SEQ ID NO: 107770 - DNA, 738 bp, Arabidopsis thaliana
  misc_feature (1)..(738): Ceres Seq. ID no. 13651590
  misc_feature: MA Experiment ID: 20000180 Result: Up-regulated in Transcription
  misc_feature: MA Experiment 20000180 PARAMETER Experiment Name: At_Germinating_Seeds_P Parameter: Age (hr) Value: 24 vs. 0
  misc_feature: MA Experiment 20000180 PARAMETER Experiment Name: At_Germinating_Seeds_P Parameter: Tissue Value: Germinating Seeds
gtacaagtggaattttgaaaaaagaagcagagagcgatggagaaagtggttgatctcttcggagtcggagaagctaattcccagaagctactcgaaggaggcaaagatctcagcgagatccaacagggattgttcataggatcagtagctgaagcgaataacaaggattttctcaaaagctctaatatcactcatgtcttaaccgttgctgtggccttggctcctccttatcctgatgattttgtctacaaagtcattgaagtggttgatagatccgagaccgatttgacagtatatttcgatgagtgttatagcttcatcgaccaagctattcaatctggtggtggtgttttggttcattgcttcatgggaatgtctaggagtgtgactatagtggtggcttacctgatgaaaaagcatggaatgggattctctaaagctatggaacttgtaaggagccgacgacatcaggcatatcctaatcccggtttcatttcgcagctccagcaatttgaaaaatccatccaaggtaatgcatgattgcttcagctgataagaagattcaagatagtggcatgatgaactctcatgaaattccggcaagtgtcttcagccccatgttggccaaaaaagttgattggtttcgtgctgtgaaggattttttcttgtgaactattgatggtgagcactttgccatgtccattagccaattgaaatgaatgaaaacgcagaatttac

SEQ ID NO: 107771 - protein, 167 aa, Arabidopsis thaliana
  peptide (1)..(167): Ceres Seq. ID no. 13651591
  misc_feature (24)..(162): Pfam Name: Dual specificity phosphatase, catalytic domain Pfam Description: Dual specificity phosphatase, catalytic domain
  misc_feature (1)..(167): Homolog of NCBI NO: 30679726 NR Description: dual-specificity protein phosphatase -related
  misc_feature (1)..(167): Homolog of NCBI NO: 18397475 NR Description: dual-specificity protein phosphatase -related
  misc_feature (26)..(164): Homolog of NCBI NO: 9294518 NR Description: dual-specificity protein phosphatase-like protein
  misc_feature (26)..(164): Homolog of NCBI NO: 15229482 NR Description: dual-specificity protein phosphatase [Arabidopsis
  misc_feature (28)..(165): Homolog of NCBI NO: 34905574 NR Description: hypothetical protein~similar to Arabidopsis
  misc_feature (28)..(166): Homolog of NCBI NO: 18254478 NR Description: dual specificity phosphatase 19; protein
  misc_feature (20)..(161): Homolog of NCBI NO: 24643332 NR Description: CG14211-PB [Drosophila melanogaster]
  misc_feature (13)..(167): Homolog of NCBI NO: 2499760 NR Description: Dual specificity protein phosphatase
  misc_feature (28)..(166): Homolog of NCBI NO: 12845353 NR Description: unnamed protein product [Mus musculus]
  misc_feature (28)..(166): Homolog of NCBI NO: 21624338 NR Description: dual-specificity phosphatase SKRP1 [Mus musculus]
MEKVVDLFGVGEANSQKLLEGGKDLSEIQQGLFIGSVAEANNKDFLKSSNITHVLTVAVALAPPYPDDFVYKVIEVVDRSETDLTVYFDECYSFIDQAIQSGGGVLVHCFMGMSRSVTIVVAYLMKKHGMGFSKAMELVRSRRHQAYPNPGFISQLQQFEKSIQGNA

SEQ ID NO: 107772 - DNA, 966 bp, Arabidopsis thaliana
  misc_feature (1)..(966): Ceres Seq. ID no. 13651592
  misc_feature: MA Experiment ID: 20000265 Result: Up-regulated in Transcription
  misc_feature: MA Experiment 20000265 PARAMETER Experiment Name: At_Open_Flower_P Parameter: Age (day) Value: 21
  misc_feature: MA Experiment 20000265 PARAMETER Experiment Name: At_Open_Flower_P Parameter: Plant Line Value: WS
  misc_feature: MA Experiment 20000265 PARAMETER Experiment Name: At_Open_Flower_P Parameter: Tissue Value: Closed Flower vs. Whole Plant
gcttccgatgattcctctcactatttcaccgagtttaccttgtctgagacatggagaatctgtataaggagctcggtgaccaatctctccacaaagatttctgtcaaactgttgcctctacttttagttgttctgtgaatcggaatggcaaatcctctataacctggaaacaggtacagatttggttccaggagaagctgaagcatcaaagccaaccaaaatccaaaactttgccatctccccctttgcagattcatgacttatctaatcccagttcttatgcttcaaatgcctcaaatgctacctttgttgggaattctacctttgttcaaacacgaaaaggcaaggcctctgatttagctgatctggcttttgaggctaaatcagcgcgggactacgcgtggtatgacgtgtcttcgttccttacttatagagttcttcgcactggtgaactggaagtgcgtgtacggttttctgggttcgacaaccgacacgatgagtgggtaaacgtcaaaacatcagtgcgtgagcggtctattcctgtagaaccatcagagtgtgggagagtgaacgttggagacctgcttctatgtttccaagaaagagaggatcaagcactctactgtgatggtcatgttttgaatatcaagagagggattcatgatcacgcgagatgtaactgcgtgtttcttgttcgctacgagcttgacaatacagagtgtatgttcaggaatcgctgggactagaaagaatttgccgccgccctgaagagtaattttttttggttttgaagtcatatttggaagatgcagtaaactatgactatatagtatatgactgacccaaaaatggaataacatgctcatgtatagacttccactactaagtacctaccggccctaggattctatgttagtttttttctgtcaactatgtggaataaagtgcaaaagcttagaattgtag

SEQ ID NO: 107773 - protein, 231 aa, Arabidopsis thaliana
  peptide (1)..(231): Ceres Seq. ID no. 13651593
  misc_feature (1)..(223): Homolog of NCBI NO: 25402795 NR Description: protein F9L1.16 [imported] - Arabidopsis thaliana
  misc_feature (1)..(223): Homolog of NCBI NO: 30684244 NR Description: expressed protein [Arabidopsis thaliana]
  misc_feature (1)..(231): Homolog of NCBI NO: 30684237 NR Description: expressed protein [Arabidopsis thaliana] unknown protein [Arabidopsis thaliana]
  misc_feature (19)..(223): Homolog of NCBI NO: 22331151 NR Description: expressed protein [Arabidopsis thaliana] unknown protein [Arabidopsis thaliana]
  misc_feature (19)..(223): Homolog of NCBI NO: 11994101 NR Description: gb|AAD39678.1~gene_id:MYF24.10~similar to unknown
MENLYKELGDQSLHKDFCQTVASTFSCSVNRNGKSSITWKQVQIWFQEKLKHQSQPKSKTLPSPPLQIHDLSNPSSYASNASNATFVGNSTFVQTRKGKASDLADLAFEAKSARDYAWYDVSSFLTYRVLRTGELEVRVRFSGFDNRHDEWVNVKTSVRERSIPVEPSECGRVNVGDLLLCFQEREDQALYCDGHVLNIKRGIHDHARCNCVFLVRYELDNTECMFRNRWD

SEQ ID NO: 107774 - DNA, 1079 bp, Arabidopsis thaliana
  misc_feature (1)..(1079): Ceres Seq. ID no. 13651594
  misc_feature: MA Experiment ID: 20000173 Result: Down-regulated in Transcription
  misc_feature: MA Experiment 20000173 PARAMETER Experiment Name: At_42deg_Heat_P Parameter: Age (day) Value: 14
  misc_feature: MA Experiment 20000173 PARAMETER Experiment Name: At_42deg_Heat_P Parameter: Organism Value: A. thaliana
  misc_feature: MA Experiment 20000173 PARAMETER Experiment Name: At_42deg_Heat_P Parameter: Plant Line Value: WS
  misc_feature: MA Experiment 20000173 PARAMETER Experiment Name: At_42deg_Heat_P Parameter: Temperature (deg C) Value: 42 vs. 22
  misc_feature: MA Experiment 20000173 PARAMETER Experiment Name: At_42deg_Heat_P Parameter: Timepoint (hr) Value: 6
  misc_feature: MA Experiment 20000173 PARAMETER Experiment Name: At_42deg_Heat_P Parameter: Tissue Value: Aerial
  misc_feature: MA Experiment ID: 20000184 Result: Down-regulated in Transcription
  misc_feature: MA Experiment 20000184 PARAMETER Experiment Name: At_Shoots__P Parameter: Age (day) Value: 7
  misc_feature: MA Experiment 20000184 PARAMETER Experiment Name: At_Shoots__P Parameter: Tissue Value: Shoots vs. Whole Plant
  misc_feature: MA Experiment ID: 20000443 Result: Down-regulated in Transcription
  misc_feature: MA Experiment 20000443 PARAMETER Experiment Name: At_1uM_BR-BRZ__P Parameter: Tissue Value: Shoot Apices
  misc_feature: MA Experiment 20000443 PARAMETER Experiment Name: At_1uM_BR-BRZ__P Parameter: Treatment Value: 1uM BRZ vs. No Treatment
  misc_feature: MA Experiment ID: 20000495 Result: Up-regulated in Transcription
  misc_feature: MA Experiment 20000495 PARAMETER Experiment Name: At_Guard_Cells_P Parameter: Harvest Date Value: 8/2/2002
  misc_feature: MA Experiment 20000495 PARAMETER Experiment Name: At_Guard_Cells_P Parameter: Organism Value: A. thaliana
  misc_feature: MA Experiment 20000495 PARAMETER Experiment Name: At_Guard_Cells_P Parameter: Tissue Value: Guard Cells vs. Leaves
taagaggtatttgtcaatcaatacctttcttcgtcgattcccttagctgatgtgttgttattttcgaatttgatttgttggaacacacttcgaagcttgggatctgaaatatctgattctgactgtatactgtagtcaaagatgggcagtgaaagtgataaaggtagagaagcaattgttgaagaagaagaagaagagatagtctgcttggagtctttcttcatcaacgatgattatcagttgacgaagtttacgtttggttctcatgttcttgagctctactgtctccaatcagcttcaactgattttgatttaacagggcagctggtttggcctggtgcgatgcttatgaatggttatctctcagaaaatgctgacattctccagggatgttcagttttggagttgggatctggcgttggtataactggagtcctatgtagcaaattttgccgtaaagttatttttactgaccacaacgatgaagtgctcaagatactgaagaaaaacattgaccttcatggacattcaagtggtcccaaaccctcagctgaattagaggctgcaaagcttgaatggggaaatagtgatcagcttggtcaaattttaaagaaacacaatgatggctttgatcttattcttggagctgagatctgctttcagcaatcaagtgtgccattgctatttgacagtgttgagcagcttctgcggatcaggggacaaggaaactgcaaattcatactagcatacgtatcacgggctagacagatggattctgcaatcttgagagaaggcgctcagcacgggatgctgatgaatgaagtttctgggactcggtgtaccgtaggaaacttggaaggggtcatatatgaaatcacacttcaaaagaagagaggaattgtgttcgagtaacttagttcctttgatacctcagaattttgtaacattatttttatgttatttagatgcatacatttttggtgaaacgtttactaaagttacagttcaaaaagtatacaatgacatttgtggatgctttgaagtgaatccacattgttagctgaaaaactgttgcaact

SEQ ID NO: 107775 - protein, 256 aa, Arabidopsis thaliana
  peptide (1)..(256): Ceres Seq. ID no. 13651595
  misc_feature (1)..(256): Homolog of NCBI NO: 26449997 NR Description: unknown protein [Arabidopsis thaliana]
  misc_feature (1)..(248): Homolog of NCBI NO: 33146643 NR Description: unknown protein [Oryza sativa (japonica
  misc_feature (120)..(256): Homolog of NCBI NO: 30683273 NR Description: expressed protein [Arabidopsis thaliana]
  misc_feature (1)..(125): Homolog of NCBI NO: 7460191 NR Description: hypothetical protein At2g26810 [imported] - thaliana >gi|3426045|gb|AAC32244.1| hypothetical protein
  misc_feature (1)..(125): Homolog of NCBI NO: 30683273 NR Description: expressed protein [Arabidopsis thaliana]
  misc_feature (120)..(209): Homolog of NCBI NO: 7460191 NR Description: hypothetical protein At2g26810 [imported] - thaliana >gi|3426045|gb|AAC32244.1| hypothetical protein
  misc_feature (1)..(238): Homolog of NCBI NO: 30683042 NR Description: expressed protein [Arabidopsis thaliana] At2g26200/T1D16.16 [Arabidopsis thaliana]
  misc_feature (1)..(238): Homolog of NCBI NO: 20197178 NR Description: hypothetical protein [Arabidopsis thaliana]
  misc_feature (1)..(238): Homolog of NCBI NO: 25407826 NR Description: hypothetical protein At2g26200 [imported] -
  misc_feature (57)..(225): Homolog of NCBI NO: 6066426 NR Description: hypothetical protein L2581.07 [Leishmania major]
MGSESDKGREAIVEEEEEEIVCLESFFINDDYQLTKFTFGSHVLELYCLQSASTDFDLTGQLVWPGAMLMNGYLSENADILQGCSVLELGSGVGITGVLCSKFCRKVIFTDHNDEVLKILKKNIDLHGHSSGPKPSAELEAAKLEWGNSDQLGQILKKHNDGFDLILGAEICFQQSSVPLLFDSVEQLLRIRGQGNCKFILAYVSRARQMDSAILREGAQHGMLMNEVSGTRCTVGNLEGVIYEITLQKKRGIVFE

SEQ ID NO: 107776 - protein, 189 aa, Arabidopsis thaliana
  peptide (1)..(189): Ceres Seq. ID no. 13651596
  misc_feature (1)..(189): Homolog of NCBI NO: 26449997 NR Description: unknown protein [Arabidopsis thaliana]
  misc_feature (1)..(181): Homolog of NCBI NO: 33146643 NR Description: unknown protein [Oryza sativa (japonica
  misc_feature (53)..(189): Homolog of NCBI NO: 30683273 NR Description: expressed protein [Arabidopsis thaliana]
  misc_feature (1)..(58): Homolog of NCBI NO: 7460191 NR Description: hypothetical protein At2g26810 [imported] - thaliana >gi|3426045|gb|AAC32244.1| hypothetical protein
  misc_feature (1)..(58): Homolog of NCBI NO: 30683273 NR Description: expressed protein [Arabidopsis thaliana]
  misc_feature (53)..(142): Homolog of NCBI NO: 7460191 NR Description: hypothetical protein At2g26810 [imported] - thaliana >gi|3426045|gb|AAC32244.1| hypothetical protein
  misc_feature (1)..(171): Homolog of NCBI NO: 30683042 NR Description: expressed protein [Arabidopsis thaliana] At2g26200/T1D16.16 [Arabidopsis thaliana]
  misc_feature (1)..(171): Homolog of NCBI NO: 20197178 NR Description: hypothetical protein [Arabidopsis thaliana]
  misc_feature (1)..(171): Homolog of NCBI NO: 25407826 NR Description: hypothetical protein At2g26200 [imported] -
  misc_feature (1)..(158): Homolog of NCBI NO: 6066426 NR Description: hypothetical protein L2581.07 [Leishmania major]
MLMNGYLSENADILQGCSVLELGSGVGITGVLCSKFCRKVIFTDHNDEVLKILKKNIDLHGHSSGPKPSAELEAAKLEWGNSDQLGQILKKHNDGFDLILGAEICFQQSSVPLLFDSVEQLLRIRGQGNCKFILAYVSRARQMDSAILREGAQHGMLMNEVSGTRCTVGNLEGVIYEITLQKKRGIVFE

SEQ ID NO: 107777 - protein, 187 aa, Arabidopsis thaliana
  peptide (1)..(187): Ceres Seq. ID no. 13651597
  misc_feature (1)..(187): Homolog of NCBI NO: 26449997 NR Description: unknown protein [Arabidopsis thaliana]
  misc_feature (1)..(179): Homolog of NCBI NO: 33146643 NR Description: unknown protein [Oryza sativa (japonica
  misc_feature (51)..(187): Homolog of NCBI NO: 30683273 NR Description: expressed protein [Arabidopsis thaliana]
  misc_feature (1)..(56): Homolog of NCBI NO: 7460191 NR Description: hypothetical protein At2g26810 [imported] - thaliana >gi|3426045|gb|AAC32244.1| hypothetical protein
  misc_feature (1)..(56): Homolog of NCBI NO: 30683273 NR Description: expressed protein [Arabidopsis thaliana]
  misc_feature (51)..(140): Homolog of NCBI NO: 7460191 NR Description: hypothetical protein At2g26810 [imported] - thaliana >gi|3426045|gb|AAC32244.1| hypothetical protein
  misc_feature (1)..(169): Homolog of NCBI NO: 30683042 NR Description: expressed protein [Arabidopsis thaliana] At2g26200/T1D16.16 [Arabidopsis thaliana]
  misc_feature (1)..(169): Homolog of NCBI NO: 20197178 NR Description: hypothetical protein [Arabidopsis thaliana]
  misc_feature (1)..(169): Homolog of NCBI NO: 25407826 NR Description: hypothetical protein At2g26200 [imported] -
  misc_feature (1)..(156): Homolog of NCBI NO: 6066426 NR Description: hypothetical protein L2581.07 [Leishmania major]
MNGYLSENADILQGCSVLELGSGVGITGVLCSKFCRKVIFTDHNDEVLKILKKNIDLHGHSSGPKPSAELEAAKLEWGNSDQLGQILKKHNDGFDLILGAEICFQQSSVPLLFDSVEQLLRIRGQGNCKFILAYVSRARQMDSAILREGAQHGMLMNEVSGTRCTVGNLEGVIYEITLQKKRGIVFE

SEQ ID NO: 107778 - DNA, 1337 bp, Arabidopsis thaliana
  misc_feature (1)..(1337): Ceres Seq. ID no. 13651632
  misc_feature: MA Experiment ID: 108434 Result: Up-regulated in Transcription
  misc_feature: MA Experiment 108434 PARAMETER Experiment Name: At_Root_Tips_cDNA_P Parameter: Tissue Value: Root Tips
  misc_feature: MA Experiment ID: 20000234 Result: Up-regulated in Transcription
  misc_feature: MA Experiment 20000234 PARAMETER Experiment Name: At_Siliques_P Parameter: Age (day) Value: 21
  misc_feature: MA Experiment 20000234 PARAMETER Experiment Name: At_Siliques_P Parameter: Organism Value: A. thaliana
  misc_feature: MA Experiment 20000234 PARAMETER Experiment Name: At_Siliques_P Parameter: Plant Line Value: WS
  misc_feature: MA Experiment 20000234 PARAMETER Experiment Name: At_Siliques_P Parameter: Tissue Value: Less Than 5mm Siliques vs. Whole Plant
  misc_feature: MA Experiment ID: 20000495 Result: Up-regulated in Transcription
  misc_feature: MA Experiment 20000495 PARAMETER Experiment Name: At_Guard_Cells_P Parameter: Harvest Date Value: 8/2/2002
  misc_feature: MA Experiment 20000495 PARAMETER Experiment Name: At_Guard_Cells_P Parameter: Organism Value: A. thaliana
  misc_feature: MA Experiment 20000495 PARAMETER Experiment Name: At_Guard_Cells_P Parameter: Tissue Value: Guard Cells vs. Leaves
gtttccttccacgcctccgccggcaagctagttttctgactggagttccatcgtggacgccattatcttcctaaaaatgaagattcttacactcgtaatgcttttatgctactcgttcgtctcttctaccggagatacgactatccacacaaacaattgggctgttttggtctgcacttctcgcttctggtttaactaccggcacatggccaatactctgtccctctataggacagtcaagagacttggaataccagatgagaggatcattcttatgctggctgatgatatggcctgtaatgctagaaatgaatatcctgctcaagttttcaacaatgaaaaccacaaacttaacctctatggagataacgttgaggtagattatcgtggatatgaggtaacagttgaaaatttcttacgggttttgactgggcgtcatgagaatgctgttccaaggtcaaagcgtctcctcagtgatgagggtagccatatactactgtacatgactgggcatggaggtgatgaatttttgaagtttcaagatgcagaagaactccagagtcacgatttagcagatgctgtaaaacaaatgaaagagaagcgtagattcaaggagctgatgataatggttgatacttgccaagctgccactctctttaatcagcttcaatctcctggtgttttggctattggtagcagtctaaaaggagagaactcatattcccatcacctggattcagatattggtgtatctgttgtagatcggtttacatattacactcttgcattctttgagaggctcaatatatatgacaatgcatcacttaacagtttatttaggtcctacgatccgagactgctaatgtctactgcctactaccggactgatctttaccaaccacatctggtggaggtaccggtcacaaatttcttcggttcagttatggagaccattcatactgattcagcttacaaagctttctcaagtaaaatctccgaaagaaagatcaattctgagatgccattcaatcaactttccgaacacgatcttaaagaagagcttgagaatacaaacataccaaacgatgagttgatagctgagaagcaaaaatgcccatattcacaaatgcgggcagacctccacgagaaagtggagaagcttgaaaatgtcgatacagtggttaacctcagcatagcagtgatggtactcgctgtaatggtctcatcatctttactacgatgaagaactgatataatcatctgcacttcacttaatctatgtagtctgattcactgttgcagcttcacacccattttgtaattttttgcacaatgct

SEQ ID NO: 107779 - protein, 388 aa, Arabidopsis thaliana; identical to SEQ ID NO: 90399
  peptide (1)..(388): Ceres Seq. ID no. 13651633
  misc_feature (2)..(327): Pfam Name: Peptidase C13 family Pfam Description: Peptidase C13 family
  misc_feature (1)..(388): Homolog of NCBI NO: 18390936 NR Description: GPI-anchor transamidase (U32517) -related
  misc_feature (1)..(388): Homolog of NCBI NO: 21537105 NR Description: putative GPI-anchor transamidase [Arabidopsis
  misc_feature (1)..(342): Homolog of NCBI NO: 7485988 NR Description: hypothetical protein F22O13.26 - Arabidopsis
  misc_feature (1)..(342): Homolog of NCBI NO: 9802563 NR Description: F22O13.24 [Arabidopsis thaliana]
  misc_feature (1)..(329): Homolog of NCBI NO: 24639234 NR Description: CG4406-PA [Drosophila melanogaster]
  misc_feature (1)..(296): Homolog of NCBI NO: 7511896 NR Description: hypothetical protein 133E12.3 - fruit fly melanogaster) >gi|2661523|emb|CAA15687.1| version:''084'',
  misc_feature (24)..(383): Homolog of NCBI NO: 6320538 NR Description: Protein involved in the attachment of
  misc_feature (24)..(345): Homolog of NCBI NO: 1518259 NR Description: gpi8 [Homo sapiens]
  misc_feature (24)..(345): Homolog of NCBI NO: 23199983 NR Description: phosphatidylinositol glycan, class K precursor
  misc_feature (14)..(319): Homolog of NCBI NO: 31209217 NR Description: ENSANGP00000013498 [Anopheles gambiae]

SEQ ID NO: 107780 - protein, 381 aa, Arabidopsis thaliana; identical to SEQ ID NO: 90400
  peptide (1)..(381): Ceres Seq. ID no. 13651634
  misc_feature (1)..(320): Pfam Name: Peptidase C13 family Pfam Description: Peptidase C13 family
  misc_feature (1)..(381): Homolog of NCBI NO: 18390936 NR Description: GPI-anchor transamidase (U32517) -related
  misc_feature (1)..(381): Homolog of NCBI NO: 21537105 NR Description: putative GPI-anchor transamidase [Arabidopsis
  misc_feature (1)..(335): Homolog of NCBI NO: 7485988 NR Description: hypothetical protein F22O13.26 - Arabidopsis
  misc_feature (1)..(335): Homolog of NCBI NO: 9802563 NR Description: F22O13.24 [Arabidopsis thaliana]
  misc_feature (1)..(322): Homolog of NCBI NO: 24639234 NR Description: CG4406-PA [Drosophila melanogaster]
  misc_feature (1)..(289): Homolog of NCBI NO: 7511896 NR Description: hypothetical protein 133E12.3 - fruit fly melanogaster) >gi|2661523|emb|CAA15687.1| version:''084'',
  misc_feature (17)..(376): Homolog of NCBI NO: 6320538 NR Description: Protein involved in the attachment of
  misc_feature (17)..(338): Homolog of NCBI NO: 1518259 NR Description: gpi8 [Homo sapiens]
  misc_feature (17)..(338): Homolog of NCBI NO: 23199983 NR Description: phosphatidylinositol glycan, class K precursor
  misc_feature (7)..(312): Homolog of NCBI NO: 31209217 NR Description: ENSANGP00000013498 [Anopheles gambiae]

SEQ ID NO: 107781 - protein, 345 aa, Arabidopsis thaliana; identical to SEQ ID NO: 90401
  peptide (1)..(345): Ceres Seq. ID no. 13651635
  misc_feature (1)..(284): Pfam Name: Peptidase C13 family Pfam Description: Peptidase C13 family
  misc_feature (1)..(345): Homolog of NCBI NO: 18390936 NR Description: GPI-anchor transamidase (U32517) -related
  misc_feature (1)..(345): Homolog of NCBI NO: 21537105 NR Description: putative GPI-anchor transamidase [Arabidopsis
  misc_feature (1)..(299): Homolog of NCBI NO: 7485988 NR Description: hypothetical protein F22O13.26 - Arabidopsis
  misc_feature (1)..(299): Homolog of NCBI NO: 9802563 NR Description: F22O13.24 [Arabidopsis thaliana]
  misc_feature (1)..(286): Homolog of NCBI NO: 24639234 NR Description: CG4406-PA [Drosophila melanogaster]
  misc_feature (1)..(253): Homolog of NCBI NO: 7511896 NR Description: hypothetical protein 133E12.3 - fruit fly melanogaster) >gi|2661523|emb|CAA15687.1| version:''084'',
  misc_feature (1)..(340): Homolog of NCBI NO: 6320538 NR Description: Protein involved in the attachment of
  misc_feature (1)..(302): Homolog of NCBI NO: 1518259 NR Description: gpi8 [Homo sapiens]
  misc_feature (1)..(302): Homolog of NCBI NO: 23199983 NR Description: phosphatidylinositol glycan, class K precursor
  misc_feature (1)..(276): Homolog of NCBI NO: 31209217 NR Description: ENSANGP00000013498 [Anopheles gambiae]

SEQ ID NO: 107782 - DNA, 1121 bp, Arabidopsis thaliana
  misc_feature (1)..(1121): Ceres Seq. ID no. 13651636
  misc_feature: MA Experiment ID: 20000173 Result: Down-regulated in Transcription
  misc_feature: MA Experiment 20000173 PARAMETER Experiment Name: At_42deg_Heat_P Parameter: Age (day) Value: 14
  misc_feature: MA Experiment 20000173 PARAMETER Experiment Name: At_42deg_Heat_P Parameter: Organism Value: A. thaliana
  misc_feature: MA Experiment 20000173 PARAMETER Experiment Name: At_42deg_Heat_P Parameter: Plant Line Value: WS
  misc_feature: MA Experiment 20000173 PARAMETER Experiment Name: At_42deg_Heat_P Parameter: Temperature (deg C) Value: 42 vs. 22
  misc_feature: MA Experiment 20000173 PARAMETER Experiment Name: At_42deg_Heat_P Parameter: Timepoint (hr) Value: 6
  misc_feature: MA Experiment 20000173 PARAMETER Experiment Name: At_42deg_Heat_P Parameter: Tissue Value: Aerial
  misc_feature: MA Experiment ID: 20000179 Result: Down-regulated in Transcription
  misc_feature: MA Experiment 20000179 PARAMETER Experiment Name: At_Germinating_Seeds_P Parameter: Age (hr) Value: 6 vs. 0
  misc_feature: MA Experiment 20000179 PARAMETER Experiment Name: At_Germinating_Seeds_P Parameter: Tissue Value: Germinating Seeds
  misc_feature: MA Experiment ID: 20000180 Result: Down-regulated in Transcription
  misc_feature: MA Experiment 20000180 PARAMETER Experiment Name: At_Germinating_Seeds_P Parameter: Age (hr) Value: 24 vs. 0
  misc_feature: MA Experiment 20000180 PARAMETER Experiment Name: At_Germinating_Seeds_P Parameter: Tissue Value: Germinating Seeds
  misc_feature: MA Experiment ID: 20000184 Result: Down-regulated in Transcription
  misc_feature: MA Experiment 20000184 PARAMETER Experiment Name: At_Shoots__P Parameter: Age (day) Value: 7
  misc_feature: MA Experiment 20000184 PARAMETER Experiment Name: At_Shoots__P Parameter: Tissue Value: Shoots vs. Whole Plant
  misc_feature: MA Experiment ID: 20001905 Result: Down-regulated in Transcription
  misc_feature: MA Experiment 20001905 PARAMETER Experiment Name: At_Drought_Reproduction_P Parameter: Age (day) Value: 40
  misc_feature: MA Experiment 20001905 PARAMETER Experiment Name: At_Drought_Reproduction_P Parameter: Organism Value: A. thaliana
  misc_feature: MA Experiment 20001905 PARAMETER Experiment Name: At_Drought_Reproduction_P Parameter: Plant Line Value: WS
  misc_feature: MA Experiment 20001905 PARAMETER Experiment Name: At_Drought_Reproduction_P Parameter: Timepoint (day) Value: 10
  misc_feature: MA Experiment 20001905 PARAMETER Experiment Name: At_Drought_Reproduction_P Parameter: Tissue Value: Rosettes
  misc_feature: MA Experiment 20001905 PARAMETER Experiment Name: At_Drought_Reproduction_P Parameter: Treatment Value: Drought vs. No Drought
gaaataatttatcaaataaacagagaagaagaaccaaattcaatgcttccttgtcgccgtcttgttctgtcctgcaagaatcaagctgccagttttctccgaaggtgtggaccatcgaaacgaattcaatcagtcaattactgtaaatcaacaagacagggccatgaaattccagatgtgaaacctctttttcccacaggaggaggaactcaagctccttctcgttctcgtgctcgttatgctgttcctgcgattctacttggttttgccggattcgtcggctttcttcattacaacgacgaaaggagagcagttcctagaggtcaagcaagcagcaatagcggttgtggctgcggttctaatacaactgtcaaaggtccgattatcggaggtccgtttacgcttgtgagcacagaaaacaagatagtcacagagaatgacttttgtggtaaatgggttctactctactttggatactctttttccccggatgttggacctgagcaactaaagatgatgtccaaagctgttgataaactaggttgagttacttatacaaagctccagccatttcattagtttcagatctttcttgttataatatatgatcttcttttagtaatgatgtcttgtcttgatggaaacaacagagtctaaacataacgagaagattctgcctgtctttgtcactcttgaccctcaacgagacacaccttctcatctccacgcatacttgaaagagtttgatagtagaatactaggactaaccgggactgcaagtgcaatgaggcaaatggcacaagagtatcgtgtctacttcaagaaggttcaagaggacggagaagattatctcgttgatacttctcacaacatgtacttgataaatccgaagatggagattgtgaggtgctttggggttgagtataatccagacgagctctcacaagagcttcttaaagaagttgcttctgtttcacagtgacccattttgaccaaacactaaagagagaaacactaggatgctctttgattgttttcttcaattcgtgatttttttaaagacgattttgttaatccgtctcttattcttgaaaaaatgaaaattagatggtagatcctgc

SEQ ID NO: 107783 - protein, 181 aa, Arabidopsis thaliana
  peptide (1)..(181): Ceres Seq. ID no. 13651637
  misc_feature (84)..(180): Pfam Name: SCO1/SenC Pfam Description: SCO1/SenC
  misc_feature (15)..(180): Homolog of NCBI NO: 18420515 NR Description: expressed protein [Arabidopsis thaliana]
  misc_feature (26)..(180): Homolog of NCBI NO: 7487210 NR Description: hypothetical protein T19P19.130 - Arabidopsis >gi|3080443|emb|CAA18760.1| putative protein [Arabidopsis >gi|7270958|emb|CAB80637.1| putative protein [Arabidopsis
  misc_feature (15)..(181): Homolog of NCBI NO: 26450269 NR Description: unknown protein [Arabidopsis thaliana]
  misc_feature (84)..(180): Homolog of NCBI NO: 6403490 NR Description: putative SCO1 protein [Arabidopsis thaliana]
  misc_feature (84)..(180): Homolog of NCBI NO: 18398306 NR Description: SCO1 protein -related [Arabidopsis thaliana] putative SCO1 protein [Arabidopsis thaliana] putative SCO1 protein [Arabidopsis thaliana]
  misc_feature (21)..(180): Homolog of NCBI NO: 40740887 NR Description: hypothetical protein AN4842.2 [Aspergillus
  misc_feature (85)..(180): Homolog of NCBI NO: 32420339 NR Description: hypothetical protein [Neurospora crassa]
  misc_feature (129)..(180): Homolog of NCBI NO: 19920710 NR Description: CG8885-PA [Drosophila melanogaster]
  misc_feature (127)..(181): Homolog of NCBI NO: 4406651 NR Description: h-sco1 [Homo sapiens]
  misc_feature (123)..(180): Homolog of NCBI NO: 22965964 NR Description: hypothetical protein [Rhodospirillum rubrum]
EIIYQINREEEPNSMLPCRRLVLSCKNQAASFLRRCGPSKRIQSVNYCKSTRQGHEIPDVKPLFPTGGGTQAPSRSRARYAVPAILLGFAGFVGFLHYNDERRAVPRGQASSNSGCGCGSNTTVKGPIIGGPFTLVSTENKIVTENDFCGKWVLLYFGYSFSPDVGPEQLKMMSKAVDKLG

SEQ ID NO: 107784 - protein, 167 aa, Arabidopsis thaliana
  peptide (1)..(167): Ceres Seq. ID no. 13651638
  misc_feature (70)..(166): Pfam Name: SCO1/SenC Pfam Description: SCO1/SenC
  misc_feature (1)..(166): Homolog of NCBI NO: 18420515 NR Description: expressed protein [Arabidopsis thaliana]
  misc_feature (12)..(166): Homolog of NCBI NO: 7487210 NR Description: hypothetical protein T19P19.130 - Arabidopsis >gi|3080443|emb|CAA18760.1| putative protein [Arabidopsis >gi|7270958|emb|CAB80637.1| putative protein [Arabidopsis
  misc_feature (1)..(167): Homolog of NCBI NO: 26450269 NR Description: unknown protein [Arabidopsis thaliana]
  misc_feature (70)..(166): Homolog of NCBI NO: 6403490 NR Description: putative SCO1 protein [Arabidopsis thaliana]
  misc_feature (70)..(166): Homolog of NCBI NO: 18398306 NR Description: SCO1 protein -related [Arabidopsis thaliana] putative SCO1 protein [Arabidopsis thaliana] putative SCO1 protein [Arabidopsis thaliana]
  misc_feature (7)..(166): Homolog of NCBI NO: 40740887 NR Description: hypothetical protein AN4842.2 [Aspergillus
  misc_feature (71)..(166): Homolog of NCBI NO: 32420339 NR Description: hypothetical protein [Neurospora crassa]
  misc_feature (115)..(166): Homolog of NCBI NO: 19920710 NR Description: CG8885-PA [Drosophila melanogaster]
  misc_feature (113)..(167): Homolog of NCBI NO: 4406651 NR Description: h-sco1 [Homo sapiens]
  misc_feature (109)..(166): Homolog of NCBI NO: 22965964 NR Description: hypothetical protein [Rhodospirillum rubrum]
MLPCRRLVLSCKNQAASFLRRCGPSKRIQSVNYCKSTRQGHEIPDVKPLFPTGGGTQAPSRSRARYAVPAILLGFAGFVGFLHYNDERRAVPRGQASSNSGCGCGSNTTVKGPIIGGPFTLVSTENKIVTENDFCGKWVLLYFGYSFSPDVGPEQLKMMSKAVDKLG

SEQ ID NO: 107785 - protein, 114 aa, Arabidopsis thaliana
  peptide (1)..(114): Ceres Seq. ID no. 13651639
  misc_feature (1)..(97): Pfam Name: SCO1/SenC Pfam Description: SCO1/SenC
  misc_feature (1)..(114): Homolog of NCBI NO: 18420515 NR Description: expressed protein [Arabidopsis thaliana]
  misc_feature (29)..(114): Homolog of NCBI NO: 7487210 NR Description: hypothetical protein T19P19.130 - Arabidopsis >gi|3080443|emb|CAA18760.1| putative protein [Arabidopsis >gi|7270958|emb|CAB80637.1| putative protein [Arabidopsis
  misc_feature (12)..(109): Homolog of NCBI NO: 6403490 NR Description: putative SCO1 protein [Arabidopsis thaliana]
  misc_feature (12)..(109): Homolog of NCBI NO: 18398306 NR Description: SCO1 protein -related [Arabidopsis thaliana] putative SCO1 protein [Arabidopsis thaliana] putative SCO1 protein [Arabidopsis thaliana]
  misc_feature (1)..(109): Homolog of NCBI NO: 40740887 NR Description: hypothetical protein AN4842.2 [Aspergillus
  misc_feature (1)..(106): Homolog of NCBI NO: 32420339 NR Description: hypothetical protein [Neurospora crassa]
  misc_feature (1)..(110): Homolog of NCBI NO: 19920710 NR Description: CG8885-PA [Drosophila melanogaster]
  misc_feature (12)..(105): Homolog of NCBI NO: 4406651 NR Description: h-sco1 [Homo sapiens]
  misc_feature (11)..(110): Homolog of NCBI NO: 22965964 NR Description: hypothetical protein [Rhodospirillum rubrum]
  misc_feature (1)..(109): Homolog of NCBI NO: 23015654 NR Description: hypothetical protein [Magnetospirillum
METTESKHNEKILPVFVTLDPQRDTPSHLHAYLKEFDSRILGLTGTASAMRQMAQEYRVYFKKVQEDGEDYLVDTSHNMYLINPKMEIVRCFGVEYNPDELSQELLKEVASVSQ

SEQ ID NO: 107786 - DNA, 1232 bp, Arabidopsis thaliana
  misc_feature (1)..(1232): Ceres Seq. ID no. 13651640
  misc_feature: MA Experiment ID: 108434 Result: Up-regulated in Transcription
  misc_feature: MA Experiment 108434 PARAMETER Experiment Name: At_Root_Tips_cDNA_P Parameter: Tissue Value: Root Tips
ggtttgccaaatctcttccatctcatccgccgagcgatattgttgatagctcaaaaaagggaggacactgggagcattaagcaagaagcacagtctcatcctccagggatcttcgagataccgggggagcctgcggttgttatcaatggtgtgcctgatgaacctcaaactgattgtatgattgccaaagatgaaccaatatcaagtggcactgtaggaagcggggaatggcttgagggtagagaagttcgcaagtttttcttgggtcgctactattctggtacggtgacaaagttcgataaacaatctggatggtacagagttgaatatgaagatggggattctgaagatcttgactggtctgagcttgaagaagtgcttctacctttggatgttactgtcccattgaggtctatctcattgcatatcatcaagaatcgacaaatacatgcccagctttatggatacacgccacaacgctagaccaagaactccaacacaaatgcgcagagtgaatatggtgaagcaggacaaagagtaaatgtgaaggcaccatatccaggacataaaccggagaaactagtgaccacaacagtgaaggcaccatacccaggacataaaccggagaagctaatcccacgtacgcttctacttccatgacattgtatccggagtcaaaccaacctcagtcgtagtcgctacgagtcccacaacaaactcctctgcaaccgctttcggtatggttgcagtcgttgacgacatattgacggtgggacctgaaataacctcagaggaagttgggagagcccaaggaattttcgcatcggccgaccagaacaactttggtctgcttatggctttcaactttgttttcacaaagggtgaattttccggcagcaccgtgtccatgtatggccggaatccgatattttcgaaggtgagagagatgccgatcatcggaggtactggagcattcaggttcggaagaggatatgcacaagccaagacttttacgttcaatactaccagtggaaatgctgtggtcaagtataatgtttatatttggcattaattgttgacttctttggtgcttttctatttttccgtcgaaagatgataaatttggatggatacaaaaagaaataaaaggttggtatgaataaatgcctctttttctattgtagttgaattgatttttgattttgatgtatttgattgtaagaaattgtggt

SEQ ID NO: 107787 - protein, 160 aa, Arabidopsis thaliana
  peptide (1)..(160): Ceres Seq. ID no. 13651641
  misc_feature (21)..(135): Homolog of NCBI NO: 15230941 NR Description: disease resistance response protein-related
  misc_feature (18)..(139): Homolog of NCBI NO: 34908048 NR Description: P0506B12.13 [Oryza sativa (japonica
GLPNLFHLIRRAILLIAQKREDTGSIKQEAQSHPPGIFEIPGEPAVVINGVPDEPQTDCMIAKDEPISSGTVGSGEWLEGREVRKFFLGRYYSGTVTKFDKQSGWYRVEYEDGDSEDLDWSELEEVLLPLDVTVPLRSISLHIIKNRQIHAQLYGYTPQR

SEQ ID NO: 107788 - protein, 110 aa, Arabidopsis thaliana
  peptide (1)..(110): Ceres Seq. ID no. 13651642
  misc_feature (1)..(110): Pfam Name: Dirigent-like protein Pfam Description: Dirigent-like protein
  misc_feature (1)..(110): Homolog of NCBI NO: 15230941 NR Description: disease resistance response protein-related
  misc_feature (1)..(110): Homolog of NCBI NO: 15218836 NR Description: disease resistance response protein-related/
  misc_feature (1)..(110): Homolog of NCBI NO: 26450265 NR Description: unknown protein [Arabidopsis thaliana]
  misc_feature (1)..(110): Homolog of NCBI NO: 15219966 NR Description: disease resistance response protein-related
  misc_feature (1)..(110): Homolog of NCBI NO: 15238980 NR Description: disease resistance response protein-related
  misc_feature (1)..(110): Homolog of NCBI NO: 15238982 NR Description: disease resistance response protein-related thaliana] >gi|9759487|dbj|BAB10492.1| contains similarity to resistance response protein~gene_id:MDH9.21 [Arabidopsis
  misc_feature (1)..(110): Homolog of NCBI NO: 15217886 NR Description: disease resistance response protein-related/
  misc_feature (1)..(110): Homolog of NCBI NO: 15231302 NR Description: disease resistance response protein-related/
  misc_feature (1)..(110): Homolog of NCBI NO: 15239779 NR Description: disease resistance response protein-related/
  misc_feature (1)..(110): Homolog of NCBI NO: 15222673 NR Description: disease resistance response protein-related/
MVAVVDDILTVGPEITSEEVGRAQGIFASADQNNFGLLMAFNFVFTKGEFSGSTVSMYGRNPIFSKVREMPIIGGTGAFRFGRGYAQAKTFTFNTTSGNAVVKYNVYIWH

SEQ ID NO: 107789 - protein, 101 aa, Arabidopsis thaliana
  peptide (1)..(101): Ceres Seq. ID no. 13651643
  misc_feature (1)..(76): Homolog of NCBI NO: 15230941 NR Description: disease resistance response protein-related
  misc_feature (1)..(80): Homolog of NCBI NO: 34908048 NR Description: P0506B12.13 [Oryza sativa (japonica
MIAKDEPISSGTVGSGEWLEGREVRKFFLGRYYSGTVTKFDKQSGWYRVEYEDGDSEDLDWSELEEVLLPLDVTVPLRSISLHIIKNRQIHAQLYGYTPQR

SEQ ID NO: 107790 - DNA, 1186 bp, Arabidopsis thaliana
  misc_feature (1)..(1186): Ceres Seq. ID no. 13651646
  misc_feature: MA Experiment ID: 20000166 Result: Up-regulated in Transcription
  misc_feature: MA Experiment 20000166 PARAMETER Experiment Name: At_100uM_ABA_P Parameter: Age (day) Value: 14
  misc_feature: MA Experiment 20000166 PARAMETER Experiment Name: At_100uM_ABA_P Parameter: Organism Value: A. thaliana
  misc_feature: MA Experiment 20000166 PARAMETER Experiment Name: At_100uM_ABA_P Parameter: Plant Line Value: WS
  misc_feature: MA Experiment 20000166 PARAMETER Experiment Name: At_100uM_ABA_P Parameter: Timepoint (hr) Value: 1
  misc_feature: MA Experiment 20000166 PARAMETER Experiment Name: At_100uM_ABA_P Parameter: Tissue Value: Aerial
  misc_feature: MA Experiment 20000166 PARAMETER Experiment Name: At_100uM_ABA_P Parameter: Treatment Value: 100uM ABA vs. No Treatment
  misc_feature: MA Experiment ID: 20000173 Result: Down-regulated in Transcription
  misc_feature: MA Experiment 20000173 PARAMETER Experiment Name: At_42deg_Heat_P Parameter: Age (day) Value: 14
  misc_feature: MA Experiment 20000173 PARAMETER Experiment Name: At_42deg_Heat_P Parameter: Organism Value: A. thaliana
  misc_feature: MA Experiment 20000173 PARAMETER Experiment Name: At_42deg_Heat_P Parameter: Plant Line Value: WS
  misc_feature: MA Experiment 20000173 PARAMETER Experiment Name: At_42deg_Heat_P Parameter: Temperature (deg C) Value: 42 vs. 22
  misc_feature: MA Experiment 20000173 PARAMETER Experiment Name: At_42deg_Heat_P Parameter: Timepoint (hr) Value: 6
  misc_feature: MA Experiment 20000173 PARAMETER Experiment Name: At_42deg_Heat_P Parameter: Tissue Value: Aerial
  misc_feature: MA Experiment ID: 20000182 Result: Up-regulated in Transcription
  misc_feature: MA Experiment 20000182 PARAMETER Experiment Name: At_2mM_SA_P Parameter: Age (day) Value: 14
  misc_feature: MA Experiment 20000182 PARAMETER Experiment Name: At_2mM_SA_P Parameter: Organism Value: A. thaliana
  misc_feature: MA Experiment 20000182 PARAMETER Experiment Name: At_2mM_SA_P Parameter: Plant Line Value: WS
  misc_feature: MA Experiment 20000182 PARAMETER Experiment Name: At_2mM_SA_P Parameter: Timepoint (hr) Value: 6
  misc_feature: MA Experiment 20000182 PARAMETER Experiment Name: At_2mM_SA_P Parameter: Tissue Value: Aerial
  misc_feature: MA Experiment 20000182 PARAMETER Experiment Name: At_2mM_SA_P Parameter: Treatment Value: 2mM SA vs. No Treatment
  misc_feature: MA Experiment ID: 20000184 Result: Down-regulated in Transcription
  misc_feature: MA Experiment 20000184 PARAMETER Experiment Name: At_Shoots__P Parameter: Age (day) Value: 7
  misc_feature: MA Experiment 20000184 PARAMETER Experiment Name: At_Shoots__P Parameter: Tissue Value: Shoots vs. Whole Plant
  misc_feature: MA Experiment ID: 20000185 Result: Down-regulated in Transcription
  misc_feature: MA Experiment 20000185 PARAMETER Experiment Name: At_Roots__P Parameter: Age (day) Value: 7 vs. 21
  misc_feature: MA Experiment 20000185 PARAMETER Experiment Name: At_Roots__P Parameter: Organism Value: A. thaliana
  misc_feature: MA Experiment 20000185 PARAMETER Experiment Name: At_Roots__P Parameter: Tissue Value: Roots vs. Whole Plant
  misc_feature: MA Experiment ID: 20000234 Result: Down-regulated in Transcription
  misc_feature: MA Experiment 20000234 PARAMETER Experiment Name: At_Siliques_P Parameter: Age (day) Value: 21
  misc_feature: MA Experiment 20000234 PARAMETER Experiment Name: At_Siliques_P Parameter: Organism Value: A. thaliana
  misc_feature: MA Experiment 20000234 PARAMETER Experiment Name: At_Siliques_P Parameter: Plant Line Value: WS
  misc_feature: MA Experiment 20000234 PARAMETER Experiment Name: At_Siliques_P Parameter: Tissue Value: Less Than 5mm Siliques vs. Whole Plant
  misc_feature: MA Experiment ID: 20000235 Result: Down-regulated in Transcription
  misc_feature: MA Experiment 20000235 PARAMETER Experiment Name: At_Siliques_P Parameter: Age (day) Value: 21
  misc_feature: MA Experiment 20000235 PARAMETER Experiment Name: At_Siliques_P Parameter: Organism Value: A. thaliana
  misc_feature: MA Experiment 20000235 PARAMETER Experiment Name: At_Siliques_P Parameter: Plant Line Value: WS
  misc_feature: MA Experiment 20000235 PARAMETER Experiment Name: At_Siliques_P Parameter: Tissue Value: 5-10mm Siliques vs. Whole Plant
  misc_feature: MA Experiment ID: 20000264 Result: Down-regulated in Transcription
  misc_feature: MA Experiment 20000264 PARAMETER Experiment Name: At_Open_Flower_P Parameter: Age (day) Value: 21
  misc_feature: MA Experiment 20000264 PARAMETER Experiment Name: At_Open_Flower_P Parameter: Plant Line Value: WS
  misc_feature: MA Experiment 20000264 PARAMETER Experiment Name: At_Open_Flower_P Parameter: Tissue Value: Open Flower vs. Whole Plant
  misc_feature: MA Experiment ID: 20000265 Result: Down-regulated in Transcription
  misc_feature: MA Experiment 20000265 PARAMETER Experiment Name: At_Open_Flower_P Parameter: Age (day) Value: 21
  misc_feature: MA Experiment 20000265 PARAMETER Experiment Name: At_Open_Flower_P Parameter: Plant Line Value: WS
  misc_feature: MA Experiment 20000265 PARAMETER Experiment Name: At_Open_Flower_P Parameter: Tissue Value: Closed Flower vs. Whole Plant
  misc_feature: MA Experiment ID: 20000267 Result: Up-regulated in Transcription
  misc_feature: MA Experiment 20000267 PARAMETER Experiment Name: At_Drought_P Parameter: Age (day) Value: 7
  misc_feature: MA Experiment 20000267 PARAMETER Experiment Name: At_Drought_P Parameter: Organism Value: A. thaliana
  misc_feature: MA Experiment 20000267 PARAMETER Experiment Name: At_Drought_P Parameter: Plant Line Value: WS
  misc_feature: MA Experiment 20000267 PARAMETER Experiment Name: At_Drought_P Parameter: Timepoint (hr) Value: 6
  misc_feature: MA Experiment 20000267 PARAMETER Experiment Name: At_Drought_P Parameter: Tissue Value: Whole Plant
  misc_feature: MA Experiment 20000267 PARAMETER Experiment Name: At_Drought_P Parameter: Treatment Value: Drought vs. No Drought
  misc_feature: MA Experiment ID: 20000286 Result: Down-regulated in Transcription
  misc_feature: MA Experiment 20000286 PARAMETER Experiment Name: At_Open_Flower_P Parameter: Age (day) Value: 21
  misc_feature: MA Experiment 20000286 PARAMETER Experiment Name: At_Open_Flower_P Parameter: Plant Line Value: WS
  misc_feature: MA Experiment 20000286 PARAMETER Experiment Name: At_Open_Flower_P Parameter: Tissue Value: Half Open vs. Whole Plant
  misc_feature: MA Experiment ID: 20000436 Result: Up-regulated in Transcription
  misc_feature: MA Experiment 20000436 PARAMETER Experiment Name: At_Drought_P Parameter: Age (day) Value: 7
  misc_feature: MA Experiment 20000436 PARAMETER Experiment Name: At_Drought_P Parameter: Organism Value: A. thaliana
  misc_feature: MA Experiment 20000436 PARAMETER Experiment Name: At_Drought_P Parameter: Plant Line Value: WS
  misc_feature: MA Experiment 20000436 PARAMETER Experiment Name: At_Drought_P Parameter: Timepoint (hr) Value: 12
  misc_feature: MA Experiment 20000436 PARAMETER Experiment Name: At_Drought_P Parameter: Tissue Value: Whole Plant
  misc_feature: MA Experiment 20000436 PARAMETER Experiment Name: At_Drought_P Parameter: Treatment Value: Drought vs. No Drought
  misc_feature: MA Experiment ID: 20000437 Result: Up-regulated in Transcription
  misc_feature: MA Experiment 20000437 PARAMETER Experiment Name: At_Drought_P Parameter: Age (day) Value: 8
  misc_feature: MA Experiment 20000437 PARAMETER Experiment Name: At_Drought_P Parameter: Organism Value: A. thaliana
  misc_feature: MA Experiment 20000437 PARAMETER Experiment Name: At_Drought_P Parameter: Plant Line Value: WS
  misc_feature: MA Experiment 20000437 PARAMETER Experiment Name: At_Drought_P Parameter: Timepoint (hr) Value: 24
  misc_feature: MA Experiment 20000437 PARAMETER Experiment Name: At_Drought_P Parameter: Tissue Value: Whole Plant
  misc_feature: MA Experiment 20000437 PARAMETER Experiment Name: At_Drought_P Parameter: Treatment Value: Drought vs. No Drought
  misc_feature: MA Experiment ID: 20000438 Result: Down-regulated in Transcription
  misc_feature: MA Experiment 20000438 PARAMETER Experiment Name: At_Shoots__P Parameter: Age (day) Value: 14
  misc_feature: MA Experiment 20000438 PARAMETER Experiment Name: At_Shoots__P Parameter: Tissue Value: Shoots vs. Whole Plant
  misc_feature: MA Experiment ID: 20000439 Result: Down-regulated in Transcription
  misc_feature: MA Experiment 20000439 PARAMETER Experiment Name: At_Roots__P Parameter: Age (day) Value: 14 vs. 21
  misc_feature: MA Experiment 20000439 PARAMETER Experiment Name: At_Roots__P Parameter: Organism Value: A. thaliana
  misc_feature: MA Experiment 20000439 PARAMETER Experiment Name: At_Roots__P Parameter: Tissue Value: Roots vs. Whole Plant
  misc_feature: MA Experiment ID: 20000453 Result: Up-regulated in Transcription
  misc_feature: MA Experiment 20000453 PARAMETER Experiment Name: At_100uM_ABA_P Parameter: Age (day) Value: 15
  misc_feature: MA Experiment 20000453 PARAMETER Experiment Name: At_100uM_ABA_P Parameter: Organism Value: A. thaliana
  misc_feature: MA Experiment 20000453 PARAMETER Experiment Name: At_100uM_ABA_P Parameter: Plant Line Value: WS
  misc_feature: MA Experiment 20000453 PARAMETER Experiment Name: At_100uM_ABA_P Parameter: Timepoint (hr) Value: 24
  misc_feature: MA Experiment 20000453 PARAMETER Experiment Name: At_100uM_ABA_P Parameter: Tissue Value: Aerial
  misc_feature: MA Experiment 20000453 PARAMETER Experiment Name: At_100uM_ABA_P Parameter: Treatment Value: 100uM ABA vs. No Treatment
  misc_feature: MA Experiment ID: 20000456 Result: Up-regulated in Transcription
  misc_feature: MA Experiment 20000456 PARAMETER Experiment Name: At_100uM_BA_P Parameter: Age (day) Value: 14
  misc_feature: MA Experiment 20000456 PARAMETER Experiment Name: At_100uM_BA_P Parameter: Organism Value: A. thaliana
  misc_feature: MA Experiment 20000456 PARAMETER Experiment Name: At_100uM_BA_P Parameter: Plant Line Value: WS
  misc_feature: MA Experiment 20000456 PARAMETER Experiment Name: At_100uM_BA_P Parameter: Timepoint (hr) Value: 6
  misc_feature: MA Experiment 20000456 PARAMETER Experiment Name: At_100uM_BA_P Parameter: Tissue Value: Aerial
  misc_feature: MA Experiment 20000456 PARAMETER Experiment Name: At_100uM_BA_P Parameter: Treatment Value: 100uM BA vs. No Treatment
  misc_feature: MA Experiment ID: 20000495 Result: Down-regulated in Transcription
  misc_feature: MA Experiment 20000495 PARAMETER Experiment Name: At_Guard_Cells_P Parameter: Harvest Date Value: 8/2/2002
  misc_feature: MA Experiment 20000495 PARAMETER Experiment Name: At_Guard_Cells_P Parameter: Organism Value: A. thaliana
  misc_feature: MA Experiment 20000495 PARAMETER Experiment Name: At_Guard_Cells_P Parameter: Tissue Value: Guard Cells vs. Leaves
  misc_feature: MA Experiment ID: 20000506 Result: Up-regulated in Transcription
  misc_feature: MA Experiment 20000506 PARAMETER Experiment Name: At_Wounding_P Parameter: Organism Value: A. thaliana
  misc_feature: MA Experiment 20000506 PARAMETER Experiment Name: At_Wounding_P Parameter: Plant Line Value: WS
  misc_feature: MA Experiment 20000506 PARAMETER Experiment Name: At_Wounding_P Parameter: Timepoint (hr) Value: 6
  misc_feature: MA Experiment 20000506 PARAMETER Experiment Name: At_Wounding_P Parameter: Tissue Value: Aerial
  misc_feature: MA Experiment 20000506 PARAMETER Experiment Name: At_Wounding_P Parameter: Treatment Value: Wounding vs. No Wounding
  misc_feature: MA Experiment ID: 20000794 Result: Down-regulated in Transcription
  misc_feature: MA Experiment 20000794 PARAMETER Experiment Name: At_Petals_P Parameter: Age (day) Value: 23-25 days
  misc_feature: MA Experiment 20000794 PARAMETER Experiment Name: At_Petals_P Parameter: Plant Line Value: WS
  misc_feature: MA Experiment 20000794 PARAMETER Experiment Name: At_Petals_P Parameter: Tissue Value: Petals vs. Whole plant
  misc_feature: MA Experiment ID: 20001450 Result: Up-regulated in Transcription
  misc_feature: MA Experiment 20001450 PARAMETER Experiment Name: At_Far-red-induction_P Parameter: Age (day) Value: 7
  misc_feature: MA Experiment 20001450 PARAMETER Experiment Name: At_Far-red-induction_P Parameter: Light Value: Far-red vs. White
  misc_feature: MA Experiment 20001450 PARAMETER Experiment Name: At_Far-red-induction_P Parameter: Organism Value: A. thaliana
  misc_feature: MA Experiment 20001450 PARAMETER Experiment Name: At_Far-red-induction_P Parameter: Plant Line Value: Columbia
  misc_feature: MA Experiment 20001450 PARAMETER Experiment Name: At_Far-red-induction_P Parameter: Timepoint (hr) Value: 8
  misc_feature: MA Experiment 20001450 PARAMETER Experiment Name: At_Far-red-induction_P Parameter: Tissue Value: Whole Plant
  misc_feature: MA Experiment ID: 20001554 Result: Down-regulated in Transcription
  misc_feature: MA Experiment 20001554 PARAMETER Experiment Name: At_Drought_Soil_Dry_P Parameter: Age (day) Value: 21
  misc_feature: MA Experiment 20001554 PARAMETER Experiment Name: At_Drought_Soil_Dry_P Parameter: Organism Value: A. thaliana
  misc_feature: MA Experiment 20001554 PARAMETER Experiment Name: At_Drought_Soil_Dry_P Parameter: Plant Line Value: WS
  misc_feature: MA Experiment 20001554 PARAMETER Experiment Name: At_Drought_Soil_Dry_P Parameter: Post Timepoint (hr) Value: None
  misc_feature: MA Experiment 20001554 PARAMETER Experiment Name: At_Drought_Soil_Dry_P Parameter: Post-Treatment Value: None
  misc_feature: MA Experiment 20001554 PARAMETER Experiment Name: At_Drought_Soil_Dry_P Parameter: Timepoint (day) Value: 7
  misc_feature: MA Experiment 20001554 PARAMETER Experiment Name: At_Drought_Soil_Dry_P Parameter: Treatment Value: Drought vs. No Drought
  misc_feature: Pfam Name: Pkinase Pfam Description: Protein kinase domain
gtcttcgtcttcatcttcgctatggccgttacttcgcttctcgataccgttttccgacgtagaaagaagaagtctactgagtttataagctttttcgaattcgacttggacaccattaaagctgcaacaaatgatttctcagaactggttggtcgtggcggatttggttttgtttacaagggtaggcttcaaaatggacaagaaatagcagtcaagattttgtctacaagttcaattagaactgagagacagtttcataacgaacttattattttgtctaagcttaaacacaagaatctgatcaatcttcttggtttctgcactaaacgagaccaacatggtcttgtttacgagttcatgcctaactcaagcctcgattgttttatactcgacccacacagagctgctcagctaaattgggagatgtgccgaaacattattgatggcatagctcgagggctacgttaccttcatgaagaatccgggttatgggtcgttcaccgcgacattaaacctggaaacattctattggattcagatttgaaaccgaaaatagtgggatttgaattggcgaggacgatgcaacaaggtgaaaacgcagctgaaacaactgaaattgtcggtaccgtagggtatttagatccggagtacatacgaagcggacgtgtttccgtcaaatctgacgtttatgcctttggagttacaatcttgacgatcattagcagaaggaaggcttggagtgtggacggagactctctaatcaaatatgttaggagatgctggaacagaggagaagccatagatgtgatccatgaagtgatgagggaagaagaaagagaatattcgataagcgaaatcttgagatacattcacattgctttgctatgtgtggatgagaatgctgagagaaggccgaatattgataaagttctgcattggtttagttgtttctctactcctttacctgatccaacatttggtaatagatttcttgtagaggaagaaacaaattggccctggtcgccatctttatctcctggtcacagctctgtcacgtcacccatatcttcacgttaaggagattgagtgctctgttttattagactgacgagagtttatgatgaaaagaattgttggttgataagttcaagtcgtaatttgctattgtcttcttctttttgtgccc

SEQ ID NO: 107791 - protein, 358 aa, Arabidopsis thaliana
  peptide (1)..(358): Ceres Seq. ID no. 13651647
  misc_feature: Pfam Name: Pkinase Pfam Description: Protein kinase domain
  misc_feature (8)..(358): Homolog of NCBI NO: 30681932 NR Description: protein kinase family [Arabidopsis thaliana] putative protein kinase [Arabidopsis thaliana]
  misc_feature (8)..(358): Homolog of NCBI NO: 15234344 NR Description: protein kinase family [Arabidopsis thaliana]
  misc_feature (1)..(350): Homolog of NCBI NO: 4530126 NR Description: receptor-like protein kinase homolog RK20-1
  misc_feature (19)..(357): Homolog of NCBI NO: 4008012 NR Description: receptor-like protein kinase [Arabidopsis
  misc_feature (19)..(357): Homolog of NCBI NO: 15236444 NR Description: protein kinase - like protein [Arabidopsis
  misc_feature (33)..(357): Homolog of NCBI NO: 22655168 NR Description: protein kinase-like protein [Arabidopsis thaliana]
  misc_feature (30)..(325): Homolog of NCBI NO: 15233525 NR Description: receptor-related protein kinase [Arabidopsis
  misc_feature (19)..(324): Homolog of NCBI NO: 19699091 NR Description: AT4g23250/F21P8_140 [Arabidopsis thaliana]
  misc_feature (19)..(324): Homolog of NCBI NO: 22328880 NR Description: expressed protein [Arabidopsis thaliana]
  misc_feature (1)..(324): Homolog of NCBI NO: 30686059 NR Description: protein kinase - like protein [Arabidopsis >gi|23296342|gb|AAN13047.1| putative protein kinase [Arabidopsis
VFVFIFAMAVTSLLDTVFRRRKKKSTEFISFFEFDLDTIKAATNDFSELVGRGGFGFVYKGRLQNGQEIAVKILSTSSIRTERQFHNELIILSKLKHKNLINLLGFCTKRDQHGLVYEFMPNSSLDCFILDPHRAAQLNWEMCRNIIDGIARGLRYLHEESGLWVVHRDIKPGNILLDSDLKPKIVGFELARTMQQGENAAETTEIVGTVGYLDPEYIRSGRVSVKSDVYAFGVTILTIISRRKAWSVDGDSLIKYVRRCWNRGEAIDVIHEVMREEEREYSISEILRYIHIALLCVDENAERRPNIDKVLHWFSCFSTPLPDPTFGNRFLVEEETNWPWSPSLSPGHSSVTSPISSR

SEQ ID NO: 107792 - protein, 351 aa, Arabidopsis thaliana
  peptide (1)..(351): Ceres Seq. ID no. 13651648
  misc_feature: Pfam Name: Pkinase Pfam Description: Protein kinase domain
  misc_feature (1)..(351): Homolog of NCBI NO: 30681932 NR Description: protein kinase family [Arabidopsis thaliana] putative protein kinase [Arabidopsis thaliana]
  misc_feature (1)..(351): Homolog of NCBI NO: 15234344 NR Description: protein kinase family [Arabidopsis thaliana]
  misc_feature (1)..(343): Homolog of NCBI NO: 4530126 NR Description: receptor-like protein kinase homolog RK20-1
  misc_feature (12)..(350): Homolog of NCBI NO: 4008012 NR Description: receptor-like protein kinase [Arabidopsis
  misc_feature (12)..(350): Homolog of NCBI NO: 15236444 NR Description: protein kinase - like protein [Arabidopsis
  misc_feature (26)..(350): Homolog of NCBI NO: 22655168 NR Description: protein kinase-like protein [Arabidopsis thaliana]
  misc_feature (23)..(318): Homolog of NCBI NO: 15233525 NR Description: receptor-related protein kinase [Arabidopsis
  misc_feature (12)..(317): Homolog of NCBI NO: 19699091 NR Description: AT4g23250/F21P8_140 [Arabidopsis thaliana]
  misc_feature (12)..(317): Homolog of NCBI NO: 22328880 NR Description: expressed protein [Arabidopsis thaliana]
  misc_feature (1)..(317): Homolog of NCBI NO: 30686059 NR Description: protein kinase - like protein [Arabidopsis >gi|23296342|gb|AAN13047.1| putative protein kinase [Arabidopsis
MAVTSLLDTVFRRRKKKSTEFISFFEFDLDTIKAATNDFSELVGRGGFGFVYKGRLQNGQEIAVKILSTSSIRTERQFHNELIILSKLKHKNLINLLGFCTKRDQHGLVYEFMPNSSLDCFILDPHRAAQLNWEMCRNIIDGIARGLRYLHEESGLWVVHRDIKPGNILLDSDLKPKIVGFELARTMQQGENAAETTEIVGTVGYLDPEYIRSGRVSVKSDVYAFGVTILTIISRRKAWSVDGDSLIKYVRRCWNRGEAIDVIHEVMREEEREYSISEILRYIHIALLCVDENAERRPNIDKVLHWFSCFSTPLPDPTFGNRFLVEEETNWPWSPSLSPGHSSVTSPISSR

SEQ ID NO: 107793 - protein, 239 aa, Arabidopsis thaliana; identical to SEQ ID NO: 69755
  peptide (1)..(239): Ceres Seq. ID no. 13651649
  misc_feature: Pfam Name: Pkinase Pfam Description: Protein kinase domain
  misc_feature (1)..(239): Homolog of NCBI NO: 30681932 NR Description: protein kinase family [Arabidopsis thaliana] putative protein kinase [Arabidopsis thaliana]
  misc_feature (1)..(239): Homolog of NCBI NO: 15234344 NR Description: protein kinase family [Arabidopsis thaliana]
  misc_feature (1)..(231): Homolog of NCBI NO: 4530126 NR Description: receptor-like protein kinase homolog RK20-1
  misc_feature (1)..(238): Homolog of NCBI NO: 4008012 NR Description: receptor-like protein kinase [Arabidopsis
  misc_feature (1)..(238): Homolog of NCBI NO: 15236444 NR Description: protein kinase - like protein [Arabidopsis
  misc_feature (1)..(238): Homolog of NCBI NO: 22655168 NR Description: protein kinase-like protein [Arabidopsis thaliana]
  misc_feature (1)..(206): Homolog of NCBI NO: 15233525 NR Description: receptor-related protein kinase [Arabidopsis
  misc_feature (1)..(205): Homolog of NCBI NO: 19699091 NR Description: AT4g23250/F21P8_140 [Arabidopsis thaliana]
  misc_feature (1)..(205): Homolog of NCBI NO: 22328880 NR Description: expressed protein [Arabidopsis thaliana]
  misc_feature (1)..(205): Homolog of NCBI NO: 30686059 NR Description: protein kinase - like protein [Arabidopsis >gi|23296342|gb|AAN13047.1| putative protein kinase [Arabidopsis

SEQ ID NO: 107794 - DNA, 498 bp, Arabidopsis thaliana
  misc_feature (1)..(498): Ceres Seq. ID no. 13651662
  misc_feature: MA Experiment ID: 20000069 Result: Up-regulated in Transcription
  misc_feature: MA Experiment 20000069 PARAMETER Experiment Name: At_100uM_ABA_Mutants_cDNA_P Parameter: Plant Line Value: CS23
  misc_feature: MA Experiment 20000069 PARAMETER Experiment Name: At_100uM_ABA_Mutants_cDNA_P Parameter: Timepoint (hr) Value: 6
  misc_feature: MA Experiment 20000069 PARAMETER Experiment Name: At_100uM_ABA_Mutants_cDNA_P Parameter: Tissue Value: Aerial
  misc_feature: MA Experiment 20000069 PARAMETER Experiment Name: At_100uM_ABA_Mutants_cDNA_P Parameter: Treatment Value: 100uM ABA vs. No Treatment
  misc_feature: MA Experiment ID: 20000071 Result: Up-regulated in Transcription
  misc_feature: MA Experiment 20000071 PARAMETER Experiment Name: At_100uM_ABA_Mutants_cDNA_P Parameter: Plant Line Value: CS8104
  misc_feature: MA Experiment 20000071 PARAMETER Experiment Name: At_100uM_ABA_Mutants_cDNA_P Parameter: Timepoint (hr) Value: 6
  misc_feature: MA Experiment 20000071 PARAMETER Experiment Name: At_100uM_ABA_Mutants_cDNA_P Parameter: Tissue Value: Aerial
  misc_feature: MA Experiment 20000071 PARAMETER Experiment Name: At_100uM_ABA_Mutants_cDNA_P Parameter: Treatment Value: 100uM ABA vs. No Treatment
  misc_feature: MA Experiment ID: 20000117 Result: Up-regulated in Transcription
  misc_feature: MA Experiment 20000117 PARAMETER Experiment Name: At_100uM_ABA_Mutants_cDNA_P Parameter: Plant Line Value: Columbia
  misc_feature: MA Experiment 20000117 PARAMETER Experiment Name: At_100uM_ABA_Mutants_cDNA_P Parameter: Timepoint (hr) Value: 6
  misc_feature: MA Experiment 20000117 PARAMETER Experiment Name: At_100uM_ABA_Mutants_cDNA_P Parameter: Tissue Value: Aerial
  misc_feature: MA Experiment 20000117 PARAMETER Experiment Name: At_100uM_ABA_Mutants_cDNA_P Parameter: Treatment Value: 100uM ABA vs. No Treatment
  misc_feature: MA Experiment ID: 20000235 Result: Down-regulated in Transcription
  misc_feature: MA Experiment 20000235 PARAMETER Experiment Name: At_Siliques_P Parameter: Age (day) Value: 21
  misc_feature: MA Experiment 20000235 PARAMETER Experiment Name: At_Siliques_P Parameter: Organism Value: A. thaliana
  misc_feature: MA Experiment 20000235 PARAMETER Experiment Name: At_Siliques_P Parameter: Plant Line Value: WS
  misc_feature: MA Experiment 20000235 PARAMETER Experiment Name: At_Siliques_P Parameter: Tissue Value: 5-10mm Siliques vs. Whole Plant
  misc_feature: MA Experiment ID: 20000438 Result: Down-regulated in Transcription
  misc_feature: MA Experiment 20000438 PARAMETER Experiment Name: At_Shoots__P Parameter: Age (day) Value: 14
  misc_feature: MA Experiment 20000438 PARAMETER Experiment Name: At_Shoots__P Parameter: Tissue Value: Shoots vs. Whole Plant
  misc_feature: MA Experiment ID: 20001557 Result: Down-regulated in Transcription
  misc_feature: MA Experiment 20001557 PARAMETER Experiment Name: At_Drought_Soil_Dry_P Parameter: Age (day) Value: 27
  misc_feature: MA Experiment 20001557 PARAMETER Experiment Name: At_Drought_Soil_Dry_P Parameter: Organism Value: A. thaliana
  misc_feature: MA Experiment 20001557 PARAMETER Experiment Name: At_Drought_Soil_Dry_P Parameter: Plant Line Value: WS
  misc_feature: MA Experiment 20001557 PARAMETER Experiment Name: At_Drought_Soil_Dry_P Parameter: Post Timepoint (hr) Value: 3
  misc_feature: MA Experiment 20001557 PARAMETER Experiment Name: At_Drought_Soil_Dry_P Parameter: Post-Treatment Value: Re-Water vs. No Drought
  misc_feature: MA Experiment 20001557 PARAMETER Experiment Name: At_Drought_Soil_Dry_P Parameter: Timepoint (day) Value: 13
  misc_feature: MA Experiment 20001557 PARAMETER Experiment Name: At_Drought_Soil_Dry_P Parameter: Treatment Value: Drought vs. No Drought
  misc_feature: MA Experiment ID: 20001905 Result: Down-regulated in Transcription
  misc_feature: MA Experiment 20001905 PARAMETER Experiment Name: At_Drought_Reproduction_P Parameter: Age (day) Value: 40
  misc_feature: MA Experiment 20001905 PARAMETER Experiment Name: At_Drought_Reproduction_P Parameter: Organism Value: A. thaliana
  misc_feature: MA Experiment 20001905 PARAMETER Experiment Name: At_Drought_Reproduction_P Parameter: Plant Line Value: WS
  misc_feature: MA Experiment 20001905 PARAMETER Experiment Name: At_Drought_Reproduction_P Parameter: Timepoint (day) Value: 10
  misc_feature: MA Experiment 20001905 PARAMETER Experiment Name: At_Drought_Reproduction_P Parameter: Tissue Value: Rosettes
  misc_feature: MA Experiment 20001905 PARAMETER Experiment Name: At_Drought_Reproduction_P Parameter: Treatment Value: Drought vs. No Drought
gctgatttcttctctgcttctgtaatttctccaattcattgatcagatcagccatggaagacgagattgaattgaaaactgctcctgctgatttccggtttcctacaacaaatcaaactaggcactgcttcactcggtacatcgagtttcacaggtgtacaactgcaaagggagaggagtctaatgactgtgaaaggtttgccaagtattaccgtgccctctgtcctggagaatgggttgacaagtggaacgagcagagggagagtggaacttttccaggtcctctttgaaccaagccttcaatcttgatgaagaggcaatcaagtccgtaataatacatggtttcaaagttaatttcttgcttgcgtgtgtatgttttggccttattatttcctctctagtgtaagtgttttattgggatgtctaagaaaggccaatcaaattataatatgaaaacattcgcttattttgtttggaacttataataccagaatgcat

SEQ ID NO: 107795 - protein, 78 aa, Arabidopsis thaliana; identical to SEQ ID NO: 35309
  peptide (1)..(78): Ceres Seq. ID no. 13651663
  misc_feature (3)..(77): Pfam Name: Cytochrome oxidase c subunit VIb Pfam Description: Cytochrome oxidase c subunit VIb
  misc_feature (1)..(78): Homolog of NCBI NO: 18424030 NR Description: expressed protein [Arabidopsis thaliana] AT4g28060/T13J8_170 [Arabidopsis thaliana]
  misc_feature (1)..(78): Homolog of NCBI NO: 21592329 NR Description: cytochrome c oxidase subunit 6b [Arabidopsis
  misc_feature (1)..(78): Homolog of NCBI NO: 15234375 NR Description: hypothetical protein [Arabidopsis thaliana]
  misc_feature (4)..(78): Homolog of NCBI NO: 9967162 NR Description: cytochrome c oxidase subunit 6b [Oryza sativa
  misc_feature (4)..(78): Homolog of NCBI NO: 4586449 NR Description: cytochrome c oxidase subunit 6b-1 [Oryza sativa
  misc_feature (3)..(78): Homolog of NCBI NO: 15219886 NR Description: cytochrome c oxidase subunit -related
  misc_feature (3)..(78): Homolog of NCBI NO: 21554378 NR Description: cytochrome c oxidase subunit, putative
  misc_feature (4)..(78): Homolog of NCBI NO: 34906824 NR Description: putative cytochrome c oxidase subunit 6b-1 [Oryza
  misc_feature (4)..(78): Homolog of NCBI NO: 22204116 NR Description: putative cytochrome c oxidase subunit [Triticum
  misc_feature (2)..(77): Homolog of NCBI NO: 32401320 NR Description: cytochrome c oxidase subunit 6b-1 [Griffithsia

SEQ ID NO: 107796 - protein, 41 aa, Arabidopsis thaliana; identical to SEQ ID NO: 35310
  peptide (1)..(41): Ceres Seq. ID no. 13651664

SEQ ID NO: 107797 - DNA, 743 bp, Arabidopsis thaliana
  misc_feature (1)..(743): Ceres Seq. ID no. 13651677
  misc_feature: MA Experiment ID: 108434 Result: Up-regulated in Transcription
  misc_feature: MA Experiment 108434 PARAMETER Experiment Name: At_Root_Tips_cDNA_P Parameter: Tissue Value: Root Tips
gatgctttgacattcctctctttcttctgctctcggaattggtgttgcagaagaaaagttaacaggactggtgaagtatcaaaatttggggttttgctacgatgacgctaggtgctcggcttgttgctcccatgattatacttctcctttttataccgattgaattagttaaagcggaagtcattacactgacaccagaaaccttttctgacaagataaaggagaaggatactgcgtggttcgtaaagttttgtgttccttggtgtaaacactgcaagaaactggggaatttgtgggaagacttgggaaaagcaatggagggagacgatgaaattgaggttggtgaagtagactgtggtactagcagagctgtttgcaccaaagttgaaattcactcgtatccaacatttatgctattttacaatggagaagaagtttcgaaatataaaggaaaaagagacgttgaatcgctcaaggcttttgttgtagaggaaactgaaaaggcagcagaaaaagcacagcttgaagacaaggaactgtgatacaactagtcggtgattattagaacctgatacattgttccctttggttttcattttgcctatgcagttgtgtgactcttaccgttagttagataggcatggttttcagcacgatggaggagcatctttgggtttaaaggtttttcacaccactgttttgctaaaatattcagtttccattttattcagagtcagataagc

SEQ ID NO: 107798 - protein, 146 aa, Arabidopsis thaliana; identical to SEQ ID NO: 29677
  peptide (1)..(146): Ceres Seq. ID no. 13651678
  misc_feature (26)..(133): Pfam Name: Thioredoxin Pfam Description: Thioredoxin
  misc_feature (1)..(146): Homolog of NCBI NO: 15223058 NR Description: protein disulfide isomerase - related thaliana] >gi|26450503|dbj|BAC42365.1| unknown protein thaliana] >gi|28827366|gb|AAO50527.1| unknown protein
  misc_feature (1)..(130): Homolog of NCBI NO: 1532175 NR Description: similar to protein disulfide isomerase
  misc_feature (30)..(146): Homolog of NCBI NO: 8778824 NR Description: T6D22.5 [Arabidopsis thaliana]
  misc_feature (23)..(145): Homolog of NCBI NO: 38649034 NR Description: Unknown (protein for MGC:75894) [Silurana
  misc_feature (24)..(133): Homolog of NCBI NO: 19353593 NR Description: similar to thioredoxin related protein [Mus
  misc_feature (24)..(133): Homolog of NCBI NO: 21703732 NR Description: similar to thioredoxin related protein [Mus >gi|16740761|gb|AAH16252.1| similar to thioredoxin related
  misc_feature (24)..(133): Homolog of NCBI NO: 37574006 NR Description: Txndc5 protein [Mus musculus]
  misc_feature (1)..(133): Homolog of NCBI NO: 13540604 NR Description: thioredoxin domain containing 5; thioredoxin protein [Homo sapiens] >gi|12654715|gb|AAH01199.1| Thioredoxin
  misc_feature (1)..(133): Homolog of NCBI NO: 20067392 NR Description: thioredoxin related protein [Homo sapiens]
  misc_feature (1)..(133): Homolog of NCBI NO: 21740140 NR Description: hypothetical protein [Homo sapiens]

SEQ ID NO: 107799 - protein, 136 aa, Arabidopsis thaliana; identical to SEQ ID NO: 29678
  peptide (1)..(136): Ceres Seq. ID no. 13651679
  misc_feature (16)..(123): Pfam Name: Thioredoxin Pfam Description: Thioredoxin
  misc_feature (1)..(136): Homolog of NCBI NO: 15223058 NR Description: protein disulfide isomerase - related thaliana] >gi|26450503|dbj|BAC42365.1| unknown protein thaliana] >gi|28827366|gb|AAO50527.1| unknown protein
  misc_feature (1)..(120): Homolog of NCBI NO: 1532175 NR Description: similar to protein disulfide isomerase
  misc_feature (20)..(136): Homolog of NCBI NO: 8778824 NR Description: T6D22.5 [Arabidopsis thaliana]
  misc_feature (13)..(135): Homolog of NCBI NO: 38649034 NR Description: Unknown (protein for MGC:75894) [Silurana
  misc_feature (14)..(123): Homolog of NCBI NO: 19353593 NR Description: similar to thioredoxin related protein [Mus
  misc_feature (14)..(123): Homolog of NCBI NO: 21703732 NR Description: similar to thioredoxin related protein [Mus >gi|16740761|gb|AAH16252.1| similar to thioredoxin related
  misc_feature (14)..(123): Homolog of NCBI NO: 37574006 NR Description: Txndc5 protein [Mus musculus]
  misc_feature (1)..(123): Homolog of NCBI NO: 13540604 NR Description: thioredoxin domain containing 5; thioredoxin protein [Homo sapiens] >gi|12654715|gb|AAH01199.1| Thioredoxin
  misc_feature (1)..(123): Homolog of NCBI NO: 20067392 NR Description: thioredoxin related protein [Homo sapiens]
  misc_feature (1)..(123): Homolog of NCBI NO: 21740140 NR Description: hypothetical protein [Homo sapiens]

SEQ ID NO: 107800 - protein, 75 aa, Arabidopsis thaliana; identical to SEQ ID NO: 29679
  peptide (1)..(75): Ceres Seq. ID no. 13651680
  misc_feature (1)..(62): Pfam Name: Thioredoxin Pfam Description: Thioredoxin
  misc_feature (1)..(75): Homolog of NCBI NO: 15223058 NR Description: protein disulfide isomerase - related thaliana] >gi|26450503|dbj|BAC42365.1| unknown protein thaliana] >gi|28827366|gb|AAO50527.1| unknown protein
  misc_feature (1)..(59): Homolog of NCBI NO: 1532175 NR Description: similar to protein disulfide isomerase
  misc_feature (1)..(75): Homolog of NCBI NO: 8778824 NR Description: T6D22.5 [Arabidopsis thaliana]
  misc_feature (1)..(74): Homolog of NCBI NO: 38649034 NR Description: Unknown (protein for MGC:75894) [Silurana
  misc_feature (1)..(62): Homolog of NCBI NO: 19353593 NR Description: similar to thioredoxin related protein [Mus
  misc_feature (1)..(62): Homolog of NCBI NO: 21703732 NR Description: similar to thioredoxin related protein [Mus >gi|16740761|gb|AAH16252.1| similar to thioredoxin related
  misc_feature (1)..(62): Homolog of NCBI NO: 37574006 NR Description: Txndc5 protein [Mus musculus]
  misc_feature (1)..(62): Homolog of NCBI NO: 13540604 NR Description: thioredoxin domain containing 5; thioredoxin protein [Homo sapiens] >gi|12654715|gb|AAH01199.1| Thioredoxin
  misc_feature (1)..(62): Homolog of NCBI NO: 20067392 NR Description: thioredoxin related protein [Homo sapiens]
  misc_feature (1)..(62): Homolog of NCBI NO: 21740140 NR Description: hypothetical protein [Homo sapiens]

SEQ ID NO: 107801 - DNA, 1113 bp, Arabidopsis thaliana
  misc_feature (1)..(1113): Ceres Seq. ID no. 13651692
  misc_feature: MA Experiment ID: 20000185 Result: Down-regulated in Transcription
  misc_feature: MA Experiment 20000185 PARAMETER Experiment Name: At_Roots__P Parameter: Age (day) Value: 7 vs. 21
  misc_feature: MA Experiment 20000185 PARAMETER Experiment Name: At_Roots__P Parameter: Organism Value: A. thaliana
  misc_feature: MA Experiment 20000185 PARAMETER Experiment Name: At_Roots__P Parameter: Tissue Value: Roots vs. Whole Plant
  misc_feature: MA Experiment ID: 20000439 Result: Down-regulated in Transcription
  misc_feature: MA Experiment 20000439 PARAMETER Experiment Name: At_Roots__P Parameter: Age (day) Value: 14 vs. 21
  misc_feature: MA Experiment 20000439 PARAMETER Experiment Name: At_Roots__P Parameter: Organism Value: A. thaliana
  misc_feature: MA Experiment 20000439 PARAMETER Experiment Name: At_Roots__P Parameter: Tissue Value: Roots vs. Whole Plant
  misc_feature: MA Experiment ID: 20001557 Result: Down-regulated in Transcription
  misc_feature: MA Experiment 20001557 PARAMETER Experiment Name: At_Drought_Soil_Dry_P Parameter: Age (day) Value: 27
  misc_feature: MA Experiment 20001557 PARAMETER Experiment Name: At_Drought_Soil_Dry_P Parameter: Organism Value: A. thaliana
  misc_feature: MA Experiment 20001557 PARAMETER Experiment Name: At_Drought_Soil_Dry_P Parameter: Plant Line Value: WS
  misc_feature: MA Experiment 20001557 PARAMETER Experiment Name: At_Drought_Soil_Dry_P Parameter: Post Timepoint (hr) Value: 3
  misc_feature: MA Experiment 20001557 PARAMETER Experiment Name: At_Drought_Soil_Dry_P Parameter: Post-Treatment Value: Re-Water vs. No Drought
  misc_feature: MA Experiment 20001557 PARAMETER Experiment Name: At_Drought_Soil_Dry_P Parameter: Timepoint (day) Value: 13
  misc_feature: MA Experiment 20001557 PARAMETER Experiment Name: At_Drought_Soil_Dry_P Parameter: Treatment Value: Drought vs. No Drought
gtcccaccgttaaagatgacgacgacgactgcttctctggttaagacttttctgtttcggtgcgactcgttttcatctttcaaattcaaatgcaaattcgaatctcccgcgaaaacgcgattgctctctccggcgaccgagaaacatgttgtcagatcgtcaagagcctggcgtattcgttgcttatccgatgatcctggttcgagtcatgttttcgttgcaagtagaaggaaaatggtagtcttgttgtcgacggtgcagcttctgtctcatatgcttccgcaaaacgggaacgcagctgagatttatccggtgatgcaaaacgaaataaggaaagtggtgacaaagggcaaggctgctggtgtgcttcgtttagtgtttcatgatgctggaacctttgaactggacgatcattctggtggcatcaacggatctattgcttatgaacttgagagacctgagaacataggtttgaagaaatccttaaaggttctagcgaaagcaaaggttaaggttgacgagatacaaccagtgtcttgggcggatatgatctctgtcgctgggtctgaagcagtttcaatatgtggcggcccaacaattccagtagttttgggaagacttgattcagcgcaacctgatccagaaggcaagctacctccagaaaccctgagtgcctcgggattgaaagaatgcttcaaaagaaaaggattttcgacccaggagcttgttgccttatctggggcacatacgattgggagtaaaggctttggagatccgacagtttttgacaatgcatactacaaaatccttcttgaaaaaccatggacgtcaacttctaagatgacgagcatggtcgggcttccttcggatcatgctttagtgcaggatgatgagtgcttaaggtgggtgaaacggtatgcagaagaccaagacaagttcttcgaagacttcacaaatgcttatatcaaactagtaaattctggggccaaatggaatatgttatgatatctaatctagttttatattttgttagctcataagtgtttcaaacatgcccgaataatttgggtagtaatgcttatttgctaataagtaaaaatttcgctgcttact

SEQ ID NO: 107802 - protein, 334 aa, Arabidopsis thaliana
  peptide (1)..(334): Ceres Seq. ID no. 13651693
  misc_feature (110)..(309): Pfam Name: Peroxidase Pfam Description: Peroxidase
  misc_feature (6)..(334): Homolog of NCBI NO: 30689347 NR Description: ascorbate peroxidase family [Arabidopsis thaliana]
  misc_feature (178)..(276): Homolog of NCBI NO: 7487935 NR Description: L-ascorbate peroxidase homolog F10M6.50 -
  misc_feature (106)..(139): Homolog of NCBI NO: 7487935 NR Description: L-ascorbate peroxidase homolog F10M6.50 -
  misc_feature (302)..(334): Homolog of NCBI NO: 7487935 NR Description: L-ascorbate peroxidase homolog F10M6.50 -
  misc_feature (84)..(331): Homolog of NCBI NO: 27817866 NR Description: OJ1081_B12.15 [Oryza sativa (japonica
  misc_feature (40)..(259): Homolog of NCBI NO: 24496465 NR Description: stromal ascorbate peroxidase [Retama raetam]
  misc_feature (262)..(332): Homolog of NCBI NO: 24496465 NR Description: stromal ascorbate peroxidase [Retama raetam]
  misc_feature (107)..(328): Homolog of NCBI NO: 6682242 NR Description: putative ascorbate peroxidase [Arabidopsis
  misc_feature (107)..(328): Homolog of NCBI NO: 30680940 NR Description: ascorbate peroxidase (APX) [Arabidopsis thaliana]
  misc_feature (113)..(328): Homolog of NCBI NO: 15080682 NR Description: peroxisome type ascorbate peroxidase [Hordeum
VPPLKMTTTTASLVKTFLFRCDSFSSFKFKCKFESPAKTRLLSPATEKHVVRSSRAWRIRCLSDDPGSSHVFVASRRKMVVLLSTVQLLSHMLPQNGNAAEIYPVMQNEIRKVVTKGKAAGVLRLVFHDAGTFELDDHSGGINGSIAYELERPENIGLKKSLKVLAKAKVKVDEIQPVSWADMISVAGSEAVSICGGPTIPVVLGRLDSAQPDPEGKLPPETLSASGLKECFKRKGFSTQELVALSGAHTIGSKGFGDPTVFDNAYYKILLEKPWTSTSKMTSMVGLPSDHALVQDDECLRWVKRYAEDQDKFFEDFTNAYIKLVNSGAKWNML

SEQ ID NO: 107803 - protein, 329 aa, Arabidopsis thaliana
  peptide (1)..(329): Ceres Seq. ID no. 13651694
  misc_feature (105)..(304): Pfam Name: Peroxidase Pfam Description: Peroxidase
  misc_feature (1)..(329): Homolog of NCBI NO: 30689347 NR Description: ascorbate peroxidase family [Arabidopsis thaliana]
  misc_feature (173)..(271): Homolog of NCBI NO: 7487935 NR Description: L-ascorbate peroxidase homolog F10M6.50 -
  misc_feature (101)..(134): Homolog of NCBI NO: 7487935 NR Description: L-ascorbate peroxidase homolog F10M6.50 -
  misc_feature (297)..(329): Homolog of NCBI NO: 7487935 NR Description: L-ascorbate peroxidase homolog F10M6.50 -
  misc_feature (79)..(326): Homolog of NCBI NO: 27817866 NR Description: OJ1081_B12.15 [Oryza sativa (japonica
  misc_feature (35)..(254): Homolog of NCBI NO: 24496465 NR Description: stromal ascorbate peroxidase [Retama raetam]
  misc_feature (257)..(327): Homolog of NCBI NO: 24496465 NR Description: stromal ascorbate peroxidase [Retama raetam]
  misc_feature (102)..(323): Homolog of NCBI NO: 6682242 NR Description: putative ascorbate peroxidase [Arabidopsis
  misc_feature (102)..(323): Homolog of NCBI NO: 30680940 NR Description: ascorbate peroxidase (APX) [Arabidopsis thaliana]
  misc_feature (108)..(323): Homolog of NCBI NO: 15080682 NR Description: peroxisome type ascorbate peroxidase [Hordeum
MTTTTASLVKTFLFRCDSFSSFKFKCKFESPAKTRLLSPATEKHVVRSSRAWRIRCLSDDPGSSHVFVASRRKMVVLLSTVQLLSHMLPQNGNAAEIYPVMQNEIRKVVTKGKAAGVLRLVFHDAGTFELDDHSGGINGSIAYELERPENIGLKKSLKVLAKAKVKVDEIQPVSWADMISVAGSEAVSICGGPTIPVVLGRLDSAQPDPEGKLPPETLSASGLKECFKRKGFSTQELVALSGAHTIGSKGFGDPTVFDNAYYKILLEKPWTSTSKMTSMVGLPSDHALVQDDECLRWVKRYAEDQDKFFEDFTNAYIKLVNSGAKWNML

SEQ ID NO: 107804 - protein, 256 aa, Arabidopsis thaliana
  peptide (1)..(256): Ceres Seq. ID no. 13651695
  misc_feature (32)..(231): Pfam Name: Peroxidase Pfam Description: Peroxidase
  misc_feature (1)..(256): Homolog of NCBI NO: 30689347 NR Description: ascorbate peroxidase family [Arabidopsis thaliana]
  misc_feature (100)..(198): Homolog of NCBI NO: 7487935 NR Description: L-ascorbate peroxidase homolog F10M6.50 -
  misc_feature (28)..(61): Homolog of NCBI NO: 7487935 NR Description: L-ascorbate peroxidase homolog F10M6.50 -
  misc_feature (224)..(256): Homolog of NCBI NO: 7487935 NR Description: L-ascorbate peroxidase homolog F10M6.50 -
  misc_feature (6)..(253): Homolog of NCBI NO: 27817866 NR Description: OJ1081_B12.15 [Oryza sativa (japonica
  misc_feature (1)..(181): Homolog of NCBI NO: 24496465 NR Description: stromal ascorbate peroxidase [Retama raetam]
  misc_feature (184)..(254): Homolog of NCBI NO: 24496465 NR Description: stromal ascorbate peroxidase [Retama raetam]
  misc_feature (29)..(250): Homolog of NCBI NO: 6682242 NR Description: putative ascorbate peroxidase [Arabidopsis
  misc_feature (29)..(250): Homolog of NCBI NO: 30680940 NR Description: ascorbate peroxidase (APX) [Arabidopsis thaliana]
  misc_feature (35)..(250): Homolog of NCBI NO: 15080682 NR Description: peroxisome type ascorbate peroxidase [Hordeum
MVVLLSTVQLLSHMLPQNGNAAEIYPVMQNEIRKVVTKGKAAGVLRLVFHDAGTFELDDHSGGINGSIAYELERPENIGLKKSLKVLAKAKVKVDEIQPVSWADMISVAGSEAVSICGGPTIPVVLGRLDSAQPDPEGKLPPETLSASGLKECFKRKGFSTQELVALSGAHTIGSKGFGDPTVFDNAYYKILLEKPWTSTSKMTSMVGLPSDHALVQDDECLRWVKRYAEDQDKFFEDFTNAYIKLVNSGAKWNML

SEQ ID NO: 107805 - DNA, 1034 bp, Arabidopsis thaliana
  misc_feature (1)..(1034): Ceres Seq. ID no. 13651696
  misc_feature: MA Experiment ID: 20000173 Result: Down-regulated in Transcription
  misc_feature: MA Experiment 20000173 PARAMETER Experiment Name: At_42deg_Heat_P Parameter: Age (day) Value: 14
  misc_feature: MA Experiment 20000173 PARAMETER Experiment Name: At_42deg_Heat_P Parameter: Organism Value: A. thaliana
  misc_feature: MA Experiment 20000173 PARAMETER Experiment Name: At_42deg_Heat_P Parameter: Plant Line Value: WS
  misc_feature: MA Experiment 20000173 PARAMETER Experiment Name: At_42deg_Heat_P Parameter: Temperature (deg C) Value: 42 vs. 22
  misc_feature: MA Experiment 20000173 PARAMETER Experiment Name: At_42deg_Heat_P Parameter: Timepoint (hr) Value: 6
  misc_feature: MA Experiment 20000173 PARAMETER Experiment Name: At_42deg_Heat_P Parameter: Tissue Value: Aerial
  misc_feature: MA Experiment ID: 20000227 Result: Up-regulated in Transcription
  misc_feature: MA Experiment 20000227 PARAMETER Experiment Name: At_Root-Tips-vs-Tops_P Parameter: Tissue Value: Root Tips vs. Root Tops
  misc_feature: MA Experiment ID: 20001247 Result: Down-regulated in Transcription
  misc_feature: MA Experiment 20001247 PARAMETER Experiment Name: At_Far-red-induction_P Parameter: Age (day) Value: 7
  misc_feature: MA Experiment 20001247 PARAMETER Experiment Name: At_Far-red-induction_P Parameter: Light Value: Far-red vs. White
  misc_feature: MA Experiment 20001247 PARAMETER Experiment Name: At_Far-red-induction_P Parameter: Organism Value: A. thaliana
  misc_feature: MA Experiment 20001247 PARAMETER Experiment Name: At_Far-red-induction_P Parameter: Plant Line Value: Columbia
  misc_feature: MA Experiment 20001247 PARAMETER Experiment Name: At_Far-red-induction_P Parameter: Timepoint (hr) Value: 1
  misc_feature: MA Experiment 20001247 PARAMETER Experiment Name: At_Far-red-induction_P Parameter: Tissue Value: Whole Plant
  misc_feature: MA Experiment ID: 20001556 Result: Up-regulated in Transcription
  misc_feature: MA Experiment 20001556 PARAMETER Experiment Name: At_Drought_Soil_Dry_P Parameter: Age (day) Value: 26
  misc_feature: MA Experiment 20001556 PARAMETER Experiment Name: At_Drought_Soil_Dry_P Parameter: Organism Value: A. thaliana
  misc_feature: MA Experiment 20001556 PARAMETER Experiment Name: At_Drought_Soil_Dry_P Parameter: Plant Line Value: WS
  misc_feature: MA Experiment 20001556 PARAMETER Experiment Name: At_Drought_Soil_Dry_P Parameter: Post Timepoint (hr) Value: None
  misc_feature: MA Experiment 20001556 PARAMETER Experiment Name: At_Drought_Soil_Dry_P Parameter: Post-Treatment Value: None
  misc_feature: MA Experiment 20001556 PARAMETER Experiment Name: At_Drought_Soil_Dry_P Parameter: Timepoint (day) Value: 12
  misc_feature: MA Experiment 20001556 PARAMETER Experiment Name: At_Drought_Soil_Dry_P Parameter: Treatment Value: Drought vs. No Drought
  misc_feature: Pfam Name: Mnd1 Pfam Description: Mnd1 family
catcgctgtctggaacagcgatgactcgagaaccggagagagagctgtagcagtgtttgaaatcctttggattgcatcaccaggagcaagagatcacgatgtctaagaaacggggactttcgctggaggagaaacgagagaagatgcttcagatattctatgagtctcaagacttcttcctactaaaggaacttgagaagatggggccgaagaagggtgtaattagtcagtctgtgaaagatgttatccagagtttagtcgatgatgatcttgttgcgaaagacaagattggaatttctatctacttttggagccttcccagctgtgctggcaatcaacttaggagtgttcgccagaaacttgaatctgatcttcagggtagtaacaaaaggttagcagaacttgttgatcagtgtgaggccctaaagaagggaagggaagaatcggaggaacgaacagaggccttgacgcaactcaaagatattgaaaagaaacacaaagatctgaagaacgagatggtacaatttgctgacaacgatccagctactttggaggcaaagaggaatgcaattgaagttgctcaccagtcggctaacagatggacagataacatcttcacactgcgacaatggtgttcaaacaacttcccccaggccaaggaacagctagaacatctatacacggaggcgggaatcactgaggactttgattacatagagttatcatcattccctttgagctcatcccatgaagctgataccgcaaagcagctagtacaagatgaagcttagttctaatactctccagcataacagttaaagaaacaatagcttaagtaaaaaatcttttcactatccttttaagttttctggttttaaaggtagcaacagtctgtaattctctatgtgacccaatcatctaatgtcaaaactcggttacaaattctgtggtcagaaaagatttttattttctttgtatctgtcggctatgtccaagcttggctatgttttgttataatattttattggagttat

SEQ ID NO: 107806 - protein, 230 aa, Arabidopsis thaliana
  peptide (1)..(230): Ceres Seq. ID no. 13651697
  misc_feature: Pfam Name: Mnd1 Pfam Description: Mnd1 family
  misc_feature (1)..(230): Homolog of NCBI NO: 30688234 NR Description: expressed protein [Arabidopsis thaliana] unknown protein [Arabidopsis thaliana]
  misc_feature (16)..(137): Homolog of NCBI NO: 7485748 NR Description: hypothetical protein F19B15.200 - Arabidopsis >gi|4972063|emb|CAB43931.1| hypothetical protein [Arabidopsis >gi|7269815|emb|CAB79675.1| hypothetical protein [Arabidopsis
  misc_feature (1)..(207): Homolog of NCBI NO: 14149769 NR Description: GAJ protein; homolog of yeast MND1 [Homo sapiens] GAJ [Homo sapiens] >gi|21594676|gb|AAH32142.1| GAJ protein [Homo
  misc_feature (1)..(207): Homolog of NCBI NO: 34857888 NR Description: similar to RIKEN cDNA 2610034E18 gene [Rattus
  misc_feature (1)..(207): Homolog of NCBI NO: 20380711 NR Description: GAJ protein [Mus musculus]
  misc_feature (1)..(207): Homolog of NCBI NO: 37591185 NR Description: GAJ protein [Mus musculus]
  misc_feature (11)..(206): Homolog of NCBI NO: 29841076 NR Description: similar to GenBank Accession Number AY028916 GAJ
  misc_feature (5)..(208): Homolog of NCBI NO: 19113903 NR Description: hypothetical coiled-coil protein pombe] >gi|1175412|sp|Q09739|YA53_SCHPO Hypothetical protein
  misc_feature (5)..(207): Homolog of NCBI NO: 29246883 NR Description: GLP_76_12374_11763 [Giardia lamblia ATCC 50803]
  misc_feature (10)..(207): Homolog of NCBI NO: 19074771 NR Description: similarity to HYPOTHETICAL PROTEIN YA53_SCHPO cuniculi] >gi|19069413|emb|CAD25881.1| similarity to HYPOTHETICAL
MSKKRGLSLEEKREKMLQIFYESQDFFLLKELEKMGPKKGVISQSVKDVIQSLVDDDLVAKDKIGISIYFWSLPSCAGNQLRSVRQKLESDLQGSNKRLAELVDQCEALKKGREESEERTEALTQLKDIEKKHKDLKNEMVQFADNDPATLEAKRNAIEVAHQSANRWTDNIFTLRQWCSNNFPQAKEQLEHLYTEAGITEDFDYIELSSFPLSSSHEADTAKQLVQDEA

SEQ ID NO: 107807 - protein, 215 aa, Arabidopsis thaliana; identical to SEQ ID NO: 49080
  peptide (1)..(215): Ceres Seq. ID no. 13651698
  misc_feature: Pfam Name: Mnd1 Pfam Description: Mnd1 family
  misc_feature (1)..(215): Homolog of NCBI NO: 30688234 NR Description: expressed protein [Arabidopsis thaliana] unknown protein [Arabidopsis thaliana]
  misc_feature (1)..(122): Homolog of NCBI NO: 7485748 NR Description: hypothetical protein F19B15.200 - Arabidopsis >gi|4972063|emb|CAB43931.1| hypothetical protein [Arabidopsis >gi|7269815|emb|CAB79675.1| hypothetical protein [Arabidopsis
  misc_feature (1)..(192): Homolog of NCBI NO: 14149769 NR Description: GAJ protein; homolog of yeast MND1 [Homo sapiens] GAJ [Homo sapiens] >gi|21594676|gb|AAH32142.1| GAJ protein [Homo
  misc_feature (1)..(192): Homolog of NCBI NO: 34857888 NR Description: similar to RIKEN cDNA 2610034E18 gene [Rattus
  misc_feature (1)..(192): Homolog of NCBI NO: 20380711 NR Description: GAJ protein [Mus musculus]
  misc_feature (1)..(192): Homolog of NCBI NO: 37591185 NR Description: GAJ protein [Mus musculus]
  misc_feature (1)..(191): Homolog of NCBI NO: 29841076 NR Description: similar to GenBank Accession Number AY028916 GAJ
  misc_feature (1)..(193): Homolog of NCBI NO: 19113903 NR Description: hypothetical coiled-coil protein pombe] >gi|1175412|sp|Q09739|YA53_SCHPO Hypothetical protein
  misc_feature (1)..(192): Homolog of NCBI NO: 29246883 NR Description: GLP_76_12374_11763 [Giardia lamblia ATCC 50803]
  misc_feature (1)..(192): Homolog of NCBI NO: 19074771 NR Description: similarity to HYPOTHETICAL PROTEIN YA53_SCHPO cuniculi] >gi|19069413|emb|CAD25881.1| similarity to HYPOTHETICAL

SEQ ID NO: 107808 - protein, 196 aa, Arabidopsis thaliana; identical to SEQ ID NO: 49081
  peptide (1)..(196): Ceres Seq. ID no. 13651699
  misc_feature: Pfam Name: Mnd1 Pfam Description: Mnd1 family
  misc_feature (1)..(196): Homolog of NCBI NO: 30688234 NR Description: expressed protein [Arabidopsis thaliana] unknown protein [Arabidopsis thaliana]
  misc_feature (1)..(103): Homolog of NCBI NO: 7485748 NR Description: hypothetical protein F19B15.200 - Arabidopsis >gi|4972063|emb|CAB43931.1| hypothetical protein [Arabidopsis >gi|7269815|emb|CAB79675.1| hypothetical protein [Arabidopsis
  misc_feature (1)..(173): Homolog of NCBI NO: 14149769 NR Description: GAJ protein; homolog of yeast MND1 [Homo sapiens] GAJ [Homo sapiens] >gi|21594676|gb|AAH32142.1| GAJ protein [Homo
  misc_feature (1)..(173): Homolog of NCBI NO: 34857888 NR Description: similar to RIKEN cDNA 2610034E18 gene [Rattus
  misc_feature (1)..(173): Homolog of NCBI NO: 20380711 NR Description: GAJ protein [Mus musculus]
  misc_feature (1)..(173): Homolog of NCBI NO: 37591185 NR Description: GAJ protein [Mus musculus]
  misc_feature (1)..(172): Homolog of NCBI NO: 29841076 NR Description: similar to GenBank Accession Number AY028916 GAJ
  misc_feature (1)..(174): Homolog of NCBI NO: 19113903 NR Description: hypothetical coiled-coil protein pombe] >gi|1175412|sp|Q09739|YA53_SCHPO Hypothetical protein
  misc_feature (1)..(173): Homolog of NCBI NO: 29246883 NR Description: GLP_76_12374_11763 [Giardia lamblia ATCC 50803]
  misc_feature (1)..(173): Homolog of NCBI NO: 19074771 NR Description: similarity to HYPOTHETICAL PROTEIN YA53_SCHPO cuniculi] >gi|19069413|emb|CAD25881.1| similarity to HYPOTHETICAL

SEQ ID NO: 107809 - DNA, 950 bp, Arabidopsis thaliana
  misc_feature (1)..(950): Ceres Seq. ID no. 13651741
  misc_feature: MA Experiment ID: 20000264 Result: Down-regulated in Transcription
  misc_feature: MA Experiment 20000264 PARAMETER Experiment Name: At_Open_Flower_P Parameter: Age (day) Value: 21
  misc_feature: MA Experiment 20000264 PARAMETER Experiment Name: At_Open_Flower_P Parameter: Plant Line Value: WS
  misc_feature: MA Experiment 20000264 PARAMETER Experiment Name: At_Open_Flower_P Parameter: Tissue Value: Open Flower vs. Whole Plant
  misc_feature: MA Experiment ID: 20000265 Result: Down-regulated in Transcription
  misc_feature: MA Experiment 20000265 PARAMETER Experiment Name: At_Open_Flower_P Parameter: Age (day) Value: 21
  misc_feature: MA Experiment 20000265 PARAMETER Experiment Name: At_Open_Flower_P Parameter: Plant Line Value: WS
  misc_feature: MA Experiment 20000265 PARAMETER Experiment Name: At_Open_Flower_P Parameter: Tissue Value: Closed Flower vs. Whole Plant
  misc_feature: MA Experiment ID: 20000286 Result: Down-regulated in Transcription
  misc_feature: MA Experiment 20000286 PARAMETER Experiment Name: At_Open_Flower_P Parameter: Age (day) Value: 21
  misc_feature: MA Experiment 20000286 PARAMETER Experiment Name: At_Open_Flower_P Parameter: Plant Line Value: WS
  misc_feature: MA Experiment 20000286 PARAMETER Experiment Name: At_Open_Flower_P Parameter: Tissue Value: Half Open vs. Whole Plant
  misc_feature: MA Experiment ID: 20001904 Result: Up-regulated in Transcription
  misc_feature: MA Experiment 20001904 PARAMETER Experiment Name: At_Drought_Reproduction_P Parameter: Age (day) Value: 37
  misc_feature: MA Experiment 20001904 PARAMETER Experiment Name: At_Drought_Reproduction_P Parameter: Organism Value: A. thaliana
  misc_feature: MA Experiment 20001904 PARAMETER Experiment Name: At_Drought_Reproduction_P Parameter: Plant Line Value: WS
  misc_feature: MA Experiment 20001904 PARAMETER Experiment Name: At_Drought_Reproduction_P Parameter: Timepoint (day) Value: 7
  misc_feature: MA Experiment 20001904 PARAMETER Experiment Name: At_Drought_Reproduction_P Parameter: Tissue Value: Rosettes
  misc_feature: MA Experiment 20001904 PARAMETER Experiment Name: At_Drought_Reproduction_P Parameter: Treatment Value: Drought vs. No Drought
atttcaaagtttggtacagacaaaaaaaaaacattttaaggtaatctcaaaaccaaaaagcctatcaatctttgtacttggatgttttgttgttgcaaggattgcagaggaaaccaacgagtttctaactttgattctctaacaggtgttttctttggagatcttgagtttggacctcagaatcaaagatatataaagatgaatgaggaagaagataaagatcaagatcgagtaacgagaggatgtagtcacactcatagctgtaaccctccaggcccagaggatgcttctcactcccacacatgcttccacgctcacactcatctcatcatctctgatcagcaagagaatgatcattctgacagtagcaacaagaaacggttatgtggtaatagagaggcagtgaggaagtacagggagaagaagaaggctcgcactgcataccttgaagatgaagtgatgagattgcaatctctgaatgagcaattccttagaaaacttcagagccaagaaatggtggaaactgaattgatcagactccgggctcttctggtagagatgcaggggaaaattgaagttgaactttgtagtttctcgtttcagaaacaatgcaacggttctggttttgtgttcaaagaagatggatgcaacttagcaacaagtaatatgatgtgtgaagcggcaagagtggagtgcgaggagggccaaacacttcatgatcctattcaatcttttgttcctcaaccaccaccattctcacgttaagcgtttacgggctgtggtattgtgtgtatatatatacatatgggtttaattaggggcatagaggtcggattccaatatagttaacatatacacagattggtaacttattctacatatgtctattttaagggtaccaaaacatcttgatgtggaattgattttgaaatgaagaggaggatgattgc

SEQ ID NO: 107810 - protein, 227 aa, Arabidopsis thaliana
  peptide (1)..(227): Ceres Seq. ID no. 13651742
  misc_feature (98)..(159): Pfam Name: bZIP transcription factor Pfam Description: bZIP transcription factor
  misc_feature (1)..(227): Homolog of NCBI NO: 30693560 NR Description: bZIP family transcription factor [Arabidopsis >gi|26450338|dbj|BAC42285.1| putative bZip transcription factor
  misc_feature (1)..(227): Homolog of NCBI NO: 30693563 NR Description: bZIP family transcription factor [Arabidopsis
  misc_feature (40)..(186): Homolog of NCBI NO: 11357780 NR Description: hypothetical protein F4F15.70 - Arabidopsis >gi|4678925|emb|CAB41316.1| putative protein [Arabidopsis
  misc_feature (26)..(198): Homolog of NCBI NO: 25370607 NR Description: hypothetical protein At2g16770 [imported] - thaliana >gi|4581120|gb|AAD24610.1| hypothetical protein
  misc_feature (26)..(198): Homolog of NCBI NO: 30679757 NR Description: bZIP protein [Arabidopsis thaliana] putative bzip transcription factor atbzip23 [Arabidopsis
  misc_feature (55)..(213): Homolog of NCBI NO: 21554283 NR Description: putative transcription factor [Arabidopsis
  misc_feature (55)..(213): Homolog of NCBI NO: 7486791 NR Description: hypothetical protein M4E13.100 - Arabidopsis >gi|2924515|emb|CAA17769.1| putative protein [Arabidopsis >gi|7270455|emb|CAB80221.1| putative protein [Arabidopsis
  misc_feature (55)..(213): Homolog of NCBI NO: 18418563 NR Description: bZIP protein [Arabidopsis thaliana] putative protein [Arabidopsis thaliana]
  misc_feature (44)..(208): Homolog of NCBI NO: 18855044 NR Description: putative transcription factor [Oryza sativa]
  misc_feature (89)..(180): Homolog of NCBI NO: 34908964 NR Description: P0003D09.19 [Oryza sativa (japonica
MFCCCKDCRGNQRVSNFDSLTGVFFGDLEFGPQNQRYIKMNEEEDKDQDRVTRGCSHTHSCNPPGPEDASHSHTCFHAHTHLIISDQQENDHSDSSNKKRLCGNREAVRKYREKKKARTAYLEDEVMRLQSLNEQFLRKLQSQEMVETELIRLRALLVEMQGKIEVELCSFSFQKQCNGSGFVFKEDGCNLATSNMMCEAARVECEEGQTLHDPIQSFVPQPPPFSR

SEQ ID NO: 107811 - protein, 188 aa, Arabidopsis thaliana
  peptide (1)..(188): Ceres Seq. ID no. 13651743
  misc_feature (59)..(120): Pfam Name: bZIP transcription factor Pfam Description: bZIP transcription factor
  misc_feature (1)..(188): Homolog of NCBI NO: 30693560 NR Description: bZIP family transcription factor [Arabidopsis >gi|26450338|dbj|BAC42285.1| putative bZip transcription factor
  misc_feature (1)..(188): Homolog of NCBI NO: 30693563 NR Description: bZIP family transcription factor [Arabidopsis
  misc_feature (1)..(147): Homolog of NCBI NO: 11357780 NR Description: hypothetical protein F4F15.70 - Arabidopsis >gi|4678925|emb|CAB41316.1| putative protein [Arabidopsis
  misc_feature (1)..(159): Homolog of NCBI NO: 25370607 NR Description: hypothetical protein At2g16770 [imported] - thaliana >gi|4581120|gb|AAD24610.1| hypothetical protein
  misc_feature (1)..(159): Homolog of NCBI NO: 30679757 NR Description: bZIP protein [Arabidopsis thaliana] putative bzip transcription factor atbzip23 [Arabidopsis
  misc_feature (16)..(174): Homolog of NCBI NO: 21554283 NR Description: putative transcription factor [Arabidopsis
  misc_feature (16)..(174): Homolog of NCBI NO: 7486791 NR Description: hypothetical protein M4E13.100 - Arabidopsis >gi|2924515|emb|CAA17769.1| putative protein [Arabidopsis >gi|7270455|emb|CAB80221.1| putative protein [Arabidopsis
  misc_feature (16)..(174): Homolog of NCBI NO: 18418563 NR Description: bZIP protein [Arabidopsis thaliana] putative protein [Arabidopsis thaliana]
  misc_feature (5)..(169): Homolog of NCBI NO: 18855044 NR Description: putative transcription factor [Oryza sativa]
  misc_feature (50)..(141): Homolog of NCBI NO: 34908964 NR Description: P0003D09.19 [Oryza sativa (japonica
MNEEEDKDQDRVTRGCSHTHSCNPPGPEDASHSHTCFHAHTHLIISDQQENDHSDSSNKKRLCGNREAVRKYREKKKARTAYLEDEVMRLQSLNEQFLRKLQSQEMVETELIRLRALLVEMQGKIEVELCSFSFQKQCNGSGFVFKEDGCNLATSNMMCEAARVECEEGQTLHDPIQSFVPQPPPFSR

SEQ ID NO: 107812 - DNA, 1770 bp, Arabidopsis thaliana
  misc_feature (1)..(1770): Ceres Seq. ID no. 13651747
  misc_feature: MA Experiment ID: 20000166 Result: Up-regulated in Transcription
  misc_feature: MA Experiment 20000166 PARAMETER Experiment Name: At_100uM_ABA_P Parameter: Age (day) Value: 14
  misc_feature: MA Experiment 20000166 PARAMETER Experiment Name: At_100uM_ABA_P Parameter: Organism Value: A. thaliana
  misc_feature: MA Experiment 20000166 PARAMETER Experiment Name: At_100uM_ABA_P Parameter: Plant Line Value: WS
  misc_feature: MA Experiment 20000166 PARAMETER Experiment Name: At_100uM_ABA_P Parameter: Timepoint (hr) Value: 1
  misc_feature: MA Experiment 20000166 PARAMETER Experiment Name: At_100uM_ABA_P Parameter: Tissue Value: Aerial
  misc_feature: MA Experiment 20000166 PARAMETER Experiment Name: At_100uM_ABA_P Parameter: Treatment Value: 100uM ABA vs. No Treatment
  misc_feature: MA Experiment ID: 20000171 Result: Down-regulated in Transcription
  misc_feature: MA Experiment 20000171 PARAMETER Experiment Name: At_42deg_Heat_P Parameter: Age (day) Value: 14
  misc_feature: MA Experiment 20000171 PARAMETER Experiment Name: At_42deg_Heat_P Parameter: Organism Value: A. thaliana
  misc_feature: MA Experiment 20000171 PARAMETER Experiment Name: At_42deg_Heat_P Parameter: Plant Line Value: WS
  misc_feature: MA Experiment 20000171 PARAMETER Experiment Name: At_42deg_Heat_P Parameter: Temperature (deg C) Value: 42 vs. 22
  misc_feature: MA Experiment 20000171 PARAMETER Experiment Name: At_42deg_Heat_P Parameter: Timepoint (hr) Value: 1
  misc_feature: MA Experiment 20000171 PARAMETER Experiment Name: At_42deg_Heat_P Parameter: Tissue Value: Aerial
  misc_feature: MA Experiment ID: 20000173 Result: Down-regulated in Transcription
  misc_feature: MA Experiment 20000173 PARAMETER Experiment Name: At_42deg_Heat_P Parameter: Age (day) Value: 14
  misc_feature: MA Experiment 20000173 PARAMETER Experiment Name: At_42deg_Heat_P Parameter: Organism Value: A. thaliana
  misc_feature: MA Experiment 20000173 PARAMETER Experiment Name: At_42deg_Heat_P Parameter: Plant Line Value: WS
  misc_feature: MA Experiment 20000173 PARAMETER Experiment Name: At_42deg_Heat_P Parameter: Temperature (deg C) Value: 42 vs. 22
  misc_feature: MA Experiment 20000173 PARAMETER Experiment Name: At_42deg_Heat_P Parameter: Timepoint (hr) Value: 6
  misc_feature: MA Experiment 20000173 PARAMETER Experiment Name: At_42deg_Heat_P Parameter: Tissue Value: Aerial
  misc_feature: MA Experiment ID: 20000182 Result: Up-regulated in Transcription
  misc_feature: MA Experiment 20000182 PARAMETER Experiment Name: At_2mM_SA_P Parameter: Age (day) Value: 14
  misc_feature: MA Experiment 20000182 PARAMETER Experiment Name: At_2mM_SA_P Parameter: Organism Value: A. thaliana
  misc_feature: MA Experiment 20000182 PARAMETER Experiment Name: At_2mM_SA_P Parameter: Plant Line Value: WS
  misc_feature: MA Experiment 20000182 PARAMETER Experiment Name: At_2mM_SA_P Parameter: Timepoint (hr) Value: 6
  misc_feature: MA Experiment 20000182 PARAMETER Experiment Name: At_2mM_SA_P Parameter: Tissue Value: Aerial
  misc_feature: MA Experiment 20000182 PARAMETER Experiment Name: At_2mM_SA_P Parameter: Treatment Value: 2mM SA vs. No Treatment
  misc_feature: MA Experiment ID: 20000184 Result: Down-regulated in Transcription
  misc_feature: MA Experiment 20000184 PARAMETER Experiment Name: At_Shoots__P Parameter: Age (day) Value: 7
  misc_feature: MA Experiment 20000184 PARAMETER Experiment Name: At_Shoots__P Parameter: Tissue Value: Shoots vs. Whole Plant
  misc_feature: MA Experiment ID: 20000185 Result: Down-regulated in Transcription
  misc_feature: MA Experiment 20000185 PARAMETER Experiment Name: At_Roots__P Parameter: Age (day) Value: 7 vs. 21
  misc_feature: MA Experiment 20000185 PARAMETER Experiment Name: At_Roots__P Parameter: Organism Value: A. thaliana
  misc_feature: MA Experiment 20000185 PARAMETER Experiment Name: At_Roots__P Parameter: Tissue Value: Roots vs. Whole Plant
  misc_feature: MA Experiment ID: 20000234 Result: Down-regulated in Transcription
  misc_feature: MA Experiment 20000234 PARAMETER Experiment Name: At_Siliques_P Parameter: Age (day) Value: 21
  misc_feature: MA Experiment 20000234 PARAMETER Experiment Name: At_Siliques_P Parameter: Organism Value: A. thaliana
  misc_feature: MA Experiment 20000234 PARAMETER Experiment Name: At_Siliques_P Parameter: Plant Line Value: WS
  misc_feature: MA Experiment 20000234 PARAMETER Experiment Name: At_Siliques_P Parameter: Tissue Value: Less Than 5mm Siliques vs. Whole Plant
  misc_feature: MA Experiment ID: 20000235 Result: Down-regulated in Transcription
  misc_feature: MA Experiment 20000235 PARAMETER Experiment Name: At_Siliques_P Parameter: Age (day) Value: 21
  misc_feature: MA Experiment 20000235 PARAMETER Experiment Name: At_Siliques_P Parameter: Organism Value: A. thaliana
  misc_feature: MA Experiment 20000235 PARAMETER Experiment Name: At_Siliques_P Parameter: Plant Line Value: WS
  misc_feature: MA Experiment 20000235 PARAMETER Experiment Name: At_Siliques_P Parameter: Tissue Value: 5-10mm Siliques vs. Whole Plant
  misc_feature: MA Experiment ID: 20000264 Result: Down-regulated in Transcription
  misc_feature: MA Experiment 20000264 PARAMETER Experiment Name: At_Open_Flower_P Parameter: Age (day) Value: 21
  misc_feature: MA Experiment 20000264 PARAMETER Experiment Name: At_Open_Flower_P Parameter: Plant Line Value: WS
  misc_feature: MA Experiment 20000264 PARAMETER Experiment Name: At_Open_Flower_P Parameter: Tissue Value: Open Flower vs. Whole Plant
  misc_feature: MA Experiment ID: 20000265 Result: Down-regulated in Transcription
  misc_feature: MA Experiment 20000265 PARAMETER Experiment Name: At_Open_Flower_P Parameter: Age (day) Value: 21
  misc_feature: MA Experiment 20000265 PARAMETER Experiment Name: At_Open_Flower_P Parameter: Plant Line Value: WS
  misc_feature: MA Experiment 20000265 PARAMETER Experiment Name: At_Open_Flower_P Parameter: Tissue Value: Closed Flower vs. Whole Plant
  misc_feature: MA Experiment ID: 20000286 Result: Down-regulated in Transcription
  misc_feature: MA Experiment 20000286 PARAMETER Experiment Name: At_Open_Flower_P Parameter: Age (day) Value: 21
  misc_feature: MA Experiment 20000286 PARAMETER Experiment Name: At_Open_Flower_P Parameter: Plant Line Value: WS
  misc_feature: MA Experiment 20000286 PARAMETER Experiment Name: At_Open_Flower_P Parameter: Tissue Value: Half Open vs. Whole Plant
  misc_feature: MA Experiment ID: 20000438 Result: Down-regulated in Transcription
  misc_feature: MA Experiment 20000438 PARAMETER Experiment Name: At_Shoots__P Parameter: Age (day) Value: 14
  misc_feature: MA Experiment 20000438 PARAMETER Experiment Name: At_Shoots__P Parameter: Tissue Value: Shoots vs. Whole Plant
  misc_feature: MA Experiment ID: 20000439 Result: Down-regulated in Transcription
  misc_feature: MA Experiment 20000439 PARAMETER Experiment Name: At_Roots__P Parameter: Age (day) Value: 14 vs. 21
  misc_feature: MA Experiment 20000439 PARAMETER Experiment Name: At_Roots__P Parameter: Organism Value: A. thaliana
  misc_feature: MA Experiment 20000439 PARAMETER Experiment Name: At_Roots__P Parameter: Tissue Value: Roots vs. Whole Plant
  misc_feature: MA Experiment ID: 20000527 Result: Up-regulated in Transcription
  misc_feature: MA Experiment 20000527 PARAMETER Experiment Name: At_10percent_PEG_P Parameter: Age (day) Value: 20
  misc_feature: MA Experiment 20000527 PARAMETER Experiment Name: At_10percent_PEG_P Parameter: Organism Value: A. thaliana
  misc_feature: MA Experiment 20000527 PARAMETER Experiment Name: At_10percent_PEG_P Parameter: Plant Line Value: WS
  misc_feature: MA Experiment 20000527 PARAMETER Experiment Name: At_10percent_PEG_P Parameter: Timepoint (day) Value: 20
  misc_feature: MA Experiment 20000527 PARAMETER Experiment Name: At_10percent_PEG_P Parameter: Tissue Value: Whole Plant
  misc_feature: MA Experiment 20000527 PARAMETER Experiment Name: At_10percent_PEG_P Parameter: Treatment Value: 10percent PEG vs. No Treatment
aacgttttgtgtctttttccatcttaatctgctttctcgacaaagaaaagcagagaaagagagacttgttatactaaactcaatctctggcttttagttttgttgtctctctccttcagtttccaggaaaaaatctctttctcattaagctgttatatagatctgtgttcatactcttcttccacaatctaacccaaaaaaaaaaaaactttatttctctctacaaatttcatttgttccattttctcaattttagaacttaagaaacccaaaaagcaaatttttagtacattttctggtttaactaaagtaattaatttttgtgttttccatcaaaattccactggttttctttagaatttttttatctctctttaagacatgaactgtctgttcttgttcaaatcaaagaaacccagaaagcaacagaaagacaacaacaagaacaaaagaaaaggtaaagagttgttacaaaactcagctccagaactgacgaatcggagtgaaacgtcttcgtttaatctccagacaccaagatcgttgccttctccaagaagtatcaaagatttgtatacagagagagaacaaaatcttagggttttttcttacgaagaactcagtaaagccacttatgtgtttagcagaaagcttgtgatcggtgaaggtggatttggtattgtttataaaggaaagattctcagcaatggagattcttctgatcctccacttgtcgttgccatcaagaaactcaatcgacaaggtttacagggtcacaagcaatggctagcagaggttcagtttcttggagtagtgaatcatccgaacgttgtgaagctcataggttattgctcggaagacggcgagaccgggatcgagaggcttttggtttatgagtacatgtcgaatcgaagtttagaagaccatctcttccctcgtcgatcacacacattaccgtggaaaaaaagactcgagatcatgcttggtgctgctgaaggattgacttatttacatgatcttaaggtgatatatagagatttcaaatcctctaatgtgcttttagacgatcaattctgtccaaaattatcggactttgggcttgccagagaaggacctgatggcgacaatactcatgtcactaccgcaagagttggaacacacggctatgcggctccggaatacgtgcaaacaggtcatcttcggttaaagagcgacgtctatagcttcggtgttgtgctctacgagatcataaccggacgcagaaccattgagaggaacaagccagtggctgaacgaaggctattggattgggtcaaagagtatcctgctgatagtcaacgtttcagcatgatcgttgaccctcggttacgcaacaattatccagctgctggagctaggagtttggctaaattggctgatctttgcctgaaaaagaacgataaagagcgacctacgatggaaattgtagtggaaagattgaaaaagattatcgaagaatcggatagtgaagattatccgatggctacgactacgaccaaggaaagtagtcaggtaaggaggagacaagttgcaaaacctgagaaacaaagtttgagaggggttagtgtcagaggatgattttgagtttagaagtttttttgcaagtttatatattataaataagtttatgcaatttgttggtttattgtgagattagtagagaaaatgtatcttattgtgtgttttgtaaataaaattcaatacggtgaatgagaatcattgagatcaagtttt

SEQ ID NO: 107813 - protein, 410 aa, Arabidopsis thaliana; identical to SEQ ID NO: 38356
  peptide (1)..(410): Ceres Seq. ID no. 13651748
  misc_feature (86)..(365): Pfam Name: Protein kinase domain Pfam Description: Protein kinase domain
  misc_feature (1)..(410): Homolog of NCBI NO: 15238002 NR Description: protein kinase, putative [Arabidopsis thaliana]
  misc_feature (1)..(376): Homolog of NCBI NO: 30684132 NR Description: protein kinase, putative [Arabidopsis thaliana]
  misc_feature (18)..(376): Homolog of NCBI NO: 7434305 NR Description: probable protein kinase - Arabidopsis thaliana NAK like protein kinase [Arabidopsis thaliana]
  misc_feature (38)..(409): Homolog of NCBI NO: 7488278 NR Description: probable protein kinase [imported] - Arabidopsis >gi|3461836|gb|AAC33222.1| putative protein kinase [Arabidopsis >gi|20197438|gb|AAM15076.1| putative protein kinase [Arabidopsis
  misc_feature (1)..(397): Homolog of NCBI NO: 28416693 NR Description: At2g39110 [Arabidopsis thaliana]
  misc_feature (1)..(397): Homolog of NCBI NO: 30687780 NR Description: protein kinase, putative [Arabidopsis thaliana]
  misc_feature (15)..(378): Homolog of NCBI NO: 34901778 NR Description: protein serine/threonine kinase-like [Oryza
  misc_feature (1)..(391): Homolog of NCBI NO: 15232764 NR Description: protein kinase, putative [Arabidopsis thaliana] putative protein kinase [Arabidopsis thaliana]
  misc_feature (33)..(387): Homolog of NCBI NO: 38345946 NR Description: OSJNBb0103I08.17 [Oryza sativa (japonica
  misc_feature (1)..(397): Homolog of NCBI NO: 25287613 NR Description: probable protein kinase [imported] - Arabidopsis >gi|3928095|gb|AAC79621.1| putative protein kinase [Arabidopsis

SEQ ID NO: 107814 - protein, 238 aa, Arabidopsis thaliana; identical to SEQ ID NO: 38357
  peptide (1)..(238): Ceres Seq. ID no. 13651749
  misc_feature (1)..(193): Pfam Name: Protein kinase domain Pfam Description: Protein kinase domain
  misc_feature (1)..(238): Homolog of NCBI NO: 15238002 NR Description: protein kinase, putative [Arabidopsis thaliana]
  misc_feature (1)..(204): Homolog of NCBI NO: 30684132 NR Description: protein kinase, putative [Arabidopsis thaliana]
  misc_feature (1)..(204): Homolog of NCBI NO: 7434305 NR Description: probable protein kinase - Arabidopsis thaliana NAK like protein kinase [Arabidopsis thaliana]
  misc_feature (1)..(237): Homolog of NCBI NO: 7488278 NR Description: probable protein kinase [imported] - Arabidopsis >gi|3461836|gb|AAC33222.1| putative protein kinase [Arabidopsis >gi|20197438|gb|AAM15076.1| putative protein kinase [Arabidopsis
  misc_feature (1)..(225): Homolog of NCBI NO: 28416693 NR Description: At2g39110 [Arabidopsis thaliana]
  misc_feature (1)..(225): Homolog of NCBI NO: 30687780 NR Description: protein kinase, putative [Arabidopsis thaliana]
  misc_feature (1)..(206): Homolog of NCBI NO: 34901778 NR Description: protein serine/threonine kinase-like [Oryza
  misc_feature (1)..(219): Homolog of NCBI NO: 15232764 NR Description: protein kinase, putative [Arabidopsis thaliana] putative protein kinase [Arabidopsis thaliana]
  misc_feature (1)..(215): Homolog of NCBI NO: 38345946 NR Description: OSJNBb0103I08.17 [Oryza sativa (japonica
  misc_feature (1)..(225): Homolog of NCBI NO: 25287613 NR Description: probable protein kinase [imported] - Arabidopsis >gi|3928095|gb|AAC79621.1| putative protein kinase [Arabidopsis

SEQ ID NO: 107815 - protein, 212 aa, Arabidopsis thaliana; identical to SEQ ID NO: 38358
  peptide (1)..(212): Ceres Seq. ID no. 13651750
  misc_feature (1)..(167): Pfam Name: Protein kinase domain Pfam Description: Protein kinase domain
  misc_feature (1)..(212): Homolog of NCBI NO: 15238002 NR Description: protein kinase, putative [Arabidopsis thaliana]
  misc_feature (1)..(178): Homolog of NCBI NO: 30684132 NR Description: protein kinase, putative [Arabidopsis thaliana]
  misc_feature (1)..(178): Homolog of NCBI NO: 7434305 NR Description: probable protein kinase - Arabidopsis thaliana NAK like protein kinase [Arabidopsis thaliana]
  misc_feature (1)..(211): Homolog of NCBI NO: 7488278 NR Description: probable protein kinase [imported] - Arabidopsis >gi|3461836|gb|AAC33222.1| putative protein kinase [Arabidopsis >gi|20197438|gb|AAM15076.1| putative protein kinase [Arabidopsis
  misc_feature (1)..(199): Homolog of NCBI NO: 28416693 NR Description: At2g39110 [Arabidopsis thaliana]
  misc_feature (1)..(199): Homolog of NCBI NO: 30687780 NR Description: protein kinase, putative [Arabidopsis thaliana]
  misc_feature (1)..(180): Homolog of NCBI NO: 34901778 NR Description: protein serine/threonine kinase-like [Oryza
  misc_feature (1)..(193): Homolog of NCBI NO: 15232764 NR Description: protein kinase, putative [Arabidopsis thaliana] putative protein kinase [Arabidopsis thaliana]
  misc_feature (1)..(189): Homolog of NCBI NO: 38345946 NR Description: OSJNBb0103I08.17 [Oryza sativa (japonica
  misc_feature (1)..(199): Homolog of NCBI NO: 25287613 NR Description: probable protein kinase [imported] - Arabidopsis >gi|3928095|gb|AAC79621.1| putative protein kinase [Arabidopsis

SEQ ID NO: 107816 - DNA, 497 bp, Arabidopsis thaliana
  misc_feature (1)..(497): Ceres Seq. ID no. 13651751
aattttctaaagaagaaacaaattaaacctcaccgacggattcaattctctcgttctcaggccgtcttcatcgccggagcgttttcttacgaaaagaatgggcttctggacattgttaaaaggtctgctgctctttgcaaatgcactggcaatcctcaacgaagaccgtttccttgttccaagaggatggacactcggagaactccaccaaaccgatagaagaaactctcccaaaggccaaatcattggtctgatccatgcctgccagtacatgaggctacccctcatgctcattaacacagcagtcatcgtcttgaagcttatctccggttgaagattttgtgtagatgaagataaactacattgcgttcttcaaatgattgtgattagttacaaatctattttgtgtaggagttggaatttgtttttgtcatccctcgcactcaagtttggtgtgcattctacaacattcttctcatatttttacatgccaaatc

SEQ ID NO: 107817 - protein, 78 aa, Arabidopsis thaliana
  peptide (1)..(78): Ceres Seq. ID no. 13651752
  misc_feature (1)..(78): Homolog of NCBI NO: 26450605 NR Description: unknown protein [Arabidopsis thaliana] unknown protein [Arabidopsis thaliana]
  misc_feature (1)..(78): Homolog of NCBI NO: 18404604 NR Description: expressed protein [Arabidopsis thaliana]
  misc_feature (2)..(78): Homolog of NCBI NO: 19114695 NR Description: hypothetical protein [Schizosaccharomyces pombe]
  misc_feature (4)..(78): Homolog of NCBI NO: 24662435 NR Description: CG32069-PA [Drosophila melanogaster]
MGFWTLLKGLLLFANALAILNEDRFLVPRGWTLGELHQTDRRNSPKGQIIGLIHACQYMRLPLMLINTAVIVLKLISG

SEQ ID NO: 107818 - protein, 72 aa, Arabidopsis thaliana
  peptide (1)..(72): Ceres Seq. ID no. 13651753
NFLKKKQIKPHRRIQFSRSQAVFIAGAFSYEKNGLLDIVKRSAALCKCTGNPQRRPFPCSKRMDTRRTPPNR

SEQ ID NO: 107819 - protein, 40 aa, Arabidopsis thaliana
  peptide (1)..(40): Ceres Seq. ID no. 13651754
MIVISYKSILCRSWNLFLSSLALKFGVHSTTFFSYFYMPN

SEQ ID NO: 107820 - DNA, 1372 bp, Arabidopsis thaliana
  misc_feature (1)..(1372): Ceres Seq. ID no. 13651774
  misc_feature: MA Experiment ID: 20000179 Result: Down-regulated in Transcription
  misc_feature: MA Experiment 20000179 PARAMETER Experiment Name: At_Germinating_Seeds_P Parameter: Age (hr) Value: 6 vs. 0
  misc_feature: MA Experiment 20000179 PARAMETER Experiment Name: At_Germinating_Seeds_P Parameter: Tissue Value: Germinating Seeds
  misc_feature: MA Experiment ID: 20000180 Result: Down-regulated in Transcription
  misc_feature: MA Experiment 20000180 PARAMETER Experiment Name: At_Germinating_Seeds_P Parameter: Age (hr) Value: 24 vs. 0
  misc_feature: MA Experiment 20000180 PARAMETER Experiment Name: At_Germinating_Seeds_P Parameter: Tissue Value: Germinating Seeds
accgatacaagatcgaagctttgccttctgtttcttcgaaaatctaccatggctgctctacaataccttgaatcgcagaaaaatgcgcacccagagcttggtgagtggtacaattcgctcgcagatctgtaccagaagaagctctggcatcagctcactcttaagctcgagcagttcatcgctctctctgtctttcaggctggagatgctttaatacagctttacaacaatttcatcactgactttgagacgaggatcaatcttctgaagcttgcgcatttcgctgttgtagtctcccgacagtatcctgagaaagaagctgcagttagttatcttgaaggagtgattgagaagcttaaagctactaaagagtcaaggataaatgaaccaattagctatatagaaacacaaatagctttgttcaagcttgagcaaggtgaccagaaggagtgcaagaaaatcttggacgatggaaaaagcctgcttgatagtatgactgacattgatccatcagtttatgccaacttcttttgggtctcttctcagtaccataaagtccgtcaagagttctctgagttctataaaaatgctcttctttacctcgcttatacgtctgtggactcactctcggaatcatttaagctggatttggcttttgatttgtcgctttcagctctacttggggagaatatctataactttggggaactgttagcccatccaattttgaaaagtctgcttggaacaaatgtggaatggctttaccacattctacaagcattcaaccacggagatttagttcagtaccaagaactctgtcgtgtgcacaatgcatcgttgagtgctcaaccagcactggttgagaatgagaagaaactattagagaagatcaacattctctgccttattgagatcattttcagccgacctgctgaagataggaccatacctttgagtgtcattgccgagcgtactaaactttcaatcgaagatgttgagcaccttctcatgaagagcttatcggtgcacttgatagagggaatactagatcaggtgaatggaacagtttacgtctcatgggcgcaaccgagggtgttaggaataccgcagatcaagtcattgagggatcagctagacagctgggtcgataaggttcacaccacattgttatctgttgaggccgagacacctgatcttgttgcagcttaaactcttctttcctcttttttccttcactgttcgtttaagctacagattgtaacattctctgaggattaaatgcaacttccttttaagtttttaggtattacagttatacttttgaactttgttctccacagacacatgaatctatcctattaagttgagtttc

SEQ ID NO: 107821 - protein, 402 aa, Arabidopsis thaliana
  peptide (1)..(402): Ceres Seq. ID no. 13651775
  misc_feature (252)..(360): Pfam Name: PCI domain Pfam Description: PCI domain
  misc_feature (17)..(402): Homolog of NCBI NO: 30684612 NR Description: 26S proteasome regulatory subunit (RPN9) -related thaliana] >gi|26450594|dbj|BAC42409.1| unknown protein
  misc_feature (17)..(402): Homolog of NCBI NO: 22327608 NR Description: 26S proteasome regulatory subunit (RPN9), putative
  misc_feature (17)..(341): Homolog of NCBI NO: 9758666 NR Description: 26S proteasome subunit-like protein [Arabidopsis
  misc_feature (19)..(402): Homolog of NCBI NO: 34914614 NR Description: putative 26S proteasome subunit [Oryza sativa
  misc_feature (122)..(402): Homolog of NCBI NO: 17298163 NR Description: 26S proteasome regulatory particle non-ATPase
  misc_feature (14)..(400): Homolog of NCBI NO: 29612578 NR Description: Similar to proteasome (prosome, macropain) 26S
  misc_feature (22)..(400): Homolog of NCBI NO: 3618343 NR Description: 26S proteasome subunit p40.5 [Homo sapiens]
  misc_feature (24)..(400): Homolog of NCBI NO: 28872728 NR Description: proteasome 26S non-ATPase subunit 13 isoform 1; proteasome subunit p40.5; 26S proteasome regulatory subunit S11
  misc_feature (24)..(400): Homolog of NCBI NO: 32880133 NR Description: proteasome (prosome, macropain) 26S subunit,
  misc_feature (24)..(400): Homolog of NCBI NO: 3746882 NR Description: 26S proteasome subunit 11 [Homo sapiens]
TDTRSKLCLLFLRKSTMAALQYLESQKNAHPELGEWYNSLADLYQKKLWHQLTLKLEQFIALSVFQAGDALIQLYNNFITDFETRINLLKLAHFAVVVSRQYPEKEAAVSYLEGVIEKLKATKESRINEPISYIETQIALFKLEQGDQKECKKILDDGKSLLDSMTDIDPSVYANFFWVSSQYHKVRQEFSEFYKNALLYLAYTSVDSLSESFKLDLAFDLSLSALLGENIYNFGELLAHPILKSLLGTNVEWLYHILQAFNHGDLVQYQELCRVHNASLSAQPALVENEKKLLEKINILCLIEIIFSRPAEDRTIPLSVIAERTKLSIEDVEHLLMKSLSVHLIEGILDQVNGTVYVSWAQPRVLGIPQIKSLRDQLDSWVDKVHTTLLSVEAETPDLVAA

SEQ ID NO: 107822 - protein, 386 aa, Arabidopsis thaliana
  peptide (1)..(386): Ceres Seq. ID no. 13651776
  misc_feature (236)..(344): Pfam Name: PCI domain Pfam Description: PCI domain
  misc_feature (1)..(386): Homolog of NCBI NO: 30684612 NR Description: 26S proteasome regulatory subunit (RPN9) -related thaliana] >gi|26450594|dbj|BAC42409.1| unknown protein
  misc_feature (1)..(386): Homolog of NCBI NO: 22327608 NR Description: 26S proteasome regulatory subunit (RPN9), putative
  misc_feature (1)..(325): Homolog of NCBI NO: 9758666 NR Description: 26S proteasome subunit-like protein [Arabidopsis
  misc_feature (3)..(386): Homolog of NCBI NO: 34914614 NR Description: putative 26S proteasome subunit [Oryza sativa
  misc_feature (106)..(386): Homolog of NCBI NO: 17298163 NR Description: 26S proteasome regulatory particle non-ATPase
  misc_feature (1)..(384): Homolog of NCBI NO: 29612578 NR Description: Similar to proteasome (prosome, macropain) 26S
  misc_feature (6)..(384): Homolog of NCBI NO: 3618343 NR Description: 26S proteasome subunit p40.5 [Homo sapiens]
  misc_feature (8)..(384): Homolog of NCBI NO: 28872728 NR Description: proteasome 26S non-ATPase subunit 13 isoform 1; proteasome subunit p40.5; 26S proteasome regulatory subunit S11
  misc_feature (8)..(384): Homolog of NCBI NO: 32880133 NR Description: proteasome (prosome, macropain) 26S subunit,
  misc_feature (8)..(384): Homolog of NCBI NO: 3746882 NR Description: 26S proteasome subunit 11 [Homo sapiens]
MAALQYLESQKNAHPELGEWYNSLADLYQKKLWHQLTLKLEQFIALSVFQAGDALIQLYNNFITDFETRINLLKLAHFAVVVSRQYPEKEAAVSYLEGVIEKLKATKESRINEPISYIETQIALFKLEQGDQKECKKILDDGKSLLDSMTDIDPSVYANFFWVSSQYHKVRQEFSEFYKNALLYLAYTSVDSLSESFKLDLAFDLSLSALLGENIYNFGELLAHPILKSLLGTNVEWLYHILQAFNHGDLVQYQELCRVHNASLSAQPALVENEKKLLEKINILCLIEIIFSRPAEDRTIPLSVIAERTKLSIEDVEHLLMKSLSVHLIEGILDQVNGTVYVSWAQPRVLGIPQIKSLRDQLDSWVDKVHTTLLSVEAETPDLVAA

SEQ ID NO: 107823 - protein, 238 aa, Arabidopsis thaliana
  peptide (1)..(238): Ceres Seq. ID no. 13651777
  misc_feature (88)..(196): Pfam Name: PCI domain Pfam Description: PCI domain
  misc_feature (1)..(238): Homolog of NCBI NO: 30684612 NR Description: 26S proteasome regulatory subunit (RPN9) -related thaliana] >gi|26450594|dbj|BAC42409.1| unknown protein
  misc_feature (1)..(238): Homolog of NCBI NO: 22327608 NR Description: 26S proteasome regulatory subunit (RPN9), putative
  misc_feature (1)..(177): Homolog of NCBI NO: 9758666 NR Description: 26S proteasome subunit-like protein [Arabidopsis
  misc_feature (1)..(238): Homolog of NCBI NO: 34914614 NR Description: putative 26S proteasome subunit [Oryza sativa
  misc_feature (1)..(238): Homolog of NCBI NO: 17298163 NR Description: 26S proteasome regulatory particle non-ATPase
  misc_feature (1)..(236): Homolog of NCBI NO: 29612578 NR Description: Similar to proteasome (prosome, macropain) 26S
  misc_feature (1)..(236): Homolog of NCBI NO: 3618343 NR Description: 26S proteasome subunit p40.5 [Homo sapiens]
  misc_feature (1)..(236): Homolog of NCBI NO: 28872728 NR Description: proteasome 26S non-ATPase subunit 13 isoform 1; proteasome subunit p40.5; 26S proteasome regulatory subunit S11
  misc_feature (1)..(236): Homolog of NCBI NO: 32880133 NR Description: proteasome (prosome, macropain) 26S subunit,
  misc_feature (1)..(236): Homolog of NCBI NO: 3746882 NR Description: 26S proteasome subunit 11 [Homo sapiens]
MTDIDPSVYANFFWVSSQYHKVRQEFSEFYKNALLYLAYTSVDSLSESFKLDLAFDLSLSALLGENIYNFGELLAHPILKSLLGTNVEWLYHILQAFNHGDLVQYQELCRVHNASLSAQPALVENEKKLLEKINILCLIEIIFSRPAEDRTIPLSVIAERTKLSIEDVEHLLMKSLSVHLIEGILDQVNGTVYVSWAQPRVLGIPQIKSLRDQLDSWVDKVHTTLLSVEAETPDLVAA

SEQ ID NO: 107824 - DNA, 1185 bp, Arabidopsis thaliana
  misc_feature (1)..(1185): Ceres Seq. ID no. 13651801
  misc_feature: MA Experiment ID: 108462 Result: Up-regulated in Transcription
  misc_feature: MA Experiment 108462 PARAMETER Experiment Name: At_Germinating_Seeds_cDNA_P Parameter: Age (day) Value: 2 vs. 0
  misc_feature: MA Experiment 108462 PARAMETER Experiment Name: At_Germinating_Seeds_cDNA_P Parameter: Tissue Value: Germinating Seeds
  misc_feature: MA Experiment ID: 108463 Result: Up-regulated in Transcription
  misc_feature: MA Experiment 108463 PARAMETER Experiment Name: At_Germinating_Seeds_cDNA_P Parameter: Age (day) Value: 3 vs. 0
  misc_feature: MA Experiment 108463 PARAMETER Experiment Name: At_Germinating_Seeds_cDNA_P Parameter: Tissue Value: Germinating Seeds
  misc_feature: MA Experiment ID: 108464 Result: Up-regulated in Transcription
  misc_feature: MA Experiment 108464 PARAMETER Experiment Name: At_Germinating_Seeds_cDNA_P Parameter: Age (day) Value: 4 vs. 0
  misc_feature: MA Experiment 108464 PARAMETER Experiment Name: At_Germinating_Seeds_cDNA_P Parameter: Tissue Value: Germinating Seeds
  misc_feature: MA Experiment ID: 108561 Result: Up-regulated in Transcription
  misc_feature: MA Experiment 108561 PARAMETER Experiment Name: At_100uM_ABA_cDNA_P Parameter: Timepoint (hr) Value: 6
  misc_feature: MA Experiment 108561 PARAMETER Experiment Name: At_100uM_ABA_cDNA_P Parameter: Tissue Value: Aerial
  misc_feature: MA Experiment 108561 PARAMETER Experiment Name: At_100uM_ABA_cDNA_P Parameter: Treatment Value: 100uM ABA vs. No Treatment
  misc_feature: MA Experiment ID: 108573 Result: Up-regulated in Transcription
  misc_feature: MA Experiment 108573 PARAMETER Experiment Name: At_Drought_cDNA_P Parameter: Timepoint (hr) Value: 6
  misc_feature: MA Experiment 108573 PARAMETER Experiment Name: At_Drought_cDNA_P Parameter: Tissue Value: Aerial
  misc_feature: MA Experiment 108573 PARAMETER Experiment Name: At_Drought_cDNA_P Parameter: Treatment Value: Drought vs. No Drought
  misc_feature: MA Experiment ID: 108579 Result: Down-regulated in Transcription
  misc_feature: MA Experiment 108579 PARAMETER Experiment Name: At_4deg_Cold_cDNA_P Parameter: Temperature (deg C) Value: 4 vs. 22
  misc_feature: MA Experiment 108579 PARAMETER Experiment Name: At_4deg_Cold_cDNA_P Parameter: Timepoint (hr) Value: 6
  misc_feature: MA Experiment 108579 PARAMETER Experiment Name: At_4deg_Cold_cDNA_P Parameter: Tissue Value: Aerial
  misc_feature: MA Experiment ID: 108605 Result: Up-regulated in Transcription
  misc_feature: MA Experiment 108605 PARAMETER Experiment Name: At_100uM_ABA_cDNA_P Parameter: Timepoint (hr) Value: 6
  misc_feature: MA Experiment 108605 PARAMETER Experiment Name: At_100uM_ABA_cDNA_P Parameter: Tissue Value: Aerial
  misc_feature: MA Experiment 108605 PARAMETER Experiment Name: At_100uM_ABA_cDNA_P Parameter: Treatment Value: 100uM ABA vs. No Treatment
  misc_feature: MA Experiment ID: 108607 Result: Up-regulated in Transcription
  misc_feature: MA Experiment 108607 PARAMETER Experiment Name: At_100uM_ABA_cDNA_P Parameter: Timepoint (hr) Value: 4
  misc_feature: MA Experiment 108607 PARAMETER Experiment Name: At_100uM_ABA_cDNA_P Parameter: Tissue Value: Aerial
  misc_feature: MA Experiment 108607 PARAMETER Experiment Name: At_100uM_ABA_cDNA_P Parameter: Treatment Value: 100uM ABA vs. No Treatment
  misc_feature: MA Experiment ID: 20000069 Result: Up-regulated in Transcription
  misc_feature: MA Experiment 20000069 PARAMETER Experiment Name: At_100uM_ABA_Mutants_cDNA_P Parameter: Plant Line Value: CS23
  misc_feature: MA Experiment 20000069 PARAMETER Experiment Name: At_100uM_ABA_Mutants_cDNA_P Parameter: Timepoint (hr) Value: 6
  misc_feature: MA Experiment 20000069 PARAMETER Experiment Name: At_100uM_ABA_Mutants_cDNA_P Parameter: Tissue Value: Aerial
  misc_feature: MA Experiment 20000069 PARAMETER Experiment Name: At_100uM_ABA_Mutants_cDNA_P Parameter: Treatment Value: 100uM ABA vs. No Treatment
  misc_feature: MA Experiment ID: 20000070 Result: Up-regulated in Transcription
  misc_feature: MA Experiment 20000070 PARAMETER Experiment Name: At_100uM_ABA_Mutants_cDNA_P Parameter: Plant Line Value: CS24
  misc_feature: MA Experiment 20000070 PARAMETER Experiment Name: At_100uM_ABA_Mutants_cDNA_P Parameter: Timepoint (hr) Value: 6
  misc_feature: MA Experiment 20000070 PARAMETER Experiment Name: At_100uM_ABA_Mutants_cDNA_P Parameter: Tissue Value: Aerial
  misc_feature: MA Experiment 20000070 PARAMETER Experiment Name: At_100uM_ABA_Mutants_cDNA_P Parameter: Treatment Value: 100uM ABA vs. No Treatment
  misc_feature: MA Experiment ID: 20000071 Result: Up-regulated in Transcription
  misc_feature: MA Experiment 20000071 PARAMETER Experiment Name: At_100uM_ABA_Mutants_cDNA_P Parameter: Plant Line Value: CS8104
  misc_feature: MA Experiment 20000071 PARAMETER Experiment Name: At_100uM_ABA_Mutants_cDNA_P Parameter: Timepoint (hr) Value: 6
  misc_feature: MA Experiment 20000071 PARAMETER Experiment Name: At_100uM_ABA_Mutants_cDNA_P Parameter: Tissue Value: Aerial
  misc_feature: MA Experiment 20000071 PARAMETER Experiment Name: At_100uM_ABA_Mutants_cDNA_P Parameter: Treatment Value: 100uM ABA vs. No Treatment
  misc_feature: MA Experiment ID: 20000113 Result: Up-regulated in Transcription
  misc_feature: MA Experiment 20000113 PARAMETER Experiment Name: At_42deg_Heat_cDNA_P Parameter: Temperature (deg C) Value: 42 vs. 22
  misc_feature: MA Experiment 20000113 PARAMETER Experiment Name: At_42deg_Heat_cDNA_P Parameter: Timepoint (hr) Value: 8
  misc_feature: MA Experiment 20000113 PARAMETER Experiment Name: At_42deg_Heat_cDNA_P Parameter: Tissue Value: Aerial
attttccgcaaatcggattcatgtttttgctttatcgtaggcttccttcatttgcacgaacaacaacaacaacccttctctgcaaatctatggagcctgcgataacagcgacttcttcttcttctttcggtggtggctcttctcgtctcgccgctttagcccagcaacttcgccaatacaagcccccaccttcttcatcgttcgatgactccgaggagatgcagacagatcaggagaccgctgggaaagtcgtttctcaggttgggtttcaggaatctattgctcctctttcgaaagaccctgataggtttaaacccaagagagccgctgtgttgatctgtctctttgaaggagatgatggtgatttgcgtgttattcttactaagagatcttccaaattgtctactcactctggagaagtttcattgccaggtggtaaagcggaggaggatgataaagatgatgggatgactgctaccagagaggctgaggaagagattggattggacccttctcttgttgatgttgttacttctcttgaaccatttctgtctaagcatcttcttagagtaattcctgtgataggcatcttgagggacaaaaataaattcaatccgataccaaatcctggggaagtggaagctgtgtttgatgcacccttggaaatgttccttaaggatgagaatcgaagatctgaagagagagagtggatgggtgaaaagtatttgatccattactttgactacagaacaggagataaggattatatgatatggggtttaactgctgggattttgatcagagctgcacctgtgacttatgaaagaccacctgcttttatcgagcagtgcccgaagtttaagtaccctaaaatgtgaatggctgaatgcagaacttggctacttgcttatatatatgcagacgcagtagctgaagctccaattcatttcctgctggggcatctcataacaggcttcatttctgagttgttcccacaggatgctcaatggtgattcagagaaaagttggcttgttatgattctaggcaaacatcaccctcaattgtgaatttggaggaatatttgtactcagtatttaccttcaaacgctcatttttcattgtatacttgttatcttctatttgtatactgaaccaatttcaaagcaaacttgtcttatgaggct

SEQ ID NO: 107825 - protein, 291 aa, Arabidopsis thaliana
  peptide (1)..(291): Ceres Seq. ID no. 13651802
  misc_feature (106)..(239): Pfam Name: NUDIX domain Pfam Description: NUDIX domain
  misc_feature (7)..(291): Homolog of NCBI NO: 26450576 NR Description: unknown protein [Arabidopsis thaliana]
  misc_feature (7)..(291): Homolog of NCBI NO: 18396900 NR Description: MutT/nudix family protein [Arabidopsis thaliana]
  misc_feature (7)..(291): Homolog of NCBI NO: 30690557 NR Description: MutT/nudix family protein [Arabidopsis thaliana]
  misc_feature (30)..(291): Homolog of NCBI NO: 10764850 NR Description: F1K23.5 [Arabidopsis thaliana]
  misc_feature (28)..(291): Homolog of NCBI NO: 18403412 NR Description: MutT/nudix family protein [Arabidopsis thaliana] unknown protein [Arabidopsis thaliana] unknown protein [Arabidopsis thaliana]
  misc_feature (103)..(291): Homolog of NCBI NO: 40253324 NR Description: putative phosphohydrolase [Oryza sativa (japonica group)] >gi|40253358|dbj|BAD05290.1| putative phosphohydrolase
  misc_feature (103)..(286): Homolog of NCBI NO: 21553389 NR Description: unknown [Arabidopsis thaliana]
  misc_feature (103)..(286): Homolog of NCBI NO: 15242543 NR Description: MutT/nudix family protein [Arabidopsis thaliana] gb|AAF24540.1~gene_id:K15I22.14~similar to unknown protein
  misc_feature (28)..(185): Homolog of NCBI NO: 25370770 NR Description: hypothetical protein At2g33980 [imported] -
  misc_feature (98)..(266): Homolog of NCBI NO: 22969068 NR Description: hypothetical protein [Rhodospirillum rubrum]
FPQIGFMFLLYRRLPSFARTTTTTLLCKSMEPAITATSSSSFGGGSSRLAALAQQLRQYKPPPSSSFDDSEEMQTDQETAGKVVSQVGFQESIAPLSKDPDRFKPKRAAVLICLFEGDDGDLRVILTKRSSKLSTHSGEVSLPGGKAEEDDKDDGMTATREAEEEIGLDPSLVDVVTSLEPFLSKHLLRVIPVIGILRDKNKFNPIPNPGEVEAVFDAPLEMFLKDENRRSEEREWMGEKYLIHYFDYRTGDKDYMIWGLTAGILIRAAPVTYERPPAFIEQCPKFKYPKM

SEQ ID NO: 107826 - protein, 285 aa, Arabidopsis thaliana
  peptide (1)..(285): Ceres Seq. ID no. 13651803
  misc_feature (100)..(233): Pfam Name: NUDIX domain Pfam Description: NUDIX domain
  misc_feature (1)..(285): Homolog of NCBI NO: 26450576 NR Description: unknown protein [Arabidopsis thaliana]
  misc_feature (1)..(285): Homolog of NCBI NO: 18396900 NR Description: MutT/nudix family protein [Arabidopsis thaliana]
  misc_feature (1)..(285): Homolog of NCBI NO: 30690557 NR Description: MutT/nudix family protein [Arabidopsis thaliana]
  misc_feature (24)..(285): Homolog of NCBI NO: 10764850 NR Description: F1K23.5 [Arabidopsis thaliana]
  misc_feature (22)..(285): Homolog of NCBI NO: 18403412 NR Description: MutT/nudix family protein [Arabidopsis thaliana] unknown protein [Arabidopsis thaliana] unknown protein [Arabidopsis thaliana]
  misc_feature (97)..(285): Homolog of NCBI NO: 40253324 NR Description: putative phosphohydrolase [Oryza sativa (japonica group)] >gi|40253358|dbj|BAD05290.1| putative phosphohydrolase
  misc_feature (97)..(280): Homolog of NCBI NO: 21553389 NR Description: unknown [Arabidopsis thaliana]
  misc_feature (97)..(280): Homolog of NCBI NO: 15242543 NR Description: MutT/nudix family protein [Arabidopsis thaliana] gb|AAF24540.1~gene_id:K15I22.14~similar to unknown protein
  misc_feature (22)..(179): Homolog of NCBI NO: 25370770 NR Description: hypothetical protein At2g33980 [imported] -
  misc_feature (92)..(260): Homolog of NCBI NO: 22969068 NR Description: hypothetical protein [Rhodospirillum rubrum]
MFLLYRRLPSFARTTTTTLLCKSMEPAITATSSSSFGGGSSRLAALAQQLRQYKPPPSSSFDDSEEMQTDQETAGKVVSQVGFQESIAPLSKDPDRFKPKRAAVLICLFEGDDGDLRVILTKRSSKLSTHSGEVSLPGGKAEEDDKDDGMTATREAEEEIGLDPSLVDVVTSLEPFLSKHLLRVIPVIGILRDKNKFNPIPNPGEVEAVFDAPLEMFLKDENRRSEEREWMGEKYLIHYFDYRTGDKDYMIWGLTAGILIRAAPVTYERPPAFIEQCPKFKYPKM

SEQ ID NO: 107827 - protein, 262 aa, Arabidopsis thaliana
  peptide (1)..(262): Ceres Seq. ID no. 13651804
  misc_feature (77)..(210): Pfam Name: NUDIX domain Pfam Description: NUDIX domain
  misc_feature (1)..(262): Homolog of NCBI NO: 26450576 NR Description: unknown protein [Arabidopsis thaliana]
  misc_feature (1)..(262): Homolog of NCBI NO: 18396900 NR Description: MutT/nudix family protein [Arabidopsis thaliana]
  misc_feature (1)..(262): Homolog of NCBI NO: 30690557 NR Description: MutT/nudix family protein [Arabidopsis thaliana]
  misc_feature (1)..(262): Homolog of NCBI NO: 10764850 NR Description: F1K23.5 [Arabidopsis thaliana]
  misc_feature (1)..(262): Homolog of NCBI NO: 18403412 NR Description: MutT/nudix family protein [Arabidopsis thaliana] unknown protein [Arabidopsis thaliana] unknown protein [Arabidopsis thaliana]
  misc_feature (74)..(262): Homolog of NCBI NO: 40253324 NR Description: putative phosphohydrolase [Oryza sativa (japonica group)] >gi|40253358|dbj|BAD05290.1| putative phosphohydrolase
  misc_feature (74)..(257): Homolog of NCBI NO: 21553389 NR Description: unknown [Arabidopsis thaliana]
  misc_feature (74)..(257): Homolog of NCBI NO: 15242543 NR Description: MutT/nudix family protein [Arabidopsis thaliana] gb|AAF24540.1~gene_id:K15I22.14~similar to unknown protein
  misc_feature (1)..(156): Homolog of NCBI NO: 25370770 NR Description: hypothetical protein At2g33980 [imported] -
  misc_feature (69)..(237): Homolog of NCBI NO: 22969068 NR Description: hypothetical protein [Rhodospirillum rubrum]
MEPAITATSSSSFGGGSSRLAALAQQLRQYKPPPSSSFDDSEEMQTDQETAGKVVSQVGFQESIAPLSKDPDRFKPKRAAVLICLFEGDDGDLRVILTKRSSKLSTHSGEVSLPGGKAEEDDKDDGMTATREAEEEIGLDPSLVDVVTSLEPFLSKHLLRVIPVIGILRDKNKFNPIPNPGEVEAVFDAPLEMFLKDENRRSEEREWMGEKYLIHYFDYRTGDKDYMIWGLTAGILIRAAPVTYERPPAFIEQCPKFKYPKM

SEQ ID NO: 107828 - DNA, 2095 bp, Arabidopsis thaliana
  misc_feature (1)..(2095): Ceres Seq. ID no. 13651809
  misc_feature: MA Experiment ID: 20000179 Result: Up-regulated in Transcription
  misc_feature: MA Experiment 20000179 PARAMETER Experiment Name: At_Germinating_Seeds_P Parameter: Age (hr) Value: 6 vs. 0
  misc_feature: MA Experiment 20000179 PARAMETER Experiment Name: At_Germinating_Seeds_P Parameter: Tissue Value: Germinating Seeds
  misc_feature: MA Experiment ID: 20000180 Result: Up-regulated in Transcription
  misc_feature: MA Experiment 20000180 PARAMETER Experiment Name: At_Germinating_Seeds_P Parameter: Age (hr) Value: 24 vs. 0
  misc_feature: MA Experiment 20000180 PARAMETER Experiment Name: At_Germinating_Seeds_P Parameter: Tissue Value: Germinating Seeds
  misc_feature: MA Experiment ID: 20000182 Result: Down-regulated in Transcription
  misc_feature: MA Experiment 20000182 PARAMETER Experiment Name: At_2mM_SA_P Parameter: Age (day) Value: 14
  misc_feature: MA Experiment 20000182 PARAMETER Experiment Name: At_2mM_SA_P Parameter: Organism Value: A. thaliana
  misc_feature: MA Experiment 20000182 PARAMETER Experiment Name: At_2mM_SA_P Parameter: Plant Line Value: WS
  misc_feature: MA Experiment 20000182 PARAMETER Experiment Name: At_2mM_SA_P Parameter: Timepoint (hr) Value: 6
  misc_feature: MA Experiment 20000182 PARAMETER Experiment Name: At_2mM_SA_P Parameter: Tissue Value: Aerial
  misc_feature: MA Experiment 20000182 PARAMETER Experiment Name: At_2mM_SA_P Parameter: Treatment Value: 2mM SA vs. No Treatment
  misc_feature: MA Experiment ID: 20000184 Result: Down-regulated in Transcription
  misc_feature: MA Experiment 20000184 PARAMETER Experiment Name: At_Shoots__P Parameter: Age (day) Value: 7
  misc_feature: MA Experiment 20000184 PARAMETER Experiment Name: At_Shoots__P Parameter: Tissue Value: Shoots vs. Whole Plant
  misc_feature: MA Experiment ID: 20000227 Result: Down-regulated in Transcription
  misc_feature: MA Experiment 20000227 PARAMETER Experiment Name: At_Root-Tips-vs-Tops_P Parameter: Tissue Value: Root Tips vs. Root Tops
  misc_feature: MA Experiment ID: 20000234 Result: Up-regulated in Transcription
  misc_feature: MA Experiment 20000234 PARAMETER Experiment Name: At_Siliques_P Parameter: Age (day) Value: 21
  misc_feature: MA Experiment 20000234 PARAMETER Experiment Name: At_Siliques_P Parameter: Organism Value: A. thaliana
  misc_feature: MA Experiment 20000234 PARAMETER Experiment Name: At_Siliques_P Parameter: Plant Line Value: WS
  misc_feature: MA Experiment 20000234 PARAMETER Experiment Name: At_Siliques_P Parameter: Tissue Value: Less Than 5mm Siliques vs. Whole Plant
  misc_feature: MA Experiment ID: 20000235 Result: Up-regulated in Transcription
  misc_feature: MA Experiment 20000235 PARAMETER Experiment Name: At_Siliques_P Parameter: Age (day) Value: 21
  misc_feature: MA Experiment 20000235 PARAMETER Experiment Name: At_Siliques_P Parameter: Organism Value: A. thaliana
  misc_feature: MA Experiment 20000235 PARAMETER Experiment Name: At_Siliques_P Parameter: Plant Line Value: WS
  misc_feature: MA Experiment 20000235 PARAMETER Experiment Name: At_Siliques_P Parameter: Tissue Value: 5-10mm Siliques vs. Whole Plant
  misc_feature: MA Experiment ID: 20000264 Result: Up-regulated in Transcription
  misc_feature: MA Experiment 20000264 PARAMETER Experiment Name: At_Open_Flower_P Parameter: Age (day) Value: 21
  misc_feature: MA Experiment 20000264 PARAMETER Experiment Name: At_Open_Flower_P Parameter: Plant Line Value: WS
  misc_feature: MA Experiment 20000264 PARAMETER Experiment Name: At_Open_Flower_P Parameter: Tissue Value: Open Flower vs. Whole Plant
  misc_feature: MA Experiment ID: 20000265 Result: Up-regulated in Transcription
  misc_feature: MA Experiment 20000265 PARAMETER Experiment Name: At_Open_Flower_P Parameter: Age (day) Value: 21
  misc_feature: MA Experiment 20000265 PARAMETER Experiment Name: At_Open_Flower_P Parameter: Plant Line Value: WS
  misc_feature: MA Experiment 20000265 PARAMETER Experiment Name: At_Open_Flower_P Parameter: Tissue Value: Closed Flower vs. Whole Plant
  misc_feature: MA Experiment ID: 20000439 Result: Up-regulated in Transcription
  misc_feature: MA Experiment 20000439 PARAMETER Experiment Name: At_Roots__P Parameter: Age (day) Value: 14 vs. 21
  misc_feature: MA Experiment 20000439 PARAMETER Experiment Name: At_Roots__P Parameter: Organism Value: A. thaliana
  misc_feature: MA Experiment 20000439 PARAMETER Experiment Name: At_Roots__P Parameter: Tissue Value: Roots vs. Whole Plant
  misc_feature: MA Experiment ID: 20000441 Result: Down-regulated in Transcription
  misc_feature: MA Experiment 20000441 PARAMETER Experiment Name: At_1uM_BR-BRZ__P Parameter: Tissue Value: Shoot Apices
  misc_feature: MA Experiment 20000441 PARAMETER Experiment Name: At_1uM_BR-BRZ__P Parameter: Treatment Value: 1uM BR vs. No Treatment
  misc_feature: MA Experiment ID: 20000443 Result: Down-regulated in Transcription
  misc_feature: MA Experiment 20000443 PARAMETER Experiment Name: At_1uM_BR-BRZ__P Parameter: Tissue Value: Shoot Apices
  misc_feature: MA Experiment 20000443 PARAMETER Experiment Name: At_1uM_BR-BRZ__P Parameter: Treatment Value: 1uM BRZ vs. No Treatment
  misc_feature: MA Experiment ID: 20000495 Result: Up-regulated in Transcription
  misc_feature: MA Experiment 20000495 PARAMETER Experiment Name: At_Guard_Cells_P Parameter: Harvest Date Value: 8/2/2002
  misc_feature: MA Experiment 20000495 PARAMETER Experiment Name: At_Guard_Cells_P Parameter: Organism Value: A. thaliana
  misc_feature: MA Experiment 20000495 PARAMETER Experiment Name: At_Guard_Cells_P Parameter: Tissue Value: Guard Cells vs. Leaves
  misc_feature: MA Experiment ID: 20000527 Result: Down-regulated in Transcription
  misc_feature: MA Experiment 20000527 PARAMETER Experiment Name: At_10percent_PEG_P Parameter: Age (day) Value: 20
  misc_feature: MA Experiment 20000527 PARAMETER Experiment Name: At_10percent_PEG_P Parameter: Organism Value: A. thaliana
  misc_feature: MA Experiment 20000527 PARAMETER Experiment Name: At_10percent_PEG_P Parameter: Plant Line Value: WS
  misc_feature: MA Experiment 20000527 PARAMETER Experiment Name: At_10percent_PEG_P Parameter: Timepoint (day) Value: 20
  misc_feature: MA Experiment 20000527 PARAMETER Experiment Name: At_10percent_PEG_P Parameter: Tissue Value: Whole Plant
  misc_feature: MA Experiment 20000527 PARAMETER Experiment Name: At_10percent_PEG_P Parameter: Treatment Value: 10percent PEG vs. No Treatment
  misc_feature: MA Experiment ID: 20001248 Result: Down-regulated in Transcription
  misc_feature: MA Experiment 20001248 PARAMETER Experiment Name: At_Far-red-induction_P Parameter: Age (day) Value: 7
  misc_feature: MA Experiment 20001248 PARAMETER Experiment Name: At_Far-red-induction_P Parameter: Light Value: Far-red vs. White
  misc_feature: MA Experiment 20001248 PARAMETER Experiment Name: At_Far-red-induction_P Parameter: Organism Value: A. thaliana
  misc_feature: MA Experiment 20001248 PARAMETER Experiment Name: At_Far-red-induction_P Parameter: Plant Line Value: Columbia
  misc_feature: MA Experiment 20001248 PARAMETER Experiment Name: At_Far-red-induction_P Parameter: Timepoint (hr) Value: 4
  misc_feature: MA Experiment 20001248 PARAMETER Experiment Name: At_Far-red-induction_P Parameter: Tissue Value: Whole Plant
  misc_feature: MA Experiment ID: 20001450 Result: Down-regulated in Transcription
  misc_feature: MA Experiment 20001450 PARAMETER Experiment Name: At_Far-red-induction_P Parameter: Age (day) Value: 7
  misc_feature: MA Experiment 20001450 PARAMETER Experiment Name: At_Far-red-induction_P Parameter: Light Value: Far-red vs. White
  misc_feature: MA Experiment 20001450 PARAMETER Experiment Name: At_Far-red-induction_P Parameter: Organism Value: A. thaliana
  misc_feature: MA Experiment 20001450 PARAMETER Experiment Name: At_Far-red-induction_P Parameter: Plant Line Value: Columbia
  misc_feature: MA Experiment 20001450 PARAMETER Experiment Name: At_Far-red-induction_P Parameter: Timepoint (hr) Value: 8
  misc_feature: MA Experiment 20001450 PARAMETER Experiment Name: At_Far-red-induction_P Parameter: Tissue Value: Whole Plant
  misc_feature: MA Experiment ID: 20001451 Result: Down-regulated in Transcription
  misc_feature: MA Experiment 20001451 PARAMETER Experiment Name: At_Far-red-induction_P Parameter: Age (day) Value: 7
  misc_feature: MA Experiment 20001451 PARAMETER Experiment Name: At_Far-red-induction_P Parameter: Light Value: Far-red vs. White
  misc_feature: MA Experiment 20001451 PARAMETER Experiment Name: At_Far-red-induction_P Parameter: Organism Value: A. thaliana
  misc_feature: MA Experiment 20001451 PARAMETER Experiment Name: At_Far-red-induction_P Parameter: Plant Line Value: Columbia
  misc_feature: MA Experiment 20001451 PARAMETER Experiment Name: At_Far-red-induction_P Parameter: Timepoint (hr) Value: 24
  misc_feature: MA Experiment 20001451 PARAMETER Experiment Name: At_Far-red-induction_P Parameter: Tissue Value: Whole Plant
  misc_feature: MA Experiment ID: 20001458 Result: Up-regulated in Transcription
  misc_feature: MA Experiment 20001458 PARAMETER Experiment Name: At_50mM_NH4NO3_L-to-H_P Parameter: Age (day) Value: Undefined
  misc_feature: MA Experiment 20001458 PARAMETER Experiment Name: At_50mM_NH4NO3_L-to-H_P Parameter: Organism Value: Undefined
  misc_feature: MA Experiment 20001458 PARAMETER Experiment Name: At_50mM_NH4NO3_L-to-H_P Parameter: Plant Line Value: Undefined
  misc_feature: MA Experiment 20001458 PARAMETER Experiment Name: At_50mM_NH4NO3_L-to-H_P Parameter: Timepoint (hr) Value: 2
  misc_feature: MA Experiment 20001458 PARAMETER Experiment Name: At_50mM_NH4NO3_L-to-H_P Parameter: Tissue Value: Siliques
  misc_feature: MA Experiment 20001458 PARAMETER Experiment Name: At_50mM_NH4NO3_L-to-H_P Parameter: Treatment Value: 50mM NH4NO3 vs. 100mM Manitol
  misc_feature: MA Experiment ID: 20001554 Result: Up-regulated in Transcription
  misc_feature: MA Experiment 20001554 PARAMETER Experiment Name: At_Drought_Soil_Dry_P Parameter: Age (day) Value: 21
  misc_feature: MA Experiment 20001554 PARAMETER Experiment Name: At_Drought_Soil_Dry_P Parameter: Organism Value: A. thaliana
  misc_feature: MA Experiment 20001554 PARAMETER Experiment Name: At_Drought_Soil_Dry_P Parameter: Plant Line Value: WS
  misc_feature: MA Experiment 20001554 PARAMETER Experiment Name: At_Drought_Soil_Dry_P Parameter: Post Timepoint (hr) Value: None
  misc_feature: MA Experiment 20001554 PARAMETER Experiment Name: At_Drought_Soil_Dry_P Parameter: Post-Treatment Value: None
  misc_feature: MA Experiment 20001554 PARAMETER Experiment Name: At_Drought_Soil_Dry_P Parameter: Timepoint (day) Value: 7
  misc_feature: MA Experiment 20001554 PARAMETER Experiment Name: At_Drought_Soil_Dry_P Parameter: Treatment Value: Drought vs. No Drought
  misc_feature: MA Experiment ID: 20001556 Result: Up-regulated in Transcription
  misc_feature: MA Experiment 20001556 PARAMETER Experiment Name: At_Drought_Soil_Dry_P Parameter: Age (day) Value: 26
  misc_feature: MA Experiment 20001556 PARAMETER Experiment Name: At_Drought_Soil_Dry_P Parameter: Organism Value: A. thaliana
  misc_feature: MA Experiment 20001556 PARAMETER Experiment Name: At_Drought_Soil_Dry_P Parameter: Plant Line Value: WS
  misc_feature: MA Experiment 20001556 PARAMETER Experiment Name: At_Drought_Soil_Dry_P Parameter: Post Timepoint (hr) Value: None
  misc_feature: MA Experiment 20001556 PARAMETER Experiment Name: At_Drought_Soil_Dry_P Parameter: Post-Treatment Value: None
  misc_feature: MA Experiment 20001556 PARAMETER Experiment Name: At_Drought_Soil_Dry_P Parameter: Timepoint (day) Value: 12
  misc_feature: MA Experiment 20001556 PARAMETER Experiment Name: At_Drought_Soil_Dry_P Parameter: Treatment Value: Drought vs. No Drought
  misc_feature: MA Experiment ID: 20001560 Result: Down-regulated in Transcription
  misc_feature: MA Experiment 20001560 PARAMETER Experiment Name: At_Drought_Soil_Dry_P Parameter: Age (day) Value: 28
  misc_feature: MA Experiment 20001560 PARAMETER Experiment Name: At_Drought_Soil_Dry_P Parameter: Organism Value: A. thaliana
  misc_feature: MA Experiment 20001560 PARAMETER Experiment Name: At_Drought_Soil_Dry_P Parameter: Plant Line Value: WS
  misc_feature: MA Experiment 20001560 PARAMETER Experiment Name: At_Drought_Soil_Dry_P Parameter: Post Timepoint (hr) Value: None
  misc_feature: MA Experiment 20001560 PARAMETER Experiment Name: At_Drought_Soil_Dry_P Parameter: Post-Treatment Value: None
  misc_feature: MA Experiment 20001560 PARAMETER Experiment Name: At_Drought_Soil_Dry_P Parameter: Timepoint (day) Value: 14
  misc_feature: MA Experiment 20001560 PARAMETER Experiment Name: At_Drought_Soil_Dry_P Parameter: Treatment Value: Drought vs. No Drought
acgttgatcacattcttctctatcccaccaattccgatgtccctcgccgtcaagatcattcctctccagtatcccgattccacctcttctgatcctcactgtcactccattccctttaatgatttcttctcccgatggacggcgaagatcaagcgcatgacgttcttcgactggattgatgcaatatttccttgcttcctttggattcggacttaccggtggcatcagtactttaagctcgatcttatggctggtatcaccgtcggtatcatgcttgttccccaggcaatgtcgtatgcaaggttagctgggcttcaaccaatatacggtctatactcctcatttgtgccggtattcgtgtatgccgtcttcggttcatcccgtcagcttgcagttggacctgtagcattagtttcccttctcgtttctaatgccttgagtggaattgttgatccatctgaagaattatacactgagcttgccattttgttggctcttatggtcggaatatttgagagcattatggggttcttgaggcttggatggcttattcgtttcataagtcactcagtcatttctggatttacaactgcttcagctgttgtaattgggttatcccaactgaaatacttcctagggtatagcgtttctcggagcagcaagattatgccagtaattgatagcataatagctggagctgatcagtttaagtggccacctttcttgttgggatgtaccattctggtgatccttttagtaatgaagcatgtgggaaaagcaaagaaggaacttcggttcatacgagcagcaggaccgctcacaggtcttgctcttggtacaatcattgcaaaagtgttccatccaccttccatcacactggtgggagatatacctcagggacttccaaagttttctttcccaaaaagttttgatcatgccaaattactgcttccaacatcggctctcattactggtgttgccatcttggaatctgtaggtattgcgaaagcactagccgcgaaaaatagatacgaattggattcaaattcagagttgtttggtcttggcgttgcaaatatatttgggtcactattctctgcatatccaactacaggatccttttctaggtcagctgtgaatagcgaaagtgaagccaagactggtctatcaggccttgtaacaggaatcatcattggatgttctctactgttcttgaccccaatgttcaaatttataccacagtgtgctttagcagcaatagttatctctgctgttagtggtttggtggactatgaaggggcaatctttctgtggcgtgtggacaagagagattttactctttggaccatcactagcaccaccactttgttctttggaatagagattggggtcctcattggtgttggtttttcacttgcatttgttatacacgagtctgcaaaccctcatatagctgtcttggggcgtcttccagggaccactgtgtacagaaacatgaaacagtatccagaggcatacacttacaacgggattgtgattgttcgaatcgatgctcccatttattttgccaacataagctacatcaaggacaggctacgagaatatgaagttgctatcgacaaacacacaagcaagggcccagatatggagaggatctactttgttatcctggaaatgtctcctgtcacatacatcgactcgagcgctgtagaagctttaaaagatttgtacgaggagtataaaacaaggggcattcagctagcgatttcgaacccaaacaaagaggttctcttgactctagcaagagcaggcattgtggaacttattggcaaagaatggttcttcgtgagagtacatgacgcagtccaagtttgtgttcattacgtcaatagacccacagatgtagaagaaagcagcaaaccaagcttatggagaagaagcggcctgaaaaactcatcgacctacactgaagttgaatcgaacatagttttagaggaaccattgttgtcaagagagaaatagagacattgaacacttcgattctttttacaataatgtaatgtatgtatcaaataaagcattcactttggttgag

SEQ ID NO: 107829 - protein, 673 aa, Arabidopsis thaliana
  peptide (1)..(673): Ceres Seq. ID no. 13651810
  misc_feature (222)..(462): Pfam Name: Permease family Pfam Description: Permease family
  misc_feature (7)..(673): Homolog of NCBI NO: 15240652 NR Description: sulfate transporter [Arabidopsis thaliana]
  misc_feature (7)..(673): Homolog of NCBI NO: 2626753 NR Description: sulfate transporter [Arabidopsis thaliana]
  misc_feature (7)..(673): Homolog of NCBI NO: 16197734 NR Description: sulfate transporter [Brassica napus]
  misc_feature (91)..(653): Homolog of NCBI NO: 37998897 NR Description: sulfate transporter [Brassica oleracea var.
  misc_feature (16)..(659): Homolog of NCBI NO: 20162451 NR Description: putative sulphate transporter [Oryza sativa]
  misc_feature (7)..(372): Homolog of NCBI NO: 11022647 NR Description: sulfate transporter-like protein [Arabidopsis
  misc_feature (7)..(335): Homolog of NCBI NO: 26453094 NR Description: putative sulfate transporter [Arabidopsis
  misc_feature (35)..(625): Homolog of NCBI NO: 11279063 NR Description: sulfate transport protein [imported] - thaliana >gi|3777483|dbj|BAA33932.1| sulfate transporter
  misc_feature (59)..(625): Homolog of NCBI NO: 13487717 NR Description: sulfate transporter 2 [Lycopersicon esculentum]
  misc_feature (59)..(625): Homolog of NCBI NO: 14270243 NR Description: sulfate transporter [Brassica napus]
TLITFFSIPPIPMSLAVKIIPLQYPDSTSSDPHCHSIPFNDFFSRWTAKIKRMTFFDWIDAIFPCFLWIRTYRWHQYFKLDLMAGITVGIMLVPQAMSYARLAGLQPIYGLYSSFVPVFVYAVFGSSRQLAVGPVALVSLLVSNALSGIVDPSEELYTELAILLALMVGIFESIMGFLRLGWLIRFISHSVISGFTTASAVVIGLSQLKYFLGYSVSRSSKIMPVIDSIIAGADQFKWPPFLLGCTILVILLVMKHVGKAKKELRFIRAAGPLTGLALGTIIAKVFHPPSITLVGDIPQGLPKFSFPKSFDHAKLLLPTSALITGVAILESVGIAKALAAKNRYELDSNSELFGLGVANIFGSLFSAYPTTGSFSRSAVNSESEAKTGLSGLVTGIIIGCSLLFLTPMFKFIPQCALAAIVISAVSGLVDYEGAIFLWRVDKRDFTLWTITSTTTLFFGIEIGVLIGVGFSLAFVIHESANPHIAVLGRLPGTTVYRNMKQYPEAYTYNGIVIVRIDAPIYFANISYIKDRLREYEVAIDKHTSKGPDMERIYFVILEMSPVTYIDSSAVEALKDLYEEYKTRGIQLAISNPNKEVLLTLARAGIVELIGKEWFFVRVHDAVQVCVHYVNRPTDVEESSKPSLWRRSGLKNSSTYTEVESNIVLEEPLLSREK

SEQ ID NO: 107830 - protein, 661 aa, Arabidopsis thaliana
  peptide (1)..(661): Ceres Seq. ID no. 13651811
  misc_feature (210)..(450): Pfam Name: Permease family Pfam Description: Permease family
  misc_feature (1)..(661): Homolog of NCBI NO: 15240652 NR Description: sulfate transporter [Arabidopsis thaliana]
  misc_feature (1)..(661): Homolog of NCBI NO: 2626753 NR Description: sulfate transporter [Arabidopsis thaliana]
  misc_feature (1)..(661): Homolog of NCBI NO: 16197734 NR Description: sulfate transporter [Brassica napus]
  misc_feature (79)..(641): Homolog of NCBI NO: 37998897 NR Description: sulfate transporter [Brassica oleracea var.
  misc_feature (4)..(647): Homolog of NCBI NO: 20162451 NR Description: putative sulphate transporter [Oryza sativa]
  misc_feature (1)..(360): Homolog of NCBI NO: 11022647 NR Description: sulfate transporter-like protein [Arabidopsis
  misc_feature (1)..(323): Homolog of NCBI NO: 26453094 NR Description: putative sulfate transporter [Arabidopsis
  misc_feature (23)..(613): Homolog of NCBI NO: 11279063 NR Description: sulfate transport protein [imported] - thaliana >gi|3777483|dbj|BAA33932.1| sulfate transporter
  misc_feature (47)..(613): Homolog of NCBI NO: 13487717 NR Description: sulfate transporter 2 [Lycopersicon esculentum]
  misc_feature (47)..(613): Homolog of NCBI NO: 14270243 NR Description: sulfate transporter [Brassica napus]
MSLAVKIIPLQYPDSTSSDPHCHSIPFNDFFSRWTAKIKRMTFFDWIDAIFPCFLWIRTYRWHQYFKLDLMAGITVGIMLVPQAMSYARLAGLQPIYGLYSSFVPVFVYAVFGSSRQLAVGPVALVSLLVSNALSGIVDPSEELYTELAILLALMVGIFESIMGFLRLGWLIRFISHSVISGFTTASAVVIGLSQLKYFLGYSVSRSSKIMPVIDSIIAGADQFKWPPFLLGCTILVILLVMKHVGKAKKELRFIRAAGPLTGLALGTIIAKVFHPPSITLVGDIPQGLPKFSFPKSFDHAKLLLPTSALITGVAILESVGIAKALAAKNRYELDSNSELFGLGVANIFGSLFSAYPTTGSFSRSAVNSESEAKTGLSGLVTGIIIGCSLLFLTPMFKFIPQCALAAIVISAVSGLVDYEGAIFLWRVDKRDFTLWTITSTTTLFFGIEIGVLIGVGFSLAFVIHESANPHIAVLGRLPGTTVYRNMKQYPEAYTYNGIVIVRIDAPIYFANISYIKDRLREYEVAIDKHTSKGPDMERIYFVILEMSPVTYIDSSAVEALKDLYEEYKTRGIQLAISNPNKEVLLTLARAGIVELIGKEWFFVRVHDAVQVCVHYVNRPTDVEESSKPSLWRRSGLKNSSTYTEVESNIVLEEPLLSREK

SEQ ID NO: 107831 - protein, 621 aa, Arabidopsis thaliana; identical to SEQ ID NO: 90068
  peptide (1)..(621): Ceres Seq. ID no. 13651812
  misc_feature (170)..(410): Pfam Name: Permease family Pfam Description: Permease family
  misc_feature (1)..(621): Homolog of NCBI NO: 15240652 NR Description: sulfate transporter [Arabidopsis thaliana]
  misc_feature (1)..(621): Homolog of NCBI NO: 2626753 NR Description: sulfate transporter [Arabidopsis thaliana]
  misc_feature (1)..(621): Homolog of NCBI NO: 16197734 NR Description: sulfate transporter [Brassica napus]
  misc_feature (39)..(601): Homolog of NCBI NO: 37998897 NR Description: sulfate transporter [Brassica oleracea var.
  misc_feature (1)..(607): Homolog of NCBI NO: 20162451 NR Description: putative sulphate transporter [Oryza sativa]
  misc_feature (1)..(320): Homolog of NCBI NO: 11022647 NR Description: sulfate transporter-like protein [Arabidopsis
  misc_feature (1)..(283): Homolog of NCBI NO: 26453094 NR Description: putative sulfate transporter [Arabidopsis
  misc_feature (1)..(573): Homolog of NCBI NO: 11279063 NR Description: sulfate transport protein [imported] - thaliana >gi|3777483|dbj|BAA33932.1| sulfate transporter
  misc_feature (7)..(573): Homolog of NCBI NO: 13487717 NR Description: sulfate transporter 2 [Lycopersicon esculentum]
  misc_feature (7)..(573): Homolog of NCBI NO: 14270243 NR Description: sulfate transporter [Brassica napus]

SEQ ID NO: 107832 - DNA, 2097 bp, Arabidopsis thaliana
  misc_feature (1)..(2097): Ceres Seq. ID no. 13651817
  misc_feature: MA Experiment ID: 20000227 Result: Down-regulated in Transcription
  misc_feature: MA Experiment 20000227 PARAMETER Experiment Name: At_Root-Tips-vs-Tops_P Parameter: Tissue Value: Root Tips vs. Root Tops
  misc_feature: MA Experiment ID: 20000264 Result: Up-regulated in Transcription
  misc_feature: MA Experiment 20000264 PARAMETER Experiment Name: At_Open_Flower_P Parameter: Age (day) Value: 21
  misc_feature: MA Experiment 20000264 PARAMETER Experiment Name: At_Open_Flower_P Parameter: Plant Line Value: WS
  misc_feature: MA Experiment 20000264 PARAMETER Experiment Name: At_Open_Flower_P Parameter: Tissue Value: Open Flower vs. Whole Plant
  misc_feature: MA Experiment ID: 20000794 Result: Up-regulated in Transcription
  misc_feature: MA Experiment 20000794 PARAMETER Experiment Name: At_Petals_P Parameter: Age (day) Value: 23-25 days
  misc_feature: MA Experiment 20000794 PARAMETER Experiment Name: At_Petals_P Parameter: Plant Line Value: WS
  misc_feature: MA Experiment 20000794 PARAMETER Experiment Name: At_Petals_P Parameter: Tissue Value: Petals vs. Whole plant
  misc_feature: MA Experiment ID: 20001560 Result: Down-regulated in Transcription
  misc_feature: MA Experiment 20001560 PARAMETER Experiment Name: At_Drought_Soil_Dry_P Parameter: Age (day) Value: 28
  misc_feature: MA Experiment 20001560 PARAMETER Experiment Name: At_Drought_Soil_Dry_P Parameter: Organism Value: A. thaliana
  misc_feature: MA Experiment 20001560 PARAMETER Experiment Name: At_Drought_Soil_Dry_P Parameter: Plant Line Value: WS
  misc_feature: MA Experiment 20001560 PARAMETER Experiment Name: At_Drought_Soil_Dry_P Parameter: Post Timepoint (hr) Value: None
  misc_feature: MA Experiment 20001560 PARAMETER Experiment Name: At_Drought_Soil_Dry_P Parameter: Post-Treatment Value: None
  misc_feature: MA Experiment 20001560 PARAMETER Experiment Name: At_Drought_Soil_Dry_P Parameter: Timepoint (day) Value: 14
  misc_feature: MA Experiment 20001560 PARAMETER Experiment Name: At_Drought_Soil_Dry_P Parameter: Treatment Value: Drought vs. No Drought
ggtgttggtggtgaccattcatgggttgtttaagaagcttagtaagaaggaaacaattcgactcttcaaatggcaaagcagagactcatcatcatcaccaacagcttgcaaaagcgttgacctttcctcacttgattgccattggtgttggatcaacaattggagcaggggtttatattcttgtgggaacagtagctagagagcattcaggacctgctcttgctttatccttccttatagctggaatttctgctgccctttctgcgttttgttatgcggaactatctagtcgttttccctctgctgggagtgcctatcattattcttacatttgcattggtgaaggtgttgcgtggttgattggctgggcgctgattttggaatacacaattggtggttcaacagttgcccgcggcatatctccaaatctggcaatgattttcggtggtgaagattgtctgcctacaatattagctcgtcatcaaatcccaggccttgatattgttgttgacccgtgtgctgctgtgctagtgttcattgtaacaggactttgttgccttggagtaaaggagagcacatttgctcagggaattgtaacaacagcaaatgtctttgtcatgatatttgtcatagtagctggaagctatttgtgtttcaagacaggttgggttggttatgaacttccaacggggtattttccttacggggttgatggaatgcttactggatctgctactgtcttctttgcctacatcgggtttgatacagttgcaagtatggcagaggaggtgaaaaatccccggcgggatttaccgctcggtattgggatttcgctcctgctttgttgtttgctgtacatgatggtgtctgttgttattgttggtttagtgccgtattatgctatggaccctgacactccaatatcatccgcattttctagtcatggaattcaatgggctgcatatttgataaatttaggtgctgtcatggctctctgttctgcattaatgggctccattctccctcagccgcggattctgatggcaatggctagggatggtctcttgccttcatatttctcatatgtgaatcaacgcacgcaggttccaattaatggcaccataaccactggtgtttgtgcagcaatcttagctttctttatggatgtttcgcaactggcgggaatggtgagtgtcgggacacttgttgcatttacaatggttgcaatatcattgttgatagtcagatatgttgttcctccagatgaggtacctcttccctcatcacttcaagaaaactcatccagtcacgtcggaacttccatccgtagtaaacaacctttacttggcaaagtggatgattcagttgtcgataaggaaaatgctccaggaagttgggttctcaacaaaaaaaacagacggaaatttgctggttggagcattatgttcacttgtattggaaacttccttttaagctatgcagcgtcaagcttcctcttgccaggactcctccgatattctctatgtggtgttggtggattgttccttcttgtcggtttgattgttctgatttgcatagatcaggatgatgctagacacagttttgggcattctggaggcttcatttgcccgtttgttccgcttttgcctatagtttgcattcttatcaacatgtatctcttggtaaaccttggagctgcgacgtgggttcgtgtatcggtttggctgttcctcggagtggttgtttacattttctatgggagaagaaacagctctcttgtgaatgctgtttatgtctccactgctcatctccaggagattcgtcgcacttctggacattctttggcttaagtctacatgaaaccatcaatggaagctcaaggaagtgggagtttcctttgtaaaatatgttcaacaaaatctgtataataatatatttttgagattggattatcctgtgtaaatacaaagttcaatgccactgctcataggcattgtatattttttttaaaacctaaatggtctaaatgttatctggtggactattgtatattttttgaactgctgaatttggtggactatgttgaatctggcgact

SEQ ID NO: 107833 - protein, 609 aa, Arabidopsis thaliana
  peptide (1)..(609): Ceres Seq. ID no. 13651818
  misc_feature (2)..(609): Homolog of NCBI NO: 30696198 NR Description: expressed protein [Arabidopsis thaliana]
  misc_feature (2)..(609): Homolog of NCBI NO: 23306414 NR Description: Unknown protein [Arabidopsis thaliana]
  misc_feature (2)..(604): Homolog of NCBI NO: 29244640 NR Description: putative cationic amino acid transporter [Oryza
  misc_feature (4)..(606): Homolog of NCBI NO: 22330822 NR Description: cationic amino acid transporter -related thaliana] >gi|17064864|gb|AAL32586.1| putative cationic amino transporter [Arabidopsis thaliana] >gi|30725412|gb|AAP37728.1|
  misc_feature (4)..(606): Homolog of NCBI NO: 6006869 NR Description: putative cationic amino acid transporter
  misc_feature (43)..(591): Homolog of NCBI NO: 37534696 NR Description: putative cationic amino acid transporter -like
  misc_feature (164)..(580): Homolog of NCBI NO: 539952 NR Description: ecotropic retrovirus receptor - rat
  misc_feature (164)..(580): Homolog of NCBI NO: 6981556 NR Description: solute carrier family 7, member 1; Solute carrier
  misc_feature (1)..(207): Homolog of NCBI NO: 539952 NR Description: ecotropic retrovirus receptor - rat
  misc_feature (1)..(207): Homolog of NCBI NO: 6981556 NR Description: solute carrier family 7, member 1; Solute carrier
MGCLRSLVRRKQFDSSNGKAETHHHHQQLAKALTFPHLIAIGVGSTIGAGVYILVGTVAREHSGPALALSFLIAGISAALSAFCYAELSSRFPSAGSAYHYSYICIGEGVAWLIGWALILEYTIGGSTVARGISPNLAMIFGGEDCLPTILARHQIPGLDIVVDPCAAVLVFIVTGLCCLGVKESTFAQGIVTTANVFVMIFVIVAGSYLCFKTGWVGYELPTGYFPYGVDGMLTGSATVFFAYIGFDTVASMAEEVKNPRRDLPLGIGISLLLCCLLYMMVSVVIVGLVPYYAMDPDTPISSAFSSHGIQWAAYLINLGAVMALCSALMGSILPQPRILMAMARDGLLPSYFSYVNQRTQVPINGTITTGVCAAILAFFMDVSQLAGMVSVGTLVAFTMVAISLLIVRYVVPPDEVPLPSSLQENSSSHVGTSIRSKQPLLGKVDDSVVDKENAPGSWVLNKKNRRKFAGWSIMFTCIGNFLLSYAASSFLLPGLLRYSLCGVGGLFLLVGLIVLICIDQDDARHSFGHSGGFICPFVPLLPIVCILINMYLLVNLGAATWVRVSVWLFLGVVVYIFYGRRNSSLVNAVYVSTAHLQEIRRTSGHSLA

SEQ ID NO: 107834 - protein, 471 aa, Arabidopsis thaliana
  peptide (1)..(471): Ceres Seq. ID no. 13651819
  misc_feature (1)..(471): Homolog of NCBI NO: 30696198 NR Description: expressed protein [Arabidopsis thaliana]
  misc_feature (1)..(471): Homolog of NCBI NO: 23306414 NR Description: Unknown protein [Arabidopsis thaliana]
  misc_feature (1)..(466): Homolog of NCBI NO: 29244640 NR Description: putative cationic amino acid transporter [Oryza
  misc_feature (1)..(468): Homolog of NCBI NO: 22330822 NR Description: cationic amino acid transporter -related thaliana] >gi|17064864|gb|AAL32586.1| putative cationic amino transporter [Arabidopsis thaliana] >gi|30725412|gb|AAP37728.1|
  misc_feature (1)..(468): Homolog of NCBI NO: 6006869 NR Description: putative cationic amino acid transporter
  misc_feature (1)..(453): Homolog of NCBI NO: 37534696 NR Description: putative cationic amino acid transporter -like
  misc_feature (26)..(442): Homolog of NCBI NO: 539952 NR Description: ecotropic retrovirus receptor - rat
  misc_feature (26)..(442): Homolog of NCBI NO: 6981556 NR Description: solute carrier family 7, member 1; Solute carrier
  misc_feature (1)..(69): Homolog of NCBI NO: 539952 NR Description: ecotropic retrovirus receptor - rat
  misc_feature (1)..(69): Homolog of NCBI NO: 6981556 NR Description: solute carrier family 7, member 1; Solute carrier
MIFGGEDCLPTILARHQIPGLDIVVDPCAAVLVFIVTGLCCLGVKESTFAQGIVTTANVFVMIFVIVAGSYLCFKTGWVGYELPTGYFPYGVDGMLTGSATVFFAYIGFDTVASMAEEVKNPRRDLPLGIGISLLLCCLLYMMVSVVIVGLVPYYAMDPDTPISSAFSSHGIQWAAYLINLGAVMALCSALMGSILPQPRILMAMARDGLLPSYFSYVNQRTQVPINGTITTGVCAAILAFFMDVSQLAGMVSVGTLVAFTMVAISLLIVRYVVPPDEVPLPSSLQENSSSHVGTSIRSKQPLLGKVDDSVVDKENAPGSWVLNKKNRRKFAGWSIMFTCIGNFLLSYAASSFLLPGLLRYSLCGVGGLFLLVGLIVLICIDQDDARHSFGHSGGFICPFVPLLPIVCILINMYLLVNLGAATWVRVSVWLFLGVVVYIFYGRRNSSLVNAVYVSTAHLQEIRRTSGHSLA

SEQ ID NO: 107835 - protein, 410 aa, Arabidopsis thaliana
  peptide (1)..(410): Ceres Seq. ID no. 13651820
  misc_feature (1)..(410): Homolog of NCBI NO: 30696198 NR Description: expressed protein [Arabidopsis thaliana]
  misc_feature (1)..(410): Homolog of NCBI NO: 23306414 NR Description: Unknown protein [Arabidopsis thaliana]
  misc_feature (1)..(405): Homolog of NCBI NO: 29244640 NR Description: putative cationic amino acid transporter [Oryza
  misc_feature (1)..(407): Homolog of NCBI NO: 22330822 NR Description: cationic amino acid transporter -related thaliana] >gi|17064864|gb|AAL32586.1| putative cationic amino transporter [Arabidopsis thaliana] >gi|30725412|gb|AAP37728.1|
  misc_feature (1)..(407): Homolog of NCBI NO: 6006869 NR Description: putative cationic amino acid transporter
  misc_feature (1)..(392): Homolog of NCBI NO: 37534696 NR Description: putative cationic amino acid transporter -like
  misc_feature (1)..(381): Homolog of NCBI NO: 539952 NR Description: ecotropic retrovirus receptor - rat
  misc_feature (1)..(381): Homolog of NCBI NO: 6981556 NR Description: solute carrier family 7, member 1; Solute carrier
  misc_feature (1)..(381): Homolog of NCBI NO: 18181964 NR Description: ecotropic retrovirus receptor [Rattus norvegicus]
  misc_feature (1)..(211): Homolog of NCBI NO: 31211135 NR Description: ENSANGP00000016984 [Anopheles gambiae]
MIFVIVAGSYLCFKTGWVGYELPTGYFPYGVDGMLTGSATVFFAYIGFDTVASMAEEVKNPRRDLPLGIGISLLLCCLLYMMVSVVIVGLVPYYAMDPDTPISSAFSSHGIQWAAYLINLGAVMALCSALMGSILPQPRILMAMARDGLLPSYFSYVNQRTQVPINGTITTGVCAAILAFFMDVSQLAGMVSVGTLVAFTMVAISLLIVRYVVPPDEVPLPSSLQENSSSHVGTSIRSKQPLLGKVDDSVVDKENAPGSWVLNKKNRRKFAGWSIMFTCIGNFLLSYAASSFLLPGLLRYSLCGVGGLFLLVGLIVLICIDQDDARHSFGHSGGFICPFVPLLPIVCILINMYLLVNLGAATWVRVSVWLFLGVVVYIFYGRRNSSLVNAVYVSTAHLQEIRRTSGHSLA

SEQ ID NO: 107836 - DNA, 803 bp, Arabidopsis thaliana
  misc_feature (1)..(803): Ceres Seq. ID no. 13651839
  misc_feature: MA Experiment ID: 20000495 Result: Down-regulated in Transcription
  misc_feature: MA Experiment 20000495 PARAMETER Experiment Name: At_Guard_Cells_P Parameter: Harvest Date Value: 8/2/2002
  misc_feature: MA Experiment 20000495 PARAMETER Experiment Name: At_Guard_Cells_P Parameter: Organism Value: A. thaliana
  misc_feature: MA Experiment 20000495 PARAMETER Experiment Name: At_Guard_Cells_P Parameter: Tissue Value: Guard Cells vs. Leaves
cttacgatcgctatctccagagcgtgcaatcaggagaaggtggttctgtttccatgggaagatcaggaggaggaggaggaggaggaggaggtaacgttcaaaccatagatgattttatgttgagacgtggtggagttctccctttagaccatggtccaaatggtcacaccattggttttgatcccccagaacctgttggtaggcgtaacctaccttcagatgcatccaacactttatatgttgaaggacttccttctaattgctctaggagggaagtagctcatatatttcgaccttttgtaggatacagagaagtgagacttgtgaccaaagactccaaacatcggaacggagatcctattgttctttgctttgttgattttacaaaccctgcctgtgctgcgactgctctgagcgccttacaaggctatcgaatggacgaaaacgagtctgattccaagttcctgcggctccagttttctaggaaaccaggttcaagaccaggacaaagaggaagaaggtgatgactcagggacattgtggtacgtcaaccaaatggtgacttgtggtatctcctttgaaggaaatatacatcctccctttccaagtataatctcaatgaaatcgcacattacatcacttatgtccttgaagcaacctgagtcgagagaaacaaagatgcgcggagagtgtagaatatgaggttatagaaactgaaaaagactcttttaacatatatatactgtttttgttcccttcctagatttcaagctcatatgtcatgttatcaagttgtgttgtag

SEQ ID NO: 107837 - protein, 173 aa, Arabidopsis thaliana
  peptide (1)..(173): Ceres Seq. ID no. 13651840
  misc_feature (78)..(152): Pfam Name: RNA recognition motif. (a.k.a. RRM, RBD, or RNP domain) Pfam Description: RNA recognition motif. (a.k.a. RRM, RBD, or RNP
  misc_feature (1)..(173): Homolog of NCBI NO: 30699215 NR Description: expressed protein [Arabidopsis thaliana]
  misc_feature (18)..(173): Homolog of NCBI NO: 26450151 NR Description: unknown protein [Arabidopsis thaliana]
  misc_feature (1)..(168): Homolog of NCBI NO: 23304837 NR Description: RNA-binding protein [Medicago truncatula]
  misc_feature (1)..(91): Homolog of NCBI NO: 25513502 NR Description: F16F4.3 protein - Arabidopsis thaliana
  misc_feature (113)..(173): Homolog of NCBI NO: 25513502 NR Description: F16F4.3 protein - Arabidopsis thaliana
  misc_feature (1)..(99): Homolog of NCBI NO: 25406479 NR Description: hypothetical protein F22K20.4 [imported] - thaliana >gi|2829909|gb|AAC00617.1| Hypothetical protein
  misc_feature (1)..(97): Homolog of NCBI NO: 25553563 NR Description: OSJNBa0038F22.13 [Oryza sativa (japonica
  misc_feature (95)..(168): Homolog of NCBI NO: 25553563 NR Description: OSJNBa0038F22.13 [Oryza sativa (japonica
  misc_feature (115)..(173): Homolog of NCBI NO: 15218968 NR Description: hypothetical protein [Arabidopsis thaliana]
YDRYLQSVQSGEGGSVSMGRSGGGGGGGGGNVQTIDDFMLRRGGVLPLDHGPNGHTIGFDPPEPVGRRNLPSDASNTLYVEGLPSNCSRREVAHIFRPFVGYREVRLVTKDSKHRNGDPIVLCFVDFTNPACAATALSALQGYRMDENESDSKFLRLQFSRKPGSRPGQRGRR

SEQ ID NO: 107838 - protein, 156 aa, Arabidopsis thaliana
  peptide (1)..(156): Ceres Seq. ID no. 13651841
  misc_feature (61)..(135): Pfam Name: RNA recognition motif. (a.k.a. RRM, RBD, or RNP domain) Pfam Description: RNA recognition motif. (a.k.a. RRM, RBD, or RNP
  misc_feature (1)..(156): Homolog of NCBI NO: 30699215 NR Description: expressed protein [Arabidopsis thaliana]
  misc_feature (1)..(156): Homolog of NCBI NO: 26450151 NR Description: unknown protein [Arabidopsis thaliana]
  misc_feature (1)..(151): Homolog of NCBI NO: 23304837 NR Description: RNA-binding protein [Medicago truncatula]
  misc_feature (1)..(74): Homolog of NCBI NO: 25513502 NR Description: F16F4.3 protein - Arabidopsis thaliana
  misc_feature (96)..(156): Homolog of NCBI NO: 25513502 NR Description: F16F4.3 protein - Arabidopsis thaliana
  misc_feature (1)..(82): Homolog of NCBI NO: 25406479 NR Description: hypothetical protein F22K20.4 [imported] - thaliana >gi|2829909|gb|AAC00617.1| Hypothetical protein
  misc_feature (1)..(80): Homolog of NCBI NO: 25553563 NR Description: OSJNBa0038F22.13 [Oryza sativa (japonica
  misc_feature (78)..(151): Homolog of NCBI NO: 25553563 NR Description: OSJNBa0038F22.13 [Oryza sativa (japonica
  misc_feature (98)..(156): Homolog of NCBI NO: 15218968 NR Description: hypothetical protein [Arabidopsis thaliana]
MGRSGGGGGGGGGNVQTIDDFMLRRGGVLPLDHGPNGHTIGFDPPEPVGRRNLPSDASNTLYVEGLPSNCSRREVAHIFRPFVGYREVRLVTKDSKHRNGDPIVLCFVDFTNPACAATALSALQGYRMDENESDSKFLRLQFSRKPGSRPGQRGRR

SEQ ID NO: 107839 - protein, 135 aa, Arabidopsis thaliana
  peptide (1)..(135): Ceres Seq. ID no. 13651842
  misc_feature (40)..(114): Pfam Name: RNA recognition motif. (a.k.a. RRM, RBD, or RNP domain) Pfam Description: RNA recognition motif. (a.k.a. RRM, RBD, or RNP
  misc_feature (1)..(135): Homolog of NCBI NO: 30699215 NR Description: expressed protein [Arabidopsis thaliana]
  misc_feature (1)..(135): Homolog of NCBI NO: 26450151 NR Description: unknown protein [Arabidopsis thaliana]
  misc_feature (1)..(130): Homolog of NCBI NO: 23304837 NR Description: RNA-binding protein [Medicago truncatula]
  misc_feature (1)..(53): Homolog of NCBI NO: 25513502 NR Description: F16F4.3 protein - Arabidopsis thaliana
  misc_feature (75)..(135): Homolog of NCBI NO: 25513502 NR Description: F16F4.3 protein - Arabidopsis thaliana
  misc_feature (1)..(61): Homolog of NCBI NO: 25406479 NR Description: hypothetical protein F22K20.4 [imported] - thaliana >gi|2829909|gb|AAC00617.1| Hypothetical protein
  misc_feature (1)..(59): Homolog of NCBI NO: 25553563 NR Description: OSJNBa0038F22.13 [Oryza sativa (japonica
  misc_feature (57)..(130): Homolog of NCBI NO: 25553563 NR Description: OSJNBa0038F22.13 [Oryza sativa (japonica
  misc_feature (77)..(135): Homolog of NCBI NO: 15218968 NR Description: hypothetical protein [Arabidopsis thaliana]
MLRRGGVLPLDHGPNGHTIGFDPPEPVGRRNLPSDASNTLYVEGLPSNCSRREVAHIFRPFVGYREVRLVTKDSKHRNGDPIVLCFVDFTNPACAATALSALQGYRMDENESDSKFLRLQFSRKPGSRPGQRGRR

SEQ ID NO: 107840 - DNA, 1691 bp, Arabidopsis thaliana
  misc_feature (1)..(1691): Ceres Seq. ID no. 13651850
  misc_feature: MA Experiment ID: 20000184 Result: Down-regulated in Transcription
  misc_feature: MA Experiment 20000184 PARAMETER Experiment Name: At_Shoots__P Parameter: Age (day) Value: 7
  misc_feature: MA Experiment 20000184 PARAMETER Experiment Name: At_Shoots__P Parameter: Tissue Value: Shoots vs. Whole Plant
  misc_feature: MA Experiment ID: 20000264 Result: Down-regulated in Transcription
  misc_feature: MA Experiment 20000264 PARAMETER Experiment Name: At_Open_Flower_P Parameter: Age (day) Value: 21
  misc_feature: MA Experiment 20000264 PARAMETER Experiment Name: At_Open_Flower_P Parameter: Plant Line Value: WS
  misc_feature: MA Experiment 20000264 PARAMETER Experiment Name: At_Open_Flower_P Parameter: Tissue Value: Open Flower vs. Whole Plant
  misc_feature: MA Experiment ID: 20000265 Result: Down-regulated in Transcription
  misc_feature: MA Experiment 20000265 PARAMETER Experiment Name: At_Open_Flower_P Parameter: Age (day) Value: 21
  misc_feature: MA Experiment 20000265 PARAMETER Experiment Name: At_Open_Flower_P Parameter: Plant Line Value: WS
  misc_feature: MA Experiment 20000265 PARAMETER Experiment Name: At_Open_Flower_P Parameter: Tissue Value: Closed Flower vs. Whole Plant
  misc_feature: MA Experiment ID: 20000286 Result: Down-regulated in Transcription
  misc_feature: MA Experiment 20000286 PARAMETER Experiment Name: At_Open_Flower_P Parameter: Age (day) Value: 21
  misc_feature: MA Experiment 20000286 PARAMETER Experiment Name: At_Open_Flower_P Parameter: Plant Line Value: WS
  misc_feature: MA Experiment 20000286 PARAMETER Experiment Name: At_Open_Flower_P Parameter: Tissue Value: Half Open vs. Whole Plant
  misc_feature: MA Experiment ID: 20000496 Result: Down-regulated in Transcription
  misc_feature: MA Experiment 20000496 PARAMETER Experiment Name: At_Guard_Cells_P Parameter: Harvest Date Value: 7/19/2002
  misc_feature: MA Experiment 20000496 PARAMETER Experiment Name: At_Guard_Cells_P Parameter: Organism Value: Canola
  misc_feature: MA Experiment 20000496 PARAMETER Experiment Name: At_Guard_Cells_P Parameter: Tissue Value: Guard Cells vs. Leaves
  misc_feature: MA Experiment ID: 20000794 Result: Down-regulated in Transcription
  misc_feature: MA Experiment 20000794 PARAMETER Experiment Name: At_Petals_P Parameter: Age (day) Value: 23-25 days
  misc_feature: MA Experiment 20000794 PARAMETER Experiment Name: At_Petals_P Parameter: Plant Line Value: WS
  misc_feature: MA Experiment 20000794 PARAMETER Experiment Name: At_Petals_P Parameter: Tissue Value: Petals vs. Whole plant
  misc_feature: MA Experiment ID: 20001555 Result: Down-regulated in Transcription
  misc_feature: MA Experiment 20001555 PARAMETER Experiment Name: At_Drought_Soil_Dry_P Parameter: Age (day) Value: 24
  misc_feature: MA Experiment 20001555 PARAMETER Experiment Name: At_Drought_Soil_Dry_P Parameter: Organism Value: A. thaliana
  misc_feature: MA Experiment 20001555 PARAMETER Experiment Name: At_Drought_Soil_Dry_P Parameter: Plant Line Value: WS
  misc_feature: MA Experiment 20001555 PARAMETER Experiment Name: At_Drought_Soil_Dry_P Parameter: Post Timepoint (hr) Value: None
  misc_feature: MA Experiment 20001555 PARAMETER Experiment Name: At_Drought_Soil_Dry_P Parameter: Post-Treatment Value: None
  misc_feature: MA Experiment 20001555 PARAMETER Experiment Name: At_Drought_Soil_Dry_P Parameter: Timepoint (day) Value: 10
  misc_feature: MA Experiment 20001555 PARAMETER Experiment Name: At_Drought_Soil_Dry_P Parameter: Treatment Value: Drought vs. No Drought
  misc_feature: MA Experiment ID: 20001560 Result: Down-regulated in Transcription
  misc_feature: MA Experiment 20001560 PARAMETER Experiment Name: At_Drought_Soil_Dry_P Parameter: Age (day) Value: 28
  misc_feature: MA Experiment 20001560 PARAMETER Experiment Name: At_Drought_Soil_Dry_P Parameter: Organism Value: A. thaliana
  misc_feature: MA Experiment 20001560 PARAMETER Experiment Name: At_Drought_Soil_Dry_P Parameter: Plant Line Value: WS
  misc_feature: MA Experiment 20001560 PARAMETER Experiment Name: At_Drought_Soil_Dry_P Parameter: Post Timepoint (hr) Value: None
  misc_feature: MA Experiment 20001560 PARAMETER Experiment Name: At_Drought_Soil_Dry_P Parameter: Post-Treatment Value: None
  misc_feature: MA Experiment 20001560 PARAMETER Experiment Name: At_Drought_Soil_Dry_P Parameter: Timepoint (day) Value: 14
  misc_feature: MA Experiment 20001560 PARAMETER Experiment Name: At_Drought_Soil_Dry_P Parameter: Treatment Value: Drought vs. No Drought
aattcgtcgagaaccaaaatggcaatcatcctctgtttcctcattctcttaccccttatcttaatcttcttgaaaaaactcaaacattcgaaatggaagcttcctccggggccaccaaagcttccgttcattggaaacttacaccaactccaagaactacctcccaggaatctcaaccacaagtacgggccagtgatacttctccgtttcggattcgtccccttggtcgtgatctcatctaaagaagcagcagaggaagttctcaagattcacgatcttgaatgttgtagccgaccagagacggccgggactagaaagatctcttacaactttaaagacatcggattcgcgccttacggtgaggaatggaaggccatgcgaaagctctcggtggtcgaactcttcaccgccaaaaaacatcagtattttaggtctatcagagaggaagagaatgacttgttggtcaagaaactaacagaattggctctgacacgatccccggtgaatttgaagaagacccttttcactttagtcgggagtattgtgtgtcggatcggattcgggtttaatcttcatgagtgtgagttcatcgatgaaaatagcatctccgaccttgttgacaagtctgagatacttgagatgacttctatgttctctgatttctttccaggaggaatcggtagattcatcgattggatctccggtcaaaacaagcgattcgataatgttttctcggacctcgacactttctttcaaaacattcttgattatcatcttaagcctggaagaaaagtagcagatagctctgatataatcgacgtggtgatcaacatgataaagaagcaagagaaagatggagactctttcaagctcacaacggatcatcttaaagggatgatctcggtaatgtttttggacctttattagttgtgtagactaatcttcccttttttaattaaatattcacacaatttttgttctgtcaggacatatttctagctggagttagcacaagtgcctccacactgatatgggcgataacagagttagttaggaaccgtaaagtgatgaagaaagtgcaagaagagattaggacaacactcggagacaagaaggagagaatcacagagcaagatctcaccaatctccattacttcaagcttgtggtcaaagagatattcagattacacccagcagttccatttttgctaccaagagagacattatctcatgtcaagattcaaggctacgacattcccgccaaaacccagatcatgatcaacgtctatgcgattgctcgcgatccaaaactttggacaaacccagatgagtttaaccctgacaggttcctagacagttccatagattacaaaggactaaattttgaactgttaccgtttgggtctggtaggagaatctgtccaggaatgacgatgggaatcacacttgttgaatttgctttattgaatttgctttacttctttggttggggtttgccggagaaggaagaggcggacaagatcatcaccggcaatggagttgctgttggcctagttcaagttcttctccactgaaaatctgatagatgtttctttttttggtttgcaacatttttttagtattggttatattgaatgcttgtgttttaaccttgcttttttctttagagacattctattaattagtaaccc

SEQ ID NO: 107841 - protein, 308 aa, Arabidopsis thaliana
  peptide (1)..(308): Ceres Seq. ID no. 13651851
  misc_feature (35)..(305): Pfam Name: Cytochrome P450 Pfam Description: Cytochrome P450
  misc_feature (7)..(305): Homolog of NCBI NO: 15222180 NR Description: cytochrome P450 71B29 [Arabidopsis thaliana]
  misc_feature (7)..(305): Homolog of NCBI NO: 15222177 NR Description: cytochrome P450 71B28 [Arabidopsis thaliana]
  misc_feature (7)..(305): Homolog of NCBI NO: 21618278 NR Description: putative cytochrome P450 monooxygenase
  misc_feature (7)..(305): Homolog of NCBI NO: 15222182 NR Description: cytochrome P450 71B7 [Arabidopsis thaliana]
  misc_feature (7)..(305): Homolog of NCBI NO: 15231632 NR Description: cytochrome P450 71B15 [Arabidopsis thaliana] Cytochrome P450 71B15 >gi|9279673|dbj|BAB01230.1| cytochrome p450 thaliana] >gi|26450995|dbj|BAC42604.1| putative cytochrome P450
  misc_feature (7)..(305): Homolog of NCBI NO: 15231526 NR Description: cytochrome P450 71B23 [Arabidopsis thaliana] Cytochrome P450 71B23 >gi|11994440|dbj|BAB02442.1| cytochrome
  misc_feature (7)..(308): Homolog of NCBI NO: 26449645 NR Description: putative cytochrome P450 monooxygenase
  misc_feature (7)..(305): Homolog of NCBI NO: 15231524 NR Description: cytochrome P450 71B21 [Arabidopsis thaliana] Cytochrome P450 71B21 >gi|11994438|dbj|BAB02440.1| cytochrome
  misc_feature (7)..(305): Homolog of NCBI NO: 15231520 NR Description: cytochrome P450 71B19 [Arabidopsis thaliana] Cytochrome P450 71B19 >gi|11994436|dbj|BAB02438.1| cytochrome [Arabidopsis thaliana] >gi|26451925|dbj|BAC43055.1| putative
  misc_feature (7)..(305): Homolog of NCBI NO: 21554748 NR Description: cytochrome P450, putative [Arabidopsis thaliana]
NSSRTKMAIILCFLILLPLILIFLKKLKHSKWKLPPGPPKLPFIGNLHQLQELPPRNLNHKYGPVILLRFGFVPLVVISSKEAAEEVLKIHDLECCSRPETAGTRKISYNFKDIGFAPYGEEWKAMRKLSVVELFTAKKHQYFRSIREEENDLLVKKLTELALTRSPVNLKKTLFTLVGSIVCRIGFGFNLHECEFIDENSISDLVDKSEILEMTSMFSDFFPGGIGRFIDWISGQNKRFDNVFSDLDTFFQNILDYHLKPGRKVADSSDIIDVVINMIKKQEKDGDSFKLTTDHLKGMISVMFLDLY

SEQ ID NO: 107842 - protein, 302 aa, Arabidopsis thaliana
  peptide (1)..(302): Ceres Seq. ID no. 13651852
  misc_feature (29)..(299): Pfam Name: Cytochrome P450 Pfam Description: Cytochrome P450
  misc_feature (1)..(299): Homolog of NCBI NO: 15222180 NR Description: cytochrome P450 71B29 [Arabidopsis thaliana]
  misc_feature (1)..(299): Homolog of NCBI NO: 15222177 NR Description: cytochrome P450 71B28 [Arabidopsis thaliana]
  misc_feature (1)..(299): Homolog of NCBI NO: 21618278 NR Description: putative cytochrome P450 monooxygenase
  misc_feature (1)..(299): Homolog of NCBI NO: 15222182 NR Description: cytochrome P450 71B7 [Arabidopsis thaliana]
  misc_feature (1)..(299): Homolog of NCBI NO: 15231632 NR Description: cytochrome P450 71B15 [Arabidopsis thaliana] Cytochrome P450 71B15 >gi|9279673|dbj|BAB01230.1| cytochrome p450 thaliana] >gi|26450995|dbj|BAC42604.1| putative cytochrome P450
  misc_feature (1)..(299): Homolog of NCBI NO: 15231526 NR Description: cytochrome P450 71B23 [Arabidopsis thaliana] Cytochrome P450 71B23 >gi|11994440|dbj|BAB02442.1| cytochrome
  misc_feature (1)..(302): Homolog of NCBI NO: 26449645 NR Description: putative cytochrome P450 monooxygenase
  misc_feature (1)..(299): Homolog of NCBI NO: 15231524 NR Description: cytochrome P450 71B21 [Arabidopsis thaliana] Cytochrome P450 71B21 >gi|11994438|dbj|BAB02440.1| cytochrome
  misc_feature (1)..(299): Homolog of NCBI NO: 15231520 NR Description: cytochrome P450 71B19 [Arabidopsis thaliana] Cytochrome P450 71B19 >gi|11994436|dbj|BAB02438.1| cytochrome [Arabidopsis thaliana] >gi|26451925|dbj|BAC43055.1| putative
  misc_feature (1)..(299): Homolog of NCBI NO: 21554748 NR Description: cytochrome P450, putative [Arabidopsis thaliana]
MAIILCFLILLPLILIFLKKLKHSKWKLPPGPPKLPFIGNLHQLQELPPRNLNHKYGPVILLRFGFVPLVVISSKEAAEEVLKIHDLECCSRPETAGTRKISYNFKDIGFAPYGEEWKAMRKLSVVELFTAKKHQYFRSIREEENDLLVKKLTELALTRSPVNLKKTLFTLVGSIVCRIGFGFNLHECEFIDENSISDLVDKSEILEMTSMFSDFFPGGIGRFIDWISGQNKRFDNVFSDLDTFFQNILDYHLKPGRKVADSSDIIDVVINMIKKQEKDGDSFKLTTDHLKGMISVMFLDLY

SEQ ID NO: 107843 - protein, 183 aa, Arabidopsis thaliana
  peptide (1)..(183): Ceres Seq. ID no. 13651853
  misc_feature (1)..(180): Pfam Name: Cytochrome P450 Pfam Description: Cytochrome P450
  misc_feature (1)..(180): Homolog of NCBI NO: 15222180 NR Description: cytochrome P450 71B29 [Arabidopsis thaliana]
  misc_feature (1)..(180): Homolog of NCBI NO: 15222177 NR Description: cytochrome P450 71B28 [Arabidopsis thaliana]
  misc_feature (1)..(180): Homolog of NCBI NO: 21618278 NR Description: putative cytochrome P450 monooxygenase
  misc_feature (1)..(180): Homolog of NCBI NO: 15222182 NR Description: cytochrome P450 71B7 [Arabidopsis thaliana]
  misc_feature (1)..(180): Homolog of NCBI NO: 15231632 NR Description: cytochrome P450 71B15 [Arabidopsis thaliana] Cytochrome P450 71B15 >gi|9279673|dbj|BAB01230.1| cytochrome p450 thaliana] >gi|26450995|dbj|BAC42604.1| putative cytochrome P450
  misc_feature (1)..(180): Homolog of NCBI NO: 15231526 NR Description: cytochrome P450 71B23 [Arabidopsis thaliana] Cytochrome P450 71B23 >gi|11994440|dbj|BAB02442.1| cytochrome
  misc_feature (1)..(183): Homolog of NCBI NO: 26449645 NR Description: putative cytochrome P450 monooxygenase
  misc_feature (1)..(180): Homolog of NCBI NO: 15231524 NR Description: cytochrome P450 71B21 [Arabidopsis thaliana] Cytochrome P450 71B21 >gi|11994438|dbj|BAB02440.1| cytochrome
  misc_feature (1)..(180): Homolog of NCBI NO: 15231520 NR Description: cytochrome P450 71B19 [Arabidopsis thaliana] Cytochrome P450 71B19 >gi|11994436|dbj|BAB02438.1| cytochrome [Arabidopsis thaliana] >gi|26451925|dbj|BAC43055.1| putative
  misc_feature (1)..(180): Homolog of NCBI NO: 21554748 NR Description: cytochrome P450, putative [Arabidopsis thaliana]
MRKLSVVELFTAKKHQYFRSIREEENDLLVKKLTELALTRSPVNLKKTLFTLVGSIVCRIGFGFNLHECEFIDENSISDLVDKSEILEMTSMFSDFFPGGIGRFIDWISGQNKRFDNVFSDLDTFFQNILDYHLKPGRKVADSSDIIDVVINMIKKQEKDGDSFKLTTDHLKGMISVMFLDLY

SEQ ID NO: 107844 - DNA, 4253 bp, Arabidopsis thaliana
  misc_feature (1)..(4253): Ceres Seq. ID no. 13651857
  misc_feature: MA Experiment ID: 20000173 Result: Down-regulated in Transcription
  misc_feature: MA Experiment 20000173 PARAMETER Experiment Name: At_42deg_Heat_P Parameter: Age (day) Value: 14
  misc_feature: MA Experiment 20000173 PARAMETER Experiment Name: At_42deg_Heat_P Parameter: Organism Value: A. thaliana
  misc_feature: MA Experiment 20000173 PARAMETER Experiment Name: At_42deg_Heat_P Parameter: Plant Line Value: WS
  misc_feature: MA Experiment 20000173 PARAMETER Experiment Name: At_42deg_Heat_P Parameter: Temperature (deg C) Value: 42 vs. 22
  misc_feature: MA Experiment 20000173 PARAMETER Experiment Name: At_42deg_Heat_P Parameter: Timepoint (hr) Value: 6
  misc_feature: MA Experiment 20000173 PARAMETER Experiment Name: At_42deg_Heat_P Parameter: Tissue Value: Aerial
  misc_feature: MA Experiment ID: 20000794 Result: Up-regulated in Transcription
  misc_feature: MA Experiment 20000794 PARAMETER Experiment Name: At_Petals_P Parameter: Age (day) Value: 23-25 days
  misc_feature: MA Experiment 20000794 PARAMETER Experiment Name: At_Petals_P Parameter: Plant Line Value: WS
  misc_feature: MA Experiment 20000794 PARAMETER Experiment Name: At_Petals_P Parameter: Tissue Value: Petals vs. Whole plant
  misc_feature: MA Experiment ID: 20001905 Result: Down-regulated in Transcription
  misc_feature: MA Experiment 20001905 PARAMETER Experiment Name: At_Drought_Reproduction_P Parameter: Age (day) Value: 40
  misc_feature: MA Experiment 20001905 PARAMETER Experiment Name: At_Drought_Reproduction_P Parameter: Organism Value: A. thaliana
  misc_feature: MA Experiment 20001905 PARAMETER Experiment Name: At_Drought_Reproduction_P Parameter: Plant Line Value: WS
  misc_feature: MA Experiment 20001905 PARAMETER Experiment Name: At_Drought_Reproduction_P Parameter: Timepoint (day) Value: 10
  misc_feature: MA Experiment 20001905 PARAMETER Experiment Name: At_Drought_Reproduction_P Parameter: Tissue Value: Rosettes
  misc_feature: MA Experiment 20001905 PARAMETER Experiment Name: At_Drought_Reproduction_P Parameter: Treatment Value: Drought vs. No Drought
actaacagttacgctttcgtcttcctcgtcgcttcctcaaaatccttaacctcgaaaactctgaagatcttccagagagtctcagcgagtgagagagaaagctatttgttctctcgtgaagtccgagtgttggaaattgacaactggatttatggttggatttggtgtgtaagtgtgtaagcgattaggttttgaatcagcggaatcgaaaaaatggtattcaagaacaaactcttcttctcttcgaagaaatctggatcttctagtcccgatagctctaatagtcccagatctgttggctccaactctccgatacgatcagataagaagaagtctaaatccgcttccaaggatgaacctccgatccctattcctggatttgttggagttggttgcaagcagacgcagattaaagatggtttgaagaagaaggatggttcatctaagggtaaacaactttcatctgaagttcaagctcactctattggaaaatcgaacttgtctcctagttccgaggtgaagaaaccacctccgccggaagtgaaggaaggacctgcttttgtttctccaatcatggcttcgtctcttgggttgaaccggattaagacgagatccggacctttgccacaggaaagggttttcaattataggaatgatccggctacgagcaatttgtcgaagatgggtgctgatggtggtgacttgggctcgggttcagctacttctggctctggtagtggcaatagaaggaaagaagctgggagtagcaagctagggttagaagagaacatggatcgcactcgaccaagtgacaataagagtgatcgtgatagtttgtctcctgatacaggaccaccgaggagcctcagccctactttgccgccatcaggatctcgattgcagaatgtagcatcctcatcgggaactggtcgctctgagatgtcatccggtcgttctggccctctaagaaattcagacttttgcaccccagagaattcatatgaatgggaaaatcccaaagagtcagaatcgcctcgttatcaagccttacttcgtatgaccagtgctccacgaaagaggtttcctggtgacatcaaaagcttttctcatgagttgaactcaaaaggtgtacgtccctttccattatggaagcctcgtaggtcgaacaatgtggaggaagtattgaatctgattcgggcaaaatttgagaaagcaaaggaagaagtaaactctgaccttgcagtatttgcagcggacctggtgggagttcttgagaaaaatgcagaaagccatcctgagtgggaggaaacatttgaagacttgctaattttggctcgaagttgtgctatgactactcctggagatttctggcttcagtgtgaaggcattgttcaggacttagatgatagacgtcaagagcttcccccgggcgtcctcaagcagcttcatactcggatgctttttatccttaccagatgtactagattacttcagtttcataaggaaagctggggggaggaggaacaagttgtacaactacgtcagtcaagagtcttgcattctatagagaaaataccgccgagtggagcgggaaggagttacagtgctgcaaaggtaccatctaccaagaaagcttatagtcaggagcagcatggtttggactggaaggaagacgctgttgtacgctcagttccccctcttgctcctcctgaaaattatgctataaaggaatctgaatctcctgcaaacattgatagaatgtcttcctggaaaaaacttccatctccagcactgaaaactgtgaaagaagcgccagcgtcagaagagcagaatgatagcaaagttgaacctccaaatatagttgggagtcgacaaggtagggatgatgccgctgttgctattctcaactttcctccagcaaaagattctcatgaacactcctccaagcatcggcacaatatttcttggggttactggggggaacaaccccttatttcggaggaaagttcaataatgtgccgtatctgtgaggaggaagttccgacaactcatgtggaagatcactctagggtttgtacattggctgataaatatgaccagaaaggactgagtgttgatgagcgactgatggcagttgctggtacacttgacaagatagcagagaccttcaggcataaggatagcctagcagccgcagagagcccagatggtatgaaagtatccaattcacatctgactgaagaatctgatgttctctctccaaggttgagtgattggtcgcgaaaaggatcagaagacatgcttgactgttttccggaggctgataattcaatttttatggatgatctgagaggtttaccgctaatgtcatgtagaacccgttttggtcccaagtctgatcaaggtatgacaacttcatctgccagtagcatgactcctagatccccgattccgacccctaggcctgatccaattgaacagatattaggaggcaagggtacattccacgatcaagatgatattccacagatgagtgaacttgctgacattgcaaaatgtgcagcagatgccattccgggtgatgatcaatccattccattcctactgtcttgtcttgaagatctaagggttgtcatagaccgcagaaagtttgatgcacttacagtagaaacatttgggactcgcatagaaaagttgatccgtgagaaatatgtgcatatgtgtgagcttatggatgatgaaaaagttgatctactaagcactgtaattgatgaagatgctcccttagaagatgatgttgttcggagcttgaggaccagcccagtacatccgcgagatcgcacatccattgatgattttgagatcataaaaccaataagtcggggagcttttgggcgagtttttttagcgaaaaagaggacaacaggagatctattcgcaatcaaggttctgaaaaaggcagatatgattcgtaagaatgctgttgaaagtatacttgctgaacgtgatatattgatcaacgttcgcaatccttttgtggttcgtttcttctattctttcacgtgtcgtgacaacctgtatttggtgatggagtatctgaatggaggggatctgtattcgttgttgagaaatttaggttgcttagaagaagatattgtccgtgtatatattgctgaagttgtccttgctttggaatatttgcattctgagggtgttgttcaccgtgatttgaagccggataatttgttgattgcgcatgatggtcatataaagttaacagatttcgggctctctaaagttggtctcatcaacagcacagatgatctggctggtcctgctgtaagtgggacgtctctgcttgatgaggaggaatcacgattagcggcatctgaggaacaacttgaaaggcgcaagaaacggtctgctgtgggtactcctgactacttagcgccagaaattcttttagggacaggacatggtgcaactgcggattggtggtctgttggcatcattctgtttgaactcattgtgggaattccacccttcaatgcggaacatcctcagcaaatatttgataatattctcaaccgtaagataccatggcatcatgttccagaagaaatgagtgctgaagcccatgatataatagaccgatttttaacagaagatccacatcagagacttggagctagaggggcagctgaggtcaagcagcacatcttctttaaagacatcaactgggacacactagcaaggcaaaaggctgcatttgttccggcttcagagagtgcaattgacacaagttacttcagaagtcgctactcgtggaacacatcagatgagcaatttttcccaagcggtgaggttccagattatagtgatgctgatagcatgactaacagcagtggttgctcgagcaatcatcatgaagaaggggaggctgaagaatgcgaaggtcatgcagagtttgagtctggcatacctgtagattactctttcagtaatttctcgtttaagaacctctctcagttggcgtctatcaactatgatcttttatccaaaggctggaaagatgagccacaacaaattccgcatcacaagtaacatccatttcctggatgttttttctcgattcttttggtgttcagtcagtgtaatgagtactctgccattaccggcgtttgtttgtatactctgtaaatgtaagtcgttcgtttctgttaatcacaaaatcaatttagtaagctcaaaag

SEQ ID NO: 107845 - protein, 1296 aa, Arabidopsis thaliana
  peptide (1)..(1296): Ceres Seq. ID no. 13651858
  misc_feature (882)..(1171): Pfam Name: Protein kinase domain Pfam Description: Protein kinase domain
  misc_feature (531)..(1287): Homolog of NCBI NO: 15241795 NR Description: protein kinase, putative (IRE) [Arabidopsis >gi|6729346|dbj|BAA89783.1| IRE [Arabidopsis thaliana]
  misc_feature (531)..(1229): Homolog of NCBI NO: 15219539 NR Description: protein kinase family [Arabidopsis thaliana]
  misc_feature (177)..(455): Homolog of NCBI NO: 15219539 NR Description: protein kinase family [Arabidopsis thaliana]
  misc_feature (1208)..(1289): Homolog of NCBI NO: 15219539 NR Description: protein kinase family [Arabidopsis thaliana]
  misc_feature (943)..(1268): Homolog of NCBI NO: 8778706 NR Description: T1N15.10 [Arabidopsis thaliana]
  misc_feature (873)..(1033): Homolog of NCBI NO: 28829453 NR Description: similar to Dictyostelium discoideum (Slime mold).
  misc_feature (1067)..(1210): Homolog of NCBI NO: 28829453 NR Description: similar to Dictyostelium discoideum (Slime mold).
  misc_feature (553)..(645): Homolog of NCBI NO: 28829453 NR Description: similar to Dictyostelium discoideum (Slime mold).
  misc_feature (1044)..(1204): Homolog of NCBI NO: 28829165 NR Description: similar to cell wall biosynthesis kinase; Cbk1p
  misc_feature (878)..(1033): Homolog of NCBI NO: 28829165 NR Description: similar to cell wall biosynthesis kinase; Cbk1p
MVFKNKLFFSSKKSGSSSPDSSNSPRSVGSNSPIRSDKKKSKSASKDEPPIPIPGFVGVGCKQTQIKDGLKKKDGSSKGKQLSSEVQAHSIGKSNLSPSSEVKKPPPPEVKEGPAFVSPIMASSLGLNRIKTRSGPLPQERVFNYRNDPATSNLSKMGADGGDLGSGSATSGSGSGNRRKEAGSSKLGLEENMDRTRPSDNKSDRDSLSPDTGPPRSLSPTLPPSGSRLQNVASSSGTGRSEMSSGRSGPLRNSDFCTPENSYEWENPKESESPRYQALLRMTSAPRKRFPGDIKSFSHELNSKGVRPFPLWKPRRSNNVEEVLNLIRAKFEKAKEEVNSDLAVFAADLVGVLEKNAESHPEWEETFEDLLILARSCAMTTPGDFWLQCEGIVQDLDDRRQELPPGVLKQLHTRMLFILTRCTRLLQFHKESWGEEEQVVQLRQSRVLHSIEKIPPSGAGRSYSAAKVPSTKKAYSQEQHGLDWKEDAVVRSVPPLAPPENYAIKESESPANIDRMSSWKKLPSPALKTVKEAPASEEQNDSKVEPPNIVGSRQGRDDAAVAILNFPPAKDSHEHSSKHRHNISWGYWGEQPLISEESSIMCRICEEEVPTTHVEDHSRVCTLADKYDQKGLSVDERLMAVAGTLDKIAETFRHKDSLAAAESPDGMKVSNSHLTEESDVLSPRLSDWSRKGSEDMLDCFPEADNSIFMDDLRGLPLMSCRTRFGPKSDQGMTTSSASSMTPRSPIPTPRPDPIEQILGGKGTFHDQDDIPQMSELADIAKCAADAIPGDDQSIPFLLSCLEDLRVVIDRRKFDALTVETFGTRIEKLIREKYVHMCELMDDEKVDLLSTVIDEDAPLEDDVVRSLRTSPVHPRDRTSIDDFEIIKPISRGAFGRVFLAKKRTTGDLFAIKVLKKADMIRKNAVESILAERDILINVRNPFVVRFFYSFTCRDNLYLVMEYLNGGDLYSLLRNLGCLEEDIVRVYIAEVVLALEYLHSEGVVHRDLKPDNLLIAHDGHIKLTDFGLSKVGLINSTDDLAGPAVSGTSLLDEEESRLAASEEQLERRKKRSAVGTPDYLAPEILLGTGHGATADWWSVGIILFELIVGIPPFNAEHPQQIFDNILNRKIPWHHVPEEMSAEAHDIIDRFLTEDPHQRLGARGAAEVKQHIFFKDINWDTLARQKAAFVPASESAIDTSYFRSRYSWNTSDEQFFPSGEVPDYSDADSMTNSSGCSSNHHEEGEAEECEGHAEFESGIPVDYSFSNFSFKNLSQLASINYDLLSKGWKDEPQQIPHHK

SEQ ID NO: 107846 - protein, 1176 aa, Arabidopsis thaliana
  peptide (1)..(1176): Ceres Seq. ID no. 13651859
  misc_feature (762)..(1051): Pfam Name: Protein kinase domain Pfam Description: Protein kinase domain
  misc_feature (411)..(1167): Homolog of NCBI NO: 15241795 NR Description: protein kinase, putative (IRE) [Arabidopsis >gi|6729346|dbj|BAA89783.1| IRE [Arabidopsis thaliana]
  misc_feature (411)..(1109): Homolog of NCBI NO: 15219539 NR Description: protein kinase family [Arabidopsis thaliana]
  misc_feature (57)..(335): Homolog of NCBI NO: 15219539 NR Description: protein kinase family [Arabidopsis thaliana]
  misc_feature (1088)..(1169): Homolog of NCBI NO: 15219539 NR Description: protein kinase family [Arabidopsis thaliana]
  misc_feature (823)..(1148): Homolog of NCBI NO: 8778706 NR Description: T1N15.10 [Arabidopsis thaliana]
  misc_feature (753)..(913): Homolog of NCBI NO: 28829453 NR Description: similar to Dictyostelium discoideum (Slime mold).
  misc_feature (947)..(1090): Homolog of NCBI NO: 28829453 NR Description: similar to Dictyostelium discoideum (Slime mold).
  misc_feature (433)..(525): Homolog of NCBI NO: 28829453 NR Description: similar to Dictyostelium discoideum (Slime mold).
  misc_feature (924)..(1084): Homolog of NCBI NO: 28829165 NR Description: similar to cell wall biosynthesis kinase; Cbk1p
  misc_feature (758)..(913): Homolog of NCBI NO: 28829165 NR Description: similar to cell wall biosynthesis kinase; Cbk1p
MASSLGLNRIKTRSGPLPQERVFNYRNDPATSNLSKMGADGGDLGSGSATSGSGSGNRRKEAGSSKLGLEENMDRTRPSDNKSDRDSLSPDTGPPRSLSPTLPPSGSRLQNVASSSGTGRSEMSSGRSGPLRNSDFCTPENSYEWENPKESESPRYQALLRMTSAPRKRFPGDIKSFSHELNSKGVRPFPLWKPRRSNNVEEVLNLIRAKFEKAKEEVNSDLAVFAADLVGVLEKNAESHPEWEETFEDLLILARSCAMTTPGDFWLQCEGIVQDLDDRRQELPPGVLKQLHTRMLFILTRCTRLLQFHKESWGEEEQVVQLRQSRVLHSIEKIPPSGAGRSYSAAKVPSTKKAYSQEQHGLDWKEDAVVRSVPPLAPPENYAIKESESPANIDRMSSWKKLPSPALKTVKEAPASEEQNDSKVEPPNIVGSRQGRDDAAVAILNFPPAKDSHEHSSKHRHNISWGYWGEQPLISEESSIMCRICEEEVPTTHVEDHSRVCTLADKYDQKGLSVDERLMAVAGTLDKIAETFRHKDSLAAAESPDGMKVSNSHLTEESDVLSPRLSDWSRKGSEDMLDCFPEADNSIFMDDLRGLPLMSCRTRFGPKSDQGMTTSSASSMTPRSPIPTPRPDPIEQILGGKGTFHDQDDIPQMSELADIAKCAADAIPGDDQSIPFLLSCLEDLRVVIDRRKFDALTVETFGTRIEKLIREKYVHMCELMDDEKVDLLSTVIDEDAPLEDDVVRSLRTSPVHPRDRTSIDDFEIIKPISRGAFGRVFLAKKRTTGDLFAIKVLKKADMIRKNAVESILAERDILINVRNPFVVRFFYSFTCRDNLYLVMEYLNGGDLYSLLRNLGCLEEDIVRVYIAEVVLALEYLHSEGVVHRDLKPDNLLIAHDGHIKLTDFGLSKVGLINSTDDLAGPAVSGTSLLDEEESRLAASEEQLERRKKRSAVGTPDYLAPEILLGTGHGATADWWSVGIILFELIVGIPPFNAEHPQQIFDNILNRKIPWHHVPEEMSAEAHDIIDRFLTEDPHQRLGARGAAEVKQHIFFKDINWDTLARQKAAFVPASESAIDTSYFRSRYSWNTSDEQFFPSGEVPDYSDADSMTNSSGCSSNHHEEGEAEECEGHAEFESGIPVDYSFSNFSFKNLSQLASINYDLLSKGWKDEPQQIPHHK

SEQ ID NO: 107847 - protein, 1140 aa, Arabidopsis thaliana
  peptide (1)..(1140): Ceres Seq. ID no. 13651860
  misc_feature (726)..(1015): Pfam Name: Protein kinase domain Pfam Description: Protein kinase domain
  misc_feature (375)..(1131): Homolog of NCBI NO: 15241795 NR Description: protein kinase, putative (IRE) [Arabidopsis >gi|6729346|dbj|BAA89783.1| IRE [Arabidopsis thaliana]
  misc_feature (375)..(1073): Homolog of NCBI NO: 15219539 NR Description: protein kinase family [Arabidopsis thaliana]
  misc_feature (21)..(299): Homolog of NCBI NO: 15219539 NR Description: protein kinase family [Arabidopsis thaliana]
  misc_feature (1052)..(1133): Homolog of NCBI NO: 15219539 NR Description: protein kinase family [Arabidopsis thaliana]
  misc_feature (787)..(1112): Homolog of NCBI NO: 8778706 NR Description: T1N15.10 [Arabidopsis thaliana]
  misc_feature (717)..(877): Homolog of NCBI NO: 28829453 NR Description: similar to Dictyostelium discoideum (Slime mold).
  misc_feature (911)..(1054): Homolog of NCBI NO: 28829453 NR Description: similar to Dictyostelium discoideum (Slime mold).
  misc_feature (397)..(489): Homolog of NCBI NO: 28829453 NR Description: similar to Dictyostelium discoideum (Slime mold).
  misc_feature (888)..(1048): Homolog of NCBI NO: 28829165 NR Description: similar to cell wall biosynthesis kinase; Cbk1p
  misc_feature (722)..(877): Homolog of NCBI NO: 28829165 NR Description: similar to cell wall biosynthesis kinase; Cbk1p
MGADGGDLGSGSATSGSGSGNRRKEAGSSKLGLEENMDRTRPSDNKSDRDSLSPDTGPPRSLSPTLPPSGSRLQNVASSSGTGRSEMSSGRSGPLRNSDFCTPENSYEWENPKESESPRYQALLRMTSAPRKRFPGDIKSFSHELNSKGVRPFPLWKPRRSNNVEEVLNLIRAKFEKAKEEVNSDLAVFAADLVGVLEKNAESHPEWEETFEDLLILARSCAMTTPGDFWLQCEGIVQDLDDRRQELPPGVLKQLHTRMLFILTRCTRLLQFHKESWGEEEQVVQLRQSRVLHSIEKIPPSGAGRSYSAAKVPSTKKAYSQEQHGLDWKEDAVVRSVPPLAPPENYAIKESESPANIDRMSSWKKLPSPALKTVKEAPASEEQNDSKVEPPNIVGSRQGRDDAAVAILNFPPAKDSHEHSSKHRHNISWGYWGEQPLISEESSIMCRICEEEVPTTHVEDHSRVCTLADKYDQKGLSVDERLMAVAGTLDKIAETFRHKDSLAAAESPDGMKVSNSHLTEESDVLSPRLSDWSRKGSEDMLDCFPEADNSIFMDDLRGLPLMSCRTRFGPKSDQGMTTSSASSMTPRSPIPTPRPDPIEQILGGKGTFHDQDDIPQMSELADIAKCAADAIPGDDQSIPFLLSCLEDLRVVIDRRKFDALTVETFGTRIEKLIREKYVHMCELMDDEKVDLLSTVIDEDAPLEDDVVRSLRTSPVHPRDRTSIDDFEIIKPISRGAFGRVFLAKKRTTGDLFAIKVLKKADMIRKNAVESILAERDILINVRNPFVVRFFYSFTCRDNLYLVMEYLNGGDLYSLLRNLGCLEEDIVRVYIAEVVLALEYLHSEGVVHRDLKPDNLLIAHDGHIKLTDFGLSKVGLINSTDDLAGPAVSGTSLLDEEESRLAASEEQLERRKKRSAVGTPDYLAPEILLGTGHGATADWWSVGIILFELIVGIPPFNAEHPQQIFDNILNRKIPWHHVPEEMSAEAHDIIDRFLTEDPHQRLGARGAAEVKQHIFFKDINWDTLARQKAAFVPASESAIDTSYFRSRYSWNTSDEQFFPSGEVPDYSDADSMTNSSGCSSNHHEEGEAEECEGHAEFESGIPVDYSFSNFSFKNLSQLASINYDLLSKGWKDEPQQIPHHK

SEQ ID NO: 107848 - DNA, 1264 bp, Arabidopsis thaliana
  misc_feature (1)..(1264): Ceres Seq. ID no. 13651869
  misc_feature: MA Experiment ID: 108434 Result: Up-regulated in Transcription
  misc_feature: MA Experiment 108434 PARAMETER Experiment Name: At_Root_Tips_cDNA_P Parameter: Tissue Value: Root Tips
  misc_feature: MA Experiment ID: 108461 Result: Up-regulated in Transcription
  misc_feature: MA Experiment 108461 PARAMETER Experiment Name: At_Germinating_Seeds_cDNA_P Parameter: Age (day) Value: 1 vs. 0
  misc_feature: MA Experiment 108461 PARAMETER Experiment Name: At_Germinating_Seeds_cDNA_P Parameter: Tissue Value: Germinating Seeds
ctatttctcctaccgtcgaactaaatcctagggcacaggtgaaatcgccgagtgacgtctagccaccgcaccgcctccttctccggttatctcgctactaatcagactattccacagctatgtcacaggtagacaacagaaattcatcagcagccaagcgtgctagaactgacggggggcgtagagaagatgattggatctgcccaagttgtggcaatgtcaacttttcattcaggacaacttgcaatatgcgtaattgcactcagcctagacctgcagatcataatggaaagtctgctcccaaacctatgcaacatcaacaaggtttctcatcacccggggcatacttaggatctgggggtccccctccagtatatatgggcgggtcaccatatggatctcctctctttaatggatcatctatgcctccttatgacgtcccattttctgggggttcgccttaccattttaactataatagccgaatgcctgccggagctcattacagaccattacatatgtctggaccaccaccataccatggcggatctatgatgggaagtggtggtatgtatggaatgcctccaccaatagacaggtatggccttggtatggcaatgggtcctggttctgccgctgccatgatgccaagaccaaggttttacccagatgaaaaatcacaaaagagagattcaactcgcgataatgattggacatgtccgaattgtggtaatgtaaacttctcattcagaactgtatgtaacatgaggaagtgcaacactccaaagcctggttctcagcagggtggaagctcagataaaatatccaaacaaaatgcaccggaagggagctggaagtgtgataactgtggaaatataaactacccattcaggagcaaatgcaacaggcaaaactgtggagctgataagcctggggatcggtcgaatggatctccgtcccgtgcaccagaagagaacgatcagtgagtcgtagacatgtttgggggttgagaagggtgagtctaatccagcgggtgtcgtaatgtcagtcaatgtctcgtcaggtcaggtcgtccatgttgctgcgtcgtcagtcaagttgcttctatgcatttgtctctttacttcccttgcgtggttgtggattgtattaataatgcaaaaattgtttatttactttgtcgtcctcgtggatcttgtcttgctatagaatcctcctccaggtccatactgttttacatcctaatcttaagtaagttggcacc

SEQ ID NO: 107849 - protein, 288 aa, Arabidopsis thaliana
  peptide (1)..(288): Ceres Seq. ID no. 13651870
  misc_feature (48)..(141): Pfam Name: Extensin-like region Pfam Description: Extensin-like region
  misc_feature (1)..(288): Homolog of NCBI NO: 22330480 NR Description: RRM-containing RNA-binding protein -related thaliana] >gi|26449540|dbj|BAC41896.1| unknown protein thaliana] >gi|28950845|gb|AAO63346.1| At1g67325 [Arabidopsis
  misc_feature (44)..(288): Homolog of NCBI NO: 25404955 NR Description: protein F1N21.14 [imported] - Arabidopsis >gi|9828626|gb|AAG00249.1|AC002130_14 F1N21.14 [Arabidopsis
  misc_feature (1)..(286): Homolog of NCBI NO: 27817857 NR Description: OJ1081_B12.5 [Oryza sativa (japonica
  misc_feature (1)..(271): Homolog of NCBI NO: 33146999 NR Description: putative p53 binding protein [Oryza sativa
  misc_feature (191)..(271): Homolog of NCBI NO: 18698995 NR Description: p53 binding protein [Oryza sativa]
  misc_feature (177)..(226): Homolog of NCBI NO: 18698995 NR Description: p53 binding protein [Oryza sativa]
  misc_feature (10)..(53): Homolog of NCBI NO: 18698995 NR Description: p53 binding protein [Oryza sativa]
  misc_feature (194)..(273): Homolog of NCBI NO: 15865325 NR Description: putative non-ribosomal nucleolar protein
  misc_feature (191)..(262): Homolog of NCBI NO: 23510073 NR Description: hypothetical protein [Plasmodium falciparum 3D7]
  misc_feature (89)..(284): Homolog of NCBI NO: 33146999 NR Description: putative p53 binding protein [Oryza sativa
MSQVDNRNSSAAKRARTDGGRREDDWICPSCGNVNFSFRTTCNMRNCTQPRPADHNGKSAPKPMQHQQGFSSPGAYLGSGGPPPVYMGGSPYGSPLFNGSSMPPYDVPFSGGSPYHFNYNSRMPAGAHYRPLHMSGPPPYHGGSMMGSGGMYGMPPPIDRYGLGMAMGPGSAAAMMPRPRFYPDEKSQKRDSTRDNDWTCPNCGNVNFSFRTVCNMRKCNTPKPGSQQGGSSDKISKQNAPEGSWKCDNCGNINYPFRSKCNRQNCGADKPGDRSNGSPSRAPEENDQ

SEQ ID NO: 107850 - protein, 245 aa, Arabidopsis thaliana
  peptide (1)..(245): Ceres Seq. ID no. 13651871
  misc_feature (5)..(98): Pfam Name: Extensin-like region Pfam Description: Extensin-like region
  misc_feature (1)..(245): Homolog of NCBI NO: 22330480 NR Description: RRM-containing RNA-binding protein -related thaliana] >gi|26449540|dbj|BAC41896.1| unknown protein thaliana] >gi|28950845|gb|AAO63346.1| At1g67325 [Arabidopsis
  misc_feature (1)..(245): Homolog of NCBI NO: 25404955 NR Description: protein F1N21.14 [imported] - Arabidopsis >gi|9828626|gb|AAG00249.1|AC002130_14 F1N21.14 [Arabidopsis
  misc_feature (1)..(243): Homolog of NCBI NO: 27817857 NR Description: OJ1081_B12.5 [Oryza sativa (japonica
  misc_feature (1)..(228): Homolog of NCBI NO: 33146999 NR Description: putative p53 binding protein [Oryza sativa
  misc_feature (148)..(228): Homolog of NCBI NO: 18698995 NR Description: p53 binding protein [Oryza sativa]
  misc_feature (134)..(183): Homolog of NCBI NO: 18698995 NR Description: p53 binding protein [Oryza sativa]
  misc_feature (151)..(230): Homolog of NCBI NO: 15865325 NR Description: putative non-ribosomal nucleolar protein
  misc_feature (148)..(219): Homolog of NCBI NO: 23510073 NR Description: hypothetical protein [Plasmodium falciparum 3D7]
  misc_feature (46)..(241): Homolog of NCBI NO: 33146999 NR Description: putative p53 binding protein [Oryza sativa
  misc_feature (144)..(222): Homolog of NCBI NO: 30962835 NR Description: Unknown (protein for MGC:56597) [Danio rerio]
MRNCTQPRPADHNGKSAPKPMQHQQGFSSPGAYLGSGGPPPVYMGGSPYGSPLFNGSSMPPYDVPFSGGSPYHFNYNSRMPAGAHYRPLHMSGPPPYHGGSMMGSGGMYGMPPPIDRYGLGMAMGPGSAAAMMPRPRFYPDEKSQKRDSTRDNDWTCPNCGNVNFSFRTVCNMRKCNTPKPGSQQGGSSDKISKQNAPEGSWKCDNCGNINYPFRSKCNRQNCGADKPGDRSNGSPSRAPEENDQ

SEQ ID NO: 107851 - protein, 225 aa, Arabidopsis thaliana
  peptide (1)..(225): Ceres Seq. ID no. 13651872
  misc_feature (1)..(78): Pfam Name: Extensin-like region Pfam Description: Extensin-like region
  misc_feature (1)..(225): Homolog of NCBI NO: 22330480 NR Description: RRM-containing RNA-binding protein -related thaliana] >gi|26449540|dbj|BAC41896.1| unknown protein thaliana] >gi|28950845|gb|AAO63346.1| At1g67325 [Arabidopsis
  misc_feature (1)..(225): Homolog of NCBI NO: 25404955 NR Description: protein F1N21.14 [imported] - Arabidopsis >gi|9828626|gb|AAG00249.1|AC002130_14 F1N21.14 [Arabidopsis
  misc_feature (1)..(223): Homolog of NCBI NO: 27817857 NR Description: OJ1081_B12.5 [Oryza sativa (japonica
  misc_feature (1)..(208): Homolog of NCBI NO: 33146999 NR Description: putative p53 binding protein [Oryza sativa
  misc_feature (128)..(208): Homolog of NCBI NO: 18698995 NR Description: p53 binding protein [Oryza sativa]
  misc_feature (114)..(163): Homolog of NCBI NO: 18698995 NR Description: p53 binding protein [Oryza sativa]
  misc_feature (131)..(210): Homolog of NCBI NO: 15865325 NR Description: putative non-ribosomal nucleolar protein
  misc_feature (128)..(199): Homolog of NCBI NO: 23510073 NR Description: hypothetical protein [Plasmodium falciparum 3D7]
  misc_feature (26)..(221): Homolog of NCBI NO: 33146999 NR Description: putative p53 binding protein [Oryza sativa
  misc_feature (124)..(202): Homolog of NCBI NO: 30962835 NR Description: Unknown (protein for MGC:56597) [Danio rerio]
MQHQQGFSSPGAYLGSGGPPPVYMGGSPYGSPLFNGSSMPPYDVPFSGGSPYHFNYNSRMPAGAHYRPLHMSGPPPYHGGSMMGSGGMYGMPPPIDRYGLGMAMGPGSAAAMMPRPRFYPDEKSQKRDSTRDNDWTCPNCGNVNFSFRTVCNMRKCNTPKPGSQQGGSSDKISKQNAPEGSWKCDNCGNINYPFRSKCNRQNCGADKPGDRSNGSPSRAPEENDQ

SEQ ID NO: 107852 - DNA, 1621 bp, Arabidopsis thaliana
  misc_feature (1)..(1621): Ceres Seq. ID no. 13651873
  misc_feature: MA Experiment ID: 20000179 Result: Down-regulated in Transcription
  misc_feature: MA Experiment 20000179 PARAMETER Experiment Name: At_Germinating_Seeds_P Parameter: Age (hr) Value: 6 vs. 0
  misc_feature: MA Experiment 20000179 PARAMETER Experiment Name: At_Germinating_Seeds_P Parameter: Tissue Value: Germinating Seeds
  misc_feature: MA Experiment ID: 20000185 Result: Up-regulated in Transcription
  misc_feature: MA Experiment 20000185 PARAMETER Experiment Name: At_Roots__P Parameter: Age (day) Value: 7 vs. 21
  misc_feature: MA Experiment 20000185 PARAMETER Experiment Name: At_Roots__P Parameter: Organism Value: A. thaliana
  misc_feature: MA Experiment 20000185 PARAMETER Experiment Name: At_Roots__P Parameter: Tissue Value: Roots vs. Whole Plant
  misc_feature: MA Experiment ID: 20000227 Result: Down-regulated in Transcription
  misc_feature: MA Experiment 20000227 PARAMETER Experiment Name: At_Root-Tips-vs-Tops_P Parameter: Tissue Value: Root Tips vs. Root Tops
  misc_feature: MA Experiment ID: 20000264 Result: Up-regulated in Transcription
  misc_feature: MA Experiment 20000264 PARAMETER Experiment Name: At_Open_Flower_P Parameter: Age (day) Value: 21
  misc_feature: MA Experiment 20000264 PARAMETER Experiment Name: At_Open_Flower_P Parameter: Plant Line Value: WS
  misc_feature: MA Experiment 20000264 PARAMETER Experiment Name: At_Open_Flower_P Parameter: Tissue Value: Open Flower vs. Whole Plant
  misc_feature: MA Experiment ID: 20000439 Result: Up-regulated in Transcription
  misc_feature: MA Experiment 20000439 PARAMETER Experiment Name: At_Roots__P Parameter: Age (day) Value: 14 vs. 21
  misc_feature: MA Experiment 20000439 PARAMETER Experiment Name: At_Roots__P Parameter: Organism Value: A. thaliana
  misc_feature: MA Experiment 20000439 PARAMETER Experiment Name: At_Roots__P Parameter: Tissue Value: Roots vs. Whole Plant
  misc_feature: MA Experiment ID: 20000451 Result: Down-regulated in Transcription
  misc_feature: MA Experiment 20000451 PARAMETER Experiment Name: At_CS6879_Shoots-Roots_P Parameter: Age (day) Value: 14
  misc_feature: MA Experiment 20000451 PARAMETER Experiment Name: At_CS6879_Shoots-Roots_P Parameter: Organism Value: A. thaliana
  misc_feature: MA Experiment 20000451 PARAMETER Experiment Name: At_CS6879_Shoots-Roots_P Parameter: Plant Line Value: CS6879 vs. WS
  misc_feature: MA Experiment 20000451 PARAMETER Experiment Name: At_CS6879_Shoots-Roots_P Parameter: Tissue Value: Roots
  misc_feature: MA Experiment ID: 20000460 Result: Up-regulated in Transcription
  misc_feature: MA Experiment 20000460 PARAMETER Experiment Name: At_10percent_PEG_P Parameter: Age (day) Value: 12
  misc_feature: MA Experiment 20000460 PARAMETER Experiment Name: At_10percent_PEG_P Parameter: Organism Value: A. thaliana
  misc_feature: MA Experiment 20000460 PARAMETER Experiment Name: At_10percent_PEG_P Parameter: Plant Line Value: WS
  misc_feature: MA Experiment 20000460 PARAMETER Experiment Name: At_10percent_PEG_P Parameter: Timepoint (day) Value: 12
  misc_feature: MA Experiment 20000460 PARAMETER Experiment Name: At_10percent_PEG_P Parameter: Tissue Value: Whole Plant
  misc_feature: MA Experiment 20000460 PARAMETER Experiment Name: At_10percent_PEG_P Parameter: Treatment Value: 10percent PEG vs. No Treatment
  misc_feature: MA Experiment ID: 20000527 Result: Up-regulated in Transcription
  misc_feature: MA Experiment 20000527 PARAMETER Experiment Name: At_10percent_PEG_P Parameter: Age (day) Value: 20
  misc_feature: MA Experiment 20000527 PARAMETER Experiment Name: At_10percent_PEG_P Parameter: Organism Value: A. thaliana
  misc_feature: MA Experiment 20000527 PARAMETER Experiment Name: At_10percent_PEG_P Parameter: Plant Line Value: WS
  misc_feature: MA Experiment 20000527 PARAMETER Experiment Name: At_10percent_PEG_P Parameter: Timepoint (day) Value: 20
  misc_feature: MA Experiment 20000527 PARAMETER Experiment Name: At_10percent_PEG_P Parameter: Tissue Value: Whole Plant
  misc_feature: MA Experiment 20000527 PARAMETER Experiment Name: At_10percent_PEG_P Parameter: Treatment Value: 10percent PEG vs. No Treatment
  misc_feature: MA Experiment ID: 20000573 Result: Up-regulated in Transcription
  misc_feature: MA Experiment 20000573 PARAMETER Experiment Name: At_100uM_ABA_Mutants__P Parameter: Organism Value: A. thaliana
  misc_feature: MA Experiment 20000573 PARAMETER Experiment Name: At_100uM_ABA_Mutants__P Parameter: Plant Line Value: CS22 vs. Ler wt
  misc_feature: MA Experiment 20000573 PARAMETER Experiment Name: At_100uM_ABA_Mutants__P Parameter: Timepoint (hr) Value: N/A
  misc_feature: MA Experiment 20000573 PARAMETER Experiment Name: At_100uM_ABA_Mutants__P Parameter: Tissue Value: Whole Plant
  misc_feature: MA Experiment 20000573 PARAMETER Experiment Name: At_100uM_ABA_Mutants__P Parameter: Treatment Value: None
  misc_feature: MA Experiment ID: 20000574 Result: Up-regulated in Transcription
  misc_feature: MA Experiment 20000574 PARAMETER Experiment Name: At_100uM_ABA_Mutants__P Parameter: Organism Value: A. thaliana
  misc_feature: MA Experiment 20000574 PARAMETER Experiment Name: At_100uM_ABA_Mutants__P Parameter: Plant Line Value: CS23 vs. Ler wt
  misc_feature: MA Experiment 20000574 PARAMETER Experiment Name: At_100uM_ABA_Mutants__P Parameter: Timepoint (hr) Value: N/A
  misc_feature: MA Experiment 20000574 PARAMETER Experiment Name: At_100uM_ABA_Mutants__P Parameter: Tissue Value: Whole Plant
  misc_feature: MA Experiment 20000574 PARAMETER Experiment Name: At_100uM_ABA_Mutants__P Parameter: Treatment Value: None
ctctgctctcaacgtcatcttctatattctatagtttctatttgtccttcgttctctgctcatccatcgatggcgaataatcatcatcccaaggatgaggcttatctctcatccgtcatccccaagcgtatcaggctcttcgaggaaatccaagccgagcagcttgagcagcttcaatctcggccacacgatccaatcaagattactcttctccccgacggtatcgagaaagaaggaaggagatgggagacctctccaatggacatcgcagtgcagatttctaagggtttagcaaaatctgctctggtttcttcggttaatcatgtcttgtgggacatgaataggcccctggaaggtgattgttccttagagattttcggatttgacagcgaccaaggccgtaatactttctggcattctagcgcccacattctaggccaggctctcgagcaggagtatggatgcaagctatgtattggaccctgcgaacccagagatgaaggcttctattacgattcactttattatggcgagctgggattaaacgacaatcattttccaaacatcgaagcaagtgttgcatatatatcttttgctgacatcttttttgttttgcggtatggaatgtagaattacccattagaatggccgaatttggagtgttacaccgaaatgaggacagtggagcacttggtggaatgacccgtgtccgacggtttgtacaggatgatgcacacatattctgtagagtggatcaggttgaggaagaagtgaagggtgtgttggatttcattgactatgtttacagaatatttgggtttacctatgaactaacgctttcaacgaggccaaaggatcacattggagatttggaaacatgggctaaagctgaaaatgatcttgaaaaagctctagatgattttggaaagccatgggttataaaggaaggagacggtgcattttatggcccaaagatagacataacagtgtctgatgccaggaataggaaattccagtgtgctactatacagcttgattttcaacttccggcttgcttcaaactgaaatacctaagtgaaaaaaacgaaatggaggcacctgtgatgatacatagtgcggtgttgggatctattgagcgtatgtttgccatattgttggaacattacaaaggaatttggcccttctggcttagtccccgccaggccatagtttgctctctttcagaggattgtagttcctatgccaaacaggtacaaaaacagattaatgaagtcgggtactatgttgatattgatgaaagtgacagaagcctccgtaaaaaggtggcagatgctcgggatgcaccatacaactacatactggtcgtaggtcaaaaagaggttgcaactggacaggtgacagttcggctcagagaggaccctgaaggccgtaaagacttgccagagatgagcatcgaaagtttgcttgatgaattcaagttcaagacagtcaacttcctctgagatccgatgtttatggtttaaaatttcatttttctgttgatgatgaatgtatttcttttataatggtctttttcattgtaccaagacacattttggaataaaatgtactattgaagtat

SEQ ID NO: 107853 - protein, 285 aa, Arabidopsis thaliana
  peptide (1)..(285): Ceres Seq. ID no. 13651874
  misc_feature (1)..(61): Pfam Name: tRNA synthetase class II core domain (G, H, P, S and T) Pfam Description: tRNA synthetase class II core domain (G, H, P,
  misc_feature (1)..(285): Homolog of NCBI NO: 15220911 NR Description: threonyl-tRNA synthetase -related [Arabidopsis
  misc_feature (1)..(285): Homolog of NCBI NO: 11271129 NR Description: threonine-tRNA ligase (EC 6.1.1.3) [imported] -
  misc_feature (1)..(285): Homolog of NCBI NO: 30690426 NR Description: threonyl-tRNA synthetase [Arabidopsis thaliana]
  misc_feature (1)..(285): Homolog of NCBI NO: 15081626 NR Description: AT5g26830/F2P16_90 [Arabidopsis thaliana]
  misc_feature (1)..(285): Homolog of NCBI NO: 7437517 NR Description: threonine-tRNA ligase (EC 6.1.1.3) - Arabidopsis
  misc_feature (1)..(278): Homolog of NCBI NO: 38175524 NR Description: putative threonyl-tRNA synthetase [Oryza sativa
  misc_feature (1)..(278): Homolog of NCBI NO: 39597482 NR Description: Hypothetical protein CBG03144 [Caenorhabditis
  misc_feature (1)..(277): Homolog of NCBI NO: 31237882 NR Description: ENSANGP00000021424 [Anopheles gambiae]
  misc_feature (1)..(277): Homolog of NCBI NO: 31237885 NR Description: ENSANGP00000024346 [Anopheles gambiae]
  misc_feature (1)..(278): Homolog of NCBI NO: 17532457 NR Description: Threonyl tRNA Synthetase TRS-1 (84.4 kD) (trs-1)
MAEFGVLHRNEDSGALGGMTRVRRFVQDDAHIFCRVDQVEEEVKGVLDFIDYVYRIFGFTYELTLSTRPKDHIGDLETWAKAENDLEKALDDFGKPWVIKEGDGAFYGPKIDITVSDARNRKFQCATIQLDFQLPACFKLKYLSEKNEMEAPVMIHSAVLGSIERMFAILLEHYKGIWPFWLSPRQAIVCSLSEDCSSYAKQVQKQINEVGYYVDIDESDRSLRKKVADARDAPYNYILVVGQKEVATGQVTVRLREDPEGRKDLPEMSIESLLDEFKFKTVNFL

SEQ ID NO: 107854 - protein, 267 aa, Arabidopsis thaliana
  peptide (1)..(267): Ceres Seq. ID no. 13651875
  misc_feature (1)..(267): Homolog of NCBI NO: 15220911 NR Description: threonyl-tRNA synthetase -related [Arabidopsis
  misc_feature (1)..(267): Homolog of NCBI NO: 11271129 NR Description: threonine-tRNA ligase (EC 6.1.1.3) [imported] -
  misc_feature (1)..(267): Homolog of NCBI NO: 30690426 NR Description: threonyl-tRNA synthetase [Arabidopsis thaliana]
  misc_feature (1)..(267): Homolog of NCBI NO: 15081626 NR Description: AT5g26830/F2P16_90 [Arabidopsis thaliana]
  misc_feature (1)..(267): Homolog of NCBI NO: 7437517 NR Description: threonine-tRNA ligase (EC 6.1.1.3) - Arabidopsis
  misc_feature (1)..(260): Homolog of NCBI NO: 38175524 NR Description: putative threonyl-tRNA synthetase [Oryza sativa
  misc_feature (1)..(260): Homolog of NCBI NO: 39597482 NR Description: Hypothetical protein CBG03144 [Caenorhabditis
  misc_feature (1)..(259): Homolog of NCBI NO: 31237882 NR Description: ENSANGP00000021424 [Anopheles gambiae]
  misc_feature (1)..(259): Homolog of NCBI NO: 31237885 NR Description: ENSANGP00000024346 [Anopheles gambiae]
  misc_feature (1)..(260): Homolog of NCBI NO: 17532457 NR Description: Threonyl tRNA Synthetase TRS-1 (84.4 kD) (trs-1)
MTRVRRFVQDDAHIFCRVDQVEEEVKGVLDFIDYVYRIFGFTYELTLSTRPKDHIGDLETWAKAENDLEKALDDFGKPWVIKEGDGAFYGPKIDITVSDARNRKFQCATIQLDFQLPACFKLKYLSEKNEMEAPVMIHSAVLGSIERMFAILLEHYKGIWPFWLSPRQAIVCSLSEDCSSYAKQVQKQINEVGYYVDIDESDRSLRKKVADARDAPYNYILVVGQKEVATGQVTVRLREDPEGRKDLPEMSIESLLDEFKFKTVNFL

SEQ ID NO: 107855 - protein, 209 aa, Arabidopsis thaliana
  peptide (1)..(209): Ceres Seq. ID no. 13651876
  misc_feature (62)..(127): Pfam Name: TGS domain Pfam Description: TGS domain
  misc_feature (24)..(205): Homolog of NCBI NO: 15220911 NR Description: threonyl-tRNA synthetase -related [Arabidopsis
  misc_feature (17)..(194): Homolog of NCBI NO: 11271129 NR Description: threonine-tRNA ligase (EC 6.1.1.3) [imported] -
  misc_feature (17)..(194): Homolog of NCBI NO: 30690426 NR Description: threonyl-tRNA synthetase [Arabidopsis thaliana]
  misc_feature (24)..(194): Homolog of NCBI NO: 15081626 NR Description: AT5g26830/F2P16_90 [Arabidopsis thaliana]
  misc_feature (17)..(154): Homolog of NCBI NO: 7437517 NR Description: threonine-tRNA ligase (EC 6.1.1.3) - Arabidopsis
  misc_feature (167)..(194): Homolog of NCBI NO: 7437517 NR Description: threonine-tRNA ligase (EC 6.1.1.3) - Arabidopsis
  misc_feature (19)..(191): Homolog of NCBI NO: 38175524 NR Description: putative threonyl-tRNA synthetase [Oryza sativa
  misc_feature (13)..(193): Homolog of NCBI NO: 39597482 NR Description: Hypothetical protein CBG03144 [Caenorhabditis
  misc_feature (40)..(196): Homolog of NCBI NO: 31237882 NR Description: ENSANGP00000021424 [Anopheles gambiae]
  misc_feature (40)..(196): Homolog of NCBI NO: 31237885 NR Description: ENSANGP00000024346 [Anopheles gambiae]
LCSQRHLLYSIVSICPSFSAHPSMANNHHPKDEAYLSSVIPKRIRLFEEIQAEQLEQLQSRPHDPIKITLLPDGIEKEGRRWETSPMDIAVQISKGLAKSALVSSVNHVLWDMNRPLEGDCSLEIFGFDSDQGRNTFWHSSAHILGQALEQEYGCKLCIGPCEPRDEGFYYDSLYYGELGLNDNHFPNIEASVAYISFADIFFVLRYGM

SEQ ID NO: 107856 - DNA, 1282 bp, Arabidopsis thaliana
  misc_feature (1)..(1282): Ceres Seq. ID no. 13651897
  misc_feature: MA Experiment ID: 20000166 Result: Down-regulated in Transcription
  misc_feature: MA Experiment 20000166 PARAMETER Experiment Name: At_100uM_ABA_P Parameter: Age (day) Value: 14
  misc_feature: MA Experiment 20000166 PARAMETER Experiment Name: At_100uM_ABA_P Parameter: Organism Value: A. thaliana
  misc_feature: MA Experiment 20000166 PARAMETER Experiment Name: At_100uM_ABA_P Parameter: Plant Line Value: WS
  misc_feature: MA Experiment 20000166 PARAMETER Experiment Name: At_100uM_ABA_P Parameter: Timepoint (hr) Value: 1
  misc_feature: MA Experiment 20000166 PARAMETER Experiment Name: At_100uM_ABA_P Parameter: Tissue Value: Aerial
  misc_feature: MA Experiment 20000166 PARAMETER Experiment Name: At_100uM_ABA_P Parameter: Treatment Value: 100uM ABA vs. No Treatment
  misc_feature: MA Experiment ID: 20000171 Result: Down-regulated in Transcription
  misc_feature: MA Experiment 20000171 PARAMETER Experiment Name: At_42deg_Heat_P Parameter: Age (day) Value: 14
  misc_feature: MA Experiment 20000171 PARAMETER Experiment Name: At_42deg_Heat_P Parameter: Organism Value: A. thaliana
  misc_feature: MA Experiment 20000171 PARAMETER Experiment Name: At_42deg_Heat_P Parameter: Plant Line Value: WS
  misc_feature: MA Experiment 20000171 PARAMETER Experiment Name: At_42deg_Heat_P Parameter: Temperature (deg C) Value: 42 vs. 22
  misc_feature: MA Experiment 20000171 PARAMETER Experiment Name: At_42deg_Heat_P Parameter: Timepoint (hr) Value: 1
  misc_feature: MA Experiment 20000171 PARAMETER Experiment Name: At_42deg_Heat_P Parameter: Tissue Value: Aerial
  misc_feature: MA Experiment ID: 20000173 Result: Down-regulated in Transcription
  misc_feature: MA Experiment 20000173 PARAMETER Experiment Name: At_42deg_Heat_P Parameter: Age (day) Value: 14
  misc_feature: MA Experiment 20000173 PARAMETER Experiment Name: At_42deg_Heat_P Parameter: Organism Value: A. thaliana
  misc_feature: MA Experiment 20000173 PARAMETER Experiment Name: At_42deg_Heat_P Parameter: Plant Line Value: WS
  misc_feature: MA Experiment 20000173 PARAMETER Experiment Name: At_42deg_Heat_P Parameter: Temperature (deg C) Value: 42 vs. 22
  misc_feature: MA Experiment 20000173 PARAMETER Experiment Name: At_42deg_Heat_P Parameter: Timepoint (hr) Value: 6
  misc_feature: MA Experiment 20000173 PARAMETER Experiment Name: At_42deg_Heat_P Parameter: Tissue Value: Aerial
  misc_feature: MA Experiment ID: 20000179 Result: Up-regulated in Transcription
  misc_feature: MA Experiment 20000179 PARAMETER Experiment Name: At_Germinating_Seeds_P Parameter: Age (hr) Value: 6 vs. 0
  misc_feature: MA Experiment 20000179 PARAMETER Experiment Name: At_Germinating_Seeds_P Parameter: Tissue Value: Germinating Seeds
  misc_feature: MA Experiment ID: 20000184 Result: Up-regulated in Transcription
  misc_feature: MA Experiment 20000184 PARAMETER Experiment Name: At_Shoots__P Parameter: Age (day) Value: 7
  misc_feature: MA Experiment 20000184 PARAMETER Experiment Name: At_Shoots__P Parameter: Tissue Value: Shoots vs. Whole Plant
  misc_feature: MA Experiment ID: 20000234 Result: Down-regulated in Transcription
  misc_feature: MA Experiment 20000234 PARAMETER Experiment Name: At_Siliques_P Parameter: Age (day) Value: 21
  misc_feature: MA Experiment 20000234 PARAMETER Experiment Name: At_Siliques_P Parameter: Organism Value: A. thaliana
  misc_feature: MA Experiment 20000234 PARAMETER Experiment Name: At_Siliques_P Parameter: Plant Line Value: WS
  misc_feature: MA Experiment 20000234 PARAMETER Experiment Name: At_Siliques_P Parameter: Tissue Value: Less Than 5mm Siliques vs. Whole Plant
  misc_feature: MA Experiment ID: 20000235 Result: Down-regulated in Transcription
  misc_feature: MA Experiment 20000235 PARAMETER Experiment Name: At_Siliques_P Parameter: Age (day) Value: 21
  misc_feature: MA Experiment 20000235 PARAMETER Experiment Name: At_Siliques_P Parameter: Organism Value: A. thaliana
  misc_feature: MA Experiment 20000235 PARAMETER Experiment Name: At_Siliques_P Parameter: Plant Line Value: WS
  misc_feature: MA Experiment 20000235 PARAMETER Experiment Name: At_Siliques_P Parameter: Tissue Value: 5-10mm Siliques vs. Whole Plant
  misc_feature: MA Experiment ID: 20000264 Result: Down-regulated in Transcription
  misc_feature: MA Experiment 20000264 PARAMETER Experiment Name: At_Open_Flower_P Parameter: Age (day) Value: 21
  misc_feature: MA Experiment 20000264 PARAMETER Experiment Name: At_Open_Flower_P Parameter: Plant Line Value: WS
  misc_feature: MA Experiment 20000264 PARAMETER Experiment Name: At_Open_Flower_P Parameter: Tissue Value: Open Flower vs. Whole Plant
  misc_feature: MA Experiment ID: 20000265 Result: Down-regulated in Transcription
  misc_feature: MA Experiment 20000265 PARAMETER Experiment Name: At_Open_Flower_P Parameter: Age (day) Value: 21
  misc_feature: MA Experiment 20000265 PARAMETER Experiment Name: At_Open_Flower_P Parameter: Plant Line Value: WS
  misc_feature: MA Experiment 20000265 PARAMETER Experiment Name: At_Open_Flower_P Parameter: Tissue Value: Closed Flower vs. Whole Plant
  misc_feature: MA Experiment ID: 20000268 Result: Down-regulated in Transcription
  misc_feature: MA Experiment 20000268 PARAMETER Experiment Name: At_100mM_NaCl__P Parameter: Age (day) Value: 14
  misc_feature: MA Experiment 20000268 PARAMETER Experiment Name: At_100mM_NaCl__P Parameter: Organism Value: A. thaliana
  misc_feature: MA Experiment 20000268 PARAMETER Experiment Name: At_100mM_NaCl__P Parameter: Plant Line Value: WS
  misc_feature: MA Experiment 20000268 PARAMETER Experiment Name: At_100mM_NaCl__P Parameter: Timepoint (hr) Value: 6
  misc_feature: MA Experiment 20000268 PARAMETER Experiment Name: At_100mM_NaCl__P Parameter: Tissue Value: Whole Plant
  misc_feature: MA Experiment 20000268 PARAMETER Experiment Name: At_100mM_NaCl__P Parameter: Treatment Value: 100mM NaCl vs. No Treatment
  misc_feature: MA Experiment ID: 20000286 Result: Down-regulated in Transcription
  misc_feature: MA Experiment 20000286 PARAMETER Experiment Name: At_Open_Flower_P Parameter: Age (day) Value: 21
  misc_feature: MA Experiment 20000286 PARAMETER Experiment Name: At_Open_Flower_P Parameter: Plant Line Value: WS
  misc_feature: MA Experiment 20000286 PARAMETER Experiment Name: At_Open_Flower_P Parameter: Tissue Value: Half Open vs. Whole Plant
  misc_feature: MA Experiment ID: 20000437 Result: Down-regulated in Transcription
  misc_feature: MA Experiment 20000437 PARAMETER Experiment Name: At_Drought_P Parameter: Age (day) Value: 8
  misc_feature: MA Experiment 20000437 PARAMETER Experiment Name: At_Drought_P Parameter: Organism Value: A. thaliana
  misc_feature: MA Experiment 20000437 PARAMETER Experiment Name: At_Drought_P Parameter: Plant Line Value: WS
  misc_feature: MA Experiment 20000437 PARAMETER Experiment Name: At_Drought_P Parameter: Timepoint (hr) Value: 24
  misc_feature: MA Experiment 20000437 PARAMETER Experiment Name: At_Drought_P Parameter: Tissue Value: Whole Plant
  misc_feature: MA Experiment 20000437 PARAMETER Experiment Name: At_Drought_P Parameter: Treatment Value: Drought vs. No Drought
  misc_feature: MA Experiment ID: 20000438 Result: Up-regulated in Transcription
  misc_feature: MA Experiment 20000438 PARAMETER Experiment Name: At_Shoots__P Parameter: Age (day) Value: 14
  misc_feature: MA Experiment 20000438 PARAMETER Experiment Name: At_Shoots__P Parameter: Tissue Value: Shoots vs. Whole Plant
  misc_feature: MA Experiment ID: 20000451 Result: Up-regulated in Transcription
  misc_feature: MA Experiment 20000451 PARAMETER Experiment Name: At_CS6879_Shoots-Roots_P Parameter: Age (day) Value: 14
  misc_feature: MA Experiment 20000451 PARAMETER Experiment Name: At_CS6879_Shoots-Roots_P Parameter: Organism Value: A. thaliana
  misc_feature: MA Experiment 20000451 PARAMETER Experiment Name: At_CS6879_Shoots-Roots_P Parameter: Plant Line Value: CS6879 vs. WS
  misc_feature: MA Experiment 20000451 PARAMETER Experiment Name: At_CS6879_Shoots-Roots_P Parameter: Tissue Value: Roots
  misc_feature: MA Experiment ID: 20000527 Result: Down-regulated in Transcription
  misc_feature: MA Experiment 20000527 PARAMETER Experiment Name: At_10percent_PEG_P Parameter: Age (day) Value: 20
  misc_feature: MA Experiment 20000527 PARAMETER Experiment Name: At_10percent_PEG_P Parameter: Organism Value: A. thaliana
  misc_feature: MA Experiment 20000527 PARAMETER Experiment Name: At_10percent_PEG_P Parameter: Plant Line Value: WS
  misc_feature: MA Experiment 20000527 PARAMETER Experiment Name: At_10percent_PEG_P Parameter: Timepoint (day) Value: 20
  misc_feature: MA Experiment 20000527 PARAMETER Experiment Name: At_10percent_PEG_P Parameter: Tissue Value: Whole Plant
  misc_feature: MA Experiment 20000527 PARAMETER Experiment Name: At_10percent_PEG_P Parameter: Treatment Value: 10percent PEG vs. No Treatment
  misc_feature: MA Experiment ID: 20000794 Result: Down-regulated in Transcription
  misc_feature: MA Experiment 20000794 PARAMETER Experiment Name: At_Petals_P Parameter: Age (day) Value: 23-25 days
  misc_feature: MA Experiment 20000794 PARAMETER Experiment Name: At_Petals_P Parameter: Plant Line Value: WS
  misc_feature: MA Experiment 20000794 PARAMETER Experiment Name: At_Petals_P Parameter: Tissue Value: Petals vs. Whole plant
  misc_feature: MA Experiment ID: 20001451 Result: Up-regulated in Transcription
  misc_feature: MA Experiment 20001451 PARAMETER Experiment Name: At_Far-red-induction_P Parameter: Age (day) Value: 7
  misc_feature: MA Experiment 20001451 PARAMETER Experiment Name: At_Far-red-induction_P Parameter: Light Value: Far-red vs. White
  misc_feature: MA Experiment 20001451 PARAMETER Experiment Name: At_Far-red-induction_P Parameter: Organism Value: A. thaliana
  misc_feature: MA Experiment 20001451 PARAMETER Experiment Name: At_Far-red-induction_P Parameter: Plant Line Value: Columbia
  misc_feature: MA Experiment 20001451 PARAMETER Experiment Name: At_Far-red-induction_P Parameter: Timepoint (hr) Value: 24
  misc_feature: MA Experiment 20001451 PARAMETER Experiment Name: At_Far-red-induction_P Parameter: Tissue Value: Whole Plant
  misc_feature: MA Experiment ID: 20001906 Result: Up-regulated in Transcription
  misc_feature: MA Experiment 20001906 PARAMETER Experiment Name: At_Drought_Reproduction_P Parameter: Age (day) Value: 35
  misc_feature: MA Experiment 20001906 PARAMETER Experiment Name: At_Drought_Reproduction_P Parameter: Organism Value: A. thaliana
  misc_feature: MA Experiment 20001906 PARAMETER Experiment Name: At_Drought_Reproduction_P Parameter: Plant Line Value: WS
  misc_feature: MA Experiment 20001906 PARAMETER Experiment Name: At_Drought_Reproduction_P Parameter: Timepoint (day) Value: 5
  misc_feature: MA Experiment 20001906 PARAMETER Experiment Name: At_Drought_Reproduction_P Parameter: Tissue Value: Siliques
  misc_feature: MA Experiment 20001906 PARAMETER Experiment Name: At_Drought_Reproduction_P Parameter: Treatment Value: Drought vs. No Drought
gactagctcttcccatggcttcttcactgaagaagcttatctcaagctttctacttgtcttatactctaccaccatcattgttgcttcatcagaatctcgatgtcggcgctttacatctatcatcagctttggtgattccatcgcagacaccggaaatattctccatctctccgacgtcaatcatcttcctcaaaccgccttttttccttatggtgaaagcttcttccatcctccctctggtcgtgcctctgatggccgtctcatcatcgacttcatcgctgaattcttgggactaccgtatgttccaccttactttggatcccaaaacgttagctttgaacaagggatcaatttcgcggtgtatggagcaaccgcattggaccgagcgtattttgtggcaaaaggaattgaatctgatttcaccaacgttagtttaggtgttcagcttgacatcttcaagcagattttgcctaacctttgtgcctcatcttctcgtgattgcagagagatgcttggagactcgctgatactcatgggagagattggaggtaacgactttttttacccatcctccgaaggcaaaagtatcaatgaaaccaaactacaggatttgatcatcaaagctatttcttctgcaattgatttgatcgctttagggggcaaaacatttttggtacccggaggcttcccagcagggcagcgtgtcttactcaatatcagaacgcgacagaagaagactacgaccccttgacaggttgtatcccacggctcaatgaacttggagagcacgacaacgaacaacttaagacagaactcaaacgactccaaaaactctatcctgatgtcaacatcatttacgctgactaccataactccttataccggttttatcaagaaccagctaaatatgggtttaagaacaaacctttagctgcttgctgtggagtcggaggtaaatacaacttcactattggtaaggagtgtggatacgaaggagttagctattgtcaaaatccttccgagtatgtgaattgggatggttatcatttaaccgaagccgcctaccagaagatggctgagggtatactcaacggtccctatgcaactcctgctttcgactggtcctgccttggctctggtacagtggatacataaaaggagcagttagaattcatttgttgtaaaaaaaaaaaaagaggaagaaaattgtgtgatgatgattaacaaaaagattgcttgtacggcaggatttgactagtgacaaaaatttcgaggataaac

SEQ ID NO: 107857 - protein, 249 aa, Arabidopsis thaliana
  peptide (1)..(249): Ceres Seq. ID no. 13651898
  misc_feature (40)..(232): Pfam Name: GDSL-like Lipase/Acylhydrolase Pfam Description: GDSL-like Lipase/Acylhydrolase
  misc_feature (5)..(232): Homolog of NCBI NO: 30690523 NR Description: lipase, putative [Arabidopsis thaliana]
  misc_feature (5)..(232): Homolog of NCBI NO: 18396873 NR Description: lipase, putative [Arabidopsis thaliana] unknown protein [Arabidopsis thaliana]
  misc_feature (5)..(232): Homolog of NCBI NO: 10764854 NR Description: F1K23.13 [Arabidopsis thaliana]
  misc_feature (219)..(232): Homolog of NCBI NO: 10764854 NR Description: F1K23.13 [Arabidopsis thaliana]
  misc_feature (5)..(232): Homolog of NCBI NO: 15218756 NR Description: lipase [Arabidopsis thaliana]
  misc_feature (3)..(232): Homolog of NCBI NO: 10764854 NR Description: F1K23.13 [Arabidopsis thaliana]
  misc_feature (5)..(232): Homolog of NCBI NO: 15218751 NR Description: lipase, putative [Arabidopsis thaliana]
  misc_feature (9)..(232): Homolog of NCBI NO: 15218753 NR Description: lipase, putative [Arabidopsis thaliana]
  misc_feature (48)..(187): Homolog of NCBI NO: 10764854 NR Description: F1K23.13 [Arabidopsis thaliana]
  misc_feature (30)..(232): Homolog of NCBI NO: 10764854 NR Description: F1K23.13 [Arabidopsis thaliana]
LALPMASSLKKLISSFLLVLYSTTIIVASSESRCRRFTSIISFGDSIADTGNILHLSDVNHLPQTAFFPYGESFFHPPSGRASDGRLIIDFIAEFLGLPYVPPYFGSQNVSFEQGINFAVYGATALDRAYFVAKGIESDFTNVSLGVQLDIFKQILPNLCASSSRDCREMLGDSLILMGEIGGNDFFYPSSEGKSINETKLQDLIIKAISSAIDLIALGGKTFLVPGGFPAGQRVLLNIRTRQKKTTTP

SEQ ID NO: 107858 - protein, 245 aa, Arabidopsis thaliana
  peptide (1)..(245): Ceres Seq. ID no. 13651899
  misc_feature (36)..(228): Pfam Name: GDSL-like Lipase/Acylhydrolase Pfam Description: GDSL-like Lipase/Acylhydrolase
  misc_feature (1)..(228): Homolog of NCBI NO: 30690523 NR Description: lipase, putative [Arabidopsis thaliana]
  misc_feature (1)..(228): Homolog of NCBI NO: 18396873 NR Description: lipase, putative [Arabidopsis thaliana] unknown protein [Arabidopsis thaliana]
  misc_feature (1)..(228): Homolog of NCBI NO: 10764854 NR Description: F1K23.13 [Arabidopsis thaliana]
  misc_feature (215)..(228): Homolog of NCBI NO: 10764854 NR Description: F1K23.13 [Arabidopsis thaliana]
  misc_feature (1)..(228): Homolog of NCBI NO: 15218756 NR Description: lipase [Arabidopsis thaliana]
  misc_feature (1)..(228): Homolog of NCBI NO: 10764854 NR Description: F1K23.13 [Arabidopsis thaliana]
  misc_feature (1)..(228): Homolog of NCBI NO: 15218751 NR Description: lipase, putative [Arabidopsis thaliana]
  misc_feature (5)..(228): Homolog of NCBI NO: 15218753 NR Description: lipase, putative [Arabidopsis thaliana]
  misc_feature (44)..(183): Homolog of NCBI NO: 10764854 NR Description: F1K23.13 [Arabidopsis thaliana]
  misc_feature (26)..(228): Homolog of NCBI NO: 10764854 NR Description: F1K23.13 [Arabidopsis thaliana]
MASSLKKLISSFLLVLYSTTIIVASSESRCRRFTSIISFGDSIADTGNILHLSDVNHLPQTAFFPYGESFFHPPSGRASDGRLIIDFIAEFLGLPYVPPYFGSQNVSFEQGINFAVYGATALDRAYFVAKGIESDFTNVSLGVQLDIFKQILPNLCASSSRDCREMLGDSLILMGEIGGNDFFYPSSEGKSINETKLQDLIIKAISSAIDLIALGGKTFLVPGGFPAGQRVLLNIRTRQKKTTTP

SEQ ID NO: 107859 - DNA, 1750 bp, Arabidopsis thaliana
  misc_feature (1)..(1750): Ceres Seq. ID no. 13651904
  misc_feature: MA Experiment ID: 20000171 Result: Down-regulated in Transcription
  misc_feature: MA Experiment 20000171 PARAMETER Experiment Name: At_42deg_Heat_P Parameter: Age (day) Value: 14
  misc_feature: MA Experiment 20000171 PARAMETER Experiment Name: At_42deg_Heat_P Parameter: Organism Value: A. thaliana
  misc_feature: MA Experiment 20000171 PARAMETER Experiment Name: At_42deg_Heat_P Parameter: Plant Line Value: WS
  misc_feature: MA Experiment 20000171 PARAMETER Experiment Name: At_42deg_Heat_P Parameter: Temperature (deg C) Value: 42 vs. 22
  misc_feature: MA Experiment 20000171 PARAMETER Experiment Name: At_42deg_Heat_P Parameter: Timepoint (hr) Value: 1
  misc_feature: MA Experiment 20000171 PARAMETER Experiment Name: At_42deg_Heat_P Parameter: Tissue Value: Aerial
  misc_feature: MA Experiment ID: 20000173 Result: Down-regulated in Transcription
  misc_feature: MA Experiment 20000173 PARAMETER Experiment Name: At_42deg_Heat_P Parameter: Age (day) Value: 14
  misc_feature: MA Experiment 20000173 PARAMETER Experiment Name: At_42deg_Heat_P Parameter: Organism Value: A. thaliana
  misc_feature: MA Experiment 20000173 PARAMETER Experiment Name: At_42deg_Heat_P Parameter: Plant Line Value: WS
  misc_feature: MA Experiment 20000173 PARAMETER Experiment Name: At_42deg_Heat_P Parameter: Temperature (deg C) Value: 42 vs. 22
  misc_feature: MA Experiment 20000173 PARAMETER Experiment Name: At_42deg_Heat_P Parameter: Timepoint (hr) Value: 6
  misc_feature: MA Experiment 20000173 PARAMETER Experiment Name: At_42deg_Heat_P Parameter: Tissue Value: Aerial
  misc_feature: MA Experiment ID: 20000180 Result: Down-regulated in Transcription
  misc_feature: MA Experiment 20000180 PARAMETER Experiment Name: At_Germinating_Seeds_P Parameter: Age (hr) Value: 24 vs. 0
  misc_feature: MA Experiment 20000180 PARAMETER Experiment Name: At_Germinating_Seeds_P Parameter: Tissue Value: Germinating Seeds
  misc_feature: MA Experiment ID: 20000184 Result: Down-regulated in Transcription
  misc_feature: MA Experiment 20000184 PARAMETER Experiment Name: At_Shoots__P Parameter: Age (day) Value: 7
  misc_feature: MA Experiment 20000184 PARAMETER Experiment Name: At_Shoots__P Parameter: Tissue Value: Shoots vs. Whole Plant
accggagtgaaagagaactgttgtcttccctctggcgagtactaccgtacaaaccaaatccttcgtatttcactttgagcggtcttattagggttttacttgtccagaccaaaagcagtaaagatgtgcggtaggactcgatgtactttaagacccgacgatgtccccagagcttctcaccgccacaccgttcctacccgatttcttcacctcgaccgttatcgtccatcttacaatgttgcccctggatcctatatacctgttctacggagagacaatgaagaagttgttggtgatggtgttgttgttcattgtatgaagtggggattagtgccaagtttcactaagaaaactgataagcctgatttcttcaaaatgtttaatgctcggtctgaatctgtggctgagaaagcgtcttttcgtcgattgcttcccaagaataggtgccttgttgcagttgatgggttctatgagtggaagaaggaaggttcaaaaaagcaaccctactacatccattttgaggatgggagacctctcgtatttgctgctctttttgatacttggcagaactcaggaggtgagacactttacacctttacgattttgacaaccgcttcctcttcagccctccaatggctccatgacagaatgcctgtaattcttggtgataaggattcaatcgacacatggttagatgatccctcgacaacgaaactgcagccattactttcaccatatgaaaaatcggatttggtatggtatccagtaacctctgcaattggtaaaccaacgtttgatggaccagagtgtattcaacagataccgctaaagacttcacaaaatagcttgatctcgaagtttttctcaacaaagcagcccaaaacagatgaaggagacaaagaaaccaaatcaacagatgcaaatatcatagttgatttgaaaaaggaacctacggctgaaaaggacacgttttctgacagcattaagaaaattgaagaactagacggggagaaagatatgtcgaatgtagccaaaaatctggagtttcaagagattgtgaaagcagaaccatttgttgaagataactcagcagttgcgtcacttcctgaacctgtaaagaatgatgttcaggagggtacaaaggaagaaggcaaatccctaaagactggtcttactaaagaaacaggtgagagcagtgccagtataccggctgagtcctacatccttgatctccaaagaatctcaaaagaagaacccgagactcaaagccatcatttctttactgcagatgagagattgaatcagctgcatgaggctgtcgaagatattccaggaaatgaaaaccagaagacagttttaactagcccgacgacgaaggaaggtggcttagtgtttagcgaaaagagtgggacaaagcgagactatgaggtattctcagctcaagaaaagccacagaaacactatgagaggttgcaaaatgttaaaagcagtgggaaacaaggaaagatgcatggaatggggaaatctaacatcaagaaatctaaggagacgcagtctacattacatttctttttcgatgagaaatagttttgagtctacataacatctatgaggaccatgttggcctacttttgttgtagataatgttagataagaccatcgttttgggaatgttgcttgtattgtatgtgtagtgtttgatctttgatctaaggtaatattattatgaatgaattgggtttttaatgcc

SEQ ID NO: 107860 - protein, 487 aa, Arabidopsis thaliana
  peptide (1)..(487): Ceres Seq. ID no. 13651905
  misc_feature (1)..(228): Pfam Name: Uncharacterised ACR, COG2135 Pfam Description: Uncharacterised ACR, COG2135
  misc_feature (1)..(487): Homolog of NCBI NO: 30683129 NR Description: expressed protein [Arabidopsis thaliana] unknown protein [Arabidopsis thaliana]
  misc_feature (22)..(487): Homolog of NCBI NO: 7487880 NR Description: hypothetical protein At2g26470 [imported] - thaliana >gi|2739372|gb|AAC14496.1| hypothetical protein
  misc_feature (1)..(33): Homolog of NCBI NO: 7487880 NR Description: hypothetical protein At2g26470 [imported] - thaliana >gi|2739372|gb|AAC14496.1| hypothetical protein
  misc_feature (1)..(233): Homolog of NCBI NO: 39995151 NR Description: conserved hypothetical protein [Geobacter PCA] >gi|39981913|gb|AAR33375.1| conserved hypothetical protein
  misc_feature (115)..(304): Homolog of NCBI NO: 38494381 NR Description: Unknown (protein for MGC:75607) [Silurana
  misc_feature (1)..(132): Homolog of NCBI NO: 38494381 NR Description: Unknown (protein for MGC:75607) [Silurana
  misc_feature (1)..(242): Homolog of NCBI NO: 17230686 NR Description: hypothetical protein [Nostoc sp. PCC 7120]
  misc_feature (1)..(241): Homolog of NCBI NO: 23124313 NR Description: hypothetical protein [Nostoc punctiforme]
  misc_feature (1)..(233): Homolog of NCBI NO: 37522067 NR Description: hypothetical protein gll2498 [Gloeobacter
  misc_feature (35)..(233): Homolog of NCBI NO: 22963055 NR Description: hypothetical protein [Rhodopseudomonas palustris]
MCGRTRCTLRPDDVPRASHRHTVPTRFLHLDRYRPSYNVAPGSYIPVLRRDNEEVVGDGVVVHCMKWGLVPSFTKKTDKPDFFKMFNARSESVAEKASFRRLLPKNRCLVAVDGFYEWKKEGSKKQPYYIHFEDGRPLVFAALFDTWQNSGGETLYTFTILTTASSSALQWLHDRMPVILGDKDSIDTWLDDPSTTKLQPLLSPYEKSDLVWYPVTSAIGKPTFDGPECIQQIPLKTSQNSLISKFFSTKQPKTDEGDKETKSTDANIIVDLKKEPTAEKDTFSDSIKKIEELDGEKDMSNVAKNLEFQEIVKAEPFVEDNSAVASLPEPVKNDVQEGTKEEGKSLKTGLTKETGESSASIPAESYILDLQRISKEEPETQSHHFFTADERLNQLHEAVEDIPGNENQKTVLTSPTTKEGGLVFSEKSGTKRDYEVFSAQEKPQKHYERLQNVKSSGKQGKMHGMGKSNIKKSKETQSTLHFFFDEK

SEQ ID NO: 107861 - protein, 423 aa, Arabidopsis thaliana; identical to SEQ ID NO: 70404
  peptide (1)..(423): Ceres Seq. ID no. 13651906
  misc_feature (1)..(164): Pfam Name: Uncharacterised ACR, COG2135 Pfam Description: Uncharacterised ACR, COG2135
  misc_feature (1)..(423): Homolog of NCBI NO: 30683129 NR Description: expressed protein [Arabidopsis thaliana] unknown protein [Arabidopsis thaliana]
  misc_feature (1)..(423): Homolog of NCBI NO: 7487880 NR Description: hypothetical protein At2g26470 [imported] - thaliana >gi|2739372|gb|AAC14496.1| hypothetical protein
  misc_feature (1)..(169): Homolog of NCBI NO: 39995151 NR Description: conserved hypothetical protein [Geobacter PCA] >gi|39981913|gb|AAR33375.1| conserved hypothetical protein
  misc_feature (51)..(240): Homolog of NCBI NO: 38494381 NR Description: Unknown (protein for MGC:75607) [Silurana
  misc_feature (1)..(68): Homolog of NCBI NO: 38494381 NR Description: Unknown (protein for MGC:75607) [Silurana
  misc_feature (1)..(178): Homolog of NCBI NO: 17230686 NR Description: hypothetical protein [Nostoc sp. PCC 7120]
  misc_feature (1)..(177): Homolog of NCBI NO: 23124313 NR Description: hypothetical protein [Nostoc punctiforme]
  misc_feature (1)..(169): Homolog of NCBI NO: 37522067 NR Description: hypothetical protein gll2498 [Gloeobacter
  misc_feature (1)..(169): Homolog of NCBI NO: 22963055 NR Description: hypothetical protein [Rhodopseudomonas palustris]
  misc_feature (1)..(169): Homolog of NCBI NO: 23098326 NR Description: hypothetical protein [Oceanobacillus iheyensis >gi|22776552|dbj|BAC12827.1| hypothetical conserved protein

SEQ ID NO: 107862 - protein, 403 aa, Arabidopsis thaliana; identical to SEQ ID NO: 70405
  peptide (1)..(403): Ceres Seq. ID no. 13651907
  misc_feature (1)..(144): Pfam Name: Uncharacterised ACR, COG2135 Pfam Description: Uncharacterised ACR, COG2135
  misc_feature (1)..(403): Homolog of NCBI NO: 30683129 NR Description: expressed protein [Arabidopsis thaliana] unknown protein [Arabidopsis thaliana]
  misc_feature (1)..(403): Homolog of NCBI NO: 7487880 NR Description: hypothetical protein At2g26470 [imported] - thaliana >gi|2739372|gb|AAC14496.1| hypothetical protein
  misc_feature (1)..(149): Homolog of NCBI NO: 39995151 NR Description: conserved hypothetical protein [Geobacter PCA] >gi|39981913|gb|AAR33375.1| conserved hypothetical protein
  misc_feature (31)..(220): Homolog of NCBI NO: 38494381 NR Description: Unknown (protein for MGC:75607) [Silurana
  misc_feature (1)..(48): Homolog of NCBI NO: 38494381 NR Description: Unknown (protein for MGC:75607) [Silurana
  misc_feature (1)..(158): Homolog of NCBI NO: 17230686 NR Description: hypothetical protein [Nostoc sp. PCC 7120]
  misc_feature (1)..(157): Homolog of NCBI NO: 23124313 NR Description: hypothetical protein [Nostoc punctiforme]
  misc_feature (1)..(149): Homolog of NCBI NO: 37522067 NR Description: hypothetical protein gll2498 [Gloeobacter
  misc_feature (1)..(149): Homolog of NCBI NO: 22963055 NR Description: hypothetical protein [Rhodopseudomonas palustris]
  misc_feature (1)..(149): Homolog of NCBI NO: 23098326 NR Description: hypothetical protein [Oceanobacillus iheyensis >gi|22776552|dbj|BAC12827.1| hypothetical conserved protein

SEQ ID NO: 107863 - DNA, 1211 bp, Arabidopsis thaliana
  misc_feature (1)..(1211): Ceres Seq. ID no. 13651958
  misc_feature: MA Experiment ID: 20000184 Result: Up-regulated in Transcription
  misc_feature: MA Experiment 20000184 PARAMETER Experiment Name: At_Shoots__P Parameter: Age (day) Value: 7
  misc_feature: MA Experiment 20000184 PARAMETER Experiment Name: At_Shoots__P Parameter: Tissue Value: Shoots vs. Whole Plant
gactactctcactctctttctattctctcttccgccgctttttccatcgttcgaaagtaaagttgctcgctttactcgttcaagcattcaactttagaatccgatcgaatcctcctgtaacagcaatgatgaatcggatcctcttgtttatgatcctggcttttgtctcatctctttcagaagttgagccaatttcgttcaagatcacgaatcgttgccggaacacgatatggcccggtttgctctctggtgctaactcagcgccgctccccacaactggctttcgtctctctagaggaaaatctaaaaccgtcgcaataccagagtcgtggtccggtcgtctctgggcacgaaccttgtgttcacaagatcggagttccggttctttcgtctgcttaaccggagattgcggctcgggaaaagtcgaatgttcaggctccggagctaaacctccagcaactctcgccgagtttactctcaacggcacaggaggactagatttttacgacgttagcctcgtcgacggttacaatctcccgatgctaatcttgcccaagaaaatcgtcattggaggatgcggagccaccgggtgtctcgtggacttgaacggcgcgtgtcccagagacctaaagctggtgacgcgtgggaatgggaacggtgttgcttgccgtagcgcgtgcgaggcattcggagacccaaggtattgctgcagcgatgcgtacgccacgccggacacgtgtcagccttcggtttactcgctcttctttaagcatgcgtgcccacgagcatacagctacgcctatgacgataagacgagcacttacacttgcgccaccggagccgattacttcatcatcttctgtccgccaccgtatacaagcgagaagcttttaggatcgaggaaagatggtgcaacactgccactagtaaacaagagcatgattcatttgccgcatccgcacagcagctgagccatcttcttattatatgtcttaagtccttcttacatcaggtccgtcttacatgggtactcgcattgtctgttgaggttactatactgttttcatttcctctttcttgttgcaggcagatagaaaattcatgtgtagaaaaatgtcattacggttaataccaaggtagaattacttctttacttgatagaaaaattcatgtgtaaatctttacttgttttacacttgttacttctttcg

SEQ ID NO: 107864 - protein, 322 aa, Arabidopsis thaliana
  peptide (1)..(322): Ceres Seq. ID no. 13651959
  misc_feature (70)..(288): Pfam Name: Thaumatin family Pfam Description: Thaumatin family
  misc_feature (42)..(322): Homolog of NCBI NO: 30692042 NR Description: thaumatin family [Arabidopsis thaliana]
  misc_feature (58)..(292): Homolog of NCBI NO: 7442169 NR Description: pathogenesis-related protein F20M13.230 -
  misc_feature (51)..(322): Homolog of NCBI NO: 6273383 NR Description: SCUTL1 [Vitis vinifera]
  misc_feature (47)..(292): Homolog of NCBI NO: 4239765 NR Description: putative thaumatin-like protein precursor
  misc_feature (46)..(295): Homolog of NCBI NO: 15233437 NR Description: thaumatin family [Arabidopsis thaliana]
  misc_feature (47)..(315): Homolog of NCBI NO: 37531042 NR Description: putative thaumatin-like protein [Oryza sativa
  misc_feature (48)..(290): Homolog of NCBI NO: 15227907 NR Description: thaumatin family [Arabidopsis thaliana]
  misc_feature (47)..(295): Homolog of NCBI NO: 15222875 NR Description: thaumatin family [Arabidopsis thaliana]
  misc_feature (47)..(292): Homolog of NCBI NO: 4105697 NR Description: thaumatin-like protein [Arabidopsis thaliana]
  misc_feature (47)..(322): Homolog of NCBI NO: 25296204 NR Description: hypothetical protein T20H2.19 [imported] - thaliana >gi|8778995|gb|AAF79910.1|AC022472_19 Contains to SCUTL1 mRNA from Vitis vinifera gb|AF195653 and is a member of
LLSLSFYSLFRRFFHRSKVKLLALLVQAFNFRIRSNPPVTAMMNRILLFMILAFVSSLSEVEPISFKITNRCRNTIWPGLLSGANSAPLPTTGFRLSRGKSKTVAIPESWSGRLWARTLCSQDRSSGSFVCLTGDCGSGKVECSGSGAKPPATLAEFTLNGTGGLDFYDVSLVDGYNLPMLILPKKIVIGGCGATGCLVDLNGACPRDLKLVTRGNGNGVACRSACEAFGDPRYCCSDAYATPDTCQPSVYSLFFKHACPRAYSYAYDDKTSTYTCATGADYFIIFCPPPYTSEKLLGSRKDGATLPLVNKSMIHLPHPHSS

SEQ ID NO: 107865 - protein, 281 aa, Arabidopsis thaliana; identical to SEQ ID NO: 74372
  peptide (1)..(281): Ceres Seq. ID no. 13651960
  misc_feature (29)..(247): Pfam Name: Thaumatin family Pfam Description: Thaumatin family
  misc_feature (1)..(281): Homolog of NCBI NO: 30692042 NR Description: thaumatin family [Arabidopsis thaliana]
  misc_feature (17)..(251): Homolog of NCBI NO: 7442169 NR Description: pathogenesis-related protein F20M13.230 -
  misc_feature (10)..(281): Homolog of NCBI NO: 6273383 NR Description: SCUTL1 [Vitis vinifera]
  misc_feature (6)..(251): Homolog of NCBI NO: 4239765 NR Description: putative thaumatin-like protein precursor
  misc_feature (5)..(254): Homolog of NCBI NO: 15233437 NR Description: thaumatin family [Arabidopsis thaliana]
  misc_feature (6)..(274): Homolog of NCBI NO: 37531042 NR Description: putative thaumatin-like protein [Oryza sativa
  misc_feature (7)..(249): Homolog of NCBI NO: 15227907 NR Description: thaumatin family [Arabidopsis thaliana]
  misc_feature (6)..(254): Homolog of NCBI NO: 15222875 NR Description: thaumatin family [Arabidopsis thaliana]
  misc_feature (6)..(251): Homolog of NCBI NO: 4105697 NR Description: thaumatin-like protein [Arabidopsis thaliana]
  misc_feature (6)..(281): Homolog of NCBI NO: 25296204 NR Description: hypothetical protein T20H2.19 [imported] - thaliana >gi|8778995|gb|AAF79910.1|AC022472_19 Contains to SCUTL1 mRNA from Vitis vinifera gb|AF195653 and is a member of

SEQ ID NO: 107866 - protein, 280 aa, Arabidopsis thaliana; identical to SEQ ID NO: 74373
  peptide (1)..(280): Ceres Seq. ID no. 13651961
  misc_feature (28)..(246): Pfam Name: Thaumatin family Pfam Description: Thaumatin family
  misc_feature (1)..(280): Homolog of NCBI NO: 30692042 NR Description: thaumatin family [Arabidopsis thaliana]
  misc_feature (16)..(250): Homolog of NCBI NO: 7442169 NR Description: pathogenesis-related protein F20M13.230 -
  misc_feature (9)..(280): Homolog of NCBI NO: 6273383 NR Description: SCUTL1 [Vitis vinifera]
  misc_feature (5)..(250): Homolog of NCBI NO: 4239765 NR Description: putative thaumatin-like protein precursor
  misc_feature (4)..(253): Homolog of NCBI NO: 15233437 NR Description: thaumatin family [Arabidopsis thaliana]
  misc_feature (5)..(273): Homolog of NCBI NO: 37531042 NR Description: putative thaumatin-like protein [Oryza sativa
  misc_feature (6)..(248): Homolog of NCBI NO: 15227907 NR Description: thaumatin family [Arabidopsis thaliana]
  misc_feature (5)..(253): Homolog of NCBI NO: 15222875 NR Description: thaumatin family [Arabidopsis thaliana]
  misc_feature (5)..(250): Homolog of NCBI NO: 4105697 NR Description: thaumatin-like protein [Arabidopsis thaliana]
  misc_feature (5)..(280): Homolog of NCBI NO: 25296204 NR Description: hypothetical protein T20H2.19 [imported] - thaliana >gi|8778995|gb|AAF79910.1|AC022472_19 Contains to SCUTL1 mRNA from Vitis vinifera gb|AF195653 and is a member of

SEQ ID NO: 107867 - DNA, 1405 bp, Arabidopsis thaliana
  misc_feature (1)..(1405): Ceres Seq. ID no. 13651977
  misc_feature: MA Experiment ID: 20000169 Result: Up-regulated in Transcription
  misc_feature: MA Experiment 20000169 PARAMETER Experiment Name: At_100uM_ABA_P Parameter: Age (day) Value: 14
  misc_feature: MA Experiment 20000169 PARAMETER Experiment Name: At_100uM_ABA_P Parameter: Organism Value: A. thaliana
  misc_feature: MA Experiment 20000169 PARAMETER Experiment Name: At_100uM_ABA_P Parameter: Plant Line Value: WS
  misc_feature: MA Experiment 20000169 PARAMETER Experiment Name: At_100uM_ABA_P Parameter: Timepoint (hr) Value: 6
  misc_feature: MA Experiment 20000169 PARAMETER Experiment Name: At_100uM_ABA_P Parameter: Tissue Value: Aerial
  misc_feature: MA Experiment 20000169 PARAMETER Experiment Name: At_100uM_ABA_P Parameter: Treatment Value: 100uM ABA vs. No Treatment
  misc_feature: MA Experiment ID: 20000180 Result: Up-regulated in Transcription
  misc_feature: MA Experiment 20000180 PARAMETER Experiment Name: At_Germinating_Seeds_P Parameter: Age (hr) Value: 24 vs. 0
  misc_feature: MA Experiment 20000180 PARAMETER Experiment Name: At_Germinating_Seeds_P Parameter: Tissue Value: Germinating Seeds
  misc_feature: MA Experiment ID: 20000436 Result: Up-regulated in Transcription
  misc_feature: MA Experiment 20000436 PARAMETER Experiment Name: At_Drought_P Parameter: Age (day) Value: 7
  misc_feature: MA Experiment 20000436 PARAMETER Experiment Name: At_Drought_P Parameter: Organism Value: A. thaliana
  misc_feature: MA Experiment 20000436 PARAMETER Experiment Name: At_Drought_P Parameter: Plant Line Value: WS
  misc_feature: MA Experiment 20000436 PARAMETER Experiment Name: At_Drought_P Parameter: Timepoint (hr) Value: 12
  misc_feature: MA Experiment 20000436 PARAMETER Experiment Name: At_Drought_P Parameter: Tissue Value: Whole Plant
  misc_feature: MA Experiment 20000436 PARAMETER Experiment Name: At_Drought_P Parameter: Treatment Value: Drought vs. No Drought
  misc_feature: MA Experiment ID: 20000437 Result: Up-regulated in Transcription
  misc_feature: MA Experiment 20000437 PARAMETER Experiment Name: At_Drought_P Parameter: Age (day) Value: 8
  misc_feature: MA Experiment 20000437 PARAMETER Experiment Name: At_Drought_P Parameter: Organism Value: A. thaliana
  misc_feature: MA Experiment 20000437 PARAMETER Experiment Name: At_Drought_P Parameter: Plant Line Value: WS
  misc_feature: MA Experiment 20000437 PARAMETER Experiment Name: At_Drought_P Parameter: Timepoint (hr) Value: 24
  misc_feature: MA Experiment 20000437 PARAMETER Experiment Name: At_Drought_P Parameter: Tissue Value: Whole Plant
  misc_feature: MA Experiment 20000437 PARAMETER Experiment Name: At_Drought_P Parameter: Treatment Value: Drought vs. No Drought
  misc_feature: MA Experiment ID: 20000496 Result: Up-regulated in Transcription
  misc_feature: MA Experiment 20000496 PARAMETER Experiment Name: At_Guard_Cells_P Parameter: Harvest Date Value: 7/19/2002
  misc_feature: MA Experiment 20000496 PARAMETER Experiment Name: At_Guard_Cells_P Parameter: Organism Value: Canola
  misc_feature: MA Experiment 20000496 PARAMETER Experiment Name: At_Guard_Cells_P Parameter: Tissue Value: Guard Cells vs. Leaves
  misc_feature: MA Experiment ID: 20001557 Result: Down-regulated in Transcription
  misc_feature: MA Experiment 20001557 PARAMETER Experiment Name: At_Drought_Soil_Dry_P Parameter: Age (day) Value: 27
  misc_feature: MA Experiment 20001557 PARAMETER Experiment Name: At_Drought_Soil_Dry_P Parameter: Organism Value: A. thaliana
  misc_feature: MA Experiment 20001557 PARAMETER Experiment Name: At_Drought_Soil_Dry_P Parameter: Plant Line Value: WS
  misc_feature: MA Experiment 20001557 PARAMETER Experiment Name: At_Drought_Soil_Dry_P Parameter: Post Timepoint (hr) Value: 3
  misc_feature: MA Experiment 20001557 PARAMETER Experiment Name: At_Drought_Soil_Dry_P Parameter: Post-Treatment Value: Re-Water vs. No Drought
  misc_feature: MA Experiment 20001557 PARAMETER Experiment Name: At_Drought_Soil_Dry_P Parameter: Timepoint (day) Value: 13
  misc_feature: MA Experiment 20001557 PARAMETER Experiment Name: At_Drought_Soil_Dry_P Parameter: Treatment Value: Drought vs. No Drought
  misc_feature: MA Experiment ID: 20001558 Result: Down-regulated in Transcription
  misc_feature: MA Experiment 20001558 PARAMETER Experiment Name: At_Drought_Soil_Dry_P Parameter: Age (day) Value: 27
  misc_feature: MA Experiment 20001558 PARAMETER Experiment Name: At_Drought_Soil_Dry_P Parameter: Organism Value: A. thaliana
  misc_feature: MA Experiment 20001558 PARAMETER Experiment Name: At_Drought_Soil_Dry_P Parameter: Plant Line Value: WS
  misc_feature: MA Experiment 20001558 PARAMETER Experiment Name: At_Drought_Soil_Dry_P Parameter: Post Timepoint (hr) Value: 6
  misc_feature: MA Experiment 20001558 PARAMETER Experiment Name: At_Drought_Soil_Dry_P Parameter: Post-Treatment Value: Re-Water vs. No Drought
  misc_feature: MA Experiment 20001558 PARAMETER Experiment Name: At_Drought_Soil_Dry_P Parameter: Timepoint (day) Value: 13
  misc_feature: MA Experiment 20001558 PARAMETER Experiment Name: At_Drought_Soil_Dry_P Parameter: Treatment Value: Drought vs. No Drought
  misc_feature: MA Experiment ID: 20001910 Result: Up-regulated in Transcription
  misc_feature: MA Experiment 20001910 PARAMETER Experiment Name: At_Drought_Reproduction_P Parameter: Age (day) Value: 37
  misc_feature: MA Experiment 20001910 PARAMETER Experiment Name: At_Drought_Reproduction_P Parameter: Organism Value: A. thaliana
  misc_feature: MA Experiment 20001910 PARAMETER Experiment Name: At_Drought_Reproduction_P Parameter: Plant Line Value: WS
  misc_feature: MA Experiment 20001910 PARAMETER Experiment Name: At_Drought_Reproduction_P Parameter: Timepoint (day) Value: 7
  misc_feature: MA Experiment 20001910 PARAMETER Experiment Name: At_Drought_Reproduction_P Parameter: Tissue Value: Flowers
  misc_feature: MA Experiment 20001910 PARAMETER Experiment Name: At_Drought_Reproduction_P Parameter: Treatment Value: Drought vs. No Drought
ctctctctctccccccatttgaattatttcaccacgactccaaaaatcctgcgattctcattccttcttcctgtttccgtagcggggattttgtgatcatcaatatcaaaaacaatcagatttcttctaccaaacgattaattgccttttgggatacgattcagggcttcttttggggcctctgtttgatttaacaccttgtttgctgcaaaccaagatagcaaaggaaacgatggtgtcggacaatgagatgggtctggtattagctgtgtcgtcgagcgtcttcataggttccagcttcattttgaagaagaaaggtctcaagcgcgctgctgctaatggcacccgcgctggtttcggaggttatacatatttgttagagccactttggtgggtaggcttggtaacaatgacttttggagaaattgctaactttgtggcttacgtttatgcacctgctgtactagtcactcctcttggcgcattaagtataatcatcagtgctgttttggcacatttcttgttagacgaaaaacttaggaaaatgggagtttggggatgtgtttgttgcattgtgggctcagttatgatcgtcatacacgcacctcaggagcagactcccaattctgtagaagaaatctggaaactagcaatgcaaccagcttttctaatttacgtagccatatcaatgtcgatagtccttgctttgattctctactgtgaacctctctgcggccaaaccaacattcttgtgtatatcggaatttgttcattgatgggttctctcacagttatgagcatcaaggctgtagggattgccataaagttaacatttgaagggataaaccagatctggtatccagagacttggttttttgccatggttgcagcaatctgtgttgttatgcaaatgatttacctcaacaaggcgctggacacattcaacgcagcaattgtttctccaatctattatgtgatgttcacaacactcacaattgtcgctagtgcaatcatgttcaaggactggaatgggcaaaacacagacagcatagcctctgagatttgtggattcatcacagtgcttacaggaacggttatactccattccacgagagaagaggaacaagcttcgccacgacgaatgagatggcaggattcagggaagagctttgacgaagaacatttgacaagtttgtacagtcctgaatattaggaaggtaacaaagatttaaaccttgtgctgaacggaaggatgttgggatccgaatcagaagatcatctaattaatctcttagtggggaaaagaatgtaaactagctttctgtatatacttgatagttttgtaacagtcttttgtatacaaatttgtccactgtttgttcatattcatttctttttgagctag

SEQ ID NO: 107868 - protein, 326 aa, Arabidopsis thaliana; identical to SEQ ID NO: 97985
  peptide (1)..(326): Ceres Seq. ID no. 13651978
  misc_feature (1)..(300): Pfam Name: Protein of unknown function (DUF803) Pfam Description: Protein of unknown function (DUF803)
  misc_feature (1)..(326): Homolog of NCBI NO: 26449939 NR Description: unknown protein [Arabidopsis thaliana]
  misc_feature (1)..(326): Homolog of NCBI NO: 30681265 NR Description: expressed protein [Arabidopsis thaliana]
  misc_feature (1)..(326): Homolog of NCBI NO: 25412015 NR Description: hypothetical protein At2g21120 [imported] - thaliana >gi|4803931|gb|AAD29804.1| unknown protein [Arabidopsis
  misc_feature (1)..(300): Homolog of NCBI NO: 18409942 NR Description: expressed protein [Arabidopsis thaliana] unknown protein [Arabidopsis thaliana]
  misc_feature (1)..(295): Homolog of NCBI NO: 25406128 NR Description: unknown protein F17M19.5 [imported] - Arabidopsis
  misc_feature (1)..(295): Homolog of NCBI NO: 18399280 NR Description: purine permease - related [Arabidopsis thaliana]
  misc_feature (1)..(295): Homolog of NCBI NO: 15229534 NR Description: purine permease - related [Arabidopsis thaliana] gb|AAF34307.1~gene_id:F14O13.5~similar to unknown protein
  misc_feature (1)..(295): Homolog of NCBI NO: 18414079 NR Description: expressed protein [Arabidopsis thaliana]
  misc_feature (1)..(295): Homolog of NCBI NO: 21593618 NR Description: unknown [Arabidopsis thaliana]
  misc_feature (1)..(301): Homolog of NCBI NO: 20161440 NR Description: B1065E10.15 [Oryza sativa (japonica

SEQ ID NO: 107869 - protein, 320 aa, Arabidopsis thaliana; identical to SEQ ID NO: 97986
  peptide (1)..(320): Ceres Seq. ID no. 13651979
  misc_feature (1)..(294): Pfam Name: Protein of unknown function (DUF803) Pfam Description: Protein of unknown function (DUF803)
  misc_feature (1)..(320): Homolog of NCBI NO: 26449939 NR Description: unknown protein [Arabidopsis thaliana]
  misc_feature (1)..(320): Homolog of NCBI NO: 30681265 NR Description: expressed protein [Arabidopsis thaliana]
  misc_feature (1)..(320): Homolog of NCBI NO: 25412015 NR Description: hypothetical protein At2g21120 [imported] - thaliana >gi|4803931|gb|AAD29804.1| unknown protein [Arabidopsis
  misc_feature (1)..(294): Homolog of NCBI NO: 18409942 NR Description: expressed protein [Arabidopsis thaliana] unknown protein [Arabidopsis thaliana]
  misc_feature (1)..(289): Homolog of NCBI NO: 25406128 NR Description: unknown protein F17M19.5 [imported] - Arabidopsis
  misc_feature (1)..(289): Homolog of NCBI NO: 18399280 NR Description: purine permease - related [Arabidopsis thaliana]
  misc_feature (1)..(289): Homolog of NCBI NO: 15229534 NR Description: purine permease - related [Arabidopsis thaliana] gb|AAF34307.1~gene_id:F14O13.5~similar to unknown protein
  misc_feature (1)..(289): Homolog of NCBI NO: 18414079 NR Description: expressed protein [Arabidopsis thaliana]
  misc_feature (1)..(289): Homolog of NCBI NO: 21593618 NR Description: unknown [Arabidopsis thaliana]
  misc_feature (1)..(295): Homolog of NCBI NO: 20161440 NR Description: B1065E10.15 [Oryza sativa (japonica

SEQ ID NO: 107870 - protein, 267 aa, Arabidopsis thaliana; identical to SEQ ID NO: 97987
  peptide (1)..(267): Ceres Seq. ID no. 13651980
  misc_feature (1)..(241): Pfam Name: Protein of unknown function (DUF803) Pfam Description: Protein of unknown function (DUF803)
  misc_feature (1)..(267): Homolog of NCBI NO: 26449939 NR Description: unknown protein [Arabidopsis thaliana]
  misc_feature (1)..(267): Homolog of NCBI NO: 30681265 NR Description: expressed protein [Arabidopsis thaliana]
  misc_feature (1)..(267): Homolog of NCBI NO: 25412015 NR Description: hypothetical protein At2g21120 [imported] - thaliana >gi|4803931|gb|AAD29804.1| unknown protein [Arabidopsis
  misc_feature (1)..(241): Homolog of NCBI NO: 18409942 NR Description: expressed protein [Arabidopsis thaliana] unknown protein [Arabidopsis thaliana]
  misc_feature (1)..(236): Homolog of NCBI NO: 25406128 NR Description: unknown protein F17M19.5 [imported] - Arabidopsis
  misc_feature (1)..(236): Homolog of NCBI NO: 18399280 NR Description: purine permease - related [Arabidopsis thaliana]
  misc_feature (1)..(236): Homolog of NCBI NO: 15229534 NR Description: purine permease - related [Arabidopsis thaliana] gb|AAF34307.1~gene_id:F14O13.5~similar to unknown protein
  misc_feature (1)..(236): Homolog of NCBI NO: 18414079 NR Description: expressed protein [Arabidopsis thaliana]
  misc_feature (1)..(236): Homolog of NCBI NO: 21593618 NR Description: unknown [Arabidopsis thaliana]
  misc_feature (1)..(242): Homolog of NCBI NO: 20161440 NR Description: B1065E10.15 [Oryza sativa (japonica

SEQ ID NO: 107871 - DNA, 1728 bp, Arabidopsis thaliana
  misc_feature (1)..(1728): Ceres Seq. ID no. 13651997
  misc_feature: MA Experiment ID: 20000184 Result: Up-regulated in Transcription
  misc_feature: MA Experiment 20000184 PARAMETER Experiment Name: At_Shoots__P Parameter: Age (day) Value: 7
  misc_feature: MA Experiment 20000184 PARAMETER Experiment Name: At_Shoots__P Parameter: Tissue Value: Shoots vs. Whole Plant
  misc_feature: MA Experiment ID: 20000234 Result: Up-regulated in Transcription
  misc_feature: MA Experiment 20000234 PARAMETER Experiment Name: At_Siliques_P Parameter: Age (day) Value: 21
  misc_feature: MA Experiment 20000234 PARAMETER Experiment Name: At_Siliques_P Parameter: Organism Value: A. thaliana
  misc_feature: MA Experiment 20000234 PARAMETER Experiment Name: At_Siliques_P Parameter: Plant Line Value: WS
  misc_feature: MA Experiment 20000234 PARAMETER Experiment Name: At_Siliques_P Parameter: Tissue Value: Less Than 5mm Siliques vs. Whole Plant
  misc_feature: MA Experiment ID: 20000235 Result: Up-regulated in Transcription
  misc_feature: MA Experiment 20000235 PARAMETER Experiment Name: At_Siliques_P Parameter: Age (day) Value: 21
  misc_feature: MA Experiment 20000235 PARAMETER Experiment Name: At_Siliques_P Parameter: Organism Value: A. thaliana
  misc_feature: MA Experiment 20000235 PARAMETER Experiment Name: At_Siliques_P Parameter: Plant Line Value: WS
  misc_feature: MA Experiment 20000235 PARAMETER Experiment Name: At_Siliques_P Parameter: Tissue Value: 5-10mm Siliques vs. Whole Plant
  misc_feature: MA Experiment ID: 20000265 Result: Up-regulated in Transcription
  misc_feature: MA Experiment 20000265 PARAMETER Experiment Name: At_Open_Flower_P Parameter: Age (day) Value: 21
  misc_feature: MA Experiment 20000265 PARAMETER Experiment Name: At_Open_Flower_P Parameter: Plant Line Value: WS
  misc_feature: MA Experiment 20000265 PARAMETER Experiment Name: At_Open_Flower_P Parameter: Tissue Value: Closed Flower vs. Whole Plant
  misc_feature: MA Experiment ID: 20000286 Result: Up-regulated in Transcription
  misc_feature: MA Experiment 20000286 PARAMETER Experiment Name: At_Open_Flower_P Parameter: Age (day) Value: 21
  misc_feature: MA Experiment 20000286 PARAMETER Experiment Name: At_Open_Flower_P Parameter: Plant Line Value: WS
  misc_feature: MA Experiment 20000286 PARAMETER Experiment Name: At_Open_Flower_P Parameter: Tissue Value: Half Open vs. Whole Plant
  misc_feature: MA Experiment ID: 20000437 Result: Down-regulated in Transcription
  misc_feature: MA Experiment 20000437 PARAMETER Experiment Name: At_Drought_P Parameter: Age (day) Value: 8
  misc_feature: MA Experiment 20000437 PARAMETER Experiment Name: At_Drought_P Parameter: Organism Value: A. thaliana
  misc_feature: MA Experiment 20000437 PARAMETER Experiment Name: At_Drought_P Parameter: Plant Line Value: WS
  misc_feature: MA Experiment 20000437 PARAMETER Experiment Name: At_Drought_P Parameter: Timepoint (hr) Value: 24
  misc_feature: MA Experiment 20000437 PARAMETER Experiment Name: At_Drought_P Parameter: Tissue Value: Whole Plant
  misc_feature: MA Experiment 20000437 PARAMETER Experiment Name: At_Drought_P Parameter: Treatment Value: Drought vs. No Drought
  misc_feature: MA Experiment ID: 20001451 Result: Down-regulated in Transcription
  misc_feature: MA Experiment 20001451 PARAMETER Experiment Name: At_Far-red-induction_P Parameter: Age (day) Value: 7
  misc_feature: MA Experiment 20001451 PARAMETER Experiment Name: At_Far-red-induction_P Parameter: Light Value: Far-red vs. White
  misc_feature: MA Experiment 20001451 PARAMETER Experiment Name: At_Far-red-induction_P Parameter: Organism Value: A. thaliana
  misc_feature: MA Experiment 20001451 PARAMETER Experiment Name: At_Far-red-induction_P Parameter: Plant Line Value: Columbia
  misc_feature: MA Experiment 20001451 PARAMETER Experiment Name: At_Far-red-induction_P Parameter: Timepoint (hr) Value: 24
  misc_feature: MA Experiment 20001451 PARAMETER Experiment Name: At_Far-red-induction_P Parameter: Tissue Value: Whole Plant
aattcgtcgagaaccgatctttgcacccgagagagagctcagtgaaaaagatgggaagcggtgtaggtgtagctctctttgccctctcccttcttctcgtctcccatgaggtggaatctgcaatcggcgtgaactggggaacgttgtcatttcacaagatgagaccttccacagtggtggatctcctcaaagcaaacaagatcaccaaggtgaagcttttcgatgcgaatccagatgcgcttcgagcgttaatgggtactggaatccaagtaatgatcggcattcctaacgagatgctctcaactttcaattctgatttgtttgtccagcaaaatctctctcgcttcataggcaaaaacggtgctgatattaggtatgttgcagtagggaatgagccgtttctgactggttacggtggtcagtttcagaactatgtagtcccaactatggttaacctgcaacaatctttggttagagcaaatctagctagctatgtgaagttggtggttccttgcaacgcagatgcgtatcagtctaatgttccctctcaggggatgttccggcctgagcttacacagattatgactcaattggtttcgtttctcaactccaatggctctccttttgtggttaatatctatcctttccttagtctctatgggaactcggattttccacaagactatgccttttttgaggggagtagtcatccggttccggatgggcctaacacttactataatgcatttgatgggaactttgacactcttgttgctgctctcaccaagcttggatatggtcaaatgcctatagttattggtgagattggttggcctacagatggagcagttggtgctaatctcacagcagcccgggtttttaatcaagggctcattagccatgtgttgagcaacaaaggaacaccgctcaggcctggatctcctcctgcggatgtatatcttttcggtttgcttgacgaaggagcgaaaagcacactgcctggtaactttgagaggcattggggaatcttctctttcgatggacaggccaagtatcgtctcaacttaggactaggcaacagaggactcaagaatgcaaaaaatgtgcagtaccttccttcaaggtggtgtgtggctcacccatcaagagacatgacccaagttggtgaccacctcaggcttgcttgcagtgaagcagattgcacaacgctcaacgacgggggctcgtgcagccagcttggtgaaaaagataatatctcatacgctttcaacagttactatcagatgcagatgcaacatgaaaagagctgtgactttgatggacttggcatggtcaccttcctagatccttcagttggtgactgtcgatttcttgtgggtgttactgatataggcttatcgtcaagtactgagccaatggcaaggtggtctatctaccacatttgcattggactattgatctggactctcacaatgtagattagggaaatttttcagtgttacattatttagcgatatagtagatataggacggagaaattgcataaatatagggtcagatgtattttattgttaagctgaaaagctgaaccagtgttatctctgtaatatcttcttggggtctatattagaaaatcagaaccactaaaactatggtacctttgttgtcaatgtactgtctaagatgagactcaaatcggttatcatcaattagattgtgatcatcact

SEQ ID NO: 107872 - protein, 491 aa, Arabidopsis thaliana
  peptide (1)..(491): Ceres Seq. ID no. 13651998
  misc_feature (41)..(355): Pfam Name: Glycosyl hydrolases family 17 Pfam Description: Glycosyl hydrolases family 17
  misc_feature (6)..(491): Homolog of NCBI NO: 7488109 NR Description: probable glucanase - Arabidopsis thaliana glucanase like protein [Arabidopsis thaliana]
  misc_feature (17)..(491): Homolog of NCBI NO: 30683955 NR Description: glycosyl hydrolase family 17 [Arabidopsis >gi|26449937|dbj|BAC42089.1| unknown protein [Arabidopsis
  misc_feature (39)..(485): Homolog of NCBI NO: 38423964 NR Description: putative glycosyl hydrolase [Oryza sativa
  misc_feature (20)..(487): Homolog of NCBI NO: 15235840 NR Description: glycosyl hydrolase family 17 [Arabidopsis
  misc_feature (17)..(456): Homolog of NCBI NO: 22327934 NR Description: glycosyl hydrolase family 17 [Arabidopsis
  misc_feature (17)..(456): Homolog of NCBI NO: 16604491 NR Description: AT5g58090/k21l19_70 [Arabidopsis thaliana]
  misc_feature (41)..(460): Homolog of NCBI NO: 30060382 NR Description: putative glucan endo-1,3-beta-glucosidase
  misc_feature (21)..(461): Homolog of NCBI NO: 18483232 NR Description: 3-glucanase [Sorghum bicolor]
  misc_feature (40)..(460): Homolog of NCBI NO: 28269434 NR Description: putative beta-1,3 glucanase [Oryza sativa
  misc_feature (41)..(487): Homolog of NCBI NO: 34395009 NR Description: putative 3-glucanase [Oryza sativa (japonica
FVENRSLHPRESSVKKMGSGVGVALFALSLLLVSHEVESAIGVNWGTLSFHKMRPSTVVDLLKANKITKVKLFDANPDALRALMGTGIQVMIGIPNEMLSTFNSDLFVQQNLSRFIGKNGADIRYVAVGNEPFLTGYGGQFQNYVVPTMVNLQQSLVRANLASYVKLVVPCNADAYQSNVPSQGMFRPELTQIMTQLVSFLNSNGSPFVVNIYPFLSLYGNSDFPQDYAFFEGSSHPVPDGPNTYYNAFDGNFDTLVAALTKLGYGQMPIVIGEIGWPTDGAVGANLTAARVFNQGLISHVLSNKGTPLRPGSPPADVYLFGLLDEGAKSTLPGNFERHWGIFSFDGQAKYRLNLGLGNRGLKNAKNVQYLPSRWCVAHPSRDMTQVGDHLRLACSEADCTTLNDGGSCSQLGEKDNISYAFNSYYQMQMQHEKSCDFDGLGMVTFLDPSVGDCRFLVGVTDIGLSSSTEPMARWSIYHICIGLLIWTLTM

SEQ ID NO: 107873 - protein, 475 aa, Arabidopsis thaliana; identical to SEQ ID NO: 46855
  peptide (1)..(475): Ceres Seq. ID no. 13651999
  misc_feature (25)..(339): Pfam Name: Glycosyl hydrolases family 17 Pfam Description: Glycosyl hydrolases family 17
  misc_feature (1)..(475): Homolog of NCBI NO: 7488109 NR Description: probable glucanase - Arabidopsis thaliana glucanase like protein [Arabidopsis thaliana]
  misc_feature (1)..(475): Homolog of NCBI NO: 30683955 NR Description: glycosyl hydrolase family 17 [Arabidopsis >gi|26449937|dbj|BAC42089.1| unknown protein [Arabidopsis
  misc_feature (23)..(469): Homolog of NCBI NO: 38423964 NR Description: putative glycosyl hydrolase [Oryza sativa
  misc_feature (4)..(471): Homolog of NCBI NO: 15235840 NR Description: glycosyl hydrolase family 17 [Arabidopsis
  misc_feature (1)..(440): Homolog of NCBI NO: 22327934 NR Description: glycosyl hydrolase family 17 [Arabidopsis
  misc_feature (1)..(440): Homolog of NCBI NO: 16604491 NR Description: AT5g58090/k21l19_70 [Arabidopsis thaliana]
  misc_feature (25)..(444): Homolog of NCBI NO: 30060382 NR Description: putative glucan endo-1,3-beta-glucosidase
  misc_feature (5)..(445): Homolog of NCBI NO: 18483232 NR Description: 3-glucanase [Sorghum bicolor]
  misc_feature (24)..(444): Homolog of NCBI NO: 28269434 NR Description: putative beta-1,3 glucanase [Oryza sativa
  misc_feature (25)..(471): Homolog of NCBI NO: 34395009 NR Description: putative 3-glucanase [Oryza sativa (japonica

SEQ ID NO: 107874 - protein, 439 aa, Arabidopsis thaliana; identical to SEQ ID NO: 46856
  peptide (1)..(439): Ceres Seq. ID no. 13652000
  misc_feature (1)..(303): Pfam Name: Glycosyl hydrolases family 17 Pfam Description: Glycosyl hydrolases family 17
  misc_feature (1)..(439): Homolog of NCBI NO: 7488109 NR Description: probable glucanase - Arabidopsis thaliana glucanase like protein [Arabidopsis thaliana]
  misc_feature (1)..(439): Homolog of NCBI NO: 30683955 NR Description: glycosyl hydrolase family 17 [Arabidopsis >gi|26449937|dbj|BAC42089.1| unknown protein [Arabidopsis
  misc_feature (1)..(433): Homolog of NCBI NO: 38423964 NR Description: putative glycosyl hydrolase [Oryza sativa
  misc_feature (1)..(435): Homolog of NCBI NO: 15235840 NR Description: glycosyl hydrolase family 17 [Arabidopsis
  misc_feature (1)..(404): Homolog of NCBI NO: 22327934 NR Description: glycosyl hydrolase family 17 [Arabidopsis
  misc_feature (1)..(404): Homolog of NCBI NO: 16604491 NR Description: AT5g58090/k21l19_70 [Arabidopsis thaliana]
  misc_feature (1)..(408): Homolog of NCBI NO: 30060382 NR Description: putative glucan endo-1,3-beta-glucosidase
  misc_feature (1)..(409): Homolog of NCBI NO: 18483232 NR Description: 3-glucanase [Sorghum bicolor]
  misc_feature (1)..(408): Homolog of NCBI NO: 28269434 NR Description: putative beta-1,3 glucanase [Oryza sativa
  misc_feature (1)..(435): Homolog of NCBI NO: 34395009 NR Description: putative 3-glucanase [Oryza sativa (japonica

SEQ ID NO: 107875 - DNA, 1386 bp, Arabidopsis thaliana
  misc_feature (1)..(1386): Ceres Seq. ID no. 13652044
  misc_feature: MA Experiment ID: 20000173 Result: Down-regulated in Transcription
  misc_feature: MA Experiment 20000173 PARAMETER Experiment Name: At_42deg_Heat_P Parameter: Age (day) Value: 14
  misc_feature: MA Experiment 20000173 PARAMETER Experiment Name: At_42deg_Heat_P Parameter: Organism Value: A. thaliana
  misc_feature: MA Experiment 20000173 PARAMETER Experiment Name: At_42deg_Heat_P Parameter: Plant Line Value: WS
  misc_feature: MA Experiment 20000173 PARAMETER Experiment Name: At_42deg_Heat_P Parameter: Temperature (deg C) Value: 42 vs. 22
  misc_feature: MA Experiment 20000173 PARAMETER Experiment Name: At_42deg_Heat_P Parameter: Timepoint (hr) Value: 6
  misc_feature: MA Experiment 20000173 PARAMETER Experiment Name: At_42deg_Heat_P Parameter: Tissue Value: Aerial
  misc_feature: MA Experiment ID: 20000179 Result: Up-regulated in Transcription
  misc_feature: MA Experiment 20000179 PARAMETER Experiment Name: At_Germinating_Seeds_P Parameter: Age (hr) Value: 6 vs. 0
  misc_feature: MA Experiment 20000179 PARAMETER Experiment Name: At_Germinating_Seeds_P Parameter: Tissue Value: Germinating Seeds
  misc_feature: MA Experiment ID: 20000180 Result: Down-regulated in Transcription
  misc_feature: MA Experiment 20000180 PARAMETER Experiment Name: At_Germinating_Seeds_P Parameter: Age (hr) Value: 24 vs. 0
  misc_feature: MA Experiment 20000180 PARAMETER Experiment Name: At_Germinating_Seeds_P Parameter: Tissue Value: Germinating Seeds
  misc_feature: MA Experiment ID: 20000184 Result: Down-regulated in Transcription
  misc_feature: MA Experiment 20000184 PARAMETER Experiment Name: At_Shoots__P Parameter: Age (day) Value: 7
  misc_feature: MA Experiment 20000184 PARAMETER Experiment Name: At_Shoots__P Parameter: Tissue Value: Shoots vs. Whole Plant
  misc_feature: MA Experiment ID: 20000185 Result: Up-regulated in Transcription
  misc_feature: MA Experiment 20000185 PARAMETER Experiment Name: At_Roots__P Parameter: Age (day) Value: 7 vs. 21
  misc_feature: MA Experiment 20000185 PARAMETER Experiment Name: At_Roots__P Parameter: Organism Value: A. thaliana
  misc_feature: MA Experiment 20000185 PARAMETER Experiment Name: At_Roots__P Parameter: Tissue Value: Roots vs. Whole Plant
  misc_feature: MA Experiment ID: 20000227 Result: Down-regulated in Transcription
  misc_feature: MA Experiment 20000227 PARAMETER Experiment Name: At_Root-Tips-vs-Tops_P Parameter: Tissue Value: Root Tips vs. Root Tops
  misc_feature: MA Experiment ID: 20000235 Result: Down-regulated in Transcription
  misc_feature: MA Experiment 20000235 PARAMETER Experiment Name: At_Siliques_P Parameter: Age (day) Value: 21
  misc_feature: MA Experiment 20000235 PARAMETER Experiment Name: At_Siliques_P Parameter: Organism Value: A. thaliana
  misc_feature: MA Experiment 20000235 PARAMETER Experiment Name: At_Siliques_P Parameter: Plant Line Value: WS
  misc_feature: MA Experiment 20000235 PARAMETER Experiment Name: At_Siliques_P Parameter: Tissue Value: 5-10mm Siliques vs. Whole Plant
  misc_feature: MA Experiment ID: 20000264 Result: Down-regulated in Transcription
  misc_feature: MA Experiment 20000264 PARAMETER Experiment Name: At_Open_Flower_P Parameter: Age (day) Value: 21
  misc_feature: MA Experiment 20000264 PARAMETER Experiment Name: At_Open_Flower_P Parameter: Plant Line Value: WS
  misc_feature: MA Experiment 20000264 PARAMETER Experiment Name: At_Open_Flower_P Parameter: Tissue Value: Open Flower vs. Whole Plant
  misc_feature: MA Experiment ID: 20000439 Result: Up-regulated in Transcription
  misc_feature: MA Experiment 20000439 PARAMETER Experiment Name: At_Roots__P Parameter: Age (day) Value: 14 vs. 21
  misc_feature: MA Experiment 20000439 PARAMETER Experiment Name: At_Roots__P Parameter: Organism Value: A. thaliana
  misc_feature: MA Experiment 20000439 PARAMETER Experiment Name: At_Roots__P Parameter: Tissue Value: Roots vs. Whole Plant
  misc_feature: MA Experiment ID: 20000451 Result: Down-regulated in Transcription
  misc_feature: MA Experiment 20000451 PARAMETER Experiment Name: At_CS6879_Shoots-Roots_P Parameter: Age (day) Value: 14
  misc_feature: MA Experiment 20000451 PARAMETER Experiment Name: At_CS6879_Shoots-Roots_P Parameter: Organism Value: A. thaliana
  misc_feature: MA Experiment 20000451 PARAMETER Experiment Name: At_CS6879_Shoots-Roots_P Parameter: Plant Line Value: CS6879 vs. WS
  misc_feature: MA Experiment 20000451 PARAMETER Experiment Name: At_CS6879_Shoots-Roots_P Parameter: Tissue Value: Roots
  misc_feature: MA Experiment ID: 20000495 Result: Up-regulated in Transcription
  misc_feature: MA Experiment 20000495 PARAMETER Experiment Name: At_Guard_Cells_P Parameter: Harvest Date Value: 8/2/2002
  misc_feature: MA Experiment 20000495 PARAMETER Experiment Name: At_Guard_Cells_P Parameter: Organism Value: A. thaliana
  misc_feature: MA Experiment 20000495 PARAMETER Experiment Name: At_Guard_Cells_P Parameter: Tissue Value: Guard Cells vs. Leaves
  misc_feature: MA Experiment ID: 20001906 Result: Up-regulated in Transcription
  misc_feature: MA Experiment 20001906 PARAMETER Experiment Name: At_Drought_Reproduction_P Parameter: Age (day) Value: 35
  misc_feature: MA Experiment 20001906 PARAMETER Experiment Name: At_Drought_Reproduction_P Parameter: Organism Value: A. thaliana
  misc_feature: MA Experiment 20001906 PARAMETER Experiment Name: At_Drought_Reproduction_P Parameter: Plant Line Value: WS
  misc_feature: MA Experiment 20001906 PARAMETER Experiment Name: At_Drought_Reproduction_P Parameter: Timepoint (day) Value: 5
  misc_feature: MA Experiment 20001906 PARAMETER Experiment Name: At_Drought_Reproduction_P Parameter: Tissue Value: Siliques
  misc_feature: MA Experiment 20001906 PARAMETER Experiment Name: At_Drought_Reproduction_P Parameter: Treatment Value: Drought vs. No Drought
catcgctgtctggaacagcgatgactactcaaacaagtttctgaagaagagacagagagagaaggatagagtaaaagctaagagagagagcgagactgagagagaaagaaagagatatcattttggttattaagtaattaacttatactaatcatgggttttatcgatggaaagtgggcaccaatgatagtcttaattgtttctaacatgattgcgggaatggttaatgctttagttaagaaagttcttgatggaggcatcaatcatatggttattgctacttatcgtttgggtatatctactcttttccttcttccagtcgcttatttttgggaacggaaaacaagaccaaagctaactctaagcatctcatgtcagcttttcgtcagtgccctttttggggcgagcttgatgcaatatttctacttgcttggactgtcctacacgtctgcaacgctgggatctgctttctgggccataatgccttccctcactttcgttatggctttaatatttgggttcgaaaagctaagtttgaaaacaaaaataggatacggtgtcgttcttggaactttgataagcttagtaggaggtttacttcttactatgtatcaagggattccattaacaaactctccagaacaagcagcaaattcaaataaccacacaggacatgagaattggatcaaaggttgtttctttttattgaccggagttgttcttttcagttcttggatgcttatacaagccaagatcaacgtgaaatacccttgtccatactcgagtaccgttattttgtcggtctttggtacgcttcaatgcgcccttcttagtttaattaagactagacatttggaagattggatccttagagatgagcttaccatcatcaccgtcgttatagcgggagtggttgcacaaggtatgtgtacggtgggcatgtcgtggtgtatcaaacaacaaggacctgtcgtttcctcatcatttagtcctgtcgtgcttatgtctgcaaccgtgttcgatttcttgattcttcatcgtgagatttatttgggaaggagtaagcaaatagtagagtgtaagatcatgaagttgcctaccaatacggtggaagaagaaaaggaagaggaaggccgtacaaatgttaacaacggtcaacttttggttattccgatgactccttgatctacttccctaaacacgcttgttcaacaagaatcatgaccgatatgtcttcaaaaaatgaaatatgaagaagagaagataacgatcgttttcattgtttattggactatttcatacttttattggacaatttcgtacttgtgttgcaacgtttagtttttttggggattttaattcctacgggattcatttggataaaag

SEQ ID NO: 107876 - protein, 343 aa, Arabidopsis thaliana
  peptide (1)..(343): Ceres Seq. ID no. 13652045
  misc_feature (19)..(146): Pfam Name: Integral membrane protein DUF6 Pfam Description: Integral membrane protein DUF6
  misc_feature (1)..(343): Homolog of NCBI NO: 30678880 NR Description: nodulin MtN21 family protein [Arabidopsis >gi|26449909|dbj|BAC42076.1| unknown protein [Arabidopsis >gi|28973211|gb|AAO63930.1| unknown protein [Arabidopsis
  misc_feature (1)..(301): Homolog of NCBI NO: 15234185 NR Description: nodulin MtN21 family protein [Arabidopsis
  misc_feature (298)..(343): Homolog of NCBI NO: 15234185 NR Description: nodulin MtN21 family protein [Arabidopsis
  misc_feature (84)..(301): Homolog of NCBI NO: 7485384 NR Description: hypothetical protein F11O4.14 - Arabidopsis >gi|3695385|gb|AAC62788.1| similar to Medicago truncatula MtN21
  misc_feature (1)..(85): Homolog of NCBI NO: 7485384 NR Description: hypothetical protein F11O4.14 - Arabidopsis >gi|3695385|gb|AAC62788.1| similar to Medicago truncatula MtN21
  misc_feature (298)..(343): Homolog of NCBI NO: 7485384 NR Description: hypothetical protein F11O4.14 - Arabidopsis >gi|3695385|gb|AAC62788.1| similar to Medicago truncatula MtN21
  misc_feature (1)..(301): Homolog of NCBI NO: 15234182 NR Description: nodulin N21 family protein [Arabidopsis thaliana]
  misc_feature (7)..(301): Homolog of NCBI NO: 15234179 NR Description: nodulin MtN21 family protein [Arabidopsis
  misc_feature (7)..(301): Homolog of NCBI NO: 18378792 NR Description: nodulin MtN21 family protein [Arabidopsis
  misc_feature (4)..(301): Homolog of NCBI NO: 15220389 NR Description: nodulin MtN21 family protein [Arabidopsis
MGFIDGKWAPMIVLIVSNMIAGMVNALVKKVLDGGINHMVIATYRLGISTLFLLPVAYFWERKTRPKLTLSISCQLFVSALFGASLMQYFYLLGLSYTSATLGSAFWAIMPSLTFVMALIFGFEKLSLKTKIGYGVVLGTLISLVGGLLLTMYQGIPLTNSPEQAANSNNHTGHENWIKGCFFLLTGVVLFSSWMLIQAKINVKYPCPYSSTVILSVFGTLQCALLSLIKTRHLEDWILRDELTIITVVIAGVVAQGMCTVGMSWCIKQQGPVVSSSFSPVVLMSATVFDFLILHREIYLGRSKQIVECKIMKLPTNTVEEEKEEEGRTNVNNGQLLVIPMTP

SEQ ID NO: 107877 - protein, 333 aa, Arabidopsis thaliana
  peptide (1)..(333): Ceres Seq. ID no. 13652046
  misc_feature (9)..(136): Pfam Name: Integral membrane protein DUF6 Pfam Description: Integral membrane protein DUF6
  misc_feature (1)..(333): Homolog of NCBI NO: 30678880 NR Description: nodulin MtN21 family protein [Arabidopsis >gi|26449909|dbj|BAC42076.1| unknown protein [Arabidopsis >gi|28973211|gb|AAO63930.1| unknown protein [Arabidopsis
  misc_feature (1)..(291): Homolog of NCBI NO: 15234185 NR Description: nodulin MtN21 family protein [Arabidopsis
  misc_feature (288)..(333): Homolog of NCBI NO: 15234185 NR Description: nodulin MtN21 family protein [Arabidopsis
  misc_feature (74)..(291): Homolog of NCBI NO: 7485384 NR Description: hypothetical protein F11O4.14 - Arabidopsis >gi|3695385|gb|AAC62788.1| similar to Medicago truncatula MtN21
  misc_feature (1)..(75): Homolog of NCBI NO: 7485384 NR Description: hypothetical protein F11O4.14 - Arabidopsis >gi|3695385|gb|AAC62788.1| similar to Medicago truncatula MtN21
  misc_feature (288)..(333): Homolog of NCBI NO: 7485384 NR Description: hypothetical protein F11O4.14 - Arabidopsis >gi|3695385|gb|AAC62788.1| similar to Medicago truncatula MtN21
  misc_feature (1)..(291): Homolog of NCBI NO: 15234182 NR Description: nodulin N21 family protein [Arabidopsis thaliana]
  misc_feature (1)..(291): Homolog of NCBI NO: 15234179 NR Description: nodulin MtN21 family protein [Arabidopsis
  misc_feature (1)..(291): Homolog of NCBI NO: 18378792 NR Description: nodulin MtN21 family protein [Arabidopsis
  misc_feature (1)..(291): Homolog of NCBI NO: 15220389 NR Description: nodulin MtN21 family protein [Arabidopsis
MIVLIVSNMIAGMVNALVKKVLDGGINHMVIATYRLGISTLFLLPVAYFWERKTRPKLTLSISCQLFVSALFGASLMQYFYLLGLSYTSATLGSAFWAIMPSLTFVMALIFGFEKLSLKTKIGYGVVLGTLISLVGGLLLTMYQGIPLTNSPEQAANSNNHTGHENWIKGCFFLLTGVVLFSSWMLIQAKINVKYPCPYSSTVILSVFGTLQCALLSLIKTRHLEDWILRDELTIITVVIAGVVAQGMCTVGMSWCIKQQGPVVSSSFSPVVLMSATVFDFLILHREIYLGRSKQIVECKIMKLPTNTVEEEKEEEGRTNVNNGQLLVIPMTP

SEQ ID NO: 107878 - protein, 325 aa, Arabidopsis thaliana
  peptide (1)..(325): Ceres Seq. ID no. 13652047
  misc_feature (1)..(128): Pfam Name: Integral membrane protein DUF6 Pfam Description: Integral membrane protein DUF6
  misc_feature (1)..(325): Homolog of NCBI NO: 30678880 NR Description: nodulin MtN21 family protein [Arabidopsis >gi|26449909|dbj|BAC42076.1| unknown protein [Arabidopsis >gi|28973211|gb|AAO63930.1| unknown protein [Arabidopsis
  misc_feature (1)..(283): Homolog of NCBI NO: 15234185 NR Description: nodulin MtN21 family protein [Arabidopsis
  misc_feature (280)..(325): Homolog of NCBI NO: 15234185 NR Description: nodulin MtN21 family protein [Arabidopsis
  misc_feature (66)..(283): Homolog of NCBI NO: 7485384 NR Description: hypothetical protein F11O4.14 - Arabidopsis >gi|3695385|gb|AAC62788.1| similar to Medicago truncatula MtN21
  misc_feature (1)..(67): Homolog of NCBI NO: 7485384 NR Description: hypothetical protein F11O4.14 - Arabidopsis >gi|3695385|gb|AAC62788.1| similar to Medicago truncatula MtN21
  misc_feature (280)..(325): Homolog of NCBI NO: 7485384 NR Description: hypothetical protein F11O4.14 - Arabidopsis >gi|3695385|gb|AAC62788.1| similar to Medicago truncatula MtN21
  misc_feature (1)..(283): Homolog of NCBI NO: 15234182 NR Description: nodulin N21 family protein [Arabidopsis thaliana]
  misc_feature (1)..(283): Homolog of NCBI NO: 15234179 NR Description: nodulin MtN21 family protein [Arabidopsis
  misc_feature (1)..(283): Homolog of NCBI NO: 18378792 NR Description: nodulin MtN21 family protein [Arabidopsis
  misc_feature (1)..(283): Homolog of NCBI NO: 15220389 NR Description: nodulin MtN21 family protein [Arabidopsis
MIAGMVNALVKKVLDGGINHMVIATYRLGISTLFLLPVAYFWERKTRPKLTLSISCQLFVSALFGASLMQYFYLLGLSYTSATLGSAFWAIMPSLTFVMALIFGFEKLSLKTKIGYGVVLGTLISLVGGLLLTMYQGIPLTNSPEQAANSNNHTGHENWIKGCFFLLTGVVLFSSWMLIQAKINVKYPCPYSSTVILSVFGTLQCALLSLIKTRHLEDWILRDELTIITVVIAGVVAQGMCTVGMSWCIKQQGPVVSSSFSPVVLMSATVFDFLILHREIYLGRSKQIVECKIMKLPTNTVEEEKEEEGRTNVNNGQLLVIPMTP

SEQ ID NO: 107879 - DNA, 3062 bp, Arabidopsis thaliana
  misc_feature (1)..(3062): Ceres Seq. ID no. 13652071
  misc_feature: MA Experiment ID: 20000307 Result: Up-regulated in Transcription
  misc_feature: MA Experiment 20000307 PARAMETER Experiment Name: At_Germinating_Seeds_Sub_P Parameter: Age (hr) Value: 24 vs. 0
  misc_feature: MA Experiment 20000307 PARAMETER Experiment Name: At_Germinating_Seeds_Sub_P Parameter: Organism Value: A. thaliana
  misc_feature: MA Experiment 20000307 PARAMETER Experiment Name: At_Germinating_Seeds_Sub_P Parameter: Plant Line Value: WS
  misc_feature: MA Experiment 20000307 PARAMETER Experiment Name: At_Germinating_Seeds_Sub_P Parameter: Tissue Value: Germinating Seeds
  misc_feature: MA Experiment ID: 20000314 Result: Up-regulated in Transcription
  misc_feature: MA Experiment 20000314 PARAMETER Experiment Name: At_14day_Shoots-Roots_Sub_P Parameter: Age (day) Value: 14
  misc_feature: MA Experiment 20000314 PARAMETER Experiment Name: At_14day_Shoots-Roots_Sub_P Parameter: Organism Value: A. thaliana
  misc_feature: MA Experiment 20000314 PARAMETER Experiment Name: At_14day_Shoots-Roots_Sub_P Parameter: Plant Line Value: WS
  misc_feature: MA Experiment 20000314 PARAMETER Experiment Name: At_14day_Shoots-Roots_Sub_P Parameter: Tissue Value: Roots vs. Whole Plant
  misc_feature: MA Experiment ID: 20000328 Result: Down-regulated in Transcription
  misc_feature: MA Experiment 20000328 PARAMETER Experiment Name: At_42deg_Heat_Sub_P Parameter: Age (day) Value: 14
  misc_feature: MA Experiment 20000328 PARAMETER Experiment Name: At_42deg_Heat_Sub_P Parameter: Organism Value: A. thaliana
  misc_feature: MA Experiment 20000328 PARAMETER Experiment Name: At_42deg_Heat_Sub_P Parameter: Plant Line Value: WS
  misc_feature: MA Experiment 20000328 PARAMETER Experiment Name: At_42deg_Heat_Sub_P Parameter: Temperature (deg C) Value: 42 vs. 22
  misc_feature: MA Experiment 20000328 PARAMETER Experiment Name: At_42deg_Heat_Sub_P Parameter: Timepoint (hr) Value: 6
  misc_feature: MA Experiment 20000328 PARAMETER Experiment Name: At_42deg_Heat_Sub_P Parameter: Tissue Value: Aerial
ataatgtggcttggcttatctctcagcacaagtgtttcctcttaaactcatccaatagtcctttacgccttcaaatccttcttcattctcccattcacaattccttcatttttaatttttgattcatcctccattttttttttctgaaaaacaagaaaagttcaaaaaaaaaccaaaaaaccaatctcggttttcgtcattgtattcatctttaatggtagaccgtagacacgtattttgaagggaattacaaaattttaatactatctcttaccaaaaaattagaaaatagagagaagaaaaatgaaagtggcagttataggaagtggtataagtggattaggaagtgcttacgtacttgcgaatcaaggagttaaagaagttgtgttgtacgagaaagaagagtcattaggaggccatgccaagacggtgcgtttcgatggcgttgacttggatcttggtttcatggtctttaatcgtgttacatatccaaacatgatagagttcttcgagaaccttggagtagagatggaggtttcagacatgtctttcgcagtgagccttgacaatggcaaaggttgtgaatggggaagccgcaacggtgtctcgggcttatttgctcaaaagaagaacgttttaaatccgtatttctggcaaatgatcagagaaattgttagatttaaagaagacgtcttaaattacattgagaagcttgagggtaaccccgatatcgatcgaaaggaaaccttaggagaatttctcaatacacgtggatactctgagttgtttcagcaagcttacttagtaccgatatgcggttcgatatggtcatgcccatcagatggtgtcttaagcttctctgcttactctgttctttcgttttgttgcaaccaccaccttcttcagatctttgggaggccacagtggctaactgttgcaggacgttctcagacttacgtcgcaaaggttagggcagaattggagagactaggatgcaagatcagaacaagctgcgacgtaaaatctgtttcgacatccgaaaatggttgtgtaactgttacaagtggagatgggtctgaagaagtattcgataggtgcatattggctatgcacgccccagatgctctgagattgcttggtgaagaagttacatttgacgaatctagggttcttggtgctttccaatacgtttacagcgatatatatctccatcatgacattgatttgatgccacggaacaaagcagcgtggagtgcgtggaatttcttgggaagtacggaaaagaaagtatgtgtaacatactggctcaatatacttcagaaccttggcgagaacagtgaaccattctttgtaacacttaacccagacgagaccccaaagaaagcattgctcaaatggaccactggtcaccctgtaccatcagttgcagcttcgatagcttcacaagagcttcaccagattcaaggcaaacgtaacatatggttctgtggtgcatatcagggctatggtttccatgaagacgggctaaaggccggtatggcggctgcacgaggtttgttagggaaagaaacagctcttctgaacaatccgcgacatatggtcccttccttgacagaaacaggagctcggcttttcgttactagattcttgggacaatttatatcaaccggttctgtaacaatactagaagaaggaggaacaatgttcacattcggagggaaggattctacttgtcctctgaaatctatcctcaagattcacagtcctcaattttactggaaggttatgacacaagcggatttaggacttgcagatgcttatatcaatggagatttttctttcgttgataaagaatcaggacttttaaatctgattatgattctcattgctaacagagatacaaaatcaaatcttactaagaaaaggggatggtggacaccgatgtttttaactgcgggtttagcatctgcaaagtattttctaaagcatgtctctaggcagaacactctaacacaagctcgtagaaacatttctcgtcactatgaccttagcaacgagcttttcggtttgttcttggatgataccatgacttactcctcggcagtattcaagtcggatgatgaggatctgagaactgcacagatgagaaaaatatctcttctgattgataaggcgagaatagagaaggaccatgaggttttagagataggatgtggatggggaactttggccatagaagttgtgagaagaactggatgcaaatacaccggcattacgctatctattgagcagcttaaatatgctgaagaaaaagtgaaagaagctggacttcaggaccggattacttttgagctccgcgattatcgccaactatctgatgctcacaaatatgacagaattatatcttgcgagatgctagaagcggtcggacatgagtttatggagatgtttttcagtcgatgtgaagccgcacttgctgaagacggcctaatggtcttgcagttcatatcgacacccgaagagcgttacaatgagtacagactaagttcagatttcattaaagaatacatattccctggtgcatgcgttccttctttagccaaagtcacttcagccatgtcctcttcttctaggctatgcattgaacatgttgagaacattgggattcattactaccaaacattgagattgtggaggaagaacttcttggagagacagaaacaaatcatggctcttggatttgatgataaattcgtaaggacatgggaatattattttgattattgcgcagctggattcaagactcgtactcttggagactaccagttggtgttctcgcgtccagggaacgtagctgcatttgcggattcataccgaggatttccttctgcttattgtgtctcttgagagcaacaacatttggttgcttatgtttttcgatctatacaatatttgatgacctgaaatactagtattgattactgatttgtttggtgtaccaatttgtgaaagtttgttgaataaaagtgagctttactttggaaaaataaccagttactcgt

SEQ ID NO: 107880 - protein, 867 aa, Arabidopsis thaliana; identical to SEQ ID NO: 99634
  peptide (1)..(867): Ceres Seq. ID no. 13652072
  misc_feature (10)..(268): Pfam Name: Flavin containing amine oxidoreductase Pfam Description: Flavin containing amine oxidoreductase
  misc_feature (1)..(867): Homolog of NCBI NO: 21069167 NR Description: cyclopropane synthase [Sterculia foetida]
  misc_feature (59)..(741): Homolog of NCBI NO: 34393848 NR Description: putative cyclopropane synthase [Oryza sativa
  misc_feature (721)..(863): Homolog of NCBI NO: 34393848 NR Description: putative cyclopropane synthase [Oryza sativa
  misc_feature (467)..(855): Homolog of NCBI NO: 15229454 NR Description: cyclopropane-fatty-acyl-phospholipid synthase
  misc_feature (412)..(842): Homolog of NCBI NO: 11994310 NR Description: cyclopocyclopropane fatty acid synthase-like
  misc_feature (426)..(585): Homolog of NCBI NO: 11994331 NR Description: gene_id:MLM24.19~unknown protein [Arabidopsis
  misc_feature (806)..(861): Homolog of NCBI NO: 11994331 NR Description: gene_id:MLM24.19~unknown protein [Arabidopsis
  misc_feature (604)..(636): Homolog of NCBI NO: 11994331 NR Description: gene_id:MLM24.19~unknown protein [Arabidopsis
  misc_feature (1)..(420): Homolog of NCBI NO: 13476696 NR Description: hypothetical protein [Mesorhizobium loti]
  misc_feature (1)..(412): Homolog of NCBI NO: 22956641 NR Description: hypothetical protein [Rhodobacter sphaeroides]

SEQ ID NO: 107881 - protein, 813 aa, Arabidopsis thaliana; identical to SEQ ID NO: 99635
  peptide (1)..(813): Ceres Seq. ID no. 13652073
  misc_feature (1)..(214): Pfam Name: Flavin containing amine oxidoreductase Pfam Description: Flavin containing amine oxidoreductase
  misc_feature (1)..(813): Homolog of NCBI NO: 21069167 NR Description: cyclopropane synthase [Sterculia foetida]
  misc_feature (5)..(687): Homolog of NCBI NO: 34393848 NR Description: putative cyclopropane synthase [Oryza sativa
  misc_feature (667)..(809): Homolog of NCBI NO: 34393848 NR Description: putative cyclopropane synthase [Oryza sativa
  misc_feature (413)..(801): Homolog of NCBI NO: 15229454 NR Description: cyclopropane-fatty-acyl-phospholipid synthase
  misc_feature (358)..(788): Homolog of NCBI NO: 11994310 NR Description: cyclopocyclopropane fatty acid synthase-like
  misc_feature (372)..(531): Homolog of NCBI NO: 11994331 NR Description: gene_id:MLM24.19~unknown protein [Arabidopsis
  misc_feature (752)..(807): Homolog of NCBI NO: 11994331 NR Description: gene_id:MLM24.19~unknown protein [Arabidopsis
  misc_feature (550)..(582): Homolog of NCBI NO: 11994331 NR Description: gene_id:MLM24.19~unknown protein [Arabidopsis
  misc_feature (1)..(366): Homolog of NCBI NO: 13476696 NR Description: hypothetical protein [Mesorhizobium loti]
  misc_feature (1)..(358): Homolog of NCBI NO: 22956641 NR Description: hypothetical protein [Rhodobacter sphaeroides]

SEQ ID NO: 107882 - protein, 803 aa, Arabidopsis thaliana; identical to SEQ ID NO: 99636
  peptide (1)..(803): Ceres Seq. ID no. 13652074
  misc_feature (1)..(204): Pfam Name: Flavin containing amine oxidoreductase Pfam Description: Flavin containing amine oxidoreductase
  misc_feature (1)..(803): Homolog of NCBI NO: 21069167 NR Description: cyclopropane synthase [Sterculia foetida]
  misc_feature (1)..(677): Homolog of NCBI NO: 34393848 NR Description: putative cyclopropane synthase [Oryza sativa
  misc_feature (657)..(799): Homolog of NCBI NO: 34393848 NR Description: putative cyclopropane synthase [Oryza sativa
  misc_feature (403)..(791): Homolog of NCBI NO: 15229454 NR Description: cyclopropane-fatty-acyl-phospholipid synthase
  misc_feature (348)..(778): Homolog of NCBI NO: 11994310 NR Description: cyclopocyclopropane fatty acid synthase-like
  misc_feature (362)..(521): Homolog of NCBI NO: 11994331 NR Description: gene_id:MLM24.19~unknown protein [Arabidopsis
  misc_feature (742)..(797): Homolog of NCBI NO: 11994331 NR Description: gene_id:MLM24.19~unknown protein [Arabidopsis
  misc_feature (540)..(572): Homolog of NCBI NO: 11994331 NR Description: gene_id:MLM24.19~unknown protein [Arabidopsis
  misc_feature (1)..(356): Homolog of NCBI NO: 13476696 NR Description: hypothetical protein [Mesorhizobium loti]
  misc_feature (1)..(348): Homolog of NCBI NO: 22956641 NR Description: hypothetical protein [Rhodobacter sphaeroides]

SEQ ID NO: 107883 - DNA, 2426 bp, Arabidopsis thaliana
  misc_feature (1)..(2426): Ceres Seq. ID no. 13652075
  misc_feature: MA Experiment ID: 20000306 Result: Up-regulated in Transcription
  misc_feature: MA Experiment 20000306 PARAMETER Experiment Name: At_Germinating_Seeds_Sub_P Parameter: Age (hr) Value: 6 vs. 0
  misc_feature: MA Experiment 20000306 PARAMETER Experiment Name: At_Germinating_Seeds_Sub_P Parameter: Organism Value: A. thaliana
  misc_feature: MA Experiment 20000306 PARAMETER Experiment Name: At_Germinating_Seeds_Sub_P Parameter: Plant Line Value: WS
  misc_feature: MA Experiment 20000306 PARAMETER Experiment Name: At_Germinating_Seeds_Sub_P Parameter: Tissue Value: Germinating Seeds
  misc_feature: MA Experiment ID: 20000307 Result: Up-regulated in Transcription
  misc_feature: MA Experiment 20000307 PARAMETER Experiment Name: At_Germinating_Seeds_Sub_P Parameter: Age (hr) Value: 24 vs. 0
  misc_feature: MA Experiment 20000307 PARAMETER Experiment Name: At_Germinating_Seeds_Sub_P Parameter: Organism Value: A. thaliana
  misc_feature: MA Experiment 20000307 PARAMETER Experiment Name: At_Germinating_Seeds_Sub_P Parameter: Plant Line Value: WS
  misc_feature: MA Experiment 20000307 PARAMETER Experiment Name: At_Germinating_Seeds_Sub_P Parameter: Tissue Value: Germinating Seeds
  misc_feature: MA Experiment ID: 20000315 Result: Down-regulated in Transcription
  misc_feature: MA Experiment 20000315 PARAMETER Experiment Name: At_14day_Shoots-Roots_Sub_P Parameter: Age (day) Value: 14
  misc_feature: MA Experiment 20000315 PARAMETER Experiment Name: At_14day_Shoots-Roots_Sub_P Parameter: Organism Value: A. thaliana
  misc_feature: MA Experiment 20000315 PARAMETER Experiment Name: At_14day_Shoots-Roots_Sub_P Parameter: Plant Line Value: WS
  misc_feature: MA Experiment 20000315 PARAMETER Experiment Name: At_14day_Shoots-Roots_Sub_P Parameter: Tissue Value: Shoots vs. Whole Plant
  misc_feature: MA Experiment ID: 20000328 Result: Down-regulated in Transcription
  misc_feature: MA Experiment 20000328 PARAMETER Experiment Name: At_42deg_Heat_Sub_P Parameter: Age (day) Value: 14
  misc_feature: MA Experiment 20000328 PARAMETER Experiment Name: At_42deg_Heat_Sub_P Parameter: Organism Value: A. thaliana
  misc_feature: MA Experiment 20000328 PARAMETER Experiment Name: At_42deg_Heat_Sub_P Parameter: Plant Line Value: WS
  misc_feature: MA Experiment 20000328 PARAMETER Experiment Name: At_42deg_Heat_Sub_P Parameter: Temperature (deg C) Value: 42 vs. 22
  misc_feature: MA Experiment 20000328 PARAMETER Experiment Name: At_42deg_Heat_Sub_P Parameter: Timepoint (hr) Value: 6
  misc_feature: MA Experiment 20000328 PARAMETER Experiment Name: At_42deg_Heat_Sub_P Parameter: Tissue Value: Aerial
  misc_feature: MA Experiment ID: 20001807 Result: Down-regulated in Transcription
  misc_feature: MA Experiment 20001807 PARAMETER Experiment Name: At_50mM_NH4NO3_L-to-H_Sub_P Parameter: Timepoint (hr) Value: 6
  misc_feature: MA Experiment 20001807 PARAMETER Experiment Name: At_50mM_NH4NO3_L-to-H_Sub_P Parameter: Tissue Value: Leaf
  misc_feature: MA Experiment 20001807 PARAMETER Experiment Name: At_50mM_NH4NO3_L-to-H_Sub_P Parameter: Treatment Value: 50mM NH4NO3 vs 100mM Mannitol
aattcgtcgagaaccggttgagaaatcaaaaaccaaaataccatctttgatcttcttcttcttcttcttcttcttcttcttctttctttttttacctgcaatttccctgcgagactgatcactgatgtgctttccttctctcgtgacaacaatcttcaatcaatcgagttcactttttagttcgtgactccctaatttcacacgatcaaagatctcgccaccgaaacgctttcacccaaggattctttcaacggcggcgaaggatatgattacacgacggagaaggacgatggccaagagagggatagtgaaattgacgaccagttggcagattctttggctttaaaactacaattcgactgcggaggaagcagacgaatttgtgtttcatcgatcgatccataatcatgatcaccagcgagaaccaaggactttaaatcatggcggatacaatggttgctcatatggaccgacataataagatagatgttgagatctcagaagatgacaagagattaacaaagctttgctctctaaagaagaaggctataaatgcgacgaacaagtttaagcactcaatgaccaagaaaggtcgaaggcatagccgtgtggcgtgtgtctcaatcgtcgatgaaatcgatacagaagagttgcaagcggttgatgctttccgtcaagctcttattttagacgaactacttccctctaagcatgatgatcatcacatgatgcttaggttcttgagggcaagaaagtttgatctcgaaaaggctaagcaaatgtggtctgatatgcttaactggaggaaagaatatggcgcagacacgatcatggaggactttgatttcaaagaaatcgaagaagtggttaagtattatccacaaggatatcatggtgttgacaaggaaggaagacctatctatattgagaggctaggccaagttgatgccacaaagctgatgaaagtgaccacaattgataggtacgtgaagtaccatgtgaaagagttcgagaagactttcaacgtcaaattccctgcttgttccatcgctgcgaaacgacacattgatcagagcacaacgatcttggatgttcaaggcgtggggcttagtaacttcaacaaagctgcaaaagatcttcttcagagtattcagaaaatcgacaacgataactaccctgaggtttagttatgtttttggacgttcttctttgagtttctataatggttctgacgcagcaacatgacctctgtgtttgtgtttcgttgtagacgctgaaccgtatgttcatcatcaatgctggttgtgggtttaggcttttatggaacacagtgaaatctttccttgacccaaagactacagcaaagattcacgttcttggcaacaaataccaaaccaaacttctagaaatcattgacgccaatgaactgcctgagttcttgggtggtaagtgcacctgcgcagacaaaggtggatgtatgcgttcagacaaaggtccatggaacgaccctgagatcttcaagttggttcagaacggtgaaggtagatgcctgcgaaggagcttgtcagggatcggggaaaagacaatctttgagtataacaacgaaacaaagaagaaatgcgaaccagaagagactcacaagcaatctgctgcagagatggagaagaagttcatcgacacgaatgtggatgctgcagcggctgctgattggcctacaaagcttaacaaggctgaaaaaaaccctaccgaccttaaagatgtgtactcagctgtgaatccgttggagaggaaagggtacttatatggcagcgtcatggcattgctaatggggatagtgggagtgatgaggctaaccaagaacatgccaaggaggctcaccgaggcaaatgtttatagccgtgaaggcagcgccgtctaccaggacggagtgactgttatgtcgaagcaggagtatattgcgatggtgaagaagataacagatcttgaggagaaatgtaagtccatggaagctcaggctgcgttttatatggagagggagaagactctagacgctgcacttcgtcgtattgaccagctcgagcttcagttgtctgaaaccaacaaggcactagacgagacaatgacgaggcaacatgagataatggctttcatcgagaagaaaaagaagaagaagcggaagttcttattattctagaagactgcatcagaggctaagaagcctggaaaataaatcaaaatttccagtttactgtaatcttttaaaatatggatactggagaagatagaaagatgaagtcatgttttgtctgtatctaaggactctcaatttctcctgtgttttttttggtataattgttttgttaatataaacttaaaagactcattcgtcatcatcataatcatcatcataaactaatcattatcat

SEQ ID NO: 107884 - protein, 303 aa, Arabidopsis thaliana
  peptide (1)..(303): Ceres Seq. ID no. 13652076
  misc_feature (1)..(77): Pfam Name: CRAL/TRIO domain Pfam Description: CRAL/TRIO domain
  misc_feature (1)..(274): Homolog of NCBI NO: 15234966 NR Description: SEC14 - like protein [Arabidopsis thaliana]
  misc_feature (1)..(300): Homolog of NCBI NO: 18399733 NR Description: phosphatidylinositol phophatidylcholine transfer - related [Arabidopsis thaliana] >gi|16209642|gb|AAL14382.1| [Arabidopsis thaliana] >gi|20197914|gb|AAM15309.1| putative
  misc_feature (1)..(298): Homolog of NCBI NO: 15236152 NR Description: hypothetical protein [Arabidopsis thaliana]
  misc_feature (1)..(114): Homolog of NCBI NO: 25412048 NR Description: hypothetical protein At2g21540 [imported] - thaliana >gi|4567235|gb|AAD23650.1| putative
  misc_feature (1)..(298): Homolog of NCBI NO: 15224125 NR Description: phosphatidylinositol/phophatidylcholine transfer - related [Arabidopsis thaliana] >gi|25411836|pir||C84561
  misc_feature (1)..(300): Homolog of NCBI NO: 18419847 NR Description: hosphatidylinositol/phophatidylcholine transfer [Arabidopsis thaliana] >gi|15215780|gb|AAK91435.1| [Arabidopsis thaliana] >gi|23463079|gb|AAN33209.1|
  misc_feature (1)..(300): Homolog of NCBI NO: 25407729 NR Description: hypothetical protein AT4g36490 [imported] - thaliana >gi|4006913|emb|CAB16843.1| hypothetical protein thaliana] >gi|7270597|emb|CAB80315.1| hypothetical protein
  misc_feature (1)..(303): Homolog of NCBI NO: 18398094 NR Description: phosphatidylinositol/phosphatidylcholine transfer - related [Arabidopsis thaliana] At2g16380/F16F14.12 [Arabidopsis thaliana]
  misc_feature (1)..(300): Homolog of NCBI NO: 14517816 NR Description: phosphatidylinositol transfer-like protein II
  misc_feature (1)..(153): Homolog of NCBI NO: 14486707 NR Description: phosphatidylinositol transfer-like protein IV
MFIINAGCGFRLLWNTVKSFLDPKTTAKIHVLGNKYQTKLLEIIDANELPEFLGGKCTCADKGGCMRSDKGPWNDPEIFKLVQNGEGRCLRRSLSGIGEKTIFEYNNETKKKCEPEETHKQSAAEMEKKFIDTNVDAAAAADWPTKLNKAEKNPTDLKDVYSAVNPLERKGYLYGSVMALLMGIVGVMRLTKNMPRRLTEANVYSREGSAVYQDGVTVMSKQEYIAMVKKITDLEEKCKSMEAQAAFYMEREKTLDAALRRIDQLELQLSETNKALDETMTRQHEIMAFIEKKKKKKRKFLLF

SEQ ID NO: 107885 - protein, 248 aa, Arabidopsis thaliana
  peptide (1)..(248): Ceres Seq. ID no. 13652077
  misc_feature (147)..(247): Pfam Name: CRAL/TRIO domain Pfam Description: CRAL/TRIO domain
  misc_feature (1)..(247): Homolog of NCBI NO: 15234966 NR Description: SEC14 - like protein [Arabidopsis thaliana]
  misc_feature (1)..(247): Homolog of NCBI NO: 18399733 NR Description: phosphatidylinositol phophatidylcholine transfer - related [Arabidopsis thaliana] >gi|16209642|gb|AAL14382.1| [Arabidopsis thaliana] >gi|20197914|gb|AAM15309.1| putative
  misc_feature (14)..(247): Homolog of NCBI NO: 15236152 NR Description: hypothetical protein [Arabidopsis thaliana]
  misc_feature (1)..(247): Homolog of NCBI NO: 25412048 NR Description: hypothetical protein At2g21540 [imported] - thaliana >gi|4567235|gb|AAD23650.1| putative
  misc_feature (29)..(247): Homolog of NCBI NO: 15224125 NR Description: phosphatidylinositol/phophatidylcholine transfer - related [Arabidopsis thaliana] >gi|25411836|pir||C84561
  misc_feature (21)..(247): Homolog of NCBI NO: 18419847 NR Description: hosphatidylinositol/phophatidylcholine transfer [Arabidopsis thaliana] >gi|15215780|gb|AAK91435.1| [Arabidopsis thaliana] >gi|23463079|gb|AAN33209.1|
  misc_feature (15)..(247): Homolog of NCBI NO: 25407729 NR Description: hypothetical protein AT4g36490 [imported] - thaliana >gi|4006913|emb|CAB16843.1| hypothetical protein thaliana] >gi|7270597|emb|CAB80315.1| hypothetical protein
  misc_feature (14)..(247): Homolog of NCBI NO: 18398094 NR Description: phosphatidylinositol/phosphatidylcholine transfer - related [Arabidopsis thaliana] At2g16380/F16F14.12 [Arabidopsis thaliana]
  misc_feature (31)..(247): Homolog of NCBI NO: 14517816 NR Description: phosphatidylinositol transfer-like protein II
  misc_feature (31)..(247): Homolog of NCBI NO: 14486707 NR Description: phosphatidylinositol transfer-like protein IV
MADTMVAHMDRHNKIDVEISEDDKRLTKLCSLKKKAINATNKFKHSMTKKGRRHSRVACVSIVDEIDTEELQAVDAFRQALILDELLPSKHDDHHMMLRFLRARKFDLEKAKQMWSDMLNWRKEYGADTIMEDFDFKEIEEVVKYYPQGYHGVDKEGRPIYIERLGQVDATKLMKVTTIDRYVKYHVKEFEKTFNVKFPACSIAAKRHIDQSTTILDVQGVGLSNFNKAAKDLLQSIQKIDNDNYPEV

SEQ ID NO: 107886 - protein, 244 aa, Arabidopsis thaliana
  peptide (1)..(244): Ceres Seq. ID no. 13652078
  misc_feature (143)..(243): Pfam Name: CRAL/TRIO domain Pfam Description: CRAL/TRIO domain
  misc_feature (1)..(243): Homolog of NCBI NO: 15234966 NR Description: SEC14 - like protein [Arabidopsis thaliana]
  misc_feature (1)..(243): Homolog of NCBI NO: 18399733 NR Description: phosphatidylinositol phophatidylcholine transfer - related [Arabidopsis thaliana] >gi|16209642|gb|AAL14382.1| [Arabidopsis thaliana] >gi|20197914|gb|AAM15309.1| putative
  misc_feature (10)..(243): Homolog of NCBI NO: 15236152 NR Description: hypothetical protein [Arabidopsis thaliana]
  misc_feature (1)..(243): Homolog of NCBI NO: 25412048 NR Description: hypothetical protein At2g21540 [imported] - thaliana >gi|4567235|gb|AAD23650.1| putative
  misc_feature (25)..(243): Homolog of NCBI NO: 15224125 NR Description: phosphatidylinositol/phophatidylcholine transfer - related [Arabidopsis thaliana] >gi|25411836|pir||C84561
  misc_feature (17)..(243): Homolog of NCBI NO: 18419847 NR Description: hosphatidylinositol/phophatidylcholine transfer [Arabidopsis thaliana] >gi|15215780|gb|AAK91435.1| [Arabidopsis thaliana] >gi|23463079|gb|AAN33209.1|
  misc_feature (11)..(243): Homolog of NCBI NO: 25407729 NR Description: hypothetical protein AT4g36490 [imported] - thaliana >gi|4006913|emb|CAB16843.1| hypothetical protein thaliana] >gi|7270597|emb|CAB80315.1| hypothetical protein
  misc_feature (10)..(243): Homolog of NCBI NO: 18398094 NR Description: phosphatidylinositol/phosphatidylcholine transfer - related [Arabidopsis thaliana] At2g16380/F16F14.12 [Arabidopsis thaliana]
  misc_feature (27)..(243): Homolog of NCBI NO: 14517816 NR Description: phosphatidylinositol transfer-like protein II
  misc_feature (27)..(243): Homolog of NCBI NO: 14486707 NR Description: phosphatidylinositol transfer-like protein IV
MVAHMDRHNKIDVEISEDDKRLTKLCSLKKKAINATNKFKHSMTKKGRRHSRVACVSIVDEIDTEELQAVDAFRQALILDELLPSKHDDHHMMLRFLRARKFDLEKAKQMWSDMLNWRKEYGADTIMEDFDFKEIEEVVKYYPQGYHGVDKEGRPIYIERLGQVDATKLMKVTTIDRYVKYHVKEFEKTFNVKFPACSIAAKRHIDQSTTILDVQGVGLSNFNKAAKDLLQSIQKIDNDNYPEV

SEQ ID NO: 107887 - DNA, 1448 bp, Arabidopsis thaliana
  misc_feature (1)..(1448): Ceres Seq. ID no. 13652099
  misc_feature: MA Experiment ID: 20000307 Result: Down-regulated in Transcription
  misc_feature: MA Experiment 20000307 PARAMETER Experiment Name: At_Germinating_Seeds_Sub_P Parameter: Age (hr) Value: 24 vs. 0
  misc_feature: MA Experiment 20000307 PARAMETER Experiment Name: At_Germinating_Seeds_Sub_P Parameter: Organism Value: A. thaliana
  misc_feature: MA Experiment 20000307 PARAMETER Experiment Name: At_Germinating_Seeds_Sub_P Parameter: Plant Line Value: WS
  misc_feature: MA Experiment 20000307 PARAMETER Experiment Name: At_Germinating_Seeds_Sub_P Parameter: Tissue Value: Germinating Seeds
  misc_feature: MA Experiment ID: 20000328 Result: Up-regulated in Transcription
  misc_feature: MA Experiment 20000328 PARAMETER Experiment Name: At_42deg_Heat_Sub_P Parameter: Age (day) Value: 14
  misc_feature: MA Experiment 20000328 PARAMETER Experiment Name: At_42deg_Heat_Sub_P Parameter: Organism Value: A. thaliana
  misc_feature: MA Experiment 20000328 PARAMETER Experiment Name: At_42deg_Heat_Sub_P Parameter: Plant Line Value: WS
  misc_feature: MA Experiment 20000328 PARAMETER Experiment Name: At_42deg_Heat_Sub_P Parameter: Temperature (deg C) Value: 42 vs. 22
  misc_feature: MA Experiment 20000328 PARAMETER Experiment Name: At_42deg_Heat_Sub_P Parameter: Timepoint (hr) Value: 6
  misc_feature: MA Experiment 20000328 PARAMETER Experiment Name: At_42deg_Heat_Sub_P Parameter: Tissue Value: Aerial
tggaaggagatgagttcctctagtgaatctcatctagccaccgccaaaacagctctcacagcggttgcatcagttgctgcagccgcaatactagctcgatcagtggttcaagattacatgccaaacgaggttcatgaatatatctctcacggctttcgcagattcttcagctacttctcttatcagatgacagctgtaatagaagaatttggaggttttgaacacaaccaagtgtttgaagctgcagaggcttatctctccaccaagatatctaattccactagaagaatcaaagttaacaaacttgagaaacagagcaattatagtgttactgttgaacgtgatgaggaagttgttgatatttttgatggcgtcaagcttagttggatccttgtatgtcgccatgtcgataaaaaggattttcgtaacccgagagatctcaactccactttgaaatcagaagtgcgtagttacgagcttagtttccgaaagaagttcaagaacatggttcttgaatcttatttaccgtttgttgtggaacaagctgcttctattaaacaaaagtttaaaacattgaagatcttcaccgttgattcttactccgtggagtggacctctgtgactctagatcatccttccacgtttcgcactctcgctctggatcccgaggtgaagaaaaacttggtggaggatcttgatcgattcgtgcagcggaaaggcttttacgggagagttggaaaagcttggaagagaggttatttgttgtatggtcctcccggtactggaaaatcaagcttgatcgcagctatagctaatcatcttaacttcgatatctatgacttagacttgacatcacttaacaacaatgctgagctacggaggttacttatgtctactgcaaatcgttccattctagttgtggaagatatagattgttcaatcgagttaaaagatcggtctactgatcaagaaaacaacgatccgttacataaaacggtcacactctctggtctattgaattttgtagacggactatggtcaagttgtggtaacgagcggattatagtgtttacgactaactacagagaaaaattggatccagcattgttgaggccaggacgtatggacatgcacattcacatgtcgtattgcacaccagctgcttttaaggttttggcttcgaattatctcgagattcaagatcatatacttttcgagcagattgaagaatttatccgagaaattgaagttacaccagcagaagtagctgaacaactgatgaggagtgactctgtggataaagtactccaaggacttgttgagttcttaaaagccaagaagcaaatagataattcaaaagcttagaagaaatttagttcttttatttgtttctttgttaaacactatcatgcaattattggttataaaatgttacagaaagtgaaacc

SEQ ID NO: 107888 - protein, 454 aa, Arabidopsis thaliana
  peptide (1)..(454): Ceres Seq. ID no. 13652100
  misc_feature (252)..(436): Pfam Name: ATPase family associated with various cellular Pfam Description: ATPase family associated with various cellular
  misc_feature (4)..(454): Homolog of NCBI NO: 30693380 NR Description: AAA-type ATPase family [Arabidopsis thaliana]
  misc_feature (4)..(454): Homolog of NCBI NO: 39104562 NR Description: putative BCS1 protein [Arabidopsis thaliana]
  misc_feature (4)..(333): Homolog of NCBI NO: 7485704 NR Description: hypothetical protein F18B3.220 - Arabidopsis >gi|4835245|emb|CAB42923.1| putative mitochondrial protein
  misc_feature (330)..(454): Homolog of NCBI NO: 7485704 NR Description: hypothetical protein F18B3.220 - Arabidopsis >gi|4835245|emb|CAB42923.1| putative mitochondrial protein
  misc_feature (5)..(453): Homolog of NCBI NO: 7485703 NR Description: hypothetical protein F18B3.210 - Arabidopsis >gi|4835244|emb|CAB42922.1| putative mitochondrial protein thaliana] >gi|13877697|gb|AAK43926.1|AF370607_1 putative
  misc_feature (5)..(453): Homolog of NCBI NO: 30693378 NR Description: AAA-type ATPase family [Arabidopsis thaliana] AT3g50930/F18B3_210 [Arabidopsis thaliana]
  misc_feature (5)..(453): Homolog of NCBI NO: 21592769 NR Description: BCS1 protein-like protein [Arabidopsis thaliana]
  misc_feature (417)..(454): Homolog of NCBI NO: 7485703 NR Description: hypothetical protein F18B3.210 - Arabidopsis >gi|4835244|emb|CAB42922.1| putative mitochondrial protein thaliana] >gi|13877697|gb|AAK43926.1|AF370607_1 putative
  misc_feature (417)..(454): Homolog of NCBI NO: 21592769 NR Description: BCS1 protein-like protein [Arabidopsis thaliana]
  misc_feature (417)..(454): Homolog of NCBI NO: 30693378 NR Description: AAA-type ATPase family [Arabidopsis thaliana] AT3g50930/F18B3_210 [Arabidopsis thaliana]
WKEMSSSSESHLATAKTALTAVASVAAAAILARSVVQDYMPNEVHEYISHGFRRFFSYFSYQMTAVIEEFGGFEHNQVFEAAEAYLSTKISNSTRRIKVNKLEKQSNYSVTVERDEEVVDIFDGVKLSWILVCRHVDKKDFRNPRDLNSTLKSEVRSYELSFRKKFKNMVLESYLPFVVEQAASIKQKFKTLKIFTVDSYSVEWTSVTLDHPSTFRTLALDPEVKKNLVEDLDRFVQRKGFYGRVGKAWKRGYLLYGPPGTGKSSLIAAIANHLNFDIYDLDLTSLNNNAELRRLLMSTANRSILVVEDIDCSIELKDRSTDQENNDPLHKTVTLSGLLNFVDGLWSSCGNERIIVFTTNYREKLDPALLRPGRMDMHIHMSYCTPAAFKVLASNYLEIQDHILFEQIEEFIREIEVTPAEVAEQLMRSDSVDKVLQGLVEFLKAKKQIDNSKA

SEQ ID NO: 107889 - protein, 451 aa, Arabidopsis thaliana
  peptide (1)..(451): Ceres Seq. ID no. 13652101
  misc_feature (249)..(433): Pfam Name: ATPase family associated with various cellular Pfam Description: ATPase family associated with various cellular
  misc_feature (1)..(451): Homolog of NCBI NO: 30693380 NR Description: AAA-type ATPase family [Arabidopsis thaliana]
  misc_feature (1)..(451): Homolog of NCBI NO: 39104562 NR Description: putative BCS1 protein [Arabidopsis thaliana]
  misc_feature (1)..(330): Homolog of NCBI NO: 7485704 NR Description: hypothetical protein F18B3.220 - Arabidopsis >gi|4835245|emb|CAB42923.1| putative mitochondrial protein
  misc_feature (327)..(451): Homolog of NCBI NO: 7485704 NR Description: hypothetical protein F18B3.220 - Arabidopsis >gi|4835245|emb|CAB42923.1| putative mitochondrial protein
  misc_feature (2)..(450): Homolog of NCBI NO: 7485703 NR Description: hypothetical protein F18B3.210 - Arabidopsis >gi|4835244|emb|CAB42922.1| putative mitochondrial protein thaliana] >gi|13877697|gb|AAK43926.1|AF370607_1 putative
  misc_feature (2)..(450): Homolog of NCBI NO: 21592769 NR Description: BCS1 protein-like protein [Arabidopsis thaliana]
  misc_feature (2)..(450): Homolog of NCBI NO: 30693378 NR Description: AAA-type ATPase family [Arabidopsis thaliana] AT3g50930/F18B3_210 [Arabidopsis thaliana]
  misc_feature (414)..(451): Homolog of NCBI NO: 7485703 NR Description: hypothetical protein F18B3.210 - Arabidopsis >gi|4835244|emb|CAB42922.1| putative mitochondrial protein thaliana] >gi|13877697|gb|AAK43926.1|AF370607_1 putative
  misc_feature (414)..(451): Homolog of NCBI NO: 30693378 NR Description: AAA-type ATPase family [Arabidopsis thaliana] AT3g50930/F18B3_210 [Arabidopsis thaliana]
  misc_feature (414)..(451): Homolog of NCBI NO: 21592769 NR Description: BCS1 protein-like protein [Arabidopsis thaliana]
MSSSSESHLATAKTALTAVASVAAAAILARSVVQDYMPNEVHEYISHGFRRFFSYFSYQMTAVIEEFGGFEHNQVFEAAEAYLSTKISNSTRRIKVNKLEKQSNYSVTVERDEEVVDIFDGVKLSWILVCRHVDKKDFRNPRDLNSTLKSEVRSYELSFRKKFKNMVLESYLPFVVEQAASIKQKFKTLKIFTVDSYSVEWTSVTLDHPSTFRTLALDPEVKKNLVEDLDRFVQRKGFYGRVGKAWKRGYLLYGPPGTGKSSLIAAIANHLNFDIYDLDLTSLNNNAELRRLLMSTANRSILVVEDIDCSIELKDRSTDQENNDPLHKTVTLSGLLNFVDGLWSSCGNERIIVFTTNYREKLDPALLRPGRMDMHIHMSYCTPAAFKVLASNYLEIQDHILFEQIEEFIREIEVTPAEVAEQLMRSDSVDKVLQGLVEFLKAKKQIDNSKA

SEQ ID NO: 107890 - protein, 415 aa, Arabidopsis thaliana
  peptide (1)..(415): Ceres Seq. ID no. 13652102
  misc_feature (213)..(397): Pfam Name: ATPase family associated with various cellular Pfam Description: ATPase family associated with various cellular
  misc_feature (1)..(415): Homolog of NCBI NO: 30693380 NR Description: AAA-type ATPase family [Arabidopsis thaliana]
  misc_feature (1)..(415): Homolog of NCBI NO: 39104562 NR Description: putative BCS1 protein [Arabidopsis thaliana]
  misc_feature (1)..(294): Homolog of NCBI NO: 7485704 NR Description: hypothetical protein F18B3.220 - Arabidopsis >gi|4835245|emb|CAB42923.1| putative mitochondrial protein
  misc_feature (291)..(415): Homolog of NCBI NO: 7485704 NR Description: hypothetical protein F18B3.220 - Arabidopsis >gi|4835245|emb|CAB42923.1| putative mitochondrial protein
  misc_feature (1)..(414): Homolog of NCBI NO: 7485703 NR Description: hypothetical protein F18B3.210 - Arabidopsis >gi|4835244|emb|CAB42922.1| putative mitochondrial protein thaliana] >gi|13877697|gb|AAK43926.1|AF370607_1 putative
  misc_feature (1)..(414): Homolog of NCBI NO: 30693378 NR Description: AAA-type ATPase family [Arabidopsis thaliana] AT3g50930/F18B3_210 [Arabidopsis thaliana]
  misc_feature (1)..(414): Homolog of NCBI NO: 21592769 NR Description: BCS1 protein-like protein [Arabidopsis thaliana]
  misc_feature (378)..(415): Homolog of NCBI NO: 7485703 NR Description: hypothetical protein F18B3.210 - Arabidopsis >gi|4835244|emb|CAB42922.1| putative mitochondrial protein thaliana] >gi|13877697|gb|AAK43926.1|AF370607_1 putative
  misc_feature (378)..(415): Homolog of NCBI NO: 21592769 NR Description: BCS1 protein-like protein [Arabidopsis thaliana]
  misc_feature (378)..(415): Homolog of NCBI NO: 30693378 NR Description: AAA-type ATPase family [Arabidopsis thaliana] AT3g50930/F18B3_210 [Arabidopsis thaliana]
MPNEVHEYISHGFRRFFSYFSYQMTAVIEEFGGFEHNQVFEAAEAYLSTKISNSTRRIKVNKLEKQSNYSVTVERDEEVVDIFDGVKLSWILVCRHVDKKDFRNPRDLNSTLKSEVRSYELSFRKKFKNMVLESYLPFVVEQAASIKQKFKTLKIFTVDSYSVEWTSVTLDHPSTFRTLALDPEVKKNLVEDLDRFVQRKGFYGRVGKAWKRGYLLYGPPGTGKSSLIAAIANHLNFDIYDLDLTSLNNNAELRRLLMSTANRSILVVEDIDCSIELKDRSTDQENNDPLHKTVTLSGLLNFVDGLWSSCGNERIIVFTTNYREKLDPALLRPGRMDMHIHMSYCTPAAFKVLASNYLEIQDHILFEQIEEFIREIEVTPAEVAEQLMRSDSVDKVLQGLVEFLKAKKQIDNSKA

SEQ ID NO: 107891 - DNA, 1473 bp, Arabidopsis thaliana
  misc_feature (1)..(1473): Ceres Seq. ID no. 13652103
  misc_feature: MA Experiment ID: 20001905 Result: Up-regulated in Transcription
  misc_feature: MA Experiment 20001905 PARAMETER Experiment Name: At_Drought_Reproduction_P Parameter: Age (day) Value: 40
  misc_feature: MA Experiment 20001905 PARAMETER Experiment Name: At_Drought_Reproduction_P Parameter: Organism Value: A. thaliana
  misc_feature: MA Experiment 20001905 PARAMETER Experiment Name: At_Drought_Reproduction_P Parameter: Plant Line Value: WS
  misc_feature: MA Experiment 20001905 PARAMETER Experiment Name: At_Drought_Reproduction_P Parameter: Timepoint (day) Value: 10
  misc_feature: MA Experiment 20001905 PARAMETER Experiment Name: At_Drought_Reproduction_P Parameter: Tissue Value: Rosettes
  misc_feature: MA Experiment 20001905 PARAMETER Experiment Name: At_Drought_Reproduction_P Parameter: Treatment Value: Drought vs. No Drought
agggtttttcccattgaagaagatcgagtgaaattcgaagagcgaatcaaagaggaagaagaagaaggaggaggtatagcaatgggggtcgattattacaaggttcttcaggtggatcggaatgcgaaagacgacgacttgaagaaagcttatcgcaaactcgccatgaagtggcatccagacaagaaccctaacaacaaaaaagacgccgaagccaaattcaagcagatctccgaagcttacgatgtaaattaacaaaatgcgttttctcttttcagagagattcccatcttttgcttgaatttgagcaattgtgtagtttgtcaattcactatggttacttctctggcaattaagtaatcttgatttgcttgtagaattgtgtttgatagattccttatgctgttggattttgtaaggttttgagtgatcctcaaaagagagccatctatgatcaatatggagaagaaggtctaacaagccaggctccgcctcccggagcaggcggcgggttttcggatggaggggcttcgttccggttcaacggtagaagcgcagatgatatcttctcggagttctttggcttcacaagaccatttggtgactcacgtggtgcaggtccctctaatgggttccggttcgcggaagacgttttctcgtcaaatgttgttccaccgaggaaagctgcccctattgagagacaacttccttgtagtttggaagatctctacaaaggagtcagtaagaagatgaagatctctcgggacgtcctcgattcaagcgggagacccacaacagttgaggagatcttgacgatagaaatcaagccagggtggaagaaagggacgaagattaccttcccggagaaaggaaacgagcagcgaggaatcataccatcagatcttgtattcatagttgatgagaagccacatgcggtgttcaagcgagacgggaatgaccttgtgatgacacagaagatccctcttgtggaagccctcacgggatacactgctcaggtctcgactctggatggaagatcagtaacggttccaattaacaacgtgatcagcccttcttatgaagaggtggtgaaaggtgaaggcgtgccaatccctaaagacccatcaaagaaagggaacttgagaatcaagttcactgttaagttcccatcgaggctaacaacagagcagaaatctggaatcaaacgaatgttttcgtcttcctagtctgtctctttctatcttactgctacgtttgattttcggttatgactaggtatgtggtagtgtgggtctttgtttgggagattgtgaggttcttgaacgatgtcgcattgagatttctcaacgtccttcagagcttttggtttgggtttggggttttacattttagcattttttttttttcgttcttttaaatttgttattagattgggggaaaaataaaaaactaaataaagattctttgcttctt

SEQ ID NO: 107892 - protein, 158 aa, Arabidopsis thaliana
  peptide (1)..(158): Ceres Seq. ID no. 13652104
  misc_feature (33)..(155): Pfam Name: DnaJ C terminal region Pfam Description: DnaJ C terminal region
  misc_feature (1)..(158): Homolog of NCBI NO: 15231987 NR Description: DnaJ protein family [Arabidopsis thaliana]
  misc_feature (1)..(158): Homolog of NCBI NO: 21618097 NR Description: putative heat shock protein [Arabidopsis thaliana]
  misc_feature (1)..(156): Homolog of NCBI NO: 15240968 NR Description: DnaJ protein family [Arabidopsis thaliana]
  misc_feature (1)..(154): Homolog of NCBI NO: 15225377 NR Description: heat shock protein, putative [Arabidopsis
  misc_feature (1)..(157): Homolog of NCBI NO: 6179940 NR Description: DnaJ-like protein [Nicotiana tabacum]
  misc_feature (1)..(157): Homolog of NCBI NO: 11863723 NR Description: DnaJ like protein [Lycopersicon esculentum]
  misc_feature (1)..(157): Homolog of NCBI NO: 34904486 NR Description: putative heat shock protein 40 [Oryza sativa
  misc_feature (1)..(154): Homolog of NCBI NO: 15235310 NR Description: heat shock protein, putative [Arabidopsis
  misc_feature (1)..(154): Homolog of NCBI NO: 15228294 NR Description: heat shock protein, putative [Arabidopsis
  misc_feature (1)..(158): Homolog of NCBI NO: 15218901 NR Description: DnaJ protein family [Arabidopsis thaliana]
MKISRDVLDSSGRPTTVEEILTIEIKPGWKKGTKITFPEKGNEQRGIIPSDLVFIVDEKPHAVFKRDGNDLVMTQKIPLVEALTGYTAQVSTLDGRSVTVPINNVISPSYEEVVKGEGVPIPKDPSKKGNLRIKFTVKFPSRLTTEQKSGIKRMFSSS

SEQ ID NO: 107893 - protein, 86 aa, Arabidopsis thaliana
  peptide (1)..(86): Ceres Seq. ID no. 13652105
  misc_feature (1)..(83): Pfam Name: DnaJ C terminal region Pfam Description: DnaJ C terminal region
  misc_feature (1)..(86): Homolog of NCBI NO: 15231987 NR Description: DnaJ protein family [Arabidopsis thaliana]
  misc_feature (1)..(86): Homolog of NCBI NO: 21618097 NR Description: putative heat shock protein [Arabidopsis thaliana]
  misc_feature (1)..(84): Homolog of NCBI NO: 15240968 NR Description: DnaJ protein family [Arabidopsis thaliana]
  misc_feature (1)..(82): Homolog of NCBI NO: 15225377 NR Description: heat shock protein, putative [Arabidopsis
  misc_feature (1)..(85): Homolog of NCBI NO: 6179940 NR Description: DnaJ-like protein [Nicotiana tabacum]
  misc_feature (1)..(85): Homolog of NCBI NO: 11863723 NR Description: DnaJ like protein [Lycopersicon esculentum]
  misc_feature (1)..(85): Homolog of NCBI NO: 34904486 NR Description: putative heat shock protein 40 [Oryza sativa
  misc_feature (1)..(82): Homolog of NCBI NO: 15235310 NR Description: heat shock protein, putative [Arabidopsis
  misc_feature (1)..(82): Homolog of NCBI NO: 15228294 NR Description: heat shock protein, putative [Arabidopsis
  misc_feature (1)..(86): Homolog of NCBI NO: 15218901 NR Description: DnaJ protein family [Arabidopsis thaliana]
MTQKIPLVEALTGYTAQVSTLDGRSVTVPINNVISPSYEEVVKGEGVPIPKDPSKKGNLRIKFTVKFPSRLTTEQKSGIKRMFSSS

SEQ ID NO: 107894 - protein, 84 aa, Arabidopsis thaliana
  peptide (1)..(84): Ceres Seq. ID no. 13652106
  misc_feature (31)..(83): Pfam Name: DnaJ domain Pfam Description: DnaJ domain
  misc_feature (28)..(83): Homolog of NCBI NO: 15231987 NR Description: DnaJ protein family [Arabidopsis thaliana]
  misc_feature (28)..(83): Homolog of NCBI NO: 21618097 NR Description: putative heat shock protein [Arabidopsis thaliana]
  misc_feature (28)..(83): Homolog of NCBI NO: 15240968 NR Description: DnaJ protein family [Arabidopsis thaliana]
  misc_feature (28)..(83): Homolog of NCBI NO: 15225377 NR Description: heat shock protein, putative [Arabidopsis
  misc_feature (28)..(83): Homolog of NCBI NO: 6179940 NR Description: DnaJ-like protein [Nicotiana tabacum]
  misc_feature (28)..(83): Homolog of NCBI NO: 11863723 NR Description: DnaJ like protein [Lycopersicon esculentum]
  misc_feature (28)..(83): Homolog of NCBI NO: 34904486 NR Description: putative heat shock protein 40 [Oryza sativa
  misc_feature (28)..(83): Homolog of NCBI NO: 15235310 NR Description: heat shock protein, putative [Arabidopsis
  misc_feature (28)..(83): Homolog of NCBI NO: 15228294 NR Description: heat shock protein, putative [Arabidopsis
  misc_feature (28)..(83): Homolog of NCBI NO: 15218901 NR Description: DnaJ protein family [Arabidopsis thaliana]
RVFPIEEDRVKFEERIKEEEEEGGGIAMGVDYYKVLQVDRNAKDDDLKKAYRKLAMKWHPDKNPNNKKDAEAKFKQISEAYDVN

SEQ ID NO: 107895 - DNA, 1768 bp, Arabidopsis thaliana
  misc_feature (1)..(1768): Ceres Seq. ID no. 13652115
  misc_feature: MA Experiment ID: 20000171 Result: Down-regulated in Transcription
  misc_feature: MA Experiment 20000171 PARAMETER Experiment Name: At_42deg_Heat_P Parameter: Age (day) Value: 14
  misc_feature: MA Experiment 20000171 PARAMETER Experiment Name: At_42deg_Heat_P Parameter: Organism Value: A. thaliana
  misc_feature: MA Experiment 20000171 PARAMETER Experiment Name: At_42deg_Heat_P Parameter: Plant Line Value: WS
  misc_feature: MA Experiment 20000171 PARAMETER Experiment Name: At_42deg_Heat_P Parameter: Temperature (deg C) Value: 42 vs. 22
  misc_feature: MA Experiment 20000171 PARAMETER Experiment Name: At_42deg_Heat_P Parameter: Timepoint (hr) Value: 1
  misc_feature: MA Experiment 20000171 PARAMETER Experiment Name: At_42deg_Heat_P Parameter: Tissue Value: Aerial
  misc_feature: MA Experiment ID: 20001247 Result: Up-regulated in Transcription
  misc_feature: MA Experiment 20001247 PARAMETER Experiment Name: At_Far-red-induction_P Parameter: Age (day) Value: 7
  misc_feature: MA Experiment 20001247 PARAMETER Experiment Name: At_Far-red-induction_P Parameter: Light Value: Far-red vs. White
  misc_feature: MA Experiment 20001247 PARAMETER Experiment Name: At_Far-red-induction_P Parameter: Organism Value: A. thaliana
  misc_feature: MA Experiment 20001247 PARAMETER Experiment Name: At_Far-red-induction_P Parameter: Plant Line Value: Columbia
  misc_feature: MA Experiment 20001247 PARAMETER Experiment Name: At_Far-red-induction_P Parameter: Timepoint (hr) Value: 1
  misc_feature: MA Experiment 20001247 PARAMETER Experiment Name: At_Far-red-induction_P Parameter: Tissue Value: Whole Plant
gattctttcttcttcattattcatttctctcgttattcgtttcgtattttgtttgtgtttatgattttacctccttagttgctgtgagatcaagaagtggtgaaagaaaagttactaaatctggatgttatttgattgtcgtcgttggtcttgagctatgaggagcgttaataatagtagtgtcgacaccgtgaacgccgccgcttccgccatcgtctccgctgagtctagaacacaaccgtcgtcggttcagaaaaaaaggggaagctggtggagcttgtactggtgttttggatccaagaagaacaataaaaggataggccacgcggtgcttgtacccgaaccagctgcatcaggagctgcggtggctccagtccaaaactcttcgagcaattctacttcaatattcatgccctttatagctcctccttcatctcctgcttcctttctgccatcaggtcctccctctgcgtcacatactcctgatcctggtctactttgttccctaaccgtcaatgaaccgccttcagcctttactattggaccatacgctcatgagactcaacctgttactcctccagtgttctctgctttcacaacggaaccctccaccgcgccattcacgccacctcctgaatcaccttcttcccctgaagtgccttttgctcagttacttacatcttcattggaaagggctaggaggaacagtggtggtggaatgaatcagaagttttcagctgcacactacgagtttaagtcttgtcaagtgtatcctggaagtccaggtggtaatctaatctctcctggttcaggtacatcttctccttacccagggaaatgctccatcatcgagtttcgtatcggcgaacctccaaagtttcttggttttgagcacttcacagcgcgtaaatggggatcaagattcggttctggatccatcacacctgctggacaaggttcaaggttgggttcaggtgctttgactcctgatggctcaaagctaacttctggtgtagtgacaccaaatggtgcagagactgttataagaatgagttatgggaatctcacaccacttgaaggcagtcttttggatagtcagatctctgaggttgcgtctttagccaattcggaccacgggtcgtcaaggcataatgatgaagctctcgtggttcctcacagagtttctttcgagttgactggtgaagacgttgcacggtgtcttgcaagcaagctaaaccgttccggttcacatgaaaaagcaagcggcgaacatttaagaccaaactgttgtaaaacgtcgggagaaacagagagcgaacagagtcagaagctaagatcgttttctacaggctctaacaaagaattcaagtttgatagcaccaatgaagagatgatagagaaaattcgatcggagtggtgggcgaatgagaaggtcgccggaaaaggtgatcacagtccaagaaacagttggactttctttccagtcttacgctctggacatacttagcacaaagaaatagcttttaccttcttcattacctctaacatgggaagcaaagtcagtgatatggtaagagattggggtctaacaactatacatatatatagcttggtattgtaggtgtctttgttctttgtactgttaattatataaaatagttttaacacttagatggtagacttatcattgacaaaagaaaagaaactgtattctttcttggttatgtataaacataaaaatcatctctttactatattgtcttacatt

SEQ ID NO: 107896 - protein, 449 aa, Arabidopsis thaliana
  peptide (1)..(449): Ceres Seq. ID no. 13652116
  misc_feature (1)..(449): Homolog of NCBI NO: 30686949 NR Description: proline-rich protein family [Arabidopsis >gi|26449762|dbj|BAC42004.1| unknown protein [Arabidopsis
  misc_feature (32)..(449): Homolog of NCBI NO: 7486810 NR Description: hypothetical protein M7J2.10 - Arabidopsis >gi|2980788|emb|CAA18164.1| putative protein [Arabidopsis >gi|7269412|emb|CAB81372.1| putative protein [Arabidopsis
  misc_feature (1)..(422): Homolog of NCBI NO: 15237154 NR Description: expressed protein [Arabidopsis thaliana] contains similarity to unknown
  misc_feature (1)..(242): Homolog of NCBI NO: 18407879 NR Description: expressed protein [Arabidopsis thaliana] unknown protein [Arabidopsis thaliana] At1g63720/F24D7_9 [Arabidopsis thaliana]
  misc_feature (75)..(242): Homolog of NCBI NO: 25404436 NR Description: hypothetical protein F24D7.9 [imported] -
  misc_feature (32)..(229): Homolog of NCBI NO: 15223134 NR Description: expressed protein [Arabidopsis thaliana]
  misc_feature (1)..(225): Homolog of NCBI NO: 34894046 NR Description: P0436E04.7 [Oryza sativa (japonica
MRSVNNSSVDTVNAAASAIVSAESRTQPSSVQKKRGSWWSLYWCFGSKKNNKRIGHAVLVPEPAASGAAVAPVQNSSSNSTSIFMPFIAPPSSPASFLPSGPPSASHTPDPGLLCSLTVNEPPSAFTIGPYAHETQPVTPPVFSAFTTEPSTAPFTPPPESPSSPEVPFAQLLTSSLERARRNSGGGMNQKFSAAHYEFKSCQVYPGSPGGNLISPGSGTSSPYPGKCSIIEFRIGEPPKFLGFEHFTARKWGSRFGSGSITPAGQGSRLGSGALTPDGSKLTSGVVTPNGAETVIRMSYGNLTPLEGSLLDSQISEVASLANSDHGSSRHNDEALVVPHRVSFELTGEDVARCLASKLNRSGSHEKASGEHLRPNCCKTSGETESEQSQKLRSFSTGSNKEFKFDSTNEEMIEKIRSEWWANEKVAGKGDHSPRNSWTFFPVLRSGHT

SEQ ID NO: 107897 - protein, 365 aa, Arabidopsis thaliana; identical to SEQ ID NO: 46009
  peptide (1)..(365): Ceres Seq. ID no. 13652117
  misc_feature (1)..(365): Homolog of NCBI NO: 30686949 NR Description: proline-rich protein family [Arabidopsis >gi|26449762|dbj|BAC42004.1| unknown protein [Arabidopsis
  misc_feature (1)..(365): Homolog of NCBI NO: 7486810 NR Description: hypothetical protein M7J2.10 - Arabidopsis >gi|2980788|emb|CAA18164.1| putative protein [Arabidopsis >gi|7269412|emb|CAB81372.1| putative protein [Arabidopsis
  misc_feature (1)..(338): Homolog of NCBI NO: 15237154 NR Description: expressed protein [Arabidopsis thaliana] contains similarity to unknown
  misc_feature (1)..(158): Homolog of NCBI NO: 18407879 NR Description: expressed protein [Arabidopsis thaliana] unknown protein [Arabidopsis thaliana] At1g63720/F24D7_9 [Arabidopsis thaliana]
  misc_feature (1)..(158): Homolog of NCBI NO: 25404436 NR Description: hypothetical protein F24D7.9 [imported] -
  misc_feature (1)..(145): Homolog of NCBI NO: 15223134 NR Description: expressed protein [Arabidopsis thaliana]
  misc_feature (1)..(141): Homolog of NCBI NO: 34894046 NR Description: P0436E04.7 [Oryza sativa (japonica

SEQ ID NO: 107898 - protein, 262 aa, Arabidopsis thaliana; identical to SEQ ID NO: 46010
  peptide (1)..(262): Ceres Seq. ID no. 13652118
  misc_feature (1)..(262): Homolog of NCBI NO: 30686949 NR Description: proline-rich protein family [Arabidopsis >gi|26449762|dbj|BAC42004.1| unknown protein [Arabidopsis
  misc_feature (1)..(262): Homolog of NCBI NO: 7486810 NR Description: hypothetical protein M7J2.10 - Arabidopsis >gi|2980788|emb|CAA18164.1| putative protein [Arabidopsis >gi|7269412|emb|CAB81372.1| putative protein [Arabidopsis
  misc_feature (1)..(235): Homolog of NCBI NO: 15237154 NR Description: expressed protein [Arabidopsis thaliana] contains similarity to unknown
  misc_feature (1)..(55): Homolog of NCBI NO: 18407879 NR Description: expressed protein [Arabidopsis thaliana] unknown protein [Arabidopsis thaliana] At1g63720/F24D7_9 [Arabidopsis thaliana]
  misc_feature (1)..(55): Homolog of NCBI NO: 25404436 NR Description: hypothetical protein F24D7.9 [imported] -
  misc_feature (1)..(42): Homolog of NCBI NO: 15223134 NR Description: expressed protein [Arabidopsis thaliana]
  misc_feature (1)..(38): Homolog of NCBI NO: 34894046 NR Description: P0436E04.7 [Oryza sativa (japonica

SEQ ID NO: 107899 - DNA, 2072 bp, Arabidopsis thaliana
  misc_feature (1)..(2072): Ceres Seq. ID no. 13652136
  misc_feature: MA Experiment ID: 20000307 Result: Up-regulated in Transcription
  misc_feature: MA Experiment 20000307 PARAMETER Experiment Name: At_Germinating_Seeds_Sub_P Parameter: Age (hr) Value: 24 vs. 0
  misc_feature: MA Experiment 20000307 PARAMETER Experiment Name: At_Germinating_Seeds_Sub_P Parameter: Organism Value: A. thaliana
  misc_feature: MA Experiment 20000307 PARAMETER Experiment Name: At_Germinating_Seeds_Sub_P Parameter: Plant Line Value: WS
  misc_feature: MA Experiment 20000307 PARAMETER Experiment Name: At_Germinating_Seeds_Sub_P Parameter: Tissue Value: Germinating Seeds
atctaaaagcaatctcgctcttctcttctcttctcttctcttctcttctcttctctcctcttcaacctcaatcacttaacaaaaccctcagtagaaaacttccactaagtttttagtcatcgttggttttcacaataaagcagctcacatgcaaacattctcgtttaagaggagacccaaccattcacatttcccatcaactctcttcttcttctttctctctttaactctgttcatctctggtgtgagttctcgtgtactaagtcctgtccctctagataactcgagcttgatctctgatggtgtccatggcgcctcggattacaagtatctcactctcgaccctccaaagaacgtttccaaagcagcttgcatccatgtctacgggttccttccatgtgcagacaatattggaggttatgtcttccaagttttttcctttggctgtctcttgatcattggtgactatttcttgtctcaaggaagatccaaactctttgtaatcttcgaggtcgggttttatggtggtatcgtcttccctctccttaccatgttcccaagaattgcccttatgatatcgcctggactagcagcgacccacgagggtgctttaatgattgttggaaacaacgttggagttactattggacacacaatctttgctctgacaatgcaatggggagcttgtgttatctttggtttgactagtcctaattcagatccatcaatccgaagaggatctatcaaaagaacatcctctgacacaaagaatccaagaagaggattttacaggatgaagatactaaaaagtgttgttgaagcaagcgtagatgcggatcctaagaacaaaaaagctgcagggattatgctcttgactctagttccatttctcttagtgacattgcctgatttattggatgtacaatcttggagtgatatcattatgttgatcacactcataatctcctgttcttcaacctttatctactttgtttactcgtattttgatacggcagaccaaaagaagagcttagatcatgccaagtttgagcttatgtcagaagttcataagcatttgcagagtttttcgcctcgaacccttattagagatgggcaactaagtaaagaaagcttgaaaagtttgtttgataaaatcgataggaacaaagatgggaagattcaaatctcggagcttaaagacttaaccgtggagtttggagtttttggaaagatgaaatgtgacatcaatgagtttgctagcactttacttgcggagttcgataaagacaaaaatggcgaactagacgagaacgaattcgaagaagggataatgaaactactgaatcattacaaatttgataaccaagaatctccaagacagaacaacacatacatttacagaacaccatccgattctgttaagagcctatcgcagggcgaggaagctggagttttaaagctagaaatgccaaagcaaactcttgttgctaaattcctctccatgagtaccttaagagctgtgactaaagttatcggtgggatgctaatcgtcgtctttcttgctaaaccatttatggtaaacattggactcttatcagtttcagctggagttccttctttctactcagtatttgcagtgatccctttggttagaaacttgaagaacacgttatctgcacacttctgtcgaaagaaagacaaagcaaggatcgcttctgaaaagttctctgagatttacagggatgttacgatgaacaatctgatgggaatgtcgataacattggcgattgtatactcgagaggattgaagtgggaatactcaatagaatctcttcttgttgtggtagttggcattgcaattggcttaccggcttatgtgagatcgacttatccgttctggatctgtgtaatggcctttgctatgtatatcttctctcttgtccttatctatatccattttcatcttcgaggtcagagctaaagctttcaccttttagctctgatcagactaaaagagtatatcaacttcaaagtgtacttttccattttcattaagaccatgttcttttgat

SEQ ID NO: 107900 - protein, 610 aa, Arabidopsis thaliana
  peptide (1)..(610): Ceres Seq. ID no. 13652137
  misc_feature (467)..(600): Pfam Name: Sodium/calcium exchanger protein Pfam Description: Sodium/calcium exchanger protein
  misc_feature (284)..(529): Homolog of NCBI NO: 15226191 NR Description: calcium-binding EF-hand family protein
  misc_feature (1)..(217): Homolog of NCBI NO: 15226191 NR Description: calcium-binding EF-hand family protein
  misc_feature (18)..(577): Homolog of NCBI NO: 15218787 NR Description: calcium-binding EF-hand family protein thaliana] >gi|10764849|gb|AAF24539.2|AC007508_2 F1K23.2
  misc_feature (265)..(604): Homolog of NCBI NO: 15218787 NR Description: calcium-binding EF-hand family protein thaliana] >gi|10764849|gb|AAF24539.2|AC007508_2 F1K23.2
  misc_feature (30)..(223): Homolog of NCBI NO: 15218787 NR Description: calcium-binding EF-hand family protein thaliana] >gi|10764849|gb|AAF24539.2|AC007508_2 F1K23.2
  misc_feature (284)..(536): Homolog of NCBI NO: 15226193 NR Description: calcium-binding EF-hand family protein
  misc_feature (18)..(233): Homolog of NCBI NO: 15226193 NR Description: calcium-binding EF-hand family protein
  misc_feature (225)..(250): Homolog of NCBI NO: 15218787 NR Description: calcium-binding EF-hand family protein thaliana] >gi|10764849|gb|AAF24539.2|AC007508_2 F1K23.2
  misc_feature (24)..(602): Homolog of NCBI NO: 30695448 NR Description: expressed protein [Arabidopsis thaliana]
  misc_feature (224)..(602): Homolog of NCBI NO: 25405975 NR Description: protein F12M16.12 [imported] - Arabidopsis >gi|7769854|gb|AAF69532.1|AC008007_7 F12M16.12 [Arabidopsis
MQTFSFKRRPNHSHFPSTLFFFFLSLTLFISGVSSRVLSPVPLDNSSLISDGVHGASDYKYLTLDPPKNVSKAACIHVYGFLPCADNIGGYVFQVFSFGCLLIIGDYFLSQGRSKLFVIFEVGFYGGIVFPLLTMFPRIALMISPGLAATHEGALMIVGNNVGVTIGHTIFALTMQWGACVIFGLTSPNSDPSIRRGSIKRTSSDTKNPRRGFYRMKILKSVVEASVDADPKNKKAAGIMLLTLVPFLLVTLPDLLDVQSWSDIIMLITLIISCSSTFIYFVYSYFDTADQKKSLDHAKFELMSEVHKHLQSFSPRTLIRDGQLSKESLKSLFDKIDRNKDGKIQISELKDLTVEFGVFGKMKCDINEFASTLLAEFDKDKNGELDENEFEEGIMKLLNHYKFDNQESPRQNNTYIYRTPSDSVKSLSQGEEAGVLKLEMPKQTLVAKFLSMSTLRAVTKVIGGMLIVVFLAKPFMVNIGLLSVSAGVPSFYSVFAVIPLVRNLKNTLSAHFCRKKDKARIASEKFSEIYRDVTMNNLMGMSITLAIVYSRGLKWEYSIESLLVVVVGIAIGLPAYVRSTYPFWICVMAFAMYIFSLVLIYIHFHLRGQS

SEQ ID NO: 107901 - protein, 476 aa, Arabidopsis thaliana
  peptide (1)..(476): Ceres Seq. ID no. 13652138
  misc_feature (333)..(466): Pfam Name: Sodium/calcium exchanger protein Pfam Description: Sodium/calcium exchanger protein
  misc_feature (150)..(395): Homolog of NCBI NO: 15226191 NR Description: calcium-binding EF-hand family protein
  misc_feature (1)..(83): Homolog of NCBI NO: 15226191 NR Description: calcium-binding EF-hand family protein
  misc_feature (1)..(443): Homolog of NCBI NO: 15218787 NR Description: calcium-binding EF-hand family protein thaliana] >gi|10764849|gb|AAF24539.2|AC007508_2 F1K23.2
  misc_feature (131)..(470): Homolog of NCBI NO: 15218787 NR Description: calcium-binding EF-hand family protein thaliana] >gi|10764849|gb|AAF24539.2|AC007508_2 F1K23.2
  misc_feature (1)..(89): Homolog of NCBI NO: 15218787 NR Description: calcium-binding EF-hand family protein thaliana] >gi|10764849|gb|AAF24539.2|AC007508_2 F1K23.2
  misc_feature (150)..(402): Homolog of NCBI NO: 15226193 NR Description: calcium-binding EF-hand family protein
  misc_feature (1)..(99): Homolog of NCBI NO: 15226193 NR Description: calcium-binding EF-hand family protein
  misc_feature (91)..(116): Homolog of NCBI NO: 15218787 NR Description: calcium-binding EF-hand family protein thaliana] >gi|10764849|gb|AAF24539.2|AC007508_2 F1K23.2
  misc_feature (1)..(468): Homolog of NCBI NO: 30695448 NR Description: expressed protein [Arabidopsis thaliana]
  misc_feature (90)..(468): Homolog of NCBI NO: 25405975 NR Description: protein F12M16.12 [imported] - Arabidopsis >gi|7769854|gb|AAF69532.1|AC008007_7 F12M16.12 [Arabidopsis
MFPRIALMISPGLAATHEGALMIVGNNVGVTIGHTIFALTMQWGACVIFGLTSPNSDPSIRRGSIKRTSSDTKNPRRGFYRMKILKSVVEASVDADPKNKKAAGIMLLTLVPFLLVTLPDLLDVQSWSDIIMLITLIISCSSTFIYFVYSYFDTADQKKSLDHAKFELMSEVHKHLQSFSPRTLIRDGQLSKESLKSLFDKIDRNKDGKIQISELKDLTVEFGVFGKMKCDINEFASTLLAEFDKDKNGELDENEFEEGIMKLLNHYKFDNQESPRQNNTYIYRTPSDSVKSLSQGEEAGVLKLEMPKQTLVAKFLSMSTLRAVTKVIGGMLIVVFLAKPFMVNIGLLSVSAGVPSFYSVFAVIPLVRNLKNTLSAHFCRKKDKARIASEKFSEIYRDVTMNNLMGMSITLAIVYSRGLKWEYSIESLLVVVVGIAIGLPAYVRSTYPFWICVMAFAMYIFSLVLIYIHFHLRGQS

SEQ ID NO: 107902 - protein, 469 aa, Arabidopsis thaliana
  peptide (1)..(469): Ceres Seq. ID no. 13652139
  misc_feature (326)..(459): Pfam Name: Sodium/calcium exchanger protein Pfam Description: Sodium/calcium exchanger protein
  misc_feature (143)..(388): Homolog of NCBI NO: 15226191 NR Description: calcium-binding EF-hand family protein
  misc_feature (1)..(76): Homolog of NCBI NO: 15226191 NR Description: calcium-binding EF-hand family protein
  misc_feature (1)..(436): Homolog of NCBI NO: 15218787 NR Description: calcium-binding EF-hand family protein thaliana] >gi|10764849|gb|AAF24539.2|AC007508_2 F1K23.2
  misc_feature (124)..(463): Homolog of NCBI NO: 15218787 NR Description: calcium-binding EF-hand family protein thaliana] >gi|10764849|gb|AAF24539.2|AC007508_2 F1K23.2
  misc_feature (1)..(82): Homolog of NCBI NO: 15218787 NR Description: calcium-binding EF-hand family protein thaliana] >gi|10764849|gb|AAF24539.2|AC007508_2 F1K23.2
  misc_feature (143)..(395): Homolog of NCBI NO: 15226193 NR Description: calcium-binding EF-hand family protein
  misc_feature (1)..(92): Homolog of NCBI NO: 15226193 NR Description: calcium-binding EF-hand family protein
  misc_feature (84)..(109): Homolog of NCBI NO: 15218787 NR Description: calcium-binding EF-hand family protein thaliana] >gi|10764849|gb|AAF24539.2|AC007508_2 F1K23.2
  misc_feature (1)..(461): Homolog of NCBI NO: 30695448 NR Description: expressed protein [Arabidopsis thaliana]
  misc_feature (83)..(461): Homolog of NCBI NO: 25405975 NR Description: protein F12M16.12 [imported] - Arabidopsis >gi|7769854|gb|AAF69532.1|AC008007_7 F12M16.12 [Arabidopsis
MISPGLAATHEGALMIVGNNVGVTIGHTIFALTMQWGACVIFGLTSPNSDPSIRRGSIKRTSSDTKNPRRGFYRMKILKSVVEASVDADPKNKKAAGIMLLTLVPFLLVTLPDLLDVQSWSDIIMLITLIISCSSTFIYFVYSYFDTADQKKSLDHAKFELMSEVHKHLQSFSPRTLIRDGQLSKESLKSLFDKIDRNKDGKIQISELKDLTVEFGVFGKMKCDINEFASTLLAEFDKDKNGELDENEFEEGIMKLLNHYKFDNQESPRQNNTYIYRTPSDSVKSLSQGEEAGVLKLEMPKQTLVAKFLSMSTLRAVTKVIGGMLIVVFLAKPFMVNIGLLSVSAGVPSFYSVFAVIPLVRNLKNTLSAHFCRKKDKARIASEKFSEIYRDVTMNNLMGMSITLAIVYSRGLKWEYSIESLLVVVVGIAIGLPAYVRSTYPFWICVMAFAMYIFSLVLIYIHFHLRGQS

SEQ ID NO: 107903 - DNA, 3417 bp, Arabidopsis thaliana
  misc_feature (1)..(3417): Ceres Seq. ID no. 13652164
  misc_feature: MA Experiment ID: 20000173 Result: Down-regulated in Transcription
  misc_feature: MA Experiment 20000173 PARAMETER Experiment Name: At_42deg_Heat_P Parameter: Age (day) Value: 14
  misc_feature: MA Experiment 20000173 PARAMETER Experiment Name: At_42deg_Heat_P Parameter: Organism Value: A. thaliana
  misc_feature: MA Experiment 20000173 PARAMETER Experiment Name: At_42deg_Heat_P Parameter: Plant Line Value: WS
  misc_feature: MA Experiment 20000173 PARAMETER Experiment Name: At_42deg_Heat_P Parameter: Temperature (deg C) Value: 42 vs. 22
  misc_feature: MA Experiment 20000173 PARAMETER Experiment Name: At_42deg_Heat_P Parameter: Timepoint (hr) Value: 6
  misc_feature: MA Experiment 20000173 PARAMETER Experiment Name: At_42deg_Heat_P Parameter: Tissue Value: Aerial
  misc_feature: MA Experiment ID: 20000184 Result: Down-regulated in Transcription
  misc_feature: MA Experiment 20000184 PARAMETER Experiment Name: At_Shoots__P Parameter: Age (day) Value: 7
  misc_feature: MA Experiment 20000184 PARAMETER Experiment Name: At_Shoots__P Parameter: Tissue Value: Shoots vs. Whole Plant
  misc_feature: MA Experiment ID: 20000234 Result: Down-regulated in Transcription
  misc_feature: MA Experiment 20000234 PARAMETER Experiment Name: At_Siliques_P Parameter: Age (day) Value: 21
  misc_feature: MA Experiment 20000234 PARAMETER Experiment Name: At_Siliques_P Parameter: Organism Value: A. thaliana
  misc_feature: MA Experiment 20000234 PARAMETER Experiment Name: At_Siliques_P Parameter: Plant Line Value: WS
  misc_feature: MA Experiment 20000234 PARAMETER Experiment Name: At_Siliques_P Parameter: Tissue Value: Less Than 5mm Siliques vs. Whole Plant
  misc_feature: MA Experiment ID: 20001560 Result: Down-regulated in Transcription
  misc_feature: MA Experiment 20001560 PARAMETER Experiment Name: At_Drought_Soil_Dry_P Parameter: Age (day) Value: 28
  misc_feature: MA Experiment 20001560 PARAMETER Experiment Name: At_Drought_Soil_Dry_P Parameter: Organism Value: A. thaliana
  misc_feature: MA Experiment 20001560 PARAMETER Experiment Name: At_Drought_Soil_Dry_P Parameter: Plant Line Value: WS
  misc_feature: MA Experiment 20001560 PARAMETER Experiment Name: At_Drought_Soil_Dry_P Parameter: Post Timepoint (hr) Value: None
  misc_feature: MA Experiment 20001560 PARAMETER Experiment Name: At_Drought_Soil_Dry_P Parameter: Post-Treatment Value: None
  misc_feature: MA Experiment 20001560 PARAMETER Experiment Name: At_Drought_Soil_Dry_P Parameter: Timepoint (day) Value: 14
  misc_feature: MA Experiment 20001560 PARAMETER Experiment Name: At_Drought_Soil_Dry_P Parameter: Treatment Value: Drought vs. No Drought
aacaactcttcccaattgtgaaacctttatatcccattatcagctgttttaagttgaccaagttttttcttatggtcctcttcctattttcttcttttgatatacttttttttttaactctatttgttcaaagtcttcgtcttctttttgttaacattattgtttacatgtttttgaaagagagattataatttttattaagagattcgtcaaacctttgtgtagagcacatgcttttttcttagattattttgagataggatcagaaaacagaggaagtgataagaggttctttttgggtttgaagatgagttcaagaactggagcctctttgctcctgatcttgtttttcttccaaatttgttctgtttcggcactcacgaatggtttagacgcttctgctttaaatgctctgaagagtgaatggaccactcctcctgatggttgggaaggctctgatccttgtggaaccaattgggttggaattacatgtcaaaatgaccgcgtcgtttcaatatcactaggtaaccttgacttggaaggaaagcttcctgccgatatatcgttcttgtccgagttgcggatcttggatttgtcatacaatcctaaattgtccggaccgcttccaccaaacatcggtaaccttgggaagttaaggaacttgatccttgtgggatgtagtttcagtggtcaaatccctgagtccattggaactctaaaagaacttatatatctctccctaaatttaaataaatttagtggaacaattccgccttcaattggcctgttatcaaaactatattggtttgatatagctgacaatcagattgaaggagagcttccagtttctaatgggacttctgcacctggacttgacatgcttcttcaaactaagcattttcattttggaaaaaacaagctttcaggcaatatcccaaaagaacttttcagctcaaacatgagtttaatacatgtcctcttcgatggaaaccaattcacgggcgaaattccagagaccctcagtctcgttaaaacgttgacggtgttacgccttgataggaacaaactcattggagatattccttcatatcttaacaatctcacaaatcttaacgaactgtacttggccaacaacagatttactggtactcttccaaatttaaccagcttgaccagtctctacacattggatgtgagcaataacactttggatttctcacccattccatcatggatctcttcattaccctccctatcaacattaaggatggaagggatccaacttaatggtccaataccaatctcatttttcagccctcctcagttgcagactgttatcttaaagcgaaatagtatagtggaaagcttagactttggtacagacgttagcagccagttggagtttgtggatttacaatacaatgaaataactgattataaaccatcagctaataaagtcctccaagtaatattggcaaataatccagtgtgtctagaggcgggaaacgggccgagttactgttcagcaatccaacacaatacctcattttctacactcccaacaaactgttctccatgcgaaccgggcatggaagcgagtcccacgtgccgctgtgcgtatccattcatgggaacactctacttccggtctccttctttctcagggttgttcaactccaccaacttctcaattctacagaaggcaatcgcggatttctttaagaagttcaattatcctgtagactccgttggtgttcggaacataagagagaatccaactgatcatcagcttctaatagatctattggtctttccattgggaagagagagttttaatcagacaggaatgtcacttgttggttttgcatttagcaaccagacttataagcctcctccgatatttggcccttatattttcaaagctgatttgtacaaacagttctctgatgtagaagtttcatcaaagtcatcaaacaaaagcattctcattggagcagtagttggtgttgttgttcttctactattgttaacaatagctgggatttacgctcttaggcagaagaagagagctgaaagagcaactggtcaaaataatccttttgctaaatgggatacaagtaagagtagtattgatgctccgcagctaatgggagcaaaagcgtttacttttgaggagctgaagaaatgcactgacaacttttcagaggcaaatgatgttggcggtggaggttacggcaaggtttatagagggattcttcctaatgggcaactcatagcaatcaaaagggctcaacaaggatctttgcaaggagggttggagttcaaaactgagattgagcttctctcaagggtccatcataagaatgttgtcagactcttgggcttctgctttgaccggaatgaacaaatgctcgtatacgagtacatttcaaatgggtcacttaaagacagtctgtccgggaagagtgggattcgattggattggacaagaagacttaaaatagcacttggttcaggcaagggcttggcttatcttcatgaacttgctgatcctccaattatacatagagacatcaaatcaaataacatattacttgatgaaaatctaaccgcaaaggttgccgacttcggtctctccaaacttgtgggagaccctgagaaaactcatgtcacaacacaagtcaaaggaaccatgggctacttggatccagagtactacatgacgaatcaattaacggagaagagcgatgtgtatgggtttggtgtggttttactcgagctattaaccggtagaagtccgatagagagaggcaaatatgtggtgagagaggtgaagacaaagatgaataaatctcggagtttgtatgacctgcaggagttgttggacacaacgatcatagcaagcagtgggaatctaaaagggttcgagaagtatgtagacttggctttgagatgtgtggaggaggaaggagttaataggccatcaatgggtgaggttgtgaaagagattgagaacataatgcagcttgcgggattaaatcctaactcagattcagcaacgagttcaagaacgtatgaggacgcaatcaaaggatctggtgatccttatggcagtgaatcgtttcagtacagtgggaattttccagcttcaaagcttgagccccaatgattgattatgtttctttttgttattttgttatttcgtaagtgacttcatacttgaaatgccttgtgaatgtggagtagcatgattctgtttgatatgtggtcgctgattataaagcagatgaatggagagccaaacgcagaatcaaaaaccaccagatctttggcaatgtcgacaccagtttcaaacataagaaaagtaatcaagctcaatgtatgatgaataattgaatatattaattcttgttgagc

SEQ ID NO: 107904 - protein, 953 aa, Arabidopsis thaliana
  peptide (1)..(953): Ceres Seq. ID no. 13652165
  misc_feature (631)..(831): Pfam Name: Protein kinase domain Pfam Description: Protein kinase domain
  misc_feature (92)..(953): Homolog of NCBI NO: 15240549 NR Description: leucine-rich repeat transmembrane protein kinase,
  misc_feature (5)..(953): Homolog of NCBI NO: 30699436 NR Description: leucine-rich repeat transmembrane protein kinase, [Arabidopsis thaliana] >gi|26450791|dbj|BAC42504.1| unknown
  misc_feature (5)..(953): Homolog of NCBI NO: 7715608 NR Description: F20B17.5 [Arabidopsis thaliana]
  misc_feature (1)..(352): Homolog of NCBI NO: 8978273 NR Description: receptor protein kinase-like [Arabidopsis
  misc_feature (192)..(953): Homolog of NCBI NO: 34909240 NR Description: putative receptor protein kinase [Oryza sativa
  misc_feature (25)..(906): Homolog of NCBI NO: 30679474 NR Description: leucine-rich repeat transmembrane protein kinase,
  misc_feature (88)..(922): Homolog of NCBI NO: 15222211 NR Description: leucine-rich repeat transmembrane protein kinase,
  misc_feature (1)..(460): Homolog of NCBI NO: 15240549 NR Description: leucine-rich repeat transmembrane protein kinase,
  misc_feature (91)..(944): Homolog of NCBI NO: 34905792 NR Description: P0401G10.22 [Oryza sativa (japonica
  misc_feature (143)..(906): Homolog of NCBI NO: 11346408 NR Description: hypothetical protein T20L15.220 - Arabidopsis >gi|7329668|emb|CAB82765.1| putative protein [Arabidopsis
MSSRTGASLLLILFFFQICSVSALTNGLDASALNALKSEWTTPPDGWEGSDPCGTNWVGITCQNDRVVSISLGNLDLEGKLPADISFLSELRILDLSYNPKLSGPLPPNIGNLGKLRNLILVGCSFSGQIPESIGTLKELIYLSLNLNKFSGTIPPSIGLLSKLYWFDIADNQIEGELPVSNGTSAPGLDMLLQTKHFHFGKNKLSGNIPKELFSSNMSLIHVLFDGNQFTGEIPETLSLVKTLTVLRLDRNKLIGDIPSYLNNLTNLNELYLANNRFTGTLPNLTSLTSLYTLDVSNNTLDFSPIPSWISSLPSLSTLRMEGIQLNGPIPISFFSPPQLQTVILKRNSIVESLDFGTDVSSQLEFVDLQYNEITDYKPSANKVLQVILANNPVCLEAGNGPSYCSAIQHNTSFSTLPTNCSPCEPGMEASPTCRCAYPFMGTLYFRSPSFSGLFNSTNFSILQKAIADFFKKFNYPVDSVGVRNIRENPTDHQLLIDLLVFPLGRESFNQTGMSLVGFAFSNQTYKPPPIFGPYIFKADLYKQFSDVEVSSKSSNKSILIGAVVGVVVLLLLLTIAGIYALRQKKRAERATGQNNPFAKWDTSKSSIDAPQLMGAKAFTFEELKKCTDNFSEANDVGGGGYGKVYRGILPNGQLIAIKRAQQGSLQGGLEFKTEIELLSRVHHKNVVRLLGFCFDRNEQMLVYEYISNGSLKDSLSGKSGIRLDWTRRLKIALGSGKGLAYLHELADPPIIHRDIKSNNILLDENLTAKVADFGLSKLVGDPEKTHVTTQVKGTMGYLDPEYYMTNQLTEKSDVYGFGVVLLELLTGRSPIERGKYVVREVKTKMNKSRSLYDLQELLDTTIIASSGNLKGFEKYVDLALRCVEEEGVNRPSMGEVVKEIENIMQLAGLNPNSDSATSSRTYEDAIKGSGDPYGSESFQYSGNFPASKLEPQ

SEQ ID NO: 107905 - protein, 763 aa, Arabidopsis thaliana
  peptide (1)..(763): Ceres Seq. ID no. 13652166
  misc_feature (441)..(641): Pfam Name: Protein kinase domain Pfam Description: Protein kinase domain
  misc_feature (1)..(763): Homolog of NCBI NO: 15240549 NR Description: leucine-rich repeat transmembrane protein kinase,
  misc_feature (1)..(763): Homolog of NCBI NO: 30699436 NR Description: leucine-rich repeat transmembrane protein kinase, [Arabidopsis thaliana] >gi|26450791|dbj|BAC42504.1| unknown
  misc_feature (1)..(763): Homolog of NCBI NO: 7715608 NR Description: F20B17.5 [Arabidopsis thaliana]
  misc_feature (1)..(162): Homolog of NCBI NO: 8978273 NR Description: receptor protein kinase-like [Arabidopsis
  misc_feature (2)..(763): Homolog of NCBI NO: 34909240 NR Description: putative receptor protein kinase [Oryza sativa
  misc_feature (1)..(716): Homolog of NCBI NO: 30679474 NR Description: leucine-rich repeat transmembrane protein kinase,
  misc_feature (1)..(732): Homolog of NCBI NO: 15222211 NR Description: leucine-rich repeat transmembrane protein kinase,
  misc_feature (1)..(270): Homolog of NCBI NO: 15240549 NR Description: leucine-rich repeat transmembrane protein kinase,
  misc_feature (1)..(754): Homolog of NCBI NO: 34905792 NR Description: P0401G10.22 [Oryza sativa (japonica
  misc_feature (1)..(716): Homolog of NCBI NO: 11346408 NR Description: hypothetical protein T20L15.220 - Arabidopsis >gi|7329668|emb|CAB82765.1| putative protein [Arabidopsis
MLLQTKHFHFGKNKLSGNIPKELFSSNMSLIHVLFDGNQFTGEIPETLSLVKTLTVLRLDRNKLIGDIPSYLNNLTNLNELYLANNRFTGTLPNLTSLTSLYTLDVSNNTLDFSPIPSWISSLPSLSTLRMEGIQLNGPIPISFFSPPQLQTVILKRNSIVESLDFGTDVSSQLEFVDLQYNEITDYKPSANKVLQVILANNPVCLEAGNGPSYCSAIQHNTSFSTLPTNCSPCEPGMEASPTCRCAYPFMGTLYFRSPSFSGLFNSTNFSILQKAIADFFKKFNYPVDSVGVRNIRENPTDHQLLIDLLVFPLGRESFNQTGMSLVGFAFSNQTYKPPPIFGPYIFKADLYKQFSDVEVSSKSSNKSILIGAVVGVVVLLLLLTIAGIYALRQKKRAERATGQNNPFAKWDTSKSSIDAPQLMGAKAFTFEELKKCTDNFSEANDVGGGGYGKVYRGILPNGQLIAIKRAQQGSLQGGLEFKTEIELLSRVHHKNVVRLLGFCFDRNEQMLVYEYISNGSLKDSLSGKSGIRLDWTRRLKIALGSGKGLAYLHELADPPIIHRDIKSNNILLDENLTAKVADFGLSKLVGDPEKTHVTTQVKGTMGYLDPEYYMTNQLTEKSDVYGFGVVLLELLTGRSPIERGKYVVREVKTKMNKSRSLYDLQELLDTTIIASSGNLKGFEKYVDLALRCVEEEGVNRPSMGEVVKEIENIMQLAGLNPNSDSATSSRTYEDAIKGSGDPYGSESFQYSGNFPASKLEPQ

SEQ ID NO: 107906 - protein, 736 aa, Arabidopsis thaliana
  peptide (1)..(736): Ceres Seq. ID no. 13652167
  misc_feature (414)..(614): Pfam Name: Protein kinase domain Pfam Description: Protein kinase domain
  misc_feature (1)..(736): Homolog of NCBI NO: 15240549 NR Description: leucine-rich repeat transmembrane protein kinase,
  misc_feature (1)..(736): Homolog of NCBI NO: 30699436 NR Description: leucine-rich repeat transmembrane protein kinase, [Arabidopsis thaliana] >gi|26450791|dbj|BAC42504.1| unknown
  misc_feature (1)..(736): Homolog of NCBI NO: 7715608 NR Description: F20B17.5 [Arabidopsis thaliana]
  misc_feature (1)..(135): Homolog of NCBI NO: 8978273 NR Description: receptor protein kinase-like [Arabidopsis
  misc_feature (1)..(736): Homolog of NCBI NO: 34909240 NR Description: putative receptor protein kinase [Oryza sativa
  misc_feature (1)..(689): Homolog of NCBI NO: 30679474 NR Description: leucine-rich repeat transmembrane protein kinase,
  misc_feature (1)..(705): Homolog of NCBI NO: 15222211 NR Description: leucine-rich repeat transmembrane protein kinase,
  misc_feature (1)..(243): Homolog of NCBI NO: 15240549 NR Description: leucine-rich repeat transmembrane protein kinase,
  misc_feature (1)..(727): Homolog of NCBI NO: 34905792 NR Description: P0401G10.22 [Oryza sativa (japonica
  misc_feature (1)..(689): Homolog of NCBI NO: 11346408 NR Description: hypothetical protein T20L15.220 - Arabidopsis >gi|7329668|emb|CAB82765.1| putative protein [Arabidopsis
MSLIHVLFDGNQFTGEIPETLSLVKTLTVLRLDRNKLIGDIPSYLNNLTNLNELYLANNRFTGTLPNLTSLTSLYTLDVSNNTLDFSPIPSWISSLPSLSTLRMEGIQLNGPIPISFFSPPQLQTVILKRNSIVESLDFGTDVSSQLEFVDLQYNEITDYKPSANKVLQVILANNPVCLEAGNGPSYCSAIQHNTSFSTLPTNCSPCEPGMEASPTCRCAYPFMGTLYFRSPSFSGLFNSTNFSILQKAIADFFKKFNYPVDSVGVRNIRENPTDHQLLIDLLVFPLGRESFNQTGMSLVGFAFSNQTYKPPPIFGPYIFKADLYKQFSDVEVSSKSSNKSILIGAVVGVVVLLLLLTIAGIYALRQKKRAERATGQNNPFAKWDTSKSSIDAPQLMGAKAFTFEELKKCTDNFSEANDVGGGGYGKVYRGILPNGQLIAIKRAQQGSLQGGLEFKTEIELLSRVHHKNVVRLLGFCFDRNEQMLVYEYISNGSLKDSLSGKSGIRLDWTRRLKIALGSGKGLAYLHELADPPIIHRDIKSNNILLDENLTAKVADFGLSKLVGDPEKTHVTTQVKGTMGYLDPEYYMTNQLTEKSDVYGFGVVLLELLTGRSPIERGKYVVREVKTKMNKSRSLYDLQELLDTTIIASSGNLKGFEKYVDLALRCVEEEGVNRPSMGEVVKEIENIMQLAGLNPNSDSATSSRTYEDAIKGSGDPYGSESFQYSGNFPASKLEPQ

SEQ ID NO: 107907 - DNA, 2007 bp, Arabidopsis thaliana
  misc_feature (1)..(2007): Ceres Seq. ID no. 13652254
  misc_feature: MA Experiment ID: 20000173 Result: Down-regulated in Transcription
  misc_feature: MA Experiment 20000173 PARAMETER Experiment Name: At_42deg_Heat_P Parameter: Age (day) Value: 14
  misc_feature: MA Experiment 20000173 PARAMETER Experiment Name: At_42deg_Heat_P Parameter: Organism Value: A. thaliana
  misc_feature: MA Experiment 20000173 PARAMETER Experiment Name: At_42deg_Heat_P Parameter: Plant Line Value: WS
  misc_feature: MA Experiment 20000173 PARAMETER Experiment Name: At_42deg_Heat_P Parameter: Temperature (deg C) Value: 42 vs. 22
  misc_feature: MA Experiment 20000173 PARAMETER Experiment Name: At_42deg_Heat_P Parameter: Timepoint (hr) Value: 6
  misc_feature: MA Experiment 20000173 PARAMETER Experiment Name: At_42deg_Heat_P Parameter: Tissue Value: Aerial
  misc_feature: MA Experiment ID: 20000180 Result: Up-regulated in Transcription
  misc_feature: MA Experiment 20000180 PARAMETER Experiment Name: At_Germinating_Seeds_P Parameter: Age (hr) Value: 24 vs. 0
  misc_feature: MA Experiment 20000180 PARAMETER Experiment Name: At_Germinating_Seeds_P Parameter: Tissue Value: Germinating Seeds
  misc_feature: MA Experiment ID: 20000234 Result: Up-regulated in Transcription
  misc_feature: MA Experiment 20000234 PARAMETER Experiment Name: At_Siliques_P Parameter: Age (day) Value: 21
  misc_feature: MA Experiment 20000234 PARAMETER Experiment Name: At_Siliques_P Parameter: Organism Value: A. thaliana
  misc_feature: MA Experiment 20000234 PARAMETER Experiment Name: At_Siliques_P Parameter: Plant Line Value: WS
  misc_feature: MA Experiment 20000234 PARAMETER Experiment Name: At_Siliques_P Parameter: Tissue Value: Less Than 5mm Siliques vs. Whole Plant
  misc_feature: MA Experiment ID: 20000235 Result: Up-regulated in Transcription
  misc_feature: MA Experiment 20000235 PARAMETER Experiment Name: At_Siliques_P Parameter: Age (day) Value: 21
  misc_feature: MA Experiment 20000235 PARAMETER Experiment Name: At_Siliques_P Parameter: Organism Value: A. thaliana
  misc_feature: MA Experiment 20000235 PARAMETER Experiment Name: At_Siliques_P Parameter: Plant Line Value: WS
  misc_feature: MA Experiment 20000235 PARAMETER Experiment Name: At_Siliques_P Parameter: Tissue Value: 5-10mm Siliques vs. Whole Plant
  misc_feature: MA Experiment ID: 20000264 Result: Up-regulated in Transcription
  misc_feature: MA Experiment 20000264 PARAMETER Experiment Name: At_Open_Flower_P Parameter: Age (day) Value: 21
  misc_feature: MA Experiment 20000264 PARAMETER Experiment Name: At_Open_Flower_P Parameter: Plant Line Value: WS
  misc_feature: MA Experiment 20000264 PARAMETER Experiment Name: At_Open_Flower_P Parameter: Tissue Value: Open Flower vs. Whole Plant
  misc_feature: MA Experiment ID: 20000286 Result: Up-regulated in Transcription
  misc_feature: MA Experiment 20000286 PARAMETER Experiment Name: At_Open_Flower_P Parameter: Age (day) Value: 21
  misc_feature: MA Experiment 20000286 PARAMETER Experiment Name: At_Open_Flower_P Parameter: Plant Line Value: WS
  misc_feature: MA Experiment 20000286 PARAMETER Experiment Name: At_Open_Flower_P Parameter: Tissue Value: Half Open vs. Whole Plant
  misc_feature: MA Experiment ID: 20000437 Result: Up-regulated in Transcription
  misc_feature: MA Experiment 20000437 PARAMETER Experiment Name: At_Drought_P Parameter: Age (day) Value: 8
  misc_feature: MA Experiment 20000437 PARAMETER Experiment Name: At_Drought_P Parameter: Organism Value: A. thaliana
  misc_feature: MA Experiment 20000437 PARAMETER Experiment Name: At_Drought_P Parameter: Plant Line Value: WS
  misc_feature: MA Experiment 20000437 PARAMETER Experiment Name: At_Drought_P Parameter: Timepoint (hr) Value: 24
  misc_feature: MA Experiment 20000437 PARAMETER Experiment Name: At_Drought_P Parameter: Tissue Value: Whole Plant
  misc_feature: MA Experiment 20000437 PARAMETER Experiment Name: At_Drought_P Parameter: Treatment Value: Drought vs. No Drought
  misc_feature: MA Experiment ID: 20000573 Result: Up-regulated in Transcription
  misc_feature: MA Experiment 20000573 PARAMETER Experiment Name: At_100uM_ABA_Mutants__P Parameter: Organism Value: A. thaliana
  misc_feature: MA Experiment 20000573 PARAMETER Experiment Name: At_100uM_ABA_Mutants__P Parameter: Plant Line Value: CS22 vs. Ler wt
  misc_feature: MA Experiment 20000573 PARAMETER Experiment Name: At_100uM_ABA_Mutants__P Parameter: Timepoint (hr) Value: N/A
  misc_feature: MA Experiment 20000573 PARAMETER Experiment Name: At_100uM_ABA_Mutants__P Parameter: Tissue Value: Whole Plant
  misc_feature: MA Experiment 20000573 PARAMETER Experiment Name: At_100uM_ABA_Mutants__P Parameter: Treatment Value: None
  misc_feature: MA Experiment ID: 20000574 Result: Up-regulated in Transcription
  misc_feature: MA Experiment 20000574 PARAMETER Experiment Name: At_100uM_ABA_Mutants__P Parameter: Organism Value: A. thaliana
  misc_feature: MA Experiment 20000574 PARAMETER Experiment Name: At_100uM_ABA_Mutants__P Parameter: Plant Line Value: CS23 vs. Ler wt
  misc_feature: MA Experiment 20000574 PARAMETER Experiment Name: At_100uM_ABA_Mutants__P Parameter: Timepoint (hr) Value: N/A
  misc_feature: MA Experiment 20000574 PARAMETER Experiment Name: At_100uM_ABA_Mutants__P Parameter: Tissue Value: Whole Plant
  misc_feature: MA Experiment 20000574 PARAMETER Experiment Name: At_100uM_ABA_Mutants__P Parameter: Treatment Value: None
  misc_feature: MA Experiment ID: 20000794 Result: Up-regulated in Transcription
  misc_feature: MA Experiment 20000794 PARAMETER Experiment Name: At_Petals_P Parameter: Age (day) Value: 23-25 days
  misc_feature: MA Experiment 20000794 PARAMETER Experiment Name: At_Petals_P Parameter: Plant Line Value: WS
  misc_feature: MA Experiment 20000794 PARAMETER Experiment Name: At_Petals_P Parameter: Tissue Value: Petals vs. Whole plant
  misc_feature: MA Experiment ID: 20001557 Result: Down-regulated in Transcription
  misc_feature: MA Experiment 20001557 PARAMETER Experiment Name: At_Drought_Soil_Dry_P Parameter: Age (day) Value: 27
  misc_feature: MA Experiment 20001557 PARAMETER Experiment Name: At_Drought_Soil_Dry_P Parameter: Organism Value: A. thaliana
  misc_feature: MA Experiment 20001557 PARAMETER Experiment Name: At_Drought_Soil_Dry_P Parameter: Plant Line Value: WS
  misc_feature: MA Experiment 20001557 PARAMETER Experiment Name: At_Drought_Soil_Dry_P Parameter: Post Timepoint (hr) Value: 3
  misc_feature: MA Experiment 20001557 PARAMETER Experiment Name: At_Drought_Soil_Dry_P Parameter: Post-Treatment Value: Re-Water vs. No Drought
  misc_feature: MA Experiment 20001557 PARAMETER Experiment Name: At_Drought_Soil_Dry_P Parameter: Timepoint (day) Value: 13
  misc_feature: MA Experiment 20001557 PARAMETER Experiment Name: At_Drought_Soil_Dry_P Parameter: Treatment Value: Drought vs. No Drought
  misc_feature: MA Experiment ID: 20001558 Result: Down-regulated in Transcription
  misc_feature: MA Experiment 20001558 PARAMETER Experiment Name: At_Drought_Soil_Dry_P Parameter: Age (day) Value: 27
  misc_feature: MA Experiment 20001558 PARAMETER Experiment Name: At_Drought_Soil_Dry_P Parameter: Organism Value: A. thaliana
  misc_feature: MA Experiment 20001558 PARAMETER Experiment Name: At_Drought_Soil_Dry_P Parameter: Plant Line Value: WS
  misc_feature: MA Experiment 20001558 PARAMETER Experiment Name: At_Drought_Soil_Dry_P Parameter: Post Timepoint (hr) Value: 6
  misc_feature: MA Experiment 20001558 PARAMETER Experiment Name: At_Drought_Soil_Dry_P Parameter: Post-Treatment Value: Re-Water vs. No Drought
  misc_feature: MA Experiment 20001558 PARAMETER Experiment Name: At_Drought_Soil_Dry_P Parameter: Timepoint (day) Value: 13
  misc_feature: MA Experiment 20001558 PARAMETER Experiment Name: At_Drought_Soil_Dry_P Parameter: Treatment Value: Drought vs. No Drought
  misc_feature: MA Experiment ID: 20001905 Result: Down-regulated in Transcription
  misc_feature: MA Experiment 20001905 PARAMETER Experiment Name: At_Drought_Reproduction_P Parameter: Age (day) Value: 40
  misc_feature: MA Experiment 20001905 PARAMETER Experiment Name: At_Drought_Reproduction_P Parameter: Organism Value: A. thaliana
  misc_feature: MA Experiment 20001905 PARAMETER Experiment Name: At_Drought_Reproduction_P Parameter: Plant Line Value: WS
  misc_feature: MA Experiment 20001905 PARAMETER Experiment Name: At_Drought_Reproduction_P Parameter: Timepoint (day) Value: 10
  misc_feature: MA Experiment 20001905 PARAMETER Experiment Name: At_Drought_Reproduction_P Parameter: Tissue Value: Rosettes
  misc_feature: MA Experiment 20001905 PARAMETER Experiment Name: At_Drought_Reproduction_P Parameter: Treatment Value: Drought vs. No Drought
taagaccaataagaatgatttagaccagctaaatcatgagatggatgttctggctggacatgagaattgcttgtgctggaagatctggacgaaaatgttccaaattttaagaattcttggttctcttatgataacatagttacatgctctagtgatggtagtgcaatcatttggatcccaagatcacggagttcgcctgtaaaatgctgccaagccttagaagaagatccgagaggttgaaagataaaacaaaagctaggatcatgacttctttgagtaggcgttgcgaaaagagaaactttgatgagcttgagggagctccaagcagtaaaaacacatgtaatggtgttaatgtagcacatagttgtttgtaattgaaaacagatattgatggcatggcagttgacactttctcggtggtttttaatgggtttacaaatggtgaaagacaatatctagaactaaatgacggtgagtctaacggttctcaggatgtaactagtcgcctgaatgatgtagcagatagctccatgtgggtttcaagggctcctggtggcactgatgaattaaatgatggttttgaagacatcaaatatgatttgacattagactgtcaaaaggattgtgtggttggagcagagatatctctgagatatgattgtgttgggatatcaaatcctcacatcagtgattctctttcaagtggtagtgtgttcctatgtcatggaagcataagaagaaaccaaacagggttgctactgactcaagaactcagttcttgtagtcaggatcagagtagtggcgctaagtcccatgacgttggtccttttgaaatattgaagcctcaacagttaaaagaaaagttatcttggttgacattatcgatacatgaagaggattgtcgttatattctacaaaaggaggatgaagttgcgaatttgcgacaaggacatcaagaatacttaaactttagctccttgaggggaagtagctccttggactttaataaagagtagaaatatgaaggctgtggaaatctgtaaagtgaaaagtctgaaatatgcaactcttcctagttctggagatagctgctgcaaaatgatacttaaagtcattgatccgaactccgaagtgtacagcaaactttcaagcttacattacctgatttagtgacctttccagattttcttgtgaaaagaagccggtatgaaggagcgatacagaggaaatggacttgcagggacaagtgtaaggtttggtggagaaacaaaggcgaagaagatggtcgttggtgggaaggaggaattctagctgtgaaacccaaatcaactcattttcttgatagtccatgggagaggtacaaagttaaatacaagactagcccgwccgagacacatcttcatrgtccttgggagctttttgatgctgatactaagtgggagcagcctcatattgataatgagaaatgaaacagtatgctcttagccttaacaaacttacagacttcagaaaaaagaatccagattcgttwgaggattcttatggactccaaaaactgaaccagatcatgggaaactcaagctacaccaataggttcccagttcctttgtctcttgaggtaataagatcaaggattgagaacaactattaccggagtatggaagcgttaaggcacgatgtatcagttatgctatccaatgcagagactttctttgatctaaacaaatgtgtaggtgtagcagtcaaaatttcagatctttctcaatggttcgaccgcacgttgtcttctttgtagcttatctgcctatgtatagagtacgtgaattagggtcgcttgcgttgttgtatctgaaaggcttcttcgatctaacgagtaagcacatttttcattgatctaatttttgtttgtctcttgtgatgtarkgtaccytaatgtcctaaagttggagctaatttttgtcattttatgcgcatcagtacaatgatgttattacagcattttagtgt

SEQ ID NO: 107908 - protein, 206 aa, Arabidopsis thaliana
  peptide (1)..(206): Ceres Seq. ID no. 13652255
  misc_feature (1)..(184): Homolog of NCBI NO: 15226044 NR Description: hypothetical protein [Arabidopsis thaliana]
  misc_feature (1)..(44): Homolog of NCBI NO: 9759426 NR Description: WD-40 repeat protein-like [Arabidopsis thaliana]
  misc_feature (45)..(115): Homolog of NCBI NO: 9759426 NR Description: WD-40 repeat protein-like [Arabidopsis thaliana]
  misc_feature (1)..(44): Homolog of NCBI NO: 15239884 NR Description: transducin / WD-40 repeat protein family
  misc_feature (45)..(115): Homolog of NCBI NO: 15239884 NR Description: transducin / WD-40 repeat protein family
  misc_feature (1)..(206): Homolog of NCBI NO: 29649027 NR Description: hypothetical protein [Arabidopsis thaliana]
  misc_feature (1)..(206): Homolog of NCBI NO: 29649018 NR Description: hypothetical protein [Arabidopsis thaliana]
  misc_feature (123)..(206): Homolog of NCBI NO: 30690675 NR Description: transducin / WD-40 repeat protein family
  misc_feature (123)..(206): Homolog of NCBI NO: 22135972 NR Description: putative WD-40 repeat protein [Arabidopsis
  misc_feature (123)..(206): Homolog of NCBI NO: 7487572 NR Description: hypothetical protein T30B22.29 - Arabidopsis
MAVDTFSVVFNGFTNGERQYLELNDGESNGSQDVTSRLNDVADSSMWVSRAPGGTDELNDGFEDIKYDLTLDCQKDCVVGAEISLRYDCVGISNPHISDSLSSGSVFLCHGSIRRNQTGLLLTQELSSCSQDQSSGAKSHDVGPFEILKPQQLKEKLSWLTLSIHEEDCRYILQKEDEVANLRQGHQEYLNFSSLRGSSSLDFNKE

SEQ ID NO: 107909 - protein, 161 aa, Arabidopsis thaliana
  peptide (1)..(161): Ceres Seq. ID no. 13652256
  misc_feature (1)..(139): Homolog of NCBI NO: 15226044 NR Description: hypothetical protein [Arabidopsis thaliana]
  misc_feature (1)..(70): Homolog of NCBI NO: 9759426 NR Description: WD-40 repeat protein-like [Arabidopsis thaliana]
  misc_feature (1)..(70): Homolog of NCBI NO: 15239884 NR Description: transducin / WD-40 repeat protein family
  misc_feature (1)..(161): Homolog of NCBI NO: 29649027 NR Description: hypothetical protein [Arabidopsis thaliana]
  misc_feature (1)..(161): Homolog of NCBI NO: 29649018 NR Description: hypothetical protein [Arabidopsis thaliana]
  misc_feature (78)..(161): Homolog of NCBI NO: 30690675 NR Description: transducin / WD-40 repeat protein family
  misc_feature (78)..(161): Homolog of NCBI NO: 22135972 NR Description: putative WD-40 repeat protein [Arabidopsis
  misc_feature (78)..(161): Homolog of NCBI NO: 7487572 NR Description: hypothetical protein T30B22.29 - Arabidopsis
  misc_feature (78)..(161): Homolog of NCBI NO: 25409048 NR Description: probable WD-40 repeat protein [imported] -
MWVSRAPGGTDELNDGFEDIKYDLTLDCQKDCVVGAEISLRYDCVGISNPHISDSLSSGSVFLCHGSIRRNQTGLLLTQELSSCSQDQSSGAKSHDVGPFEILKPQQLKEKLSWLTLSIHEEDCRYILQKEDEVANLRQGHQEYLNFSSLRGSSSLDFNKE

SEQ ID NO: 107910 - protein, 109 aa, Arabidopsis thaliana
  peptide (1)..(109): Ceres Seq. ID no. 13652257
  misc_feature (47)..(95): Pfam Name: Bromodomain Pfam Description: Bromodomain
  misc_feature (43)..(109): Homolog of NCBI NO: 15226044 NR Description: hypothetical protein [Arabidopsis thaliana]
  misc_feature (1)..(108): Homolog of NCBI NO: 9759426 NR Description: WD-40 repeat protein-like [Arabidopsis thaliana]
  misc_feature (1)..(108): Homolog of NCBI NO: 15239884 NR Description: transducin / WD-40 repeat protein family
  misc_feature (17)..(109): Homolog of NCBI NO: 30690675 NR Description: transducin / WD-40 repeat protein family
  misc_feature (17)..(109): Homolog of NCBI NO: 22135972 NR Description: putative WD-40 repeat protein [Arabidopsis
  misc_feature (17)..(109): Homolog of NCBI NO: 7487572 NR Description: hypothetical protein T30B22.29 - Arabidopsis
  misc_feature (17)..(109): Homolog of NCBI NO: 25409048 NR Description: probable WD-40 repeat protein [imported] -
  misc_feature (22)..(22): Xaa is any aa, unknown or other
MKQYALSLNKLTDFRKKNPDSXEDSYGLQKLNQIMGNSSYTNRFPVPLSLEVIRSRIENNYYRSMEALRHDVSVMLSNAETFFDLNKCVGVAVKISDLSQWFDRTLSSL

SEQ ID NO: 107911 - DNA, 2114 bp, Arabidopsis thaliana
  misc_feature (1)..(2114): Ceres Seq. ID no. 13652258
  misc_feature: MA Experiment ID: 20000173 Result: Down-regulated in Transcription
  misc_feature: MA Experiment 20000173 PARAMETER Experiment Name: At_42deg_Heat_P Parameter: Age (day) Value: 14
  misc_feature: MA Experiment 20000173 PARAMETER Experiment Name: At_42deg_Heat_P Parameter: Organism Value: A. thaliana
  misc_feature: MA Experiment 20000173 PARAMETER Experiment Name: At_42deg_Heat_P Parameter: Plant Line Value: WS
  misc_feature: MA Experiment 20000173 PARAMETER Experiment Name: At_42deg_Heat_P Parameter: Temperature (deg C) Value: 42 vs. 22
  misc_feature: MA Experiment 20000173 PARAMETER Experiment Name: At_42deg_Heat_P Parameter: Timepoint (hr) Value: 6
  misc_feature: MA Experiment 20000173 PARAMETER Experiment Name: At_42deg_Heat_P Parameter: Tissue Value: Aerial
  misc_feature: MA Experiment ID: 20000180 Result: Up-regulated in Transcription
  misc_feature: MA Experiment 20000180 PARAMETER Experiment Name: At_Germinating_Seeds_P Parameter: Age (hr) Value: 24 vs. 0
  misc_feature: MA Experiment 20000180 PARAMETER Experiment Name: At_Germinating_Seeds_P Parameter: Tissue Value: Germinating Seeds
  misc_feature: MA Experiment ID: 20000234 Result: Up-regulated in Transcription
  misc_feature: MA Experiment 20000234 PARAMETER Experiment Name: At_Siliques_P Parameter: Age (day) Value: 21
  misc_feature: MA Experiment 20000234 PARAMETER Experiment Name: At_Siliques_P Parameter: Organism Value: A. thaliana
  misc_feature: MA Experiment 20000234 PARAMETER Experiment Name: At_Siliques_P Parameter: Plant Line Value: WS
  misc_feature: MA Experiment 20000234 PARAMETER Experiment Name: At_Siliques_P Parameter: Tissue Value: Less Than 5mm Siliques vs. Whole Plant
  misc_feature: MA Experiment ID: 20000235 Result: Up-regulated in Transcription
  misc_feature: MA Experiment 20000235 PARAMETER Experiment Name: At_Siliques_P Parameter: Age (day) Value: 21
  misc_feature: MA Experiment 20000235 PARAMETER Experiment Name: At_Siliques_P Parameter: Organism Value: A. thaliana
  misc_feature: MA Experiment 20000235 PARAMETER Experiment Name: At_Siliques_P Parameter: Plant Line Value: WS
  misc_feature: MA Experiment 20000235 PARAMETER Experiment Name: At_Siliques_P Parameter: Tissue Value: 5-10mm Siliques vs. Whole Plant
  misc_feature: MA Experiment ID: 20000264 Result: Up-regulated in Transcription
  misc_feature: MA Experiment 20000264 PARAMETER Experiment Name: At_Open_Flower_P Parameter: Age (day) Value: 21
  misc_feature: MA Experiment 20000264 PARAMETER Experiment Name: At_Open_Flower_P Parameter: Plant Line Value: WS
  misc_feature: MA Experiment 20000264 PARAMETER Experiment Name: At_Open_Flower_P Parameter: Tissue Value: Open Flower vs. Whole Plant
  misc_feature: MA Experiment ID: 20000286 Result: Up-regulated in Transcription
  misc_feature: MA Experiment 20000286 PARAMETER Experiment Name: At_Open_Flower_P Parameter: Age (day) Value: 21
  misc_feature: MA Experiment 20000286 PARAMETER Experiment Name: At_Open_Flower_P Parameter: Plant Line Value: WS
  misc_feature: MA Experiment 20000286 PARAMETER Experiment Name: At_Open_Flower_P Parameter: Tissue Value: Half Open vs. Whole Plant
  misc_feature: MA Experiment ID: 20000437 Result: Up-regulated in Transcription
  misc_feature: MA Experiment 20000437 PARAMETER Experiment Name: At_Drought_P Parameter: Age (day) Value: 8
  misc_feature: MA Experiment 20000437 PARAMETER Experiment Name: At_Drought_P Parameter: Organism Value: A. thaliana
  misc_feature: MA Experiment 20000437 PARAMETER Experiment Name: At_Drought_P Parameter: Plant Line Value: WS
  misc_feature: MA Experiment 20000437 PARAMETER Experiment Name: At_Drought_P Parameter: Timepoint (hr) Value: 24
  misc_feature: MA Experiment 20000437 PARAMETER Experiment Name: At_Drought_P Parameter: Tissue Value: Whole Plant
  misc_feature: MA Experiment 20000437 PARAMETER Experiment Name: At_Drought_P Parameter: Treatment Value: Drought vs. No Drought
  misc_feature: MA Experiment ID: 20000573 Result: Up-regulated in Transcription
  misc_feature: MA Experiment 20000573 PARAMETER Experiment Name: At_100uM_ABA_Mutants__P Parameter: Organism Value: A. thaliana
  misc_feature: MA Experiment 20000573 PARAMETER Experiment Name: At_100uM_ABA_Mutants__P Parameter: Plant Line Value: CS22 vs. Ler wt
  misc_feature: MA Experiment 20000573 PARAMETER Experiment Name: At_100uM_ABA_Mutants__P Parameter: Timepoint (hr) Value: N/A
  misc_feature: MA Experiment 20000573 PARAMETER Experiment Name: At_100uM_ABA_Mutants__P Parameter: Tissue Value: Whole Plant
  misc_feature: MA Experiment 20000573 PARAMETER Experiment Name: At_100uM_ABA_Mutants__P Parameter: Treatment Value: None
  misc_feature: MA Experiment ID: 20000574 Result: Up-regulated in Transcription
  misc_feature: MA Experiment 20000574 PARAMETER Experiment Name: At_100uM_ABA_Mutants__P Parameter: Organism Value: A. thaliana
  misc_feature: MA Experiment 20000574 PARAMETER Experiment Name: At_100uM_ABA_Mutants__P Parameter: Plant Line Value: CS23 vs. Ler wt
  misc_feature: MA Experiment 20000574 PARAMETER Experiment Name: At_100uM_ABA_Mutants__P Parameter: Timepoint (hr) Value: N/A
  misc_feature: MA Experiment 20000574 PARAMETER Experiment Name: At_100uM_ABA_Mutants__P Parameter: Tissue Value: Whole Plant
  misc_feature: MA Experiment 20000574 PARAMETER Experiment Name: At_100uM_ABA_Mutants__P Parameter: Treatment Value: None
  misc_feature: MA Experiment ID: 20000794 Result: Up-regulated in Transcription
  misc_feature: MA Experiment 20000794 PARAMETER Experiment Name: At_Petals_P Parameter: Age (day) Value: 23-25 days
  misc_feature: MA Experiment 20000794 PARAMETER Experiment Name: At_Petals_P Parameter: Plant Line Value: WS
  misc_feature: MA Experiment 20000794 PARAMETER Experiment Name: At_Petals_P Parameter: Tissue Value: Petals vs. Whole plant
  misc_feature: MA Experiment ID: 20001557 Result: Down-regulated in Transcription
  misc_feature: MA Experiment 20001557 PARAMETER Experiment Name: At_Drought_Soil_Dry_P Parameter: Age (day) Value: 27
  misc_feature: MA Experiment 20001557 PARAMETER Experiment Name: At_Drought_Soil_Dry_P Parameter: Organism Value: A. thaliana
  misc_feature: MA Experiment 20001557 PARAMETER Experiment Name: At_Drought_Soil_Dry_P Parameter: Plant Line Value: WS
  misc_feature: MA Experiment 20001557 PARAMETER Experiment Name: At_Drought_Soil_Dry_P Parameter: Post Timepoint (hr) Value: 3
  misc_feature: MA Experiment 20001557 PARAMETER Experiment Name: At_Drought_Soil_Dry_P Parameter: Post-Treatment Value: Re-Water vs. No Drought
  misc_feature: MA Experiment 20001557 PARAMETER Experiment Name: At_Drought_Soil_Dry_P Parameter: Timepoint (day) Value: 13
  misc_feature: MA Experiment 20001557 PARAMETER Experiment Name: At_Drought_Soil_Dry_P Parameter: Treatment Value: Drought vs. No Drought
  misc_feature: MA Experiment ID: 20001558 Result: Down-regulated in Transcription
  misc_feature: MA Experiment 20001558 PARAMETER Experiment Name: At_Drought_Soil_Dry_P Parameter: Age (day) Value: 27
  misc_feature: MA Experiment 20001558 PARAMETER Experiment Name: At_Drought_Soil_Dry_P Parameter: Organism Value: A. thaliana
  misc_feature: MA Experiment 20001558 PARAMETER Experiment Name: At_Drought_Soil_Dry_P Parameter: Plant Line Value: WS
  misc_feature: MA Experiment 20001558 PARAMETER Experiment Name: At_Drought_Soil_Dry_P Parameter: Post Timepoint (hr) Value: 6
  misc_feature: MA Experiment 20001558 PARAMETER Experiment Name: At_Drought_Soil_Dry_P Parameter: Post-Treatment Value: Re-Water vs. No Drought
  misc_feature: MA Experiment 20001558 PARAMETER Experiment Name: At_Drought_Soil_Dry_P Parameter: Timepoint (day) Value: 13
  misc_feature: MA Experiment 20001558 PARAMETER Experiment Name: At_Drought_Soil_Dry_P Parameter: Treatment Value: Drought vs. No Drought
  misc_feature: MA Experiment ID: 20001905 Result: Down-regulated in Transcription
  misc_feature: MA Experiment 20001905 PARAMETER Experiment Name: At_Drought_Reproduction_P Parameter: Age (day) Value: 40
  misc_feature: MA Experiment 20001905 PARAMETER Experiment Name: At_Drought_Reproduction_P Parameter: Organism Value: A. thaliana
  misc_feature: MA Experiment 20001905 PARAMETER Experiment Name: At_Drought_Reproduction_P Parameter: Plant Line Value: WS
  misc_feature: MA Experiment 20001905 PARAMETER Experiment Name: At_Drought_Reproduction_P Parameter: Timepoint (day) Value: 10
  misc_feature: MA Experiment 20001905 PARAMETER Experiment Name: At_Drought_Reproduction_P Parameter: Tissue Value: Rosettes
  misc_feature: MA Experiment 20001905 PARAMETER Experiment Name: At_Drought_Reproduction_P Parameter: Treatment Value: Drought vs. No Drought
ggcttaccggtttccgtcctcgtggacatactgaagctgttattgctattgtatttagtcctagacctggatccccgtaccagcttctctcatcgtcagatgatgacacatgtctgatatgggatgctcggggtgtccagcttgctccgcggatataagtccctaagcctcacagtcctattggtgattggctgattgctttatattcctggttgatttatatatcgatttgatctattggaagctataggactgacttcggaatcatattccaggagaaaaccgtggcggttcttctagtaatggtaaaatgctgccaagccttagaagaagatccgagaggttgaaagataaaacaaaagctaggatcatgacttctttgagtaggcgttgcgaaaagagaaactttgatgagcttgagggagctccaagcagtaaaaacacatgtaatggtgttaatgtagcacatagttgtttgtaattgaaaacagatattgatggcatggcagttggcactttctcggtggtttttaatgggtttacaaatggtgaaagacaatatctagaactaaatgacggtgagtctaacggttctcaggatgtaactagtcgcctgaatgatgtagcagatagctccatgtgggtttcaagggctcctggtggcactgatgaattaaatgatggttttgaagacatcaaatatgatttgacattagactgtcaaaaggattgtgtggttggagcagagatatctctgagatatgattgtgttgggatatcaaatcctcacatcagtgattctctctcaagtggtagtgtgttcctatgtcatggaagcataagaagaaaccaaacagggttgctactgactcaagaactcagttcttgtagtcaggatcagagtagtggcgctaagtcccatgacgttggtccttttgaaatattgaagcctcaacagttaaaagaaaagttatcttggttgacattatcgatacatgaagaggattgtcgttatattctacaaaaggaggatgaagttgcgaatttgcgacaaggacatcaagaatacttaaactttagctccttgaggggaagtagctccttggactttaataaagagtagaaatatgaaggctgtggaaatctgtaaagtgaaaagtctgaaatatgcaactcttcctagttctggagatagctgctgcaaaatgatacttaaagtcattgatccgaactccgaagtgtacagcaaactttcaagcttacattacctgatttagtgacctttccagattttcttgtgaaaagaagccggtatgaaggagcgatacagaggaaatggacttgcagggacaagtgtaaggtttggtggagaaacaaaggcgaagaagatggtcgttggtgggaaggaggaattctagctgtgaaacccaaatcaactcattttcttgatagtccatgggagaggtacaaagttaaatacaagactagcccgwccgagacacatcttcatrgtccttgggagctttttgatgctgatactaagtgggagcagcctcatattgataatgagaaatgaaacagtatgctcttagccttaacaaacttacagacttcagaaaaaagaatccagattcgtttgaggattcttatggactccaaaaactgaaccagatcatgggaaactcaagctacaccaataggttcccagttcctttgtctcttgaggtaataagatcaaggattgagaacaactattaccggagtatggaagcgttaaggcacgatgtatcagttatgctatccaatgcagagactttctttgatctaaacaaatgtgtaggtgtagcagtcaaaatttcagatctttctcaatggttcgaccgcacgttgtcttctttgtagcttatctgcctatgtatagagtacgtgaattagggtcgcttgcgttgttgtatctgaaaggcttcttcgatctaacgagtaagcacatttttcattgatctaatttttgtttgtctcttgtgatgtarkgtaccytaatgtcctaaagttggagctaatttttgtcattttatgcgcatcagtacaatgatgttattacagcattttagtgt

SEQ ID NO: 107912 - protein, 206 aa, Arabidopsis thaliana
  peptide (1)..(206): Ceres Seq. ID no. 13652259
  misc_feature (1)..(184): Homolog of NCBI NO: 15226044 NR Description: hypothetical protein [Arabidopsis thaliana]
  misc_feature (1)..(44): Homolog of NCBI NO: 15239884 NR Description: transducin / WD-40 repeat protein family
  misc_feature (45)..(115): Homolog of NCBI NO: 15239884 NR Description: transducin / WD-40 repeat protein family
  misc_feature (1)..(44): Homolog of NCBI NO: 9759426 NR Description: WD-40 repeat protein-like [Arabidopsis thaliana]
  misc_feature (45)..(115): Homolog of NCBI NO: 9759426 NR Description: WD-40 repeat protein-like [Arabidopsis thaliana]
  misc_feature (1)..(206): Homolog of NCBI NO: 29649018 NR Description: hypothetical protein [Arabidopsis thaliana]
  misc_feature (1)..(206): Homolog of NCBI NO: 29649027 NR Description: hypothetical protein [Arabidopsis thaliana]
  misc_feature (123)..(206): Homolog of NCBI NO: 30690675 NR Description: transducin / WD-40 repeat protein family
  misc_feature (123)..(206): Homolog of NCBI NO: 22135972 NR Description: putative WD-40 repeat protein [Arabidopsis
  misc_feature (123)..(206): Homolog of NCBI NO: 7487572 NR Description: hypothetical protein T30B22.29 - Arabidopsis
MAVGTFSVVFNGFTNGERQYLELNDGESNGSQDVTSRLNDVADSSMWVSRAPGGTDELNDGFEDIKYDLTLDCQKDCVVGAEISLRYDCVGISNPHISDSLSSGSVFLCHGSIRRNQTGLLLTQELSSCSQDQSSGAKSHDVGPFEILKPQQLKEKLSWLTLSIHEEDCRYILQKEDEVANLRQGHQEYLNFSSLRGSSSLDFNKE

SEQ ID NO: 107913 - protein, 161 aa, Arabidopsis thaliana; identical to SEQ ID NO: 107909
  peptide (1)..(161): Ceres Seq. ID no. 13652260
  misc_feature (1)..(139): Homolog of NCBI NO: 15226044 NR Description: hypothetical protein [Arabidopsis thaliana]
  misc_feature (1)..(70): Homolog of NCBI NO: 15239884 NR Description: transducin / WD-40 repeat protein family
  misc_feature (1)..(70): Homolog of NCBI NO: 9759426 NR Description: WD-40 repeat protein-like [Arabidopsis thaliana]
  misc_feature (1)..(161): Homolog of NCBI NO: 29649018 NR Description: hypothetical protein [Arabidopsis thaliana]
  misc_feature (1)..(161): Homolog of NCBI NO: 29649027 NR Description: hypothetical protein [Arabidopsis thaliana]
  misc_feature (78)..(161): Homolog of NCBI NO: 30690675 NR Description: transducin / WD-40 repeat protein family
  misc_feature (78)..(161): Homolog of NCBI NO: 22135972 NR Description: putative WD-40 repeat protein [Arabidopsis
  misc_feature (78)..(161): Homolog of NCBI NO: 7487572 NR Description: hypothetical protein T30B22.29 - Arabidopsis
  misc_feature (78)..(161): Homolog of NCBI NO: 25409048 NR Description: probable WD-40 repeat protein [imported] -

SEQ ID NO: 107914 - protein, 109 aa, Arabidopsis thaliana
  peptide (1)..(109): Ceres Seq. ID no. 13652261
  misc_feature (47)..(95): Pfam Name: Bromodomain Pfam Description: Bromodomain
  misc_feature (43)..(109): Homolog of NCBI NO: 15226044 NR Description: hypothetical protein [Arabidopsis thaliana]
  misc_feature (1)..(108): Homolog of NCBI NO: 15239884 NR Description: transducin / WD-40 repeat protein family
  misc_feature (1)..(108): Homolog of NCBI NO: 9759426 NR Description: WD-40 repeat protein-like [Arabidopsis thaliana]
  misc_feature (17)..(109): Homolog of NCBI NO: 30690675 NR Description: transducin / WD-40 repeat protein family
  misc_feature (17)..(109): Homolog of NCBI NO: 22135972 NR Description: putative WD-40 repeat protein [Arabidopsis
  misc_feature (17)..(109): Homolog of NCBI NO: 7487572 NR Description: hypothetical protein T30B22.29 - Arabidopsis
  misc_feature (17)..(109): Homolog of NCBI NO: 25409048 NR Description: probable WD-40 repeat protein [imported] -
MKQYALSLNKLTDFRKKNPDSFEDSYGLQKLNQIMGNSSYTNRFPVPLSLEVIRSRIENNYYRSMEALRHDVSVMLSNAETFFDLNKCVGVAVKISDLSQWFDRTLSSL

SEQ ID NO: 107915 - DNA, 1811 bp, Arabidopsis thaliana
  misc_feature (1)..(1811): Ceres Seq. ID no. 13652269
  misc_feature: MA Experiment ID: 20000355 Result: Up-regulated in Transcription
  misc_feature: MA Experiment 20000355 PARAMETER Experiment Name: At_Siliques_Sub_P Parameter: Age (day) Value: 21
  misc_feature: MA Experiment 20000355 PARAMETER Experiment Name: At_Siliques_Sub_P Parameter: Organism Value: A. thaliana
  misc_feature: MA Experiment 20000355 PARAMETER Experiment Name: At_Siliques_Sub_P Parameter: Plant Line Value: WS
  misc_feature: MA Experiment 20000355 PARAMETER Experiment Name: At_Siliques_Sub_P Parameter: Tissue Value: Less Than 5mm Siliques vs. Whole Plant
gaaaagaagaagactagccggagaaccaaaatcgaacgataaccgttacactaayaaacttaccctatcatcttatctttcatggattcacttcctcacaaattctcagaatcaccgaaatggggtcaattcgtggtgaccttcagccgctctttgycatgccaccacctcccctcgatgaagattgtgatgatatcttcaattctgacgaatcttcatgggggttgttgagcttgtcctgcttcggtatcattatgggattgtggttctttgcgtcggtttgtctgatttttggtgtttacggtagtgaaactgtctggcttggacctaactcgtccattcttgttaaaccaagttccatctttgtcaaaagcattaaggtgaaggagcttgatttttcaaagcctggacttcagctatatggattcaatggtcaatctactcctagtggttattttgtaaactggactgaatctcgagtgttatctgtctcacagaattcttacaagggatggccatactacttaaatagaggaacgcatatgaatatatcttataacattttacctaaaggttctgcagttcggcttgtgatcactgaaggaatgccattcttctatcggtcgtcgctgaaggatattgcatttcgtgacaccgcttggtcatggaatctaattcaggggggtggtatgattcaattggatataagtaagtctaaaggttattatcttactgtggctaacttgaagaggaaggacatagaggtaattataatcaagttatgactttggattaagttttggtttctgttgtgtttctgcacagtccacagtacactgttttacttgacataatgtttgttcaggtggaactggatattgatgtgaaggctgtctygtatgatactaaacaatcatcctacaattgttccttcagcaatggcgagtgctcattcaaaatgaatgaaaggtcccctgttgaaaattatgctgtcgtaacttcaccagcactgggtcagggagtatccatcgatgatgaatggtatatcgagttgtcatatcaacctagattgattgcatatggaagcttcacaggtgtgttgctttccttcatgctggtagctatacacttctgcaacaagttaaagtgttgtggtggagagggatttttatcckaagatgattcagtgagaacatgtctacttgcagacaaaggtgacaatgattgttgtaatgatgtcgaagcaagtaacaaaagtctctgtgccatttgttttgatgctccaagagattgttgtttcctcccgtgtggccattgcgtctcctgttaccaatgcggaacaaagataaaaagaaccaaggggaggtgtccaatatgtcgaaagaaaataatgcatgtgaagcgaatctatacagcttaagatgtattattatctgtccaatgtgatgttgaatcgttagagcattaataaaaatcatataatttgatattgacaaggctcaggtctttctttgcattaattcgtttcatctcttaaccatctttgtgacaacaccattggttaactaccatagggtaggcaatatagtgaaccattgtttgttgactcacatcacaaaatggttcgaaacccgaatcgataattaaggatttcataaattaattgttaatttctgaataaattcggattttgtatatttcctccgtttcgtaatataagtagttttggaccaatttttttgtttcacaacgtaaattgtttttaactttctatgtaaataatatattattttaatattttttgattattt

SEQ ID NO: 107916 - protein, 221 aa, Arabidopsis thaliana
  peptide (1)..(221): Ceres Seq. ID no. 13652270
  misc_feature (1)..(130): Homolog of NCBI NO: 15224468 NR Description: hypothetical protein [Arabidopsis thaliana]
  misc_feature (188)..(216): Homolog of NCBI NO: 15224468 NR Description: hypothetical protein [Arabidopsis thaliana]
  misc_feature (1)..(221): Homolog of NCBI NO: 29648951 NR Description: hypothetical protein [Arabidopsis thaliana]
  misc_feature (163)..(216): Homolog of NCBI NO: 15224464 NR Description: hypothetical protein [Arabidopsis thaliana]
  misc_feature (40)..(218): Homolog of NCBI NO: 30679266 NR Description: expressed protein [Arabidopsis thaliana]
  misc_feature (88)..(218): Homolog of NCBI NO: 11357966 NR Description: hypothetical protein T10O8.160 - Arabidopsis >gi|7320723|emb|CAB81928.1| putative protein [Arabidopsis
  misc_feature (20)..(130): Homolog of NCBI NO: 18404666 NR Description: expressed protein [Arabidopsis thaliana] Expressed protein [Arabidopsis thaliana]
  misc_feature (13)..(13): Xaa is any aa, unknown or other
MGSIRGDLQPLFXMPPPPLDEDCDDIFNSDESSWGLLSLSCFGIIMGLWFFASVCLIFGVYGSETVWLGPNSSILVKPSSIFVKSIKVKELDFSKPGLQLYGFNGQSTPSGYFVNWTESRVLSVSQNSYKGWPYYLNRGTHMNISYNILPKGSAVRLVITEGMPFFYRSSLKDIAFRDTAWSWNLIQGGGMIQLDISKSKGYYLTVANLKRKDIEVIIIKL

SEQ ID NO: 107917 - protein, 208 aa, Arabidopsis thaliana
  peptide (1)..(208): Ceres Seq. ID no. 13652271
  misc_feature (1)..(117): Homolog of NCBI NO: 15224468 NR Description: hypothetical protein [Arabidopsis thaliana]
  misc_feature (175)..(203): Homolog of NCBI NO: 15224468 NR Description: hypothetical protein [Arabidopsis thaliana]
  misc_feature (1)..(208): Homolog of NCBI NO: 29648951 NR Description: hypothetical protein [Arabidopsis thaliana]
  misc_feature (150)..(203): Homolog of NCBI NO: 15224464 NR Description: hypothetical protein [Arabidopsis thaliana]
  misc_feature (27)..(205): Homolog of NCBI NO: 30679266 NR Description: expressed protein [Arabidopsis thaliana]
  misc_feature (75)..(205): Homolog of NCBI NO: 11357966 NR Description: hypothetical protein T10O8.160 - Arabidopsis >gi|7320723|emb|CAB81928.1| putative protein [Arabidopsis
  misc_feature (7)..(117): Homolog of NCBI NO: 18404666 NR Description: expressed protein [Arabidopsis thaliana] Expressed protein [Arabidopsis thaliana]
MPPPPLDEDCDDIFNSDESSWGLLSLSCFGIIMGLWFFASVCLIFGVYGSETVWLGPNSSILVKPSSIFVKSIKVKELDFSKPGLQLYGFNGQSTPSGYFVNWTESRVLSVSQNSYKGWPYYLNRGTHMNISYNILPKGSAVRLVITEGMPFFYRSSLKDIAFRDTAWSWNLIQGGGMIQLDISKSKGYYLTVANLKRKDIEVIIIKL

SEQ ID NO: 107918 - protein, 188 aa, Arabidopsis thaliana
  peptide (1)..(188): Ceres Seq. ID no. 13652272
  misc_feature (137)..(175): Pfam Name: Zinc finger, C3HC4 type (RING finger) Pfam Description: Zinc finger, C3HC4 type (RING finger)
  misc_feature (3)..(89): Homolog of NCBI NO: 15224468 NR Description: hypothetical protein [Arabidopsis thaliana]
  misc_feature (1)..(188): Homolog of NCBI NO: 29648940 NR Description: hypothetical protein [Arabidopsis thaliana]
  misc_feature (3)..(117): Homolog of NCBI NO: 15224464 NR Description: hypothetical protein [Arabidopsis thaliana]
  misc_feature (3)..(186): Homolog of NCBI NO: 30679266 NR Description: expressed protein [Arabidopsis thaliana]
  misc_feature (3)..(186): Homolog of NCBI NO: 11357966 NR Description: hypothetical protein T10O8.160 - Arabidopsis >gi|7320723|emb|CAB81928.1| putative protein [Arabidopsis
  misc_feature (127)..(187): Homolog of NCBI NO: 15224462 NR Description: zinc finger (C3HC4-type RING finger) protein [Arabidopsis thaliana] >gi|7485584|pir||T01251 hypothetical
  misc_feature (87)..(133): Homolog of NCBI NO: 15224462 NR Description: zinc finger (C3HC4-type RING finger) protein [Arabidopsis thaliana] >gi|7485584|pir||T01251 hypothetical
  misc_feature (94)..(186): Homolog of NCBI NO: 28569275 NR Description: putative inhibitor of apoptosis [Choristoneura
  misc_feature (94)..(186): Homolog of NCBI NO: 33622218 NR Description: iap-3 [Cryptophlebia leucotreta granulovirus]
  misc_feature (119)..(186): Homolog of NCBI NO: 15617532 NR Description: apoptosis inhibitor [Spodoptera litura >gi|15553268|gb|AAL01746.1|AF325155_58 apoptosis inhibitor
  misc_feature (15)..(15): Xaa is any aa, unknown or other
  misc_feature (108)..(108): Xaa is any aa, unknown or other
MFVQVELDIDVKAVXYDTKQSSYNCSFSNGECSFKMNERSPVENYAVVTSPALGQGVSIDDEWYIELSYQPRLIAYGSFTGVLLSFMLVAIHFCNKLKCCGGEGFLSXDDSVRTCLLADKGDNDCCNDVEASNKSLCAICFDAPRDCCFLPCGHCVSCYQCGTKIKRTKGRCPICRKKIMHVKRIYTA

SEQ ID NO: 107919 - DNA, 877 bp, Arabidopsis thaliana
  misc_feature (1)..(877): Ceres Seq. ID no. 13652311
  misc_feature: MA Experiment ID: 20000173 Result: Up-regulated in Transcription
  misc_feature: MA Experiment 20000173 PARAMETER Experiment Name: At_42deg_Heat_P Parameter: Age (day) Value: 14
  misc_feature: MA Experiment 20000173 PARAMETER Experiment Name: At_42deg_Heat_P Parameter: Organism Value: A. thaliana
  misc_feature: MA Experiment 20000173 PARAMETER Experiment Name: At_42deg_Heat_P Parameter: Plant Line Value: WS
  misc_feature: MA Experiment 20000173 PARAMETER Experiment Name: At_42deg_Heat_P Parameter: Temperature (deg C) Value: 42 vs. 22
  misc_feature: MA Experiment 20000173 PARAMETER Experiment Name: At_42deg_Heat_P Parameter: Timepoint (hr) Value: 6
  misc_feature: MA Experiment 20000173 PARAMETER Experiment Name: At_42deg_Heat_P Parameter: Tissue Value: Aerial
  misc_feature: MA Experiment ID: 20000437 Result: Down-regulated in Transcription
  misc_feature: MA Experiment 20000437 PARAMETER Experiment Name: At_Drought_P Parameter: Age (day) Value: 8
  misc_feature: MA Experiment 20000437 PARAMETER Experiment Name: At_Drought_P Parameter: Organism Value: A. thaliana
  misc_feature: MA Experiment 20000437 PARAMETER Experiment Name: At_Drought_P Parameter: Plant Line Value: WS
  misc_feature: MA Experiment 20000437 PARAMETER Experiment Name: At_Drought_P Parameter: Timepoint (hr) Value: 24
  misc_feature: MA Experiment 20000437 PARAMETER Experiment Name: At_Drought_P Parameter: Tissue Value: Whole Plant
  misc_feature: MA Experiment 20000437 PARAMETER Experiment Name: At_Drought_P Parameter: Treatment Value: Drought vs. No Drought
  misc_feature: MA Experiment ID: 20000439 Result: Down-regulated in Transcription
  misc_feature: MA Experiment 20000439 PARAMETER Experiment Name: At_Roots__P Parameter: Age (day) Value: 14 vs. 21
  misc_feature: MA Experiment 20000439 PARAMETER Experiment Name: At_Roots__P Parameter: Organism Value: A. thaliana
  misc_feature: MA Experiment 20000439 PARAMETER Experiment Name: At_Roots__P Parameter: Tissue Value: Roots vs. Whole Plant
  misc_feature: MA Experiment ID: 20001451 Result: Up-regulated in Transcription
  misc_feature: MA Experiment 20001451 PARAMETER Experiment Name: At_Far-red-induction_P Parameter: Age (day) Value: 7
  misc_feature: MA Experiment 20001451 PARAMETER Experiment Name: At_Far-red-induction_P Parameter: Light Value: Far-red vs. White
  misc_feature: MA Experiment 20001451 PARAMETER Experiment Name: At_Far-red-induction_P Parameter: Organism Value: A. thaliana
  misc_feature: MA Experiment 20001451 PARAMETER Experiment Name: At_Far-red-induction_P Parameter: Plant Line Value: Columbia
  misc_feature: MA Experiment 20001451 PARAMETER Experiment Name: At_Far-red-induction_P Parameter: Timepoint (hr) Value: 24
  misc_feature: MA Experiment 20001451 PARAMETER Experiment Name: At_Far-red-induction_P Parameter: Tissue Value: Whole Plant
  misc_feature: MA Experiment ID: 20001910 Result: Up-regulated in Transcription
  misc_feature: MA Experiment 20001910 PARAMETER Experiment Name: At_Drought_Reproduction_P Parameter: Age (day) Value: 37
  misc_feature: MA Experiment 20001910 PARAMETER Experiment Name: At_Drought_Reproduction_P Parameter: Organism Value: A. thaliana
  misc_feature: MA Experiment 20001910 PARAMETER Experiment Name: At_Drought_Reproduction_P Parameter: Plant Line Value: WS
  misc_feature: MA Experiment 20001910 PARAMETER Experiment Name: At_Drought_Reproduction_P Parameter: Timepoint (day) Value: 7
  misc_feature: MA Experiment 20001910 PARAMETER Experiment Name: At_Drought_Reproduction_P Parameter: Tissue Value: Flowers
  misc_feature: MA Experiment 20001910 PARAMETER Experiment Name: At_Drought_Reproduction_P Parameter: Treatment Value: Drought vs. No Drought
  misc_feature: Pfam Name: WRKY Pfam Description: WRKY DNA -binding domain
atggaaatgatgaattgggagcggaggagtttgctaaacgagctaattcatggactaaaagcggccaagcagcttcaggctattttgatgctcaacggatccaccacacaacacaatccaacgatagagcttgcgcctgatcccctagctcatcccggaaaggttccaggatctccagcatcgatcaccggaaatccgagaagcgaagagtttttcaatgtaagatcgaaagaattcaacttaagttctaaaaagaggaagatgttgccaaagtggacagagcaagtgagaattagcccagagagaggcttagaaggacctcatgacgatatcttcagctggagaaaatatggccagaaagacattttgggcgccaaattcccaaggagttattacagatgcacatttcgtaacacacagtactgttgggctacgaaacaagtccaaagatcggacggtgatccaacgatcttcgaagtaacatacagaggaacacacacttgttcacaggggatcccacttccagagaaacgagaaaccaaaccaaaacacacagtagcagtaaattaccagaatctcagggccagtcttaccgtacgtaccggcggacttggaagcgaagctttctcattccccgtcacgtcgccgttatacacttacgagtccatcaacggtggtggaacgttttaccaccacgtgggaagttctggtccgtcggatttcactggattgatctcaacaaatacttccacaggaagttctccaatcttcgacgttaattttcaatttgatccaacggctgagattaacacaggcttccccacttttttccacaattcgatttaagtagtacagtattgaatattcttgagattaa

SEQ ID NO: 107920 - protein, 281 aa, Arabidopsis thaliana
  peptide (1)..(281): Ceres Seq. ID no. 13652312
  misc_feature: Pfam Name: WRKY Pfam Description: WRKY DNA -binding domain
  misc_feature (1)..(281): Homolog of NCBI NO: 30681651 NR Description: WRKY family transcription factor [Arabidopsis >gi|24762209|gb|AAN64171.1| putative WRKY family transcription
  misc_feature (15)..(281): Homolog of NCBI NO: 15237039 NR Description: WRKY family transcription factor [Arabidopsis >gi|29839551|sp|Q8H0Y8|WR41_ARATH Probable WRKY transcription
  misc_feature (1)..(26): Homolog of NCBI NO: 15237039 NR Description: WRKY family transcription factor [Arabidopsis >gi|29839551|sp|Q8H0Y8|WR41_ARATH Probable WRKY transcription
  misc_feature (13)..(281): Homolog of NCBI NO: 15236622 NR Description: WRKY family transcription factor [Arabidopsis >gi|29839683|sp|Q9SUP6|WR53_ARATH Probable WRKY transcription
  misc_feature (2)..(29): Homolog of NCBI NO: 15236622 NR Description: WRKY family transcription factor [Arabidopsis >gi|29839683|sp|Q9SUP6|WR53_ARATH Probable WRKY transcription
  misc_feature (56)..(201): Homolog of NCBI NO: 40253471 NR Description: putative transcription factor WRKY5 [Oryza sativa
  misc_feature (53)..(263): Homolog of NCBI NO: 34911952 NR Description: P0694A04.6 [Oryza sativa (japonica
  misc_feature (74)..(215): Homolog of NCBI NO: 34898262 NR Description: WRKY family transcription factor-like protein
  misc_feature (64)..(170): Homolog of NCBI NO: 18420751 NR Description: WRKY family transcription factor [Arabidopsis >gi|29839626|sp|Q9FL62|WR30_ARATH Probable WRKY transcription
  misc_feature (84)..(193): Homolog of NCBI NO: 15225975 NR Description: WRKY family transcription factor [Arabidopsis >gi|29839678|sp|Q9SKD9|WR46_ARATH Probable WRKY transcription
MEMMNWERRSLLNELIHGLKAAKQLQAILMLNGSTTQHNPTIELAPDPLAHPGKVPGSPASITGNPRSEEFFNVRSKEFNLSSKKRKMLPKWTEQVRISPERGLEGPHDDIFSWRKYGQKDILGAKFPRSYYRCTFRNTQYCWATKQVQRSDGDPTIFEVTYRGTHTCSQGIPLPEKRETKPKHTVAVNYQNLRASLTVRTGGLGSEAFSFPVTSPLYTYESINGGGTFYHHVGSSGPSDFTGLISTNTSTGSSPIFDVNFQFDPTAEINTGFPTFFHNSI

SEQ ID NO: 107921 - protein, 279 aa, Arabidopsis thaliana
  peptide (1)..(279): Ceres Seq. ID no. 13652313
  misc_feature: Pfam Name: WRKY Pfam Description: WRKY DNA -binding domain
  misc_feature (1)..(279): Homolog of NCBI NO: 30681651 NR Description: WRKY family transcription factor [Arabidopsis >gi|24762209|gb|AAN64171.1| putative WRKY family transcription
  misc_feature (13)..(279): Homolog of NCBI NO: 15237039 NR Description: WRKY family transcription factor [Arabidopsis >gi|29839551|sp|Q8H0Y8|WR41_ARATH Probable WRKY transcription
  misc_feature (1)..(24): Homolog of NCBI NO: 15237039 NR Description: WRKY family transcription factor [Arabidopsis >gi|29839551|sp|Q8H0Y8|WR41_ARATH Probable WRKY transcription
  misc_feature (11)..(279): Homolog of NCBI NO: 15236622 NR Description: WRKY family transcription factor [Arabidopsis >gi|29839683|sp|Q9SUP6|WR53_ARATH Probable WRKY transcription
  misc_feature (1)..(27): Homolog of NCBI NO: 15236622 NR Description: WRKY family transcription factor [Arabidopsis >gi|29839683|sp|Q9SUP6|WR53_ARATH Probable WRKY transcription
  misc_feature (54)..(199): Homolog of NCBI NO: 40253471 NR Description: putative transcription factor WRKY5 [Oryza sativa
  misc_feature (51)..(261): Homolog of NCBI NO: 34911952 NR Description: P0694A04.6 [Oryza sativa (japonica
  misc_feature (72)..(213): Homolog of NCBI NO: 34898262 NR Description: WRKY family transcription factor-like protein
  misc_feature (62)..(168): Homolog of NCBI NO: 18420751 NR Description: WRKY family transcription factor [Arabidopsis >gi|29839626|sp|Q9FL62|WR30_ARATH Probable WRKY transcription
  misc_feature (82)..(191): Homolog of NCBI NO: 15225975 NR Description: WRKY family transcription factor [Arabidopsis >gi|29839678|sp|Q9SKD9|WR46_ARATH Probable WRKY transcription
MMNWERRSLLNELIHGLKAAKQLQAILMLNGSTTQHNPTIELAPDPLAHPGKVPGSPASITGNPRSEEFFNVRSKEFNLSSKKRKMLPKWTEQVRISPERGLEGPHDDIFSWRKYGQKDILGAKFPRSYYRCTFRNTQYCWATKQVQRSDGDPTIFEVTYRGTHTCSQGIPLPEKRETKPKHTVAVNYQNLRASLTVRTGGLGSEAFSFPVTSPLYTYESINGGGTFYHHVGSSGPSDFTGLISTNTSTGSSPIFDVNFQFDPTAEINTGFPTFFHNSI

SEQ ID NO: 107922 - protein, 278 aa, Arabidopsis thaliana
  peptide (1)..(278): Ceres Seq. ID no. 13652314
  misc_feature: Pfam Name: WRKY Pfam Description: WRKY DNA -binding domain
  misc_feature (1)..(278): Homolog of NCBI NO: 30681651 NR Description: WRKY family transcription factor [Arabidopsis >gi|24762209|gb|AAN64171.1| putative WRKY family transcription
  misc_feature (12)..(278): Homolog of NCBI NO: 15237039 NR Description: WRKY family transcription factor [Arabidopsis >gi|29839551|sp|Q8H0Y8|WR41_ARATH Probable WRKY transcription
  misc_feature (1)..(23): Homolog of NCBI NO: 15237039 NR Description: WRKY family transcription factor [Arabidopsis >gi|29839551|sp|Q8H0Y8|WR41_ARATH Probable WRKY transcription
  misc_feature (10)..(278): Homolog of NCBI NO: 15236622 NR Description: WRKY family transcription factor [Arabidopsis >gi|29839683|sp|Q9SUP6|WR53_ARATH Probable WRKY transcription
  misc_feature (1)..(26): Homolog of NCBI NO: 15236622 NR Description: WRKY family transcription factor [Arabidopsis >gi|29839683|sp|Q9SUP6|WR53_ARATH Probable WRKY transcription
  misc_feature (53)..(198): Homolog of NCBI NO: 40253471 NR Description: putative transcription factor WRKY5 [Oryza sativa
  misc_feature (50)..(260): Homolog of NCBI NO: 34911952 NR Description: P0694A04.6 [Oryza sativa (japonica
  misc_feature (71)..(212): Homolog of NCBI NO: 34898262 NR Description: WRKY family transcription factor-like protein
  misc_feature (61)..(167): Homolog of NCBI NO: 18420751 NR Description: WRKY family transcription factor [Arabidopsis >gi|29839626|sp|Q9FL62|WR30_ARATH Probable WRKY transcription
  misc_feature (81)..(190): Homolog of NCBI NO: 15225975 NR Description: WRKY family transcription factor [Arabidopsis >gi|29839678|sp|Q9SKD9|WR46_ARATH Probable WRKY transcription
MNWERRSLLNELIHGLKAAKQLQAILMLNGSTTQHNPTIELAPDPLAHPGKVPGSPASITGNPRSEEFFNVRSKEFNLSSKKRKMLPKWTEQVRISPERGLEGPHDDIFSWRKYGQKDILGAKFPRSYYRCTFRNTQYCWATKQVQRSDGDPTIFEVTYRGTHTCSQGIPLPEKRETKPKHTVAVNYQNLRASLTVRTGGLGSEAFSFPVTSPLYTYESINGGGTFYHHVGSSGPSDFTGLISTNTSTGSSPIFDVNFQFDPTAEINTGFPTFFHNSI

SEQ ID NO: 107923 - DNA, 1494 bp, Arabidopsis thaliana
  misc_feature (1)..(1494): Ceres Seq. ID no. 13652319
  misc_feature: MA Experiment ID: 20000794 Result: Up-regulated in Transcription
  misc_feature: MA Experiment 20000794 PARAMETER Experiment Name: At_Petals_P Parameter: Age (day) Value: 23-25 days
  misc_feature: MA Experiment 20000794 PARAMETER Experiment Name: At_Petals_P Parameter: Plant Line Value: WS
  misc_feature: MA Experiment 20000794 PARAMETER Experiment Name: At_Petals_P Parameter: Tissue Value: Petals vs. Whole plant
  misc_feature: Pfam Name: Mito_carr Pfam Description: Mitochondrial carrier protein
aacgaatcaccttccgaagatttttcttcctttcttttttggattctcctccatgcaaaattggaaagccctaagacgaacaccaaccatacgccatcgtgcgacgtgaaaattggagaatctgattggctgaaggattattgaaattgaaagttattgtgatcgagttttgttttttcctgatggtggaagaagcacaattggatcctaaatcgaaatcgattccgaatgagaatttgaaatttggagaaagggctttgtctgccggaggcgccgcttttatatcggcggtcatagtcaatcctctcgatgttgttaagacgagattacaagcacaggctgcaggagttccgtatcaaggctcgtgtcgtcttggttgtttcgacacgaattccacgttggtacatgatttgagaagtaattctgctccagggatgtgtagaattactggctctgcatctgtatgctcagataatcagtacaagggaactcttgatgttttctacaaaattatccgccaggaacaactttatgcaggaagggttttctaggctttggagaggtacaaacgcaagtttaactttagccattccgactgttgggatctacatgccttgttatgattattttcgcaacataatggaggagttcacgactgagaagtctccatctttgacggtttatgtccctctagttgctgggacaatagcacgctccttggcttgtatctcttgttaccctgttgagttagcaaggacacggatgcaggcatttaagggaacgcaaagaaatgtgaaactgcctggcgtttggaagacattagttgacgtcgtcaatccagtgaagggctcaaataatggatataggatgttatggactggtcttggtgctcaacttgctagggatgttccattctctgcaatctgctggtcgatacttgagcctacccggagaagcattcagtcggccatgggtgaagaaccaagggcaggcagtataataggtgcaaacttcgctgctggttttgttgcgggtgcagttgctgcagcagctacttgccctctagatgttgcaaagactaggcgtcaaatagagaagaacacagatagagccatgacaatgaccacaagacaaaccttggcagagatttggagggacggagggatgagagggatgtttagtggagcaggggctagagtgggacgagcaggaccatctgtagccattgtggtatcgttttacgaagtggtcaagtacggactgcacaacttccaccaacagtaacacttatactagacagattttgttttgatgcgaagctaaaaagaacacacttgcgcgtctaatccaataaaggttaccgtattaggtgcttacggcaaaacttgatttttttttgtcaagaaggaatattatttatgcaagttgttgcatttgtttttcgttttaatattttttgtaagaacaagtaaattaacacgagattcttatggc

SEQ ID NO: 107924 - protein, 262 aa, Arabidopsis thaliana
  peptide (1)..(262): Ceres Seq. ID no. 13652320
  misc_feature: Pfam Name: Mito_carr Pfam Description: Mitochondrial carrier protein
  misc_feature (14)..(262): Homolog of NCBI NO: 30690323 NR Description: mitochondrial carrier protein family [Arabidopsis
  misc_feature (14)..(262): Homolog of NCBI NO: 19310377 NR Description: At2g46320/F11C10.1 [Arabidopsis thaliana]
  misc_feature (30)..(262): Homolog of NCBI NO: 25408981 NR Description: hypothetical protein At2g46320 [imported] - thaliana >gi|20197376|gb|AAM15049.1| hypothetical protein
  misc_feature (1)..(262): Homolog of NCBI NO: 30690327 NR Description: mitochondrial carrier protein family [Arabidopsis
  misc_feature (14)..(260): Homolog of NCBI NO: 40253478 NR Description: putative mitochondrial carrier protein [Oryza
  misc_feature (14)..(257): Homolog of NCBI NO: 18417093 NR Description: mitochondrial carrier protein family [Arabidopsis >gi|16226567|gb|AAL16202.1|AF428433_1 AT4g27940/T13J8_50 thaliana] >gi|21553497|gb|AAM62590.1| unknown [Arabidopsis
  misc_feature (14)..(262): Homolog of NCBI NO: 34904154 NR Description: P0417G05.20 [Oryza sativa (japonica
  misc_feature (21)..(200): Homolog of NCBI NO: 7486963 NR Description: hypothetical protein T13J8.50 - Arabidopsis >gi|4455353|emb|CAB36763.1| putative protein [Arabidopsis >gi|7269648|emb|CAB79596.1| putative protein [Arabidopsis
  misc_feature (1)..(261): Homolog of NCBI NO: 6321696 NR Description: Hypothetical ORF; Ygr257cp [Saccharomyces >gi|1723767|sp|P53320|YG5F_YEAST PUTATIVE MITOCHONDRIAL CARRIER
  misc_feature (15)..(262): Homolog of NCBI NO: 28571261 NR Description: CG33075-PA [Drosophila melanogaster]
MFSTKLSARNNFMQEGFSRLWRGTNASLTLAIPTVGIYMPCYDYFRNIMEEFTTEKSPSLTVYVPLVAGTIARSLACISCYPVELARTRMQAFKGTQRNVKLPGVWKTLVDVVNPVKGSNNGYRMLWTGLGAQLARDVPFSAICWSILEPTRRSIQSAMGEEPRAGSIIGANFAAGFVAGAVAAAATCPLDVAKTRRQIEKNTDRAMTMTTRQTLAEIWRDGGMRGMFSGAGARVGRAGPSVAIVVSFYEVVKYGLHNFHQQ

SEQ ID NO: 107925 - protein, 250 aa, Arabidopsis thaliana
  peptide (1)..(250): Ceres Seq. ID no. 13652321
  misc_feature: Pfam Name: Mito_carr Pfam Description: Mitochondrial carrier protein
  misc_feature (2)..(250): Homolog of NCBI NO: 30690323 NR Description: mitochondrial carrier protein family [Arabidopsis
  misc_feature (2)..(250): Homolog of NCBI NO: 19310377 NR Description: At2g46320/F11C10.1 [Arabidopsis thaliana]
  misc_feature (18)..(250): Homolog of NCBI NO: 25408981 NR Description: hypothetical protein At2g46320 [imported] - thaliana >gi|20197376|gb|AAM15049.1| hypothetical protein
  misc_feature (1)..(250): Homolog of NCBI NO: 30690327 NR Description: mitochondrial carrier protein family [Arabidopsis
  misc_feature (2)..(248): Homolog of NCBI NO: 40253478 NR Description: putative mitochondrial carrier protein [Oryza
  misc_feature (2)..(245): Homolog of NCBI NO: 18417093 NR Description: mitochondrial carrier protein family [Arabidopsis >gi|16226567|gb|AAL16202.1|AF428433_1 AT4g27940/T13J8_50 thaliana] >gi|21553497|gb|AAM62590.1| unknown [Arabidopsis
  misc_feature (2)..(250): Homolog of NCBI NO: 34904154 NR Description: P0417G05.20 [Oryza sativa (japonica
  misc_feature (9)..(188): Homolog of NCBI NO: 7486963 NR Description: hypothetical protein T13J8.50 - Arabidopsis >gi|4455353|emb|CAB36763.1| putative protein [Arabidopsis >gi|7269648|emb|CAB79596.1| putative protein [Arabidopsis
  misc_feature (1)..(249): Homolog of NCBI NO: 6321696 NR Description: Hypothetical ORF; Ygr257cp [Saccharomyces >gi|1723767|sp|P53320|YG5F_YEAST PUTATIVE MITOCHONDRIAL CARRIER
  misc_feature (3)..(250): Homolog of NCBI NO: 28571261 NR Description: CG33075-PA [Drosophila melanogaster]
MQEGFSRLWRGTNASLTLAIPTVGIYMPCYDYFRNIMEEFTTEKSPSLTVYVPLVAGTIARSLACISCYPVELARTRMQAFKGTQRNVKLPGVWKTLVDVVNPVKGSNNGYRMLWTGLGAQLARDVPFSAICWSILEPTRRSIQSAMGEEPRAGSIIGANFAAGFVAGAVAAAATCPLDVAKTRRQIEKNTDRAMTMTTRQTLAEIWRDGGMRGMFSGAGARVGRAGPSVAIVVSFYEVVKYGLHNFHQQ

SEQ ID NO: 107926 - protein, 224 aa, Arabidopsis thaliana
  peptide (1)..(224): Ceres Seq. ID no. 13652322
  misc_feature: Pfam Name: Mito_carr Pfam Description: Mitochondrial carrier protein
  misc_feature (1)..(224): Homolog of NCBI NO: 30690323 NR Description: mitochondrial carrier protein family [Arabidopsis
  misc_feature (1)..(224): Homolog of NCBI NO: 19310377 NR Description: At2g46320/F11C10.1 [Arabidopsis thaliana]
  misc_feature (1)..(224): Homolog of NCBI NO: 25408981 NR Description: hypothetical protein At2g46320 [imported] - thaliana >gi|20197376|gb|AAM15049.1| hypothetical protein
  misc_feature (1)..(224): Homolog of NCBI NO: 30690327 NR Description: mitochondrial carrier protein family [Arabidopsis
  misc_feature (1)..(222): Homolog of NCBI NO: 40253478 NR Description: putative mitochondrial carrier protein [Oryza
  misc_feature (1)..(219): Homolog of NCBI NO: 18417093 NR Description: mitochondrial carrier protein family [Arabidopsis >gi|16226567|gb|AAL16202.1|AF428433_1 AT4g27940/T13J8_50 thaliana] >gi|21553497|gb|AAM62590.1| unknown [Arabidopsis
  misc_feature (1)..(224): Homolog of NCBI NO: 34904154 NR Description: P0417G05.20 [Oryza sativa (japonica
  misc_feature (1)..(162): Homolog of NCBI NO: 7486963 NR Description: hypothetical protein T13J8.50 - Arabidopsis >gi|4455353|emb|CAB36763.1| putative protein [Arabidopsis >gi|7269648|emb|CAB79596.1| putative protein [Arabidopsis
  misc_feature (1)..(223): Homolog of NCBI NO: 6321696 NR Description: Hypothetical ORF; Ygr257cp [Saccharomyces >gi|1723767|sp|P53320|YG5F_YEAST PUTATIVE MITOCHONDRIAL CARRIER
  misc_feature (1)..(224): Homolog of NCBI NO: 28571261 NR Description: CG33075-PA [Drosophila melanogaster]
MPCYDYFRNIMEEFTTEKSPSLTVYVPLVAGTIARSLACISCYPVELARTRMQAFKGTQRNVKLPGVWKTLVDVVNPVKGSNNGYRMLWTGLGAQLARDVPFSAICWSILEPTRRSIQSAMGEEPRAGSIIGANFAAGFVAGAVAAAATCPLDVAKTRRQIEKNTDRAMTMTTRQTLAEIWRDGGMRGMFSGAGARVGRAGPSVAIVVSFYEVVKYGLHNFHQQ

SEQ ID NO: 107927 - DNA, 1055 bp, Arabidopsis thaliana
  misc_feature (1)..(1055): Ceres Seq. ID no. 13652327
  misc_feature: MA Experiment ID: 20000314 Result: Down-regulated in Transcription
  misc_feature: MA Experiment 20000314 PARAMETER Experiment Name: At_14day_Shoots-Roots_Sub_P Parameter: Age (day) Value: 14
  misc_feature: MA Experiment 20000314 PARAMETER Experiment Name: At_14day_Shoots-Roots_Sub_P Parameter: Organism Value: A. thaliana
  misc_feature: MA Experiment 20000314 PARAMETER Experiment Name: At_14day_Shoots-Roots_Sub_P Parameter: Plant Line Value: WS
  misc_feature: MA Experiment 20000314 PARAMETER Experiment Name: At_14day_Shoots-Roots_Sub_P Parameter: Tissue Value: Roots vs. Whole Plant
  misc_feature: MA Experiment ID: 20000315 Result: Down-regulated in Transcription
  misc_feature: MA Experiment 20000315 PARAMETER Experiment Name: At_14day_Shoots-Roots_Sub_P Parameter: Age (day) Value: 14
  misc_feature: MA Experiment 20000315 PARAMETER Experiment Name: At_14day_Shoots-Roots_Sub_P Parameter: Organism Value: A. thaliana
  misc_feature: MA Experiment 20000315 PARAMETER Experiment Name: At_14day_Shoots-Roots_Sub_P Parameter: Plant Line Value: WS
  misc_feature: MA Experiment 20000315 PARAMETER Experiment Name: At_14day_Shoots-Roots_Sub_P Parameter: Tissue Value: Shoots vs. Whole Plant
  misc_feature: MA Experiment ID: 20000352 Result: Up-regulated in Transcription
  misc_feature: MA Experiment 20000352 PARAMETER Experiment Name: At_Drought_Sub_P Parameter: Age (day) Value: 7
  misc_feature: MA Experiment 20000352 PARAMETER Experiment Name: At_Drought_Sub_P Parameter: Organism Value: A. thaliana
  misc_feature: MA Experiment 20000352 PARAMETER Experiment Name: At_Drought_Sub_P Parameter: Plant Line Value: WS
  misc_feature: MA Experiment 20000352 PARAMETER Experiment Name: At_Drought_Sub_P Parameter: Timepoint (hr) Value: 6
  misc_feature: MA Experiment 20000352 PARAMETER Experiment Name: At_Drought_Sub_P Parameter: Tissue Value: Whole Plant
  misc_feature: MA Experiment 20000352 PARAMETER Experiment Name: At_Drought_Sub_P Parameter: Treatment Value: Drought vs. No Drought
  misc_feature: MA Experiment ID: 20000355 Result: Down-regulated in Transcription
  misc_feature: MA Experiment 20000355 PARAMETER Experiment Name: At_Siliques_Sub_P Parameter: Age (day) Value: 21
  misc_feature: MA Experiment 20000355 PARAMETER Experiment Name: At_Siliques_Sub_P Parameter: Organism Value: A. thaliana
  misc_feature: MA Experiment 20000355 PARAMETER Experiment Name: At_Siliques_Sub_P Parameter: Plant Line Value: WS
  misc_feature: MA Experiment 20000355 PARAMETER Experiment Name: At_Siliques_Sub_P Parameter: Tissue Value: Less Than 5mm Siliques vs. Whole Plant
  misc_feature: MA Experiment ID: 20000440 Result: Down-regulated in Transcription
  misc_feature: MA Experiment 20000440 PARAMETER Experiment Name: At_Closed-Flower__Sub_P Parameter: Tissue Value: Closed Flower vs. Whole Plant
  misc_feature: MA Experiment ID: 20000634 Result: Up-regulated in Transcription
  misc_feature: MA Experiment 20000634 PARAMETER Experiment Name: At_10percent_PEG_Sub_P Parameter: Age (day) Value: 12
  misc_feature: MA Experiment 20000634 PARAMETER Experiment Name: At_10percent_PEG_Sub_P Parameter: Organism Value: A. thaliana
  misc_feature: MA Experiment 20000634 PARAMETER Experiment Name: At_10percent_PEG_Sub_P Parameter: Plant Line Value: WS
  misc_feature: MA Experiment 20000634 PARAMETER Experiment Name: At_10percent_PEG_Sub_P Parameter: Timepoint (day) Value: 12
  misc_feature: MA Experiment 20000634 PARAMETER Experiment Name: At_10percent_PEG_Sub_P Parameter: Tissue Value: Whole Plant
  misc_feature: MA Experiment 20000634 PARAMETER Experiment Name: At_10percent_PEG_Sub_P Parameter: Treatment Value: 10% PEG vs. No Treatment
acatgtaaattcacatatctctctaatttgctcactagatattatttctttcctcttgaaaagtccaaaaatgagaagctttctctacctcatcgtagtcatcttcctcttctcttcatccgttaacgcttgtgatcgatgtctacaccgttctaaagcatcttatttctcctctgcttctgctctctcttgtaaacattcccatcttcttctaactacttccgtttaactactagtttgtttcttttttctcatgtcttgtttatgggtattttctagccggggcttgtgcctatggccctatggctacgagcttctttgccggccacattgcggccgctataccttccatttacaaagatggtgctggctgtggagcttgctttcaagtcagatgcaagaaccccaagttgtgtaacagtaaaggaaccattgtgatggtcacagacttgaacacgagcaaccaaactgatcttgtccttagtagtagagcttttagggctatggctaagcctgttgttggtgttgacaaataccttctcaaacaaggcatcgtcgacgttgaataccaaagagttccttgcaattacggtaaaaggaatttgaacgtgagagtggaagaagcaagcaaaaagccaaattacttggcgataaagctattgtaccaaggaggtcaaaccgaagtggtaggtatcgacattgctccagtaggttcgtcacaatggagttacatgagtagaagccacggagccgtttgggcgaccgataaagtaccaacgggagctctacagttcaagttcacggtgacaggcggctacgatggcaaaacggtttggtcaaagagggttcttccggcgaattggaactctgggaggatttatgatgccggcgttcagatcaccgacattgctcaagaaggttgtgatacatgcggtcacatatggaactgactcattacaattctccttatttaggcaaacagcaaacaaacaccctttataggatatatacatgtatgtgtaacagagttcattatttaatgagttgaagaattc

SEQ ID NO: 107928 - protein, 215 aa, Arabidopsis thaliana; identical to SEQ ID NO: 90784
  peptide (1)..(215): Ceres Seq. ID no. 13652328
  misc_feature (101)..(184): Pfam Name: Pollen allergen Pfam Description: Pollen allergen
  misc_feature (1)..(215): Homolog of NCBI NO: 20138389 NR Description: Expansin-like 3 precursor (At-EXPL3)
  misc_feature (1)..(215): Homolog of NCBI NO: 21555265 NR Description: Expansin-like 1 precursor (At-EXPL1)
  misc_feature (1)..(215): Homolog of NCBI NO: 15231303 NR Description: expansin protein family (EXPL1) [Arabidopsis
  misc_feature (1)..(215): Homolog of NCBI NO: 30692657 NR Description: expansin protein family (EXPL3) [Arabidopsis >gi|26449323|dbj|BAC41789.1| unknown protein [Arabidopsis
  misc_feature (1)..(215): Homolog of NCBI NO: 15233841 NR Description: expansin protein family (EXPL2) [Arabidopsis
  misc_feature (1)..(210): Homolog of NCBI NO: 33111959 NR Description: expansin-like protein [Quercus robur]
  misc_feature (1)..(210): Homolog of NCBI NO: 37536544 NR Description: putative pollen allergen [Oryza sativa (japonica group)] >gi|10140765|gb|AAG13596.1| putative pollen allergen sativa] >gi|31433332|gb|AAP54861.1| putative pollen allergen
  misc_feature (1)..(214): Homolog of NCBI NO: 21654743 NR Description: expansin-like protein 1 [Oryza sativa]
  misc_feature (1)..(214): Homolog of NCBI NO: 20502989 NR Description: Putative pollen allergen [Oryza sativa (japonica
  misc_feature (8)..(214): Homolog of NCBI NO: 25136297 NR Description: expansin-like protein [Oryza sativa (japonica

SEQ ID NO: 107929 - protein, 170 aa, Arabidopsis thaliana; identical to SEQ ID NO: 90785
  peptide (1)..(170): Ceres Seq. ID no. 13652329
  misc_feature (56)..(139): Pfam Name: Pollen allergen Pfam Description: Pollen allergen
  misc_feature (1)..(170): Homolog of NCBI NO: 20138389 NR Description: Expansin-like 3 precursor (At-EXPL3)
  misc_feature (1)..(170): Homolog of NCBI NO: 21555265 NR Description: Expansin-like 1 precursor (At-EXPL1)
  misc_feature (1)..(170): Homolog of NCBI NO: 15231303 NR Description: expansin protein family (EXPL1) [Arabidopsis
  misc_feature (1)..(170): Homolog of NCBI NO: 30692657 NR Description: expansin protein family (EXPL3) [Arabidopsis >gi|26449323|dbj|BAC41789.1| unknown protein [Arabidopsis
  misc_feature (1)..(170): Homolog of NCBI NO: 15233841 NR Description: expansin protein family (EXPL2) [Arabidopsis
  misc_feature (1)..(165): Homolog of NCBI NO: 33111959 NR Description: expansin-like protein [Quercus robur]
  misc_feature (1)..(165): Homolog of NCBI NO: 37536544 NR Description: putative pollen allergen [Oryza sativa (japonica group)] >gi|10140765|gb|AAG13596.1| putative pollen allergen sativa] >gi|31433332|gb|AAP54861.1| putative pollen allergen
  misc_feature (1)..(169): Homolog of NCBI NO: 21654743 NR Description: expansin-like protein 1 [Oryza sativa]
  misc_feature (1)..(169): Homolog of NCBI NO: 20502989 NR Description: Putative pollen allergen [Oryza sativa (japonica
  misc_feature (1)..(169): Homolog of NCBI NO: 25136297 NR Description: expansin-like protein [Oryza sativa (japonica

SEQ ID NO: 107930 - protein, 148 aa, Arabidopsis thaliana
  peptide (1)..(148): Ceres Seq. ID no. 13652330
  misc_feature (34)..(117): Pfam Name: Pollen allergen Pfam Description: Pollen allergen
  misc_feature (1)..(148): Homolog of NCBI NO: 20138389 NR Description: Expansin-like 3 precursor (At-EXPL3)
  misc_feature (1)..(148): Homolog of NCBI NO: 21555265 NR Description: Expansin-like 1 precursor (At-EXPL1)
  misc_feature (1)..(148): Homolog of NCBI NO: 15231303 NR Description: expansin protein family (EXPL1) [Arabidopsis
  misc_feature (1)..(148): Homolog of NCBI NO: 30692657 NR Description: expansin protein family (EXPL3) [Arabidopsis >gi|26449323|dbj|BAC41789.1| unknown protein [Arabidopsis
  misc_feature (1)..(148): Homolog of NCBI NO: 15233841 NR Description: expansin protein family (EXPL2) [Arabidopsis
  misc_feature (1)..(143): Homolog of NCBI NO: 33111959 NR Description: expansin-like protein [Quercus robur]
  misc_feature (1)..(143): Homolog of NCBI NO: 37536544 NR Description: putative pollen allergen [Oryza sativa (japonica group)] >gi|10140765|gb|AAG13596.1| putative pollen allergen sativa] >gi|31433332|gb|AAP54861.1| putative pollen allergen
  misc_feature (1)..(147): Homolog of NCBI NO: 21654743 NR Description: expansin-like protein 1 [Oryza sativa]
  misc_feature (1)..(147): Homolog of NCBI NO: 20502989 NR Description: Putative pollen allergen [Oryza sativa (japonica
  misc_feature (1)..(147): Homolog of NCBI NO: 25136297 NR Description: expansin-like protein [Oryza sativa (japonica
MAKPVVGVDKYLLKQGIVDVEYQRVPCNYGKRNLNVRVEEASKKPNYLAIKLLYQGGQTEVVGIDIAPVGSSQWSYMSRSHGAVWATDKVPTGALQFKFTVTGGYDGKTVWSKRVLPANWNSGRIYDAGVQITDIAQEGCDTCGHIWN

SEQ ID NO: 107931 - DNA, 1612 bp, Arabidopsis thaliana
  misc_feature (1)..(1612): Ceres Seq. ID no. 13652331
  misc_feature: MA Experiment ID: 20000327 Result: Up-regulated in Transcription
  misc_feature: MA Experiment 20000327 PARAMETER Experiment Name: At_42deg_Heat_Sub_P Parameter: Age (day) Value: 14
  misc_feature: MA Experiment 20000327 PARAMETER Experiment Name: At_42deg_Heat_Sub_P Parameter: Organism Value: A. thaliana
  misc_feature: MA Experiment 20000327 PARAMETER Experiment Name: At_42deg_Heat_Sub_P Parameter: Plant Line Value: WS
  misc_feature: MA Experiment 20000327 PARAMETER Experiment Name: At_42deg_Heat_Sub_P Parameter: Temperature (deg C) Value: 42 vs. 22
  misc_feature: MA Experiment 20000327 PARAMETER Experiment Name: At_42deg_Heat_Sub_P Parameter: Timepoint (hr) Value: 1
  misc_feature: MA Experiment 20000327 PARAMETER Experiment Name: At_42deg_Heat_Sub_P Parameter: Tissue Value: Aerial
  misc_feature: MA Experiment ID: 20000328 Result: Up-regulated in Transcription
  misc_feature: MA Experiment 20000328 PARAMETER Experiment Name: At_42deg_Heat_Sub_P Parameter: Age (day) Value: 14
  misc_feature: MA Experiment 20000328 PARAMETER Experiment Name: At_42deg_Heat_Sub_P Parameter: Organism Value: A. thaliana
  misc_feature: MA Experiment 20000328 PARAMETER Experiment Name: At_42deg_Heat_Sub_P Parameter: Plant Line Value: WS
  misc_feature: MA Experiment 20000328 PARAMETER Experiment Name: At_42deg_Heat_Sub_P Parameter: Temperature (deg C) Value: 42 vs. 22
  misc_feature: MA Experiment 20000328 PARAMETER Experiment Name: At_42deg_Heat_Sub_P Parameter: Timepoint (hr) Value: 6
  misc_feature: MA Experiment 20000328 PARAMETER Experiment Name: At_42deg_Heat_Sub_P Parameter: Tissue Value: Aerial
atggcggacgcagaaacctttgctttccaagctgagatcaaccagttgctctccctcatcatcaataccttttactctaacaaggagatcttccttcgtgaactcatcagtaactcttctgatgctttggacaagattaggtttgagtccttgacagacaagagcaagctcgatggtcagccagagctcttcattcacatcattcccgacaagactaacaacaccttgacgattatcgatagtggtattgggatgaccaaggctgatctggtgaacaaccttggaacaattgcaagatctggaaccaaagaattcatggaggcgttggctgctggagctgatgttagcatgattggacagtttggtgttggtttctactctgcttacttggttgctgacaaggttgttgttactaccaagcacaatgacgatgagcagtacgtgtgggagtcccaggccggtggatctttcaccgtcaccagagacacctctggtgaggctcttggtagaggaactaagatggtcctttacctcaaggaagaccagatggagtacattgaggagcgaaggcttaaggatttggtgaagaagcactctgagttcatcagctacccaatctctctctggattgagaagaccattgagaaggagatctctgatgatgaagaggaggaagagaagaaggatgaggaaggcaaggttgaggaagttgatgaggagaaagaaaaggaggactacaacaagttctatgaggctttctctaagaacctgaagctcggtatccatgaggactcccaaaacagaaccaagattgctgagttgctccgttaccactcaaccaagagcggtgatgaattgaccagtctcaaggactacgtgacaaggatgaaggaaggtcagaacgatatcttctatatcactggtgagagcaagaagggtattgaagttctctacatggttgacgctatcgatgagtatgctattggtcagctcaaggaattcgaaggaaagaagcttgtctctgcaaccaaggaaggtctgaaactggatgagactgaagacgagaagaagaagaaagaagagctcaaggagaagtttgagggactctgcaaagtgatcaaggacgttttgggagacaaggttgagaaggttatcgtctctgaccgtgttgtggactcaccctgctgtcttgtaacaggcgagtatggctggactgcaaacatggagaggatcatgaaagctcaagccttgagagacagcagcatgggtggctacatgtcgagcaagaagacaatggagattaacccagagaactccatcatggatgagctgagaaagagagctgatgcagacaagaacgacaagtctgtgaaggaccttgtacttcttctctttgagaccgctcttctcacttctggtttcagcctcgatgagcccaacactttcgggagcaggattcacaggatgttgaagcttggattgagcattgatgacgatgatgttgttgaagccgatgctgacatgcctccacttgaagatgatgccgatgctgaaggtagcaagatggaggaagttgactaaattatcacacacagtcgacttaatcattagg

SEQ ID NO: 107932 - protein, 526 aa, Arabidopsis thaliana
  peptide (1)..(526): Ceres Seq. ID no. 13652332
  misc_feature (27)..(181): Pfam Name: Histidine kinase-, DNA gyrase B-, and HSP90-like ATPase Pfam Description: Histidine kinase-, DNA gyrase B-, and
  misc_feature (1)..(526): Homolog of NCBI NO: 24429604 NR Description: putative heat shock protein 90 [Arabidopsis >gi|24762203|gb|AAN64168.1| putative heat shock protein 90
  misc_feature (241)..(526): Homolog of NCBI NO: 15241113 NR Description: heat shock protein, putative [Arabidopsis
  misc_feature (241)..(526): Homolog of NCBI NO: 17979041 NR Description: putative heat shock protein 90 [Arabidopsis
  misc_feature (1)..(270): Homolog of NCBI NO: 15241113 NR Description: heat shock protein, putative [Arabidopsis
  misc_feature (1)..(270): Homolog of NCBI NO: 17979041 NR Description: putative heat shock protein 90 [Arabidopsis
  misc_feature (241)..(526): Homolog of NCBI NO: 1906826 NR Description: heat shock protein [Arabidopsis thaliana]
  misc_feature (241)..(526): Homolog of NCBI NO: 15241115 NR Description: heat shock protein 81-2 (HSP81-2) [Arabidopsis
  misc_feature (1)..(270): Homolog of NCBI NO: 1906826 NR Description: heat shock protein [Arabidopsis thaliana]
  misc_feature (1)..(270): Homolog of NCBI NO: 15241115 NR Description: heat shock protein 81-2 (HSP81-2) [Arabidopsis
  misc_feature (241)..(526): Homolog of NCBI NO: 23397152 NR Description: putative heat shock protein 81-2 (HSP81-2)
MADAETFAFQAEINQLLSLIINTFYSNKEIFLRELISNSSDALDKIRFESLTDKSKLDGQPELFIHIIPDKTNNTLTIIDSGIGMTKADLVNNLGTIARSGTKEFMEALAAGADVSMIGQFGVGFYSAYLVADKVVVTTKHNDDEQYVWESQAGGSFTVTRDTSGEALGRGTKMVLYLKEDQMEYIEERRLKDLVKKHSEFISYPISLWIEKTIEKEISDDEEEEEKKDEEGKVEEVDEEKEKEDYNKFYEAFSKNLKLGIHEDSQNRTKIAELLRYHSTKSGDELTSLKDYVTRMKEGQNDIFYITGESKKGIEVLYMVDAIDEYAIGQLKEFEGKKLVSATKEGLKLDETEDEKKKKEELKEKFEGLCKVIKDVLGDKVEKVIVSDRVVDSPCCLVTGEYGWTANMERIMKAQALRDSSMGGYMSSKKTMEINPENSIMDELRKRADADKNDKSVKDLVLLLFETALLTSGFSLDEPNTFGSRIHRMLKLGLSIDDDDVVEADADMPPLEDDADAEGSKMEEVD

SEQ ID NO: 107933 - protein, 442 aa, Arabidopsis thaliana
  peptide (1)..(442): Ceres Seq. ID no. 13652333
  misc_feature (1)..(97): Pfam Name: Histidine kinase-, DNA gyrase B-, and HSP90-like ATPase Pfam Description: Histidine kinase-, DNA gyrase B-, and
  misc_feature (1)..(442): Homolog of NCBI NO: 24429604 NR Description: putative heat shock protein 90 [Arabidopsis >gi|24762203|gb|AAN64168.1| putative heat shock protein 90
  misc_feature (157)..(442): Homolog of NCBI NO: 15241113 NR Description: heat shock protein, putative [Arabidopsis
  misc_feature (157)..(442): Homolog of NCBI NO: 17979041 NR Description: putative heat shock protein 90 [Arabidopsis
  misc_feature (1)..(186): Homolog of NCBI NO: 15241113 NR Description: heat shock protein, putative [Arabidopsis
  misc_feature (1)..(186): Homolog of NCBI NO: 17979041 NR Description: putative heat shock protein 90 [Arabidopsis
  misc_feature (157)..(442): Homolog of NCBI NO: 1906826 NR Description: heat shock protein [Arabidopsis thaliana]
  misc_feature (157)..(442): Homolog of NCBI NO: 15241115 NR Description: heat shock protein 81-2 (HSP81-2) [Arabidopsis
  misc_feature (1)..(186): Homolog of NCBI NO: 1906826 NR Description: heat shock protein [Arabidopsis thaliana]
  misc_feature (1)..(186): Homolog of NCBI NO: 15241115 NR Description: heat shock protein 81-2 (HSP81-2) [Arabidopsis
  misc_feature (157)..(442): Homolog of NCBI NO: 23397152 NR Description: putative heat shock protein 81-2 (HSP81-2)
MTKADLVNNLGTIARSGTKEFMEALAAGADVSMIGQFGVGFYSAYLVADKVVVTTKHNDDEQYVWESQAGGSFTVTRDTSGEALGRGTKMVLYLKEDQMEYIEERRLKDLVKKHSEFISYPISLWIEKTIEKEISDDEEEEEKKDEEGKVEEVDEEKEKEDYNKFYEAFSKNLKLGIHEDSQNRTKIAELLRYHSTKSGDELTSLKDYVTRMKEGQNDIFYITGESKKGIEVLYMVDAIDEYAIGQLKEFEGKKLVSATKEGLKLDETEDEKKKKEELKEKFEGLCKVIKDVLGDKVEKVIVSDRVVDSPCCLVTGEYGWTANMERIMKAQALRDSSMGGYMSSKKTMEINPENSIMDELRKRADADKNDKSVKDLVLLLFETALLTSGFSLDEPNTFGSRIHRMLKLGLSIDDDDVVEADADMPPLEDDADAEGSKMEEVD

SEQ ID NO: 107934 - protein, 421 aa, Arabidopsis thaliana
  peptide (1)..(421): Ceres Seq. ID no. 13652334
  misc_feature (1)..(76): Pfam Name: Histidine kinase-, DNA gyrase B-, and HSP90-like ATPase Pfam Description: Histidine kinase-, DNA gyrase B-, and
  misc_feature (1)..(421): Homolog of NCBI NO: 24429604 NR Description: putative heat shock protein 90 [Arabidopsis >gi|24762203|gb|AAN64168.1| putative heat shock protein 90
  misc_feature (136)..(421): Homolog of NCBI NO: 15241113 NR Description: heat shock protein, putative [Arabidopsis
  misc_feature (136)..(421): Homolog of NCBI NO: 17979041 NR Description: putative heat shock protein 90 [Arabidopsis
  misc_feature (1)..(165): Homolog of NCBI NO: 15241113 NR Description: heat shock protein, putative [Arabidopsis
  misc_feature (1)..(165): Homolog of NCBI NO: 17979041 NR Description: putative heat shock protein 90 [Arabidopsis
  misc_feature (136)..(421): Homolog of NCBI NO: 1906826 NR Description: heat shock protein [Arabidopsis thaliana]
  misc_feature (136)..(421): Homolog of NCBI NO: 15241115 NR Description: heat shock protein 81-2 (HSP81-2) [Arabidopsis
  misc_feature (1)..(165): Homolog of NCBI NO: 1906826 NR Description: heat shock protein [Arabidopsis thaliana]
  misc_feature (1)..(165): Homolog of NCBI NO: 15241115 NR Description: heat shock protein 81-2 (HSP81-2) [Arabidopsis
  misc_feature (136)..(421): Homolog of NCBI NO: 23397152 NR Description: putative heat shock protein 81-2 (HSP81-2)
MEALAAGADVSMIGQFGVGFYSAYLVADKVVVTTKHNDDEQYVWESQAGGSFTVTRDTSGEALGRGTKMVLYLKEDQMEYIEERRLKDLVKKHSEFISYPISLWIEKTIEKEISDDEEEEEKKDEEGKVEEVDEEKEKEDYNKFYEAFSKNLKLGIHEDSQNRTKIAELLRYHSTKSGDELTSLKDYVTRMKEGQNDIFYITGESKKGIEVLYMVDAIDEYAIGQLKEFEGKKLVSATKEGLKLDETEDEKKKKEELKEKFEGLCKVIKDVLGDKVEKVIVSDRVVDSPCCLVTGEYGWTANMERIMKAQALRDSSMGGYMSSKKTMEINPENSIMDELRKRADADKNDKSVKDLVLLLFETALLTSGFSLDEPNTFGSRIHRMLKLGLSIDDDDVVEADADMPPLEDDADAEGSKMEEVD

SEQ ID NO: 107935 - DNA, 1125 bp, Arabidopsis thaliana
  misc_feature (1)..(1125): Ceres Seq. ID no. 13652351
  misc_feature: MA Experiment ID: 108434 Result: Up-regulated in Transcription
  misc_feature: MA Experiment 108434 PARAMETER Experiment Name: At_Root_Tips_cDNA_P Parameter: Tissue Value: Root Tips
  misc_feature: MA Experiment ID: 108461 Result: Up-regulated in Transcription
  misc_feature: MA Experiment 108461 PARAMETER Experiment Name: At_Germinating_Seeds_cDNA_P Parameter: Age (day) Value: 1 vs. 0
  misc_feature: MA Experiment 108461 PARAMETER Experiment Name: At_Germinating_Seeds_cDNA_P Parameter: Tissue Value: Germinating Seeds
  misc_feature: MA Experiment ID: 108462 Result: Up-regulated in Transcription
  misc_feature: MA Experiment 108462 PARAMETER Experiment Name: At_Germinating_Seeds_cDNA_P Parameter: Age (day) Value: 2 vs. 0
  misc_feature: MA Experiment 108462 PARAMETER Experiment Name: At_Germinating_Seeds_cDNA_P Parameter: Tissue Value: Germinating Seeds
  misc_feature: MA Experiment ID: 108473 Result: Down-regulated in Transcription
  misc_feature: MA Experiment 108473 PARAMETER Experiment Name: At_Drought_Flowers_cDNA_P Parameter: Timepoint (hr) Value: 7 d
  misc_feature: MA Experiment 108473 PARAMETER Experiment Name: At_Drought_Flowers_cDNA_P Parameter: Tissue Value: Flower
  misc_feature: MA Experiment 108473 PARAMETER Experiment Name: At_Drought_Flowers_cDNA_P Parameter: Treatment Value: Drought vs. No Drought
  misc_feature: MA Experiment ID: 20000069 Result: Down-regulated in Transcription
  misc_feature: MA Experiment 20000069 PARAMETER Experiment Name: At_100uM_ABA_Mutants_cDNA_P Parameter: Plant Line Value: CS23
  misc_feature: MA Experiment 20000069 PARAMETER Experiment Name: At_100uM_ABA_Mutants_cDNA_P Parameter: Timepoint (hr) Value: 6
  misc_feature: MA Experiment 20000069 PARAMETER Experiment Name: At_100uM_ABA_Mutants_cDNA_P Parameter: Tissue Value: Aerial
  misc_feature: MA Experiment 20000069 PARAMETER Experiment Name: At_100uM_ABA_Mutants_cDNA_P Parameter: Treatment Value: 100uM ABA vs. No Treatment
  misc_feature: MA Experiment ID: 20000111 Result: Down-regulated in Transcription
  misc_feature: MA Experiment 20000111 PARAMETER Experiment Name: At_42deg_Heat_cDNA_P Parameter: Temperature (deg C) Value: 42 vs. 22
  misc_feature: MA Experiment 20000111 PARAMETER Experiment Name: At_42deg_Heat_cDNA_P Parameter: Timepoint (hr) Value: 6
  misc_feature: MA Experiment 20000111 PARAMETER Experiment Name: At_42deg_Heat_cDNA_P Parameter: Tissue Value: Aerial
  misc_feature: MA Experiment ID: 20000112 Result: Down-regulated in Transcription
  misc_feature: MA Experiment 20000112 PARAMETER Experiment Name: At_42deg_Heat_cDNA_P Parameter: Temperature (deg C) Value: 42 vs. 22
  misc_feature: MA Experiment 20000112 PARAMETER Experiment Name: At_42deg_Heat_cDNA_P Parameter: Timepoint (hr) Value: 2
  misc_feature: MA Experiment 20000112 PARAMETER Experiment Name: At_42deg_Heat_cDNA_P Parameter: Tissue Value: Aerial
  misc_feature: MA Experiment ID: 20000113 Result: Down-regulated in Transcription
  misc_feature: MA Experiment 20000113 PARAMETER Experiment Name: At_42deg_Heat_cDNA_P Parameter: Temperature (deg C) Value: 42 vs. 22
  misc_feature: MA Experiment 20000113 PARAMETER Experiment Name: At_42deg_Heat_cDNA_P Parameter: Timepoint (hr) Value: 8
  misc_feature: MA Experiment 20000113 PARAMETER Experiment Name: At_42deg_Heat_cDNA_P Parameter: Tissue Value: Aerial
  misc_feature: MA Experiment ID: 20000117 Result: Down-regulated in Transcription
  misc_feature: MA Experiment 20000117 PARAMETER Experiment Name: At_100uM_ABA_Mutants_cDNA_P Parameter: Plant Line Value: Columbia
  misc_feature: MA Experiment 20000117 PARAMETER Experiment Name: At_100uM_ABA_Mutants_cDNA_P Parameter: Timepoint (hr) Value: 6
  misc_feature: MA Experiment 20000117 PARAMETER Experiment Name: At_100uM_ABA_Mutants_cDNA_P Parameter: Tissue Value: Aerial
  misc_feature: MA Experiment 20000117 PARAMETER Experiment Name: At_100uM_ABA_Mutants_cDNA_P Parameter: Treatment Value: 100uM ABA vs. No Treatment
  misc_feature: MA Experiment ID: 20000144 Result: Down-regulated in Transcription
  misc_feature: MA Experiment 20000144 PARAMETER Experiment Name: At_42deg_Heat_cDNA_P Parameter: Temperature (deg C) Value: 42 vs. 22
  misc_feature: MA Experiment 20000144 PARAMETER Experiment Name: At_42deg_Heat_cDNA_P Parameter: Timepoint (hr) Value: 1
  misc_feature: MA Experiment 20000144 PARAMETER Experiment Name: At_42deg_Heat_cDNA_P Parameter: Tissue Value: Aerial
  misc_feature: MA Experiment ID: 20000306 Result: Up-regulated in Transcription
  misc_feature: MA Experiment 20000306 PARAMETER Experiment Name: At_Germinating_Seeds_Sub_P Parameter: Age (hr) Value: 6 vs. 0
  misc_feature: MA Experiment 20000306 PARAMETER Experiment Name: At_Germinating_Seeds_Sub_P Parameter: Organism Value: A. thaliana
  misc_feature: MA Experiment 20000306 PARAMETER Experiment Name: At_Germinating_Seeds_Sub_P Parameter: Plant Line Value: WS
  misc_feature: MA Experiment 20000306 PARAMETER Experiment Name: At_Germinating_Seeds_Sub_P Parameter: Tissue Value: Germinating Seeds
  misc_feature: MA Experiment ID: 20000307 Result: Up-regulated in Transcription
  misc_feature: MA Experiment 20000307 PARAMETER Experiment Name: At_Germinating_Seeds_Sub_P Parameter: Age (hr) Value: 24 vs. 0
  misc_feature: MA Experiment 20000307 PARAMETER Experiment Name: At_Germinating_Seeds_Sub_P Parameter: Organism Value: A. thaliana
  misc_feature: MA Experiment 20000307 PARAMETER Experiment Name: At_Germinating_Seeds_Sub_P Parameter: Plant Line Value: WS
  misc_feature: MA Experiment 20000307 PARAMETER Experiment Name: At_Germinating_Seeds_Sub_P Parameter: Tissue Value: Germinating Seeds
  misc_feature: MA Experiment ID: 20000315 Result: Down-regulated in Transcription
  misc_feature: MA Experiment 20000315 PARAMETER Experiment Name: At_14day_Shoots-Roots_Sub_P Parameter: Age (day) Value: 14
  misc_feature: MA Experiment 20000315 PARAMETER Experiment Name: At_14day_Shoots-Roots_Sub_P Parameter: Organism Value: A. thaliana
  misc_feature: MA Experiment 20000315 PARAMETER Experiment Name: At_14day_Shoots-Roots_Sub_P Parameter: Plant Line Value: WS
  misc_feature: MA Experiment 20000315 PARAMETER Experiment Name: At_14day_Shoots-Roots_Sub_P Parameter: Tissue Value: Shoots vs. Whole Plant
  misc_feature: MA Experiment ID: 20000328 Result: Down-regulated in Transcription
  misc_feature: MA Experiment 20000328 PARAMETER Experiment Name: At_42deg_Heat_Sub_P Parameter: Age (day) Value: 14
  misc_feature: MA Experiment 20000328 PARAMETER Experiment Name: At_42deg_Heat_Sub_P Parameter: Organism Value: A. thaliana
  misc_feature: MA Experiment 20000328 PARAMETER Experiment Name: At_42deg_Heat_Sub_P Parameter: Plant Line Value: WS
  misc_feature: MA Experiment 20000328 PARAMETER Experiment Name: At_42deg_Heat_Sub_P Parameter: Temperature (deg C) Value: 42 vs. 22
  misc_feature: MA Experiment 20000328 PARAMETER Experiment Name: At_42deg_Heat_Sub_P Parameter: Timepoint (hr) Value: 6
  misc_feature: MA Experiment 20000328 PARAMETER Experiment Name: At_42deg_Heat_Sub_P Parameter: Tissue Value: Aerial
aacatcttcttcttcttcatcaaatctcacaaatcttcaacacttaatcacaaatctcaaagcttcggataccaaatggctcgtaccaagcaaaccgcaaggaaatccaccggaggaaaagccccaaggaaacaactcgcaacaaaggcggcgaggaaatcagctccggcgaccggaggagtaaagaagccacacagattccgtcctggaactgttgccctaagagaaatcaggaagtatcagaagagcactgagcttctgatccgcaagcttccgttccagcgtttggttcgtgagatcgctcaggatttcaaaacagatctgcgtttccagagcagcgccgtcgcagcacttcaggaagcggctgaagcatacctcgttggattgtttgaagacaccaatctttgcgcgattcatgctaagagagtcactatcatgcctaaggatattcaattggcgaggagaattagaggcgagagggcttaagaaggagattgaagtactctagactgtgatcgttatgcttatactgctagaatatccaccggaggaaaagctccgaggaagcaattagcgccaaaagcggcgagacaatctgcaccagcaacgggaggagtgaagaagccacacagattccgtccaggaactgttgcgttgagagatattaggaaataccaaaagagtaccgagattttgatcagaaagcttccgtttcagcgacttgttcgtgagatcgctcaagatttcaaaacggatctgaggtttcagagcagtgccgtcgctgctctccaggaagctgctgaggcttaccttgttgggttattcgaagatacaaacctctgtgcgattcacgcaaagagggtgacgatcatgcctaaagagatccaattagcgagaaggattagaggtgagagagctcgaggagagtgatgattttgttgttctgcgaactgggatttcatgggtttttcgatttacggatttgggtttatgtaagtttcgatctttgctgctttggaatgtcttgtaggttggttagttaatgcttttatttgcagctaaggtgtttgtggaaattccccaatgaaacttgtaatgttcaatacaatccttactttggttccc

SEQ ID NO: 107936 - protein, 161 aa, Arabidopsis thaliana
  peptide (1)..(161): Ceres Seq. ID no. 13652352
  misc_feature (42)..(160): Pfam Name: Core histone H2A/H2B/H3/H4 Pfam Description: Core histone H2A/H2B/H3/H4
  misc_feature (26)..(149): Homolog of NCBI NO: 25404986 NR Description: protein F10A5.19 [imported] - Arabidopsis >gi|9369379|gb|AAF87128.1|AC006434_24 F10A5.19 [Arabidopsis
  misc_feature (26)..(121): Homolog of NCBI NO: 34876364 NR Description: similar to CG31613-PA [Rattus norvegicus]
  misc_feature (26)..(159): Homolog of NCBI NO: 37550346 NR Description: similar to histone (15.4 kD) (his-72) [Homo
  misc_feature (26)..(161): Homolog of NCBI NO: 15232146 NR Description: histone H3 [Arabidopsis thaliana] histone H3 [Arabidopsis thaliana] >gi|18390992|ref|NP_563838.1|
  misc_feature (26)..(161): Homolog of NCBI NO: 122087 NR Description: Histone H3 >gi|81849|pir||S04520 histone H3
  misc_feature (26)..(161): Homolog of NCBI NO: 1362108 NR Description: histone H3 homolog - common tobacco
  misc_feature (26)..(161): Homolog of NCBI NO: 166384 NR Description: histone H3 (H3-1.1)
  misc_feature (27)..(161): Homolog of NCBI NO: 70753 NR Description: histone H3 - garden pea (tentative sequence)
  misc_feature (27)..(161): Homolog of NCBI NO: 122083 NR Description: Histone H3 >gi|70751|pir||HSEAH3 histone H3 -
  misc_feature (22)..(161): Homolog of NCBI NO: 37546835 NR Description: similar to histone protein Hist2h3c1 [Homo
NIFFFFIKSHKSSTLNHKSQSFGYQMARTKQTARKSTGGKAPRKQLATKAARKSAPATGGVKKPHRFRPGTVALREIRKYQKSTELLIRKLPFQRLVREIAQDFKTDLRFQSSAVAALQEAAEAYLVGLFEDTNLCAIHAKRVTIMPKDIQLARRIRGERA

SEQ ID NO: 107937 - protein, 136 aa, Arabidopsis thaliana; identical to SEQ ID NO: 8709
  peptide (1)..(136): Ceres Seq. ID no. 13652353
  misc_feature (17)..(135): Pfam Name: Core histone H2A/H2B/H3/H4 Pfam Description: Core histone H2A/H2B/H3/H4
  misc_feature (1)..(124): Homolog of NCBI NO: 25404986 NR Description: protein F10A5.19 [imported] - Arabidopsis >gi|9369379|gb|AAF87128.1|AC006434_24 F10A5.19 [Arabidopsis
  misc_feature (1)..(96): Homolog of NCBI NO: 34876364 NR Description: similar to CG31613-PA [Rattus norvegicus]
  misc_feature (1)..(134): Homolog of NCBI NO: 37550346 NR Description: similar to histone (15.4 kD) (his-72) [Homo
  misc_feature (1)..(136): Homolog of NCBI NO: 15232146 NR Description: histone H3 [Arabidopsis thaliana] histone H3 [Arabidopsis thaliana] >gi|18390992|ref|NP_563838.1|
  misc_feature (1)..(136): Homolog of NCBI NO: 122087 NR Description: Histone H3 >gi|81849|pir||S04520 histone H3
  misc_feature (1)..(136): Homolog of NCBI NO: 1362108 NR Description: histone H3 homolog - common tobacco
  misc_feature (1)..(136): Homolog of NCBI NO: 166384 NR Description: histone H3 (H3-1.1)
  misc_feature (2)..(136): Homolog of NCBI NO: 70753 NR Description: histone H3 - garden pea (tentative sequence)
  misc_feature (2)..(136): Homolog of NCBI NO: 122083 NR Description: Histone H3 >gi|70751|pir||HSEAH3 histone H3 -
  misc_feature (1)..(136): Homolog of NCBI NO: 37546835 NR Description: similar to histone protein Hist2h3c1 [Homo

SEQ ID NO: 107938 - DNA, 1121 bp, Arabidopsis thaliana
  misc_feature (1)..(1121): Ceres Seq. ID no. 13652380
  misc_feature: MA Experiment ID: 20000173 Result: Down-regulated in Transcription
  misc_feature: MA Experiment 20000173 PARAMETER Experiment Name: At_42deg_Heat_P Parameter: Age (day) Value: 14
  misc_feature: MA Experiment 20000173 PARAMETER Experiment Name: At_42deg_Heat_P Parameter: Organism Value: A. thaliana
  misc_feature: MA Experiment 20000173 PARAMETER Experiment Name: At_42deg_Heat_P Parameter: Plant Line Value: WS
  misc_feature: MA Experiment 20000173 PARAMETER Experiment Name: At_42deg_Heat_P Parameter: Temperature (deg C) Value: 42 vs. 22
  misc_feature: MA Experiment 20000173 PARAMETER Experiment Name: At_42deg_Heat_P Parameter: Timepoint (hr) Value: 6
  misc_feature: MA Experiment 20000173 PARAMETER Experiment Name: At_42deg_Heat_P Parameter: Tissue Value: Aerial
  misc_feature: MA Experiment ID: 20000184 Result: Down-regulated in Transcription
  misc_feature: MA Experiment 20000184 PARAMETER Experiment Name: At_Shoots__P Parameter: Age (day) Value: 7
  misc_feature: MA Experiment 20000184 PARAMETER Experiment Name: At_Shoots__P Parameter: Tissue Value: Shoots vs. Whole Plant
  misc_feature: MA Experiment ID: 20000235 Result: Up-regulated in Transcription
  misc_feature: MA Experiment 20000235 PARAMETER Experiment Name: At_Siliques_P Parameter: Age (day) Value: 21
  misc_feature: MA Experiment 20000235 PARAMETER Experiment Name: At_Siliques_P Parameter: Organism Value: A. thaliana
  misc_feature: MA Experiment 20000235 PARAMETER Experiment Name: At_Siliques_P Parameter: Plant Line Value: WS
  misc_feature: MA Experiment 20000235 PARAMETER Experiment Name: At_Siliques_P Parameter: Tissue Value: 5-10mm Siliques vs. Whole Plant
  misc_feature: MA Experiment ID: 20001451 Result: Down-regulated in Transcription
  misc_feature: MA Experiment 20001451 PARAMETER Experiment Name: At_Far-red-induction_P Parameter: Age (day) Value: 7
  misc_feature: MA Experiment 20001451 PARAMETER Experiment Name: At_Far-red-induction_P Parameter: Light Value: Far-red vs. White
  misc_feature: MA Experiment 20001451 PARAMETER Experiment Name: At_Far-red-induction_P Parameter: Organism Value: A. thaliana
  misc_feature: MA Experiment 20001451 PARAMETER Experiment Name: At_Far-red-induction_P Parameter: Plant Line Value: Columbia
  misc_feature: MA Experiment 20001451 PARAMETER Experiment Name: At_Far-red-induction_P Parameter: Timepoint (hr) Value: 24
  misc_feature: MA Experiment 20001451 PARAMETER Experiment Name: At_Far-red-induction_P Parameter: Tissue Value: Whole Plant
gtgtttgtttgttgttacagtttgtttgtttgtttatagcgggaactctcacccaaaagaaggatgagtatggagatggagttgtttgtcactccagagaagcagaggcaacatccttcagtgagcgttgagaaaactccagtgagaaggaaattgattgttgatgatgattctgaaattggatcagagaagaaagggcaatcaagaacttctggaggcgggcttcgtcaattcagtgttatggtttgtcagaagttggaagccaagaagataactacttacaaggaggttgcagacgaaattatttcagattttgccacaattaagcaaaacgcagagaagcctttgaatgaaaatgagtacaatgagaagaacataaggcggagagtctacgatgcgctcaatgtgttcatggcgttggatattattgcaagggataaaaaggaaatccggtggaaaggacttcctattacctgcaaaaaggatgtggaagaagtcaagatggatcgtaataaagttatgagcagtgtgcaaaagaaggctgcttttcttaaagagttgagagaaaaggtctcaagtcttgagagtcttatgtcgagaaatcaagagatggttgtgaagactcaaggcccagcagaaggatttaccttaccattcattctacttgagacaaaccctcacgcagtagtcgaaatcgagatttctgaagatatgcaacttgtacacctcgacttcaatagcacacctttctcggtccatgatgatgcttacattttgaaactgatgcaagaacagaagcaagaacagaacagagtatcttcttcttcatctacacatcaccaatctcaacatagctccgctcattcttcatccagttcttgcattgcttctggaacctcaggcccggtttgctggaactcgggatccattgatactcgctgaccgagcttctattcccaaattcttcaagaagaagaagtaatgatctaattggtatactaaaaaattatacatctggtttagtgttcaattgagagagactgtaaaatcaattcataggccaacaaatgtttgtttatccaattttcctttttattcgaacttgatgcgatatttcaacg

SEQ ID NO: 107939 - protein, 292 aa, Arabidopsis thaliana; identical to SEQ ID NO: 48076
  peptide (1)..(292): Ceres Seq. ID no. 13652381
  misc_feature (53)..(291): Pfam Name: Transcription factor E2F/dimerisation partner (TDP) Pfam Description: Transcription factor E2F/dimerisation partner
  misc_feature (1)..(292): Homolog of NCBI NO: 22326573 NR Description: DPA transcription factor [Arabidopsis thaliana] DPA transcription factor [Arabidopsis thaliana] DPA transcription factor [Arabidopsis thaliana]
  misc_feature (5)..(292): Homolog of NCBI NO: 11357273 NR Description: DP-2 transcription factor-like - Arabidopsis
  misc_feature (40)..(259): Homolog of NCBI NO: 21554147 NR Description: unknown [Arabidopsis thaliana]
  misc_feature (40)..(259): Homolog of NCBI NO: 30680032 NR Description: DPB transcription factor [Arabidopsis thaliana]
  misc_feature (40)..(241): Homolog of NCBI NO: 29367654 NR Description: DP TF [Oryza sativa (japonica cultivar-group)]
  misc_feature (40)..(248): Homolog of NCBI NO: 29371983 NR Description: E2F dimerization factor [Oryza sativa (japonica
  misc_feature (40)..(259): Homolog of NCBI NO: 11358893 NR Description: transcription factor-like protein - Arabidopsis
  misc_feature (27)..(239): Homolog of NCBI NO: 11877791 NR Description: DP protein [Triticum sp.]
  misc_feature (42)..(245): Homolog of NCBI NO: 29367575 NR Description: DP protein [Oryza sativa (japonica
  misc_feature (29)..(241): Homolog of NCBI NO: 5454112 NR Description: transcription factor Dp-2 (E2F dimerization

SEQ ID NO: 107940 - protein, 290 aa, Arabidopsis thaliana; identical to SEQ ID NO: 48077
  peptide (1)..(290): Ceres Seq. ID no. 13652382
  misc_feature (51)..(289): Pfam Name: Transcription factor E2F/dimerisation partner (TDP) Pfam Description: Transcription factor E2F/dimerisation partner
  misc_feature (1)..(290): Homolog of NCBI NO: 22326573 NR Description: DPA transcription factor [Arabidopsis thaliana] DPA transcription factor [Arabidopsis thaliana] DPA transcription factor [Arabidopsis thaliana]
  misc_feature (3)..(290): Homolog of NCBI NO: 11357273 NR Description: DP-2 transcription factor-like - Arabidopsis
  misc_feature (38)..(257): Homolog of NCBI NO: 21554147 NR Description: unknown [Arabidopsis thaliana]
  misc_feature (38)..(257): Homolog of NCBI NO: 30680032 NR Description: DPB transcription factor [Arabidopsis thaliana]
  misc_feature (38)..(239): Homolog of NCBI NO: 29367654 NR Description: DP TF [Oryza sativa (japonica cultivar-group)]
  misc_feature (38)..(246): Homolog of NCBI NO: 29371983 NR Description: E2F dimerization factor [Oryza sativa (japonica
  misc_feature (38)..(257): Homolog of NCBI NO: 11358893 NR Description: transcription factor-like protein - Arabidopsis
  misc_feature (25)..(237): Homolog of NCBI NO: 11877791 NR Description: DP protein [Triticum sp.]
  misc_feature (40)..(243): Homolog of NCBI NO: 29367575 NR Description: DP protein [Oryza sativa (japonica
  misc_feature (27)..(239): Homolog of NCBI NO: 5454112 NR Description: transcription factor Dp-2 (E2F dimerization

SEQ ID NO: 107941 - protein, 288 aa, Arabidopsis thaliana
  peptide (1)..(288): Ceres Seq. ID no. 13652383
  misc_feature (49)..(287): Pfam Name: Transcription factor E2F/dimerisation partner (TDP) Pfam Description: Transcription factor E2F/dimerisation partner
  misc_feature (1)..(288): Homolog of NCBI NO: 22326573 NR Description: DPA transcription factor [Arabidopsis thaliana] DPA transcription factor [Arabidopsis thaliana] DPA transcription factor [Arabidopsis thaliana]
  misc_feature (1)..(288): Homolog of NCBI NO: 11357273 NR Description: DP-2 transcription factor-like - Arabidopsis
  misc_feature (36)..(255): Homolog of NCBI NO: 21554147 NR Description: unknown [Arabidopsis thaliana]
  misc_feature (36)..(255): Homolog of NCBI NO: 30680032 NR Description: DPB transcription factor [Arabidopsis thaliana]
  misc_feature (36)..(237): Homolog of NCBI NO: 29367654 NR Description: DP TF [Oryza sativa (japonica cultivar-group)]
  misc_feature (36)..(244): Homolog of NCBI NO: 29371983 NR Description: E2F dimerization factor [Oryza sativa (japonica
  misc_feature (36)..(255): Homolog of NCBI NO: 11358893 NR Description: transcription factor-like protein - Arabidopsis
  misc_feature (23)..(235): Homolog of NCBI NO: 11877791 NR Description: DP protein [Triticum sp.]
  misc_feature (38)..(241): Homolog of NCBI NO: 29367575 NR Description: DP protein [Oryza sativa (japonica
  misc_feature (25)..(237): Homolog of NCBI NO: 5454112 NR Description: transcription factor Dp-2 (E2F dimerization
MELFVTPEKQRQHPSVSVEKTPVRRKLIVDDDSEIGSEKKGQSRTSGGGLRQFSVMVCQKLEAKKITTYKEVADEIISDFATIKQNAEKPLNENEYNEKNIRRRVYDALNVFMALDIIARDKKEIRWKGLPITCKKDVEEVKMDRNKVMSSVQKKAAFLKELREKVSSLESLMSRNQEMVVKTQGPAEGFTLPFILLETNPHAVVEIEISEDMQLVHLDFNSTPFSVHDDAYILKLMQEQKQEQNRVSSSSSTHHQSQHSSAHSSSSSCIASGTSGPVCWNSGSIDTR

SEQ ID NO: 107942 - DNA, 1729 bp, Arabidopsis thaliana
  misc_feature (1)..(1729): Ceres Seq. ID no. 13652440
  misc_feature: MA Experiment ID: 20000171 Result: Up-regulated in Transcription
  misc_feature: MA Experiment 20000171 PARAMETER Experiment Name: At_42deg_Heat_P Parameter: Age (day) Value: 14
  misc_feature: MA Experiment 20000171 PARAMETER Experiment Name: At_42deg_Heat_P Parameter: Organism Value: A. thaliana
  misc_feature: MA Experiment 20000171 PARAMETER Experiment Name: At_42deg_Heat_P Parameter: Plant Line Value: WS
  misc_feature: MA Experiment 20000171 PARAMETER Experiment Name: At_42deg_Heat_P Parameter: Temperature (deg C) Value: 42 vs. 22
  misc_feature: MA Experiment 20000171 PARAMETER Experiment Name: At_42deg_Heat_P Parameter: Timepoint (hr) Value: 1
  misc_feature: MA Experiment 20000171 PARAMETER Experiment Name: At_42deg_Heat_P Parameter: Tissue Value: Aerial
  misc_feature: MA Experiment ID: 20000234 Result: Up-regulated in Transcription
  misc_feature: MA Experiment 20000234 PARAMETER Experiment Name: At_Siliques_P Parameter: Age (day) Value: 21
  misc_feature: MA Experiment 20000234 PARAMETER Experiment Name: At_Siliques_P Parameter: Organism Value: A. thaliana
  misc_feature: MA Experiment 20000234 PARAMETER Experiment Name: At_Siliques_P Parameter: Plant Line Value: WS
  misc_feature: MA Experiment 20000234 PARAMETER Experiment Name: At_Siliques_P Parameter: Tissue Value: Less Than 5mm Siliques vs. Whole Plant
  misc_feature: MA Experiment ID: 20000235 Result: Up-regulated in Transcription
  misc_feature: MA Experiment 20000235 PARAMETER Experiment Name: At_Siliques_P Parameter: Age (day) Value: 21
  misc_feature: MA Experiment 20000235 PARAMETER Experiment Name: At_Siliques_P Parameter: Organism Value: A. thaliana
  misc_feature: MA Experiment 20000235 PARAMETER Experiment Name: At_Siliques_P Parameter: Plant Line Value: WS
  misc_feature: MA Experiment 20000235 PARAMETER Experiment Name: At_Siliques_P Parameter: Tissue Value: 5-10mm Siliques vs. Whole Plant
  misc_feature: MA Experiment ID: 20000264 Result: Up-regulated in Transcription
  misc_feature: MA Experiment 20000264 PARAMETER Experiment Name: At_Open_Flower_P Parameter: Age (day) Value: 21
  misc_feature: MA Experiment 20000264 PARAMETER Experiment Name: At_Open_Flower_P Parameter: Plant Line Value: WS
  misc_feature: MA Experiment 20000264 PARAMETER Experiment Name: At_Open_Flower_P Parameter: Tissue Value: Open Flower vs. Whole Plant
  misc_feature: MA Experiment ID: 20000265 Result: Up-regulated in Transcription
  misc_feature: MA Experiment 20000265 PARAMETER Experiment Name: At_Open_Flower_P Parameter: Age (day) Value: 21
  misc_feature: MA Experiment 20000265 PARAMETER Experiment Name: At_Open_Flower_P Parameter: Plant Line Value: WS
  misc_feature: MA Experiment 20000265 PARAMETER Experiment Name: At_Open_Flower_P Parameter: Tissue Value: Closed Flower vs. Whole Plant
  misc_feature: MA Experiment ID: 20000286 Result: Up-regulated in Transcription
  misc_feature: MA Experiment 20000286 PARAMETER Experiment Name: At_Open_Flower_P Parameter: Age (day) Value: 21
  misc_feature: MA Experiment 20000286 PARAMETER Experiment Name: At_Open_Flower_P Parameter: Plant Line Value: WS
  misc_feature: MA Experiment 20000286 PARAMETER Experiment Name: At_Open_Flower_P Parameter: Tissue Value: Half Open vs. Whole Plant
  misc_feature: MA Experiment ID: 20000495 Result: Up-regulated in Transcription
  misc_feature: MA Experiment 20000495 PARAMETER Experiment Name: At_Guard_Cells_P Parameter: Harvest Date Value: 8/2/2002
  misc_feature: MA Experiment 20000495 PARAMETER Experiment Name: At_Guard_Cells_P Parameter: Organism Value: A. thaliana
  misc_feature: MA Experiment 20000495 PARAMETER Experiment Name: At_Guard_Cells_P Parameter: Tissue Value: Guard Cells vs. Leaves
  misc_feature: MA Experiment ID: 20001560 Result: Up-regulated in Transcription
  misc_feature: MA Experiment 20001560 PARAMETER Experiment Name: At_Drought_Soil_Dry_P Parameter: Age (day) Value: 28
  misc_feature: MA Experiment 20001560 PARAMETER Experiment Name: At_Drought_Soil_Dry_P Parameter: Organism Value: A. thaliana
  misc_feature: MA Experiment 20001560 PARAMETER Experiment Name: At_Drought_Soil_Dry_P Parameter: Plant Line Value: WS
  misc_feature: MA Experiment 20001560 PARAMETER Experiment Name: At_Drought_Soil_Dry_P Parameter: Post Timepoint (hr) Value: None
  misc_feature: MA Experiment 20001560 PARAMETER Experiment Name: At_Drought_Soil_Dry_P Parameter: Post-Treatment Value: None
  misc_feature: MA Experiment 20001560 PARAMETER Experiment Name: At_Drought_Soil_Dry_P Parameter: Timepoint (day) Value: 14
  misc_feature: MA Experiment 20001560 PARAMETER Experiment Name: At_Drought_Soil_Dry_P Parameter: Treatment Value: Drought vs. No Drought
attcgacgattcctctcgacgttatcatatttcctctccaggagcgtgtttccagaggggatggattctgttcgacgcacttacaccattatgcgaggtcgtcacatagacaagcgtgttccttctaaagagtttctctctgctttggataaagctgaaactgcagtacgtcttcctactgggacgggaaaagactgcgggaatccttcctggaagcgatctctgcctcacgtgctcgttgcttctctgacttcgcttttattcggctatcatctcggggttgttaatgaaactctcgaaagcatatcaattgaccttggctttagtgggaacaccatagctgaaggtcttgtggttagcacctgcttaggcggcgcctttattgggtctctgttcagtgggttggtagctgatggtgttgggcgccgtagagctttccagttgagcgctttaccaatgattgttggagcttctgtgagtgcatcaactgagagtcttatgggcatgctcctgggaaggtttttggtcggaattgggatgggcataggtccttctgttacagctctctatgtcactgaggtgtcacctgcttatgtgagaggtacatatgggagttctacccaaatcgcaacatgtattggactcttaggttcgctgtttgctggaatcccggcaaaagataacttgggctggtggcgcatatgtttttggatatccacagtcccagctgcaatgcttgctgtcttcatggaactctgcgtggaaagtcctcagtggctttttaagaggggaagggcagctgaagctgaagctgtgtttgagaagctattgggagggtcgtacgtcaaagctgctatggcagagttagtgaagtcggataggggagatgacgccgattcagccaaattgtcggagttgctttttggacgcagttttagagttgtctgggataaatgctgtgttctatttctcatcaactgtcttcaagaaagctggtgtaccttcagcctctgcaaacatatgtgtaggagtttgcaacctcttaggatcaactgttgctgtggttttgatggataagctggggagaaaagtgttgcttattgggagttttgcgggcatggcagtatcgctgggtctccaagcaatagcatatacttcgcttccttcgccctttggaaccttgtttctctcggttggaggaatgctgctgtttgtgttgtcgtttgcaactggagcgggtcctgttccaagtcttctcctgtctgagatatgccctggtcgacttcgagcaactgcgttggctgtttgtcttgccgttcactgggttataaacttctttgtcgggctgctgtttctgagaatgctggagcaactaggttcggtgcttctaaatgcaatatttgggttcttctgtgtggtggcagtcatctttgtgcagaagaacgtggttgagactaaaggaaagagcctacaagagatagaaatcagtctgctctcttccacccagtgattgatctctttattctgagaattcgtattattcttctggctctctttttttccttggagagacacaagtaacgtgtacctaatatggaagtaggagtgagtagtaagtaggtaaacaacatgtaaggaaatggatattattcattcgagtatagccaacgtttcaactgattttgtaataaacataagaccaaacttcattcaacaatggtaggttctc

SEQ ID NO: 107943 - protein, 358 aa, Arabidopsis thaliana
  peptide (1)..(358): Ceres Seq. ID no. 13652441
  misc_feature (85)..(316): Pfam Name: Sugar (and other) transporter Pfam Description: Sugar (and other) transporter
  misc_feature (21)..(316): Homolog of NCBI NO: 30699453 NR Description: hexose transporter, putative [Arabidopsis >gi|30699455|ref|NP_178100.3| hexose transporter, putative
  misc_feature (85)..(316): Homolog of NCBI NO: 25308946 NR Description: probable sugar transporter, 77409-81599 - Arabidopsis thaliana >gi|12324590|gb|AAG52251.1|AC011717_19
  misc_feature (85)..(316): Homolog of NCBI NO: 7715596 NR Description: F20B17.24 [Arabidopsis thaliana]
  misc_feature (21)..(358): Homolog of NCBI NO: 30793849 NR Description: putative hexose transporter protein [Arabidopsis >gi|30794114|gb|AAP40499.1| putative hexose transporter protein
  misc_feature (153)..(316): Homolog of NCBI NO: 19347894 NR Description: putative hexose transporter protein [Arabidopsis
  misc_feature (38)..(316): Homolog of NCBI NO: 27261731 NR Description: sugar transporter [Citrus unshiu]
  misc_feature (38)..(316): Homolog of NCBI NO: 15220399 NR Description: hexose transporter, putative [Arabidopsis >gi|30697486|ref|NP_849855.1| hexose transporter, putative
  misc_feature (21)..(117): Homolog of NCBI NO: 25308946 NR Description: probable sugar transporter, 77409-81599 - Arabidopsis thaliana >gi|12324590|gb|AAG52251.1|AC011717_19
  misc_feature (21)..(117): Homolog of NCBI NO: 7715596 NR Description: F20B17.24 [Arabidopsis thaliana]
  misc_feature (75)..(328): Homolog of NCBI NO: 8347246 NR Description: hexose transporter [Solanum tuberosum]
IRRFLSTLSYFLSRSVFPEGMDSVRRTYTIMRGRHIDKRVPSKEFLSALDKAETAVRLPTGTGKDCGNPSWKRSLPHVLVASLTSLLFGYHLGVVNETLESISIDLGFSGNTIAEGLVVSTCLGGAFIGSLFSGLVADGVGRRRAFQLSALPMIVGASVSASTESLMGMLLGRFLVGIGMGIGPSVTALYVTEVSPAYVRGTYGSSTQIATCIGLLGSLFAGIPAKDNLGWWRICFWISTVPAAMLAVFMELCVESPQWLFKRGRAAEAEAVFEKLLGGSYVKAAMAELVKSDRGDDADSAKLSELLFGRSFRVVWDKCCVLFLINCLQESWCTFSLCKHMCRSLQPLRINCCCGFDG

SEQ ID NO: 107944 - protein, 338 aa, Arabidopsis thaliana
  peptide (1)..(338): Ceres Seq. ID no. 13652442
  misc_feature (65)..(296): Pfam Name: Sugar (and other) transporter Pfam Description: Sugar (and other) transporter
  misc_feature (1)..(296): Homolog of NCBI NO: 30699453 NR Description: hexose transporter, putative [Arabidopsis >gi|30699455|ref|NP_178100.3| hexose transporter, putative
  misc_feature (65)..(296): Homolog of NCBI NO: 25308946 NR Description: probable sugar transporter, 77409-81599 - Arabidopsis thaliana >gi|12324590|gb|AAG52251.1|AC011717_19
  misc_feature (65)..(296): Homolog of NCBI NO: 7715596 NR Description: F20B17.24 [Arabidopsis thaliana]
  misc_feature (1)..(338): Homolog of NCBI NO: 30793849 NR Description: putative hexose transporter protein [Arabidopsis >gi|30794114|gb|AAP40499.1| putative hexose transporter protein
  misc_feature (133)..(296): Homolog of NCBI NO: 19347894 NR Description: putative hexose transporter protein [Arabidopsis
  misc_feature (18)..(296): Homolog of NCBI NO: 27261731 NR Description: sugar transporter [Citrus unshiu]
  misc_feature (18)..(296): Homolog of NCBI NO: 15220399 NR Description: hexose transporter, putative [Arabidopsis >gi|30697486|ref|NP_849855.1| hexose transporter, putative
  misc_feature (1)..(97): Homolog of NCBI NO: 25308946 NR Description: probable sugar transporter, 77409-81599 - Arabidopsis thaliana >gi|12324590|gb|AAG52251.1|AC011717_19
  misc_feature (1)..(97): Homolog of NCBI NO: 7715596 NR Description: F20B17.24 [Arabidopsis thaliana]
  misc_feature (55)..(308): Homolog of NCBI NO: 8347246 NR Description: hexose transporter [Solanum tuberosum]
MDSVRRTYTIMRGRHIDKRVPSKEFLSALDKAETAVRLPTGTGKDCGNPSWKRSLPHVLVASLTSLLFGYHLGVVNETLESISIDLGFSGNTIAEGLVVSTCLGGAFIGSLFSGLVADGVGRRRAFQLSALPMIVGASVSASTESLMGMLLGRFLVGIGMGIGPSVTALYVTEVSPAYVRGTYGSSTQIATCIGLLGSLFAGIPAKDNLGWWRICFWISTVPAAMLAVFMELCVESPQWLFKRGRAAEAEAVFEKLLGGSYVKAAMAELVKSDRGDDADSAKLSELLFGRSFRVVWDKCCVLFLINCLQESWCTFSLCKHMCRSLQPLRINCCCGFDG

SEQ ID NO: 107945 - protein, 328 aa, Arabidopsis thaliana
  peptide (1)..(328): Ceres Seq. ID no. 13652443
  misc_feature (55)..(286): Pfam Name: Sugar (and other) transporter Pfam Description: Sugar (and other) transporter
  misc_feature (1)..(286): Homolog of NCBI NO: 30699453 NR Description: hexose transporter, putative [Arabidopsis >gi|30699455|ref|NP_178100.3| hexose transporter, putative
  misc_feature (55)..(286): Homolog of NCBI NO: 25308946 NR Description: probable sugar transporter, 77409-81599 - Arabidopsis thaliana >gi|12324590|gb|AAG52251.1|AC011717_19
  misc_feature (55)..(286): Homolog of NCBI NO: 7715596 NR Description: F20B17.24 [Arabidopsis thaliana]
  misc_feature (1)..(328): Homolog of NCBI NO: 30793849 NR Description: putative hexose transporter protein [Arabidopsis >gi|30794114|gb|AAP40499.1| putative hexose transporter protein
  misc_feature (123)..(286): Homolog of NCBI NO: 19347894 NR Description: putative hexose transporter protein [Arabidopsis
  misc_feature (8)..(286): Homolog of NCBI NO: 27261731 NR Description: sugar transporter [Citrus unshiu]
  misc_feature (8)..(286): Homolog of NCBI NO: 15220399 NR Description: hexose transporter, putative [Arabidopsis >gi|30697486|ref|NP_849855.1| hexose transporter, putative
  misc_feature (1)..(87): Homolog of NCBI NO: 25308946 NR Description: probable sugar transporter, 77409-81599 - Arabidopsis thaliana >gi|12324590|gb|AAG52251.1|AC011717_19
  misc_feature (1)..(87): Homolog of NCBI NO: 7715596 NR Description: F20B17.24 [Arabidopsis thaliana]
  misc_feature (45)..(298): Homolog of NCBI NO: 8347246 NR Description: hexose transporter [Solanum tuberosum]
MRGRHIDKRVPSKEFLSALDKAETAVRLPTGTGKDCGNPSWKRSLPHVLVASLTSLLFGYHLGVVNETLESISIDLGFSGNTIAEGLVVSTCLGGAFIGSLFSGLVADGVGRRRAFQLSALPMIVGASVSASTESLMGMLLGRFLVGIGMGIGPSVTALYVTEVSPAYVRGTYGSSTQIATCIGLLGSLFAGIPAKDNLGWWRICFWISTVPAAMLAVFMELCVESPQWLFKRGRAAEAEAVFEKLLGGSYVKAAMAELVKSDRGDDADSAKLSELLFGRSFRVVWDKCCVLFLINCLQESWCTFSLCKHMCRSLQPLRINCCCGFDG

SEQ ID NO: 107946 - DNA, 1277 bp, Arabidopsis thaliana
  misc_feature (1)..(1277): Ceres Seq. ID no. 13652448
  misc_feature: MA Experiment ID: 20000235 Result: Up-regulated in Transcription
  misc_feature: MA Experiment 20000235 PARAMETER Experiment Name: At_Siliques_P Parameter: Age (day) Value: 21
  misc_feature: MA Experiment 20000235 PARAMETER Experiment Name: At_Siliques_P Parameter: Organism Value: A. thaliana
  misc_feature: MA Experiment 20000235 PARAMETER Experiment Name: At_Siliques_P Parameter: Plant Line Value: WS
  misc_feature: MA Experiment 20000235 PARAMETER Experiment Name: At_Siliques_P Parameter: Tissue Value: 5-10mm Siliques vs. Whole Plant
ttggttacagagaagaagaagaaggagaaatgtcagacgacgacgagagaggcgaagagtacctcttcaagattgttatcatcggtgattccgccgtcggcaaatccaatctcctcactcgctacgcccgtaacgagttcaatcccaattccaaagccactatcggcgtcgagtttcagactcagagcatgctcatcgacggcaaagaggtcaaagctcagatttgggataccgccggtcaggaacgcttccgcgccgttacatctgcttattaccgtggcgccgttggagccctcgtcgtctacgatatcactcgtagctccactttcgaaaacgtcggtcgctggctcgatgagctcaacagtatgtgtttcgatctccgatttttgagtgaatttattcaatttgaagtgagatctgtaaatctgagttttgattttgaatagagtagagattggatttggattaggattgaatcatagcgatagtgatgctgctggttagaatttttagatctgaagatttatgatgacttcttaagactttgattcaaagtcaagtcaaatttatctacttctttaggtttatgattatcatgaaactgaatgatgaagatatgcaatgattagttgattcatgtttgcatctttactctattgagcttgaaattgtgataggttgagttagagttagtttgacagtaatgatgaatctttggtgcagctcattctgatacaacagtagcaaaaatgcttattgggaacaaatgtgatctcgagagcataagagcggtgagtgttgaggaaggcaagagtcttgctgagtctgaaggtttgtttttcatggagacctctgcgttggactcgaccaatgtaaagacggctttcgagatggttattcgggagatctatagcaacattagtcgaaagcaattgaactctgattcttacaaagaggagctgactgtgaatcgtgttagcttggttaagaacgagaacgaagggacaaagacattctcttgctgttcgaggtaacatctttgtaacggtttctctttgtcctgaggattggtttcgggttgaattgtgttcctgataaacttatagaaaggcagagatatattcttatagttctcagttaaagtaaaagaagaagagagaaagatgttttgagtttctttgttacgcatacagaaaaagtttggttagtgtataagttatgttctcatttgtaacttttgtaaacttatgattgttaaatcaattttgatattttcc

SEQ ID NO: 107947 - protein, 147 aa, Arabidopsis thaliana
  peptide (1)..(147): Ceres Seq. ID no. 13652449
  misc_feature (23)..(121): Pfam Name: Ras family Pfam Description: Ras family
  misc_feature (10)..(121): Homolog of NCBI NO: 15224226 NR Description: Ras-related GTP-binding protein (ARA-4)
  misc_feature (10)..(119): Homolog of NCBI NO: 18390575 NR Description: RAS-related GTP-binding protein (ARA-1)
  misc_feature (10)..(119): Homolog of NCBI NO: 29893534 NR Description: putative RAS-related protein ARA-1 [Arabidopsis
  misc_feature (10)..(121): Homolog of NCBI NO: 15225121 NR Description: GTP-binding protein, putative [Arabidopsis
  misc_feature (10)..(119): Homolog of NCBI NO: 17380746 NR Description: putative RAS-related protein ARA-1 [Arabidopsis
  misc_feature (10)..(121): Homolog of NCBI NO: 21553627 NR Description: putative RAS superfamily GTP-binding protein
  misc_feature (10)..(121): Homolog of NCBI NO: 1076457 NR Description: GTP-binding protein bra - rape
  misc_feature (11)..(123): Homolog of NCBI NO: 1370154 NR Description: RAB11G [Lotus japonicus]
GYREEEEGEMSDDDERGEEYLFKIVIIGDSAVGKSNLLTRYARNEFNPNSKATIGVEFQTQSMLIDGKEVKAQIWDTAGQERFRAVTSAYYRGAVGALVVYDITRSSTFENVGRWLDELNSMCFDLRFLSEFIQFEVRSVNLSFDFE

SEQ ID NO: 107948 - protein, 138 aa, Arabidopsis thaliana
  peptide (1)..(138): Ceres Seq. ID no. 13652450
  misc_feature (14)..(112): Pfam Name: Ras family Pfam Description: Ras family
  misc_feature (1)..(112): Homolog of NCBI NO: 15224226 NR Description: Ras-related GTP-binding protein (ARA-4)
  misc_feature (1)..(110): Homolog of NCBI NO: 18390575 NR Description: RAS-related GTP-binding protein (ARA-1)
  misc_feature (1)..(110): Homolog of NCBI NO: 29893534 NR Description: putative RAS-related protein ARA-1 [Arabidopsis
  misc_feature (1)..(112): Homolog of NCBI NO: 15225121 NR Description: GTP-binding protein, putative [Arabidopsis
  misc_feature (1)..(110): Homolog of NCBI NO: 17380746 NR Description: putative RAS-related protein ARA-1 [Arabidopsis
  misc_feature (1)..(112): Homolog of NCBI NO: 21553627 NR Description: putative RAS superfamily GTP-binding protein
  misc_feature (1)..(112): Homolog of NCBI NO: 1076457 NR Description: GTP-binding protein bra - rape
  misc_feature (2)..(114): Homolog of NCBI NO: 1370154 NR Description: RAB11G [Lotus japonicus]
MSDDDERGEEYLFKIVIIGDSAVGKSNLLTRYARNEFNPNSKATIGVEFQTQSMLIDGKEVKAQIWDTAGQERFRAVTSAYYRGAVGALVVYDITRSSTFENVGRWLDELNSMCFDLRFLSEFIQFEVRSVNLSFDFE

SEQ ID NO: 107949 - protein, 129 aa, Arabidopsis thaliana
  peptide (1)..(129): Ceres Seq. ID no. 13652451
LVTEKKKKEKCQTTTREAKSTSSRLLSSVIPPSANPISSLATPVTSSIPIPKPLSASSFRLRACSSTAKRSKLRFGIPPVRNASAPLHLLITVAPLEPSSSTISLVAPLSKTSVAGSMSSTVCVSISDF

SEQ ID NO: 107950 - DNA, 1261 bp, Arabidopsis thaliana
  misc_feature (1)..(1261): Ceres Seq. ID no. 13652452
  misc_feature: MA Experiment ID: 108434 Result: Up-regulated in Transcription
  misc_feature: MA Experiment 108434 PARAMETER Experiment Name: At_Root_Tips_cDNA_P Parameter: Tissue Value: Root Tips
  misc_feature: MA Experiment ID: 108461 Result: Down-regulated in Transcription
  misc_feature: MA Experiment 108461 PARAMETER Experiment Name: At_Germinating_Seeds_cDNA_P Parameter: Age (day) Value: 1 vs. 0
  misc_feature: MA Experiment 108461 PARAMETER Experiment Name: At_Germinating_Seeds_cDNA_P Parameter: Tissue Value: Germinating Seeds
  misc_feature: MA Experiment ID: 108462 Result: Down-regulated in Transcription
  misc_feature: MA Experiment 108462 PARAMETER Experiment Name: At_Germinating_Seeds_cDNA_P Parameter: Age (day) Value: 2 vs. 0
  misc_feature: MA Experiment 108462 PARAMETER Experiment Name: At_Germinating_Seeds_cDNA_P Parameter: Tissue Value: Germinating Seeds
  misc_feature: MA Experiment ID: 108463 Result: Down-regulated in Transcription
  misc_feature: MA Experiment 108463 PARAMETER Experiment Name: At_Germinating_Seeds_cDNA_P Parameter: Age (day) Value: 3 vs. 0
  misc_feature: MA Experiment 108463 PARAMETER Experiment Name: At_Germinating_Seeds_cDNA_P Parameter: Tissue Value: Germinating Seeds
  misc_feature: MA Experiment ID: 108464 Result: Down-regulated in Transcription
  misc_feature: MA Experiment 108464 PARAMETER Experiment Name: At_Germinating_Seeds_cDNA_P Parameter: Age (day) Value: 4 vs. 0
  misc_feature: MA Experiment 108464 PARAMETER Experiment Name: At_Germinating_Seeds_cDNA_P Parameter: Tissue Value: Germinating Seeds
  misc_feature: MA Experiment ID: 108489 Result: Up-regulated in Transcription
  misc_feature: MA Experiment ID: 108572 Result: Down-regulated in Transcription
  misc_feature: MA Experiment 108572 PARAMETER Experiment Name: At_Drought_cDNA_P Parameter: Timepoint (hr) Value: 1
  misc_feature: MA Experiment 108572 PARAMETER Experiment Name: At_Drought_cDNA_P Parameter: Tissue Value: Aerial
  misc_feature: MA Experiment 108572 PARAMETER Experiment Name: At_Drought_cDNA_P Parameter: Treatment Value: Drought vs. No Drought
  misc_feature: MA Experiment ID: 108573 Result: Down-regulated in Transcription
  misc_feature: MA Experiment 108573 PARAMETER Experiment Name: At_Drought_cDNA_P Parameter: Timepoint (hr) Value: 6
  misc_feature: MA Experiment 108573 PARAMETER Experiment Name: At_Drought_cDNA_P Parameter: Tissue Value: Aerial
  misc_feature: MA Experiment 108573 PARAMETER Experiment Name: At_Drought_cDNA_P Parameter: Treatment Value: Drought vs. No Drought
  misc_feature: MA Experiment ID: 20000179 Result: Down-regulated in Transcription
  misc_feature: MA Experiment 20000179 PARAMETER Experiment Name: At_Germinating_Seeds_P Parameter: Age (hr) Value: 6 vs. 0
  misc_feature: MA Experiment 20000179 PARAMETER Experiment Name: At_Germinating_Seeds_P Parameter: Tissue Value: Germinating Seeds
  misc_feature: MA Experiment ID: 20000180 Result: Down-regulated in Transcription
  misc_feature: MA Experiment 20000180 PARAMETER Experiment Name: At_Germinating_Seeds_P Parameter: Age (hr) Value: 24 vs. 0
  misc_feature: MA Experiment 20000180 PARAMETER Experiment Name: At_Germinating_Seeds_P Parameter: Tissue Value: Germinating Seeds
  misc_feature: MA Experiment ID: 20000794 Result: Down-regulated in Transcription
  misc_feature: MA Experiment 20000794 PARAMETER Experiment Name: At_Petals_P Parameter: Age (day) Value: 23-25 days
  misc_feature: MA Experiment 20000794 PARAMETER Experiment Name: At_Petals_P Parameter: Plant Line Value: WS
  misc_feature: MA Experiment 20000794 PARAMETER Experiment Name: At_Petals_P Parameter: Tissue Value: Petals vs. Whole plant
  misc_feature: MA Experiment ID: 20001458 Result: Up-regulated in Transcription
  misc_feature: MA Experiment 20001458 PARAMETER Experiment Name: At_50mM_NH4NO3_L-to-H_P Parameter: Age (day) Value: Undefined
  misc_feature: MA Experiment 20001458 PARAMETER Experiment Name: At_50mM_NH4NO3_L-to-H_P Parameter: Organism Value: Undefined
  misc_feature: MA Experiment 20001458 PARAMETER Experiment Name: At_50mM_NH4NO3_L-to-H_P Parameter: Plant Line Value: Undefined
  misc_feature: MA Experiment 20001458 PARAMETER Experiment Name: At_50mM_NH4NO3_L-to-H_P Parameter: Timepoint (hr) Value: 2
  misc_feature: MA Experiment 20001458 PARAMETER Experiment Name: At_50mM_NH4NO3_L-to-H_P Parameter: Tissue Value: Siliques
  misc_feature: MA Experiment 20001458 PARAMETER Experiment Name: At_50mM_NH4NO3_L-to-H_P Parameter: Treatment Value: 50mM NH4NO3 vs. 100mM Manitol
  misc_feature: MA Experiment ID: 20001557 Result: Up-regulated in Transcription
  misc_feature: MA Experiment 20001557 PARAMETER Experiment Name: At_Drought_Soil_Dry_P Parameter: Age (day) Value: 27
  misc_feature: MA Experiment 20001557 PARAMETER Experiment Name: At_Drought_Soil_Dry_P Parameter: Organism Value: A. thaliana
  misc_feature: MA Experiment 20001557 PARAMETER Experiment Name: At_Drought_Soil_Dry_P Parameter: Plant Line Value: WS
  misc_feature: MA Experiment 20001557 PARAMETER Experiment Name: At_Drought_Soil_Dry_P Parameter: Post Timepoint (hr) Value: 3
  misc_feature: MA Experiment 20001557 PARAMETER Experiment Name: At_Drought_Soil_Dry_P Parameter: Post-Treatment Value: Re-Water vs. No Drought
  misc_feature: MA Experiment 20001557 PARAMETER Experiment Name: At_Drought_Soil_Dry_P Parameter: Timepoint (day) Value: 13
  misc_feature: MA Experiment 20001557 PARAMETER Experiment Name: At_Drought_Soil_Dry_P Parameter: Treatment Value: Drought vs. No Drought
  misc_feature: MA Experiment ID: 20001558 Result: Up-regulated in Transcription
  misc_feature: MA Experiment 20001558 PARAMETER Experiment Name: At_Drought_Soil_Dry_P Parameter: Age (day) Value: 27
  misc_feature: MA Experiment 20001558 PARAMETER Experiment Name: At_Drought_Soil_Dry_P Parameter: Organism Value: A. thaliana
  misc_feature: MA Experiment 20001558 PARAMETER Experiment Name: At_Drought_Soil_Dry_P Parameter: Plant Line Value: WS
  misc_feature: MA Experiment 20001558 PARAMETER Experiment Name: At_Drought_Soil_Dry_P Parameter: Post Timepoint (hr) Value: 6
  misc_feature: MA Experiment 20001558 PARAMETER Experiment Name: At_Drought_Soil_Dry_P Parameter: Post-Treatment Value: Re-Water vs. No Drought
  misc_feature: MA Experiment 20001558 PARAMETER Experiment Name: At_Drought_Soil_Dry_P Parameter: Timepoint (day) Value: 13
  misc_feature: MA Experiment 20001558 PARAMETER Experiment Name: At_Drought_Soil_Dry_P Parameter: Treatment Value: Drought vs. No Drought
  misc_feature: MA Experiment ID: 20001560 Result: Up-regulated in Transcription
  misc_feature: MA Experiment 20001560 PARAMETER Experiment Name: At_Drought_Soil_Dry_P Parameter: Age (day) Value: 28
  misc_feature: MA Experiment 20001560 PARAMETER Experiment Name: At_Drought_Soil_Dry_P Parameter: Organism Value: A. thaliana
  misc_feature: MA Experiment 20001560 PARAMETER Experiment Name: At_Drought_Soil_Dry_P Parameter: Plant Line Value: WS
  misc_feature: MA Experiment 20001560 PARAMETER Experiment Name: At_Drought_Soil_Dry_P Parameter: Post Timepoint (hr) Value: None
  misc_feature: MA Experiment 20001560 PARAMETER Experiment Name: At_Drought_Soil_Dry_P Parameter: Post-Treatment Value: None
  misc_feature: MA Experiment 20001560 PARAMETER Experiment Name: At_Drought_Soil_Dry_P Parameter: Timepoint (day) Value: 14
  misc_feature: MA Experiment 20001560 PARAMETER Experiment Name: At_Drought_Soil_Dry_P Parameter: Treatment Value: Drought vs. No Drought
  misc_feature: MA Experiment ID: 20001757 Result: Up-regulated in Transcription
  misc_feature: MA Experiment 20001757 PARAMETER Experiment Name: At_50mM_NH4NO3_L-to-H_P Parameter: Timepoint (hr) Value: 6
  misc_feature: MA Experiment 20001757 PARAMETER Experiment Name: At_50mM_NH4NO3_L-to-H_P Parameter: Tissue Value: Leaf
  misc_feature: MA Experiment 20001757 PARAMETER Experiment Name: At_50mM_NH4NO3_L-to-H_P Parameter: Treatment Value: 50mM NH4NO3 vs 100mM Mannitol
  misc_feature: Pfam Name: RRM_1 Pfam Description: RNA recognition motif. (a.k.a. RRM, RBD, or RNP domain)
acatttcactgctcactactctcactgtaatcccttagatcttcttttcaaatttcaatggcgtccggtgatgttgagtatcggtgcttcgttggaggtctagcatgggccactgatgacagagctcttgagactgccttcgctcaatacggcgacgttattgattccaagatcattaacgatcgtgagactggaagatcaaggggattcggattcgtcaccttcaaggatgagaaagccatgaaggatgcgattgagggaatgaacggacaagatctcgatggccgtagcatcactgttaacgaggctcagtcacgaggaagcggtggcggcggaggccaccgtggaggtggtgtcggtggataccgcagcggcggtggtggaggttactccggtggaggtggtagctacggaggtggcggcggtagacgccatcagatcccaatcaaagatttaggtaataatttaccatagaagaaatggcagagtctactcagatggaagttgagacagcaacagaaggaactgtgccattgccgcctaaaccaaccttcaagcctttgaaagctcatgaaatgtctgatggtaaagtccagttcaggaaaatagctgtaccaccaaaccgatactcgcctctcaagaaagcatggttggatatctacacacccatttacgatcagatgaaggttgacataaggatgaatctcaaagcccgcaaagtcgagcttaaaacccgagctgacactcccgacatcagtaatcttcagaagtctgcggattttgtacacgctttcatgcttggttttgatatccctgatgctatctctcttttgagaatggacgagctttatgttgagtcttttgagatcaaggatgtgaagactcttaaaggtgagcatttgtctagagccattggtaggttgtctggtaaaggagggaagacaaagtttgctattgagaactcgaccaagacgaggattgtgattgcagacactaggattcatattttgggagctttctctaatattaaagtcgcaaggagttcactttgcagtcttattatgggatctcctgctgggaaagtttactctaagctcagatctgtctctgctagattgaacgaatagttttgaatggcgaaattttgaaacattaacttgcttttgttcggagtgatctttgtaatgaaattttgaagaaacaaatgttatggtgttctttataaaatttgttatgggatgaaaattgttatttgaatgct

SEQ ID NO: 107951 - protein, 215 aa, Arabidopsis thaliana; identical to SEQ ID NO: 98573
  peptide (1)..(215): Ceres Seq. ID no. 13652453
  misc_feature: Pfam Name: RRM_1 Pfam Description: RNA recognition motif. (a.k.a. RRM, RBD, or RNP domain)
  misc_feature (1)..(215): Homolog of NCBI NO: 18399930 NR Description: expressed protein [Arabidopsis thaliana] gb|AAF50915.1~gene_id:MDC11.5~similar to unknown protein
  misc_feature (1)..(215): Homolog of NCBI NO: 34908792 NR Description: P0415A04.33 [Oryza sativa (japonica
  misc_feature (22)..(215): Homolog of NCBI NO: 34902190 NR Description: Hypothetical protein [Oryza sativa (japonica group)] >gi|27476101|gb|AAO17032.1| Hypothetical protein [Oryza
  misc_feature (3)..(215): Homolog of NCBI NO: 20129085 NR Description: CG11738-PA [Drosophila melanogaster]
  misc_feature (1)..(215): Homolog of NCBI NO: 34147041 NR Description: putatative 28 kDa protein [Bos taurus]
  misc_feature (1)..(215): Homolog of NCBI NO: 33989460 NR Description: Unknown (protein for MGC:65782) [Danio rerio]
  misc_feature (2)..(215): Homolog of NCBI NO: 33669478 NR Description: partner of Nob1 [Oryzias latipes]
  misc_feature (13)..(212): Homolog of NCBI NO: 40018534 NR Description: putatative 28 kDa protein; partner of Nob1 norvegicus] >gi|33669474|gb|AAQ24834.1| partner of Nob1 [Rattus
  misc_feature (13)..(212): Homolog of NCBI NO: 13384846 NR Description: RIKEN cDNA 1810003N24 [Mus musculus] unnamed protein product [Mus musculus] unnamed protein product [Mus musculus]
  misc_feature (13)..(212): Homolog of NCBI NO: 10047140 NR Description: putatative 28 kDa protein [Homo sapiens]

SEQ ID NO: 107952 - protein, 209 aa, Arabidopsis thaliana; identical to SEQ ID NO: 98574
  peptide (1)..(209): Ceres Seq. ID no. 13652454
  misc_feature: Pfam Name: RRM_1 Pfam Description: RNA recognition motif. (a.k.a. RRM, RBD, or RNP domain)
  misc_feature (1)..(209): Homolog of NCBI NO: 18399930 NR Description: expressed protein [Arabidopsis thaliana] gb|AAF50915.1~gene_id:MDC11.5~similar to unknown protein
  misc_feature (1)..(209): Homolog of NCBI NO: 34908792 NR Description: P0415A04.33 [Oryza sativa (japonica
  misc_feature (16)..(209): Homolog of NCBI NO: 34902190 NR Description: Hypothetical protein [Oryza sativa (japonica group)] >gi|27476101|gb|AAO17032.1| Hypothetical protein [Oryza
  misc_feature (1)..(209): Homolog of NCBI NO: 20129085 NR Description: CG11738-PA [Drosophila melanogaster]
  misc_feature (1)..(209): Homolog of NCBI NO: 34147041 NR Description: putatative 28 kDa protein [Bos taurus]
  misc_feature (1)..(209): Homolog of NCBI NO: 33989460 NR Description: Unknown (protein for MGC:65782) [Danio rerio]
  misc_feature (1)..(209): Homolog of NCBI NO: 33669478 NR Description: partner of Nob1 [Oryzias latipes]
  misc_feature (7)..(206): Homolog of NCBI NO: 40018534 NR Description: putatative 28 kDa protein; partner of Nob1 norvegicus] >gi|33669474|gb|AAQ24834.1| partner of Nob1 [Rattus
  misc_feature (7)..(206): Homolog of NCBI NO: 13384846 NR Description: RIKEN cDNA 1810003N24 [Mus musculus] unnamed protein product [Mus musculus] unnamed protein product [Mus musculus]
  misc_feature (7)..(206): Homolog of NCBI NO: 10047140 NR Description: putatative 28 kDa protein [Homo sapiens]

SEQ ID NO: 107953 - protein, 183 aa, Arabidopsis thaliana; identical to SEQ ID NO: 98575
  peptide (1)..(183): Ceres Seq. ID no. 13652455
  misc_feature: Pfam Name: RRM_1 Pfam Description: RNA recognition motif. (a.k.a. RRM, RBD, or RNP domain)
  misc_feature (1)..(183): Homolog of NCBI NO: 18399930 NR Description: expressed protein [Arabidopsis thaliana] gb|AAF50915.1~gene_id:MDC11.5~similar to unknown protein
  misc_feature (1)..(183): Homolog of NCBI NO: 34908792 NR Description: P0415A04.33 [Oryza sativa (japonica
  misc_feature (1)..(183): Homolog of NCBI NO: 34902190 NR Description: Hypothetical protein [Oryza sativa (japonica group)] >gi|27476101|gb|AAO17032.1| Hypothetical protein [Oryza
  misc_feature (1)..(183): Homolog of NCBI NO: 20129085 NR Description: CG11738-PA [Drosophila melanogaster]
  misc_feature (1)..(183): Homolog of NCBI NO: 34147041 NR Description: putatative 28 kDa protein [Bos taurus]
  misc_feature (1)..(183): Homolog of NCBI NO: 33989460 NR Description: Unknown (protein for MGC:65782) [Danio rerio]
  misc_feature (1)..(183): Homolog of NCBI NO: 33669478 NR Description: partner of Nob1 [Oryzias latipes]
  misc_feature (1)..(180): Homolog of NCBI NO: 40018534 NR Description: putatative 28 kDa protein; partner of Nob1 norvegicus] >gi|33669474|gb|AAQ24834.1| partner of Nob1 [Rattus
  misc_feature (1)..(180): Homolog of NCBI NO: 13384846 NR Description: RIKEN cDNA 1810003N24 [Mus musculus] unnamed protein product [Mus musculus] unnamed protein product [Mus musculus]
  misc_feature (1)..(180): Homolog of NCBI NO: 10047140 NR Description: putatative 28 kDa protein [Homo sapiens]

SEQ ID NO: 107954 - DNA, 1596 bp, Arabidopsis thaliana
  misc_feature (1)..(1596): Ceres Seq. ID no. 13652484
  misc_feature: MA Experiment ID: 20000173 Result: Down-regulated in Transcription
  misc_feature: MA Experiment 20000173 PARAMETER Experiment Name: At_42deg_Heat_P Parameter: Age (day) Value: 14
  misc_feature: MA Experiment 20000173 PARAMETER Experiment Name: At_42deg_Heat_P Parameter: Organism Value: A. thaliana
  misc_feature: MA Experiment 20000173 PARAMETER Experiment Name: At_42deg_Heat_P Parameter: Plant Line Value: WS
  misc_feature: MA Experiment 20000173 PARAMETER Experiment Name: At_42deg_Heat_P Parameter: Temperature (deg C) Value: 42 vs. 22
  misc_feature: MA Experiment 20000173 PARAMETER Experiment Name: At_42deg_Heat_P Parameter: Timepoint (hr) Value: 6
  misc_feature: MA Experiment 20000173 PARAMETER Experiment Name: At_42deg_Heat_P Parameter: Tissue Value: Aerial
  misc_feature: MA Experiment ID: 20000180 Result: Down-regulated in Transcription
  misc_feature: MA Experiment 20000180 PARAMETER Experiment Name: At_Germinating_Seeds_P Parameter: Age (hr) Value: 24 vs. 0
  misc_feature: MA Experiment 20000180 PARAMETER Experiment Name: At_Germinating_Seeds_P Parameter: Tissue Value: Germinating Seeds
  misc_feature: MA Experiment ID: 20000184 Result: Down-regulated in Transcription
  misc_feature: MA Experiment 20000184 PARAMETER Experiment Name: At_Shoots__P Parameter: Age (day) Value: 7
  misc_feature: MA Experiment 20000184 PARAMETER Experiment Name: At_Shoots__P Parameter: Tissue Value: Shoots vs. Whole Plant
  misc_feature: MA Experiment ID: 20000185 Result: Down-regulated in Transcription
  misc_feature: MA Experiment 20000185 PARAMETER Experiment Name: At_Roots__P Parameter: Age (day) Value: 7 vs. 21
  misc_feature: MA Experiment 20000185 PARAMETER Experiment Name: At_Roots__P Parameter: Organism Value: A. thaliana
  misc_feature: MA Experiment 20000185 PARAMETER Experiment Name: At_Roots__P Parameter: Tissue Value: Roots vs. Whole Plant
  misc_feature: MA Experiment ID: 20000213 Result: Up-regulated in Transcription
  misc_feature: MA Experiment 20000213 PARAMETER Experiment Name: At_4deg_Cold_P Parameter: Timepoint (hr) Value: 2
  misc_feature: MA Experiment ID: 20000437 Result: Up-regulated in Transcription
  misc_feature: MA Experiment 20000437 PARAMETER Experiment Name: At_Drought_P Parameter: Age (day) Value: 8
  misc_feature: MA Experiment 20000437 PARAMETER Experiment Name: At_Drought_P Parameter: Organism Value: A. thaliana
  misc_feature: MA Experiment 20000437 PARAMETER Experiment Name: At_Drought_P Parameter: Plant Line Value: WS
  misc_feature: MA Experiment 20000437 PARAMETER Experiment Name: At_Drought_P Parameter: Timepoint (hr) Value: 24
  misc_feature: MA Experiment 20000437 PARAMETER Experiment Name: At_Drought_P Parameter: Tissue Value: Whole Plant
  misc_feature: MA Experiment 20000437 PARAMETER Experiment Name: At_Drought_P Parameter: Treatment Value: Drought vs. No Drought
  misc_feature: MA Experiment ID: 20000438 Result: Down-regulated in Transcription
  misc_feature: MA Experiment 20000438 PARAMETER Experiment Name: At_Shoots__P Parameter: Age (day) Value: 14
  misc_feature: MA Experiment 20000438 PARAMETER Experiment Name: At_Shoots__P Parameter: Tissue Value: Shoots vs. Whole Plant
  misc_feature: MA Experiment ID: 20000495 Result: Up-regulated in Transcription
  misc_feature: MA Experiment 20000495 PARAMETER Experiment Name: At_Guard_Cells_P Parameter: Harvest Date Value: 8/2/2002
  misc_feature: MA Experiment 20000495 PARAMETER Experiment Name: At_Guard_Cells_P Parameter: Organism Value: A. thaliana
  misc_feature: MA Experiment 20000495 PARAMETER Experiment Name: At_Guard_Cells_P Parameter: Tissue Value: Guard Cells vs. Leaves
  misc_feature: MA Experiment ID: 20000794 Result: Up-regulated in Transcription
  misc_feature: MA Experiment 20000794 PARAMETER Experiment Name: At_Petals_P Parameter: Age (day) Value: 23-25 days
  misc_feature: MA Experiment 20000794 PARAMETER Experiment Name: At_Petals_P Parameter: Plant Line Value: WS
  misc_feature: MA Experiment 20000794 PARAMETER Experiment Name: At_Petals_P Parameter: Tissue Value: Petals vs. Whole plant
  misc_feature: MA Experiment ID: 20001247 Result: Down-regulated in Transcription
  misc_feature: MA Experiment 20001247 PARAMETER Experiment Name: At_Far-red-induction_P Parameter: Age (day) Value: 7
  misc_feature: MA Experiment 20001247 PARAMETER Experiment Name: At_Far-red-induction_P Parameter: Light Value: Far-red vs. White
  misc_feature: MA Experiment 20001247 PARAMETER Experiment Name: At_Far-red-induction_P Parameter: Organism Value: A. thaliana
  misc_feature: MA Experiment 20001247 PARAMETER Experiment Name: At_Far-red-induction_P Parameter: Plant Line Value: Columbia
  misc_feature: MA Experiment 20001247 PARAMETER Experiment Name: At_Far-red-induction_P Parameter: Timepoint (hr) Value: 1
  misc_feature: MA Experiment 20001247 PARAMETER Experiment Name: At_Far-red-induction_P Parameter: Tissue Value: Whole Plant
  misc_feature: MA Experiment ID: 20001248 Result: Up-regulated in Transcription
  misc_feature: MA Experiment 20001248 PARAMETER Experiment Name: At_Far-red-induction_P Parameter: Age (day) Value: 7
  misc_feature: MA Experiment 20001248 PARAMETER Experiment Name: At_Far-red-induction_P Parameter: Light Value: Far-red vs. White
  misc_feature: MA Experiment 20001248 PARAMETER Experiment Name: At_Far-red-induction_P Parameter: Organism Value: A. thaliana
  misc_feature: MA Experiment 20001248 PARAMETER Experiment Name: At_Far-red-induction_P Parameter: Plant Line Value: Columbia
  misc_feature: MA Experiment 20001248 PARAMETER Experiment Name: At_Far-red-induction_P Parameter: Timepoint (hr) Value: 4
  misc_feature: MA Experiment 20001248 PARAMETER Experiment Name: At_Far-red-induction_P Parameter: Tissue Value: Whole Plant
  misc_feature: MA Experiment ID: 20001558 Result: Down-regulated in Transcription
  misc_feature: MA Experiment 20001558 PARAMETER Experiment Name: At_Drought_Soil_Dry_P Parameter: Age (day) Value: 27
  misc_feature: MA Experiment 20001558 PARAMETER Experiment Name: At_Drought_Soil_Dry_P Parameter: Organism Value: A. thaliana
  misc_feature: MA Experiment 20001558 PARAMETER Experiment Name: At_Drought_Soil_Dry_P Parameter: Plant Line Value: WS
  misc_feature: MA Experiment 20001558 PARAMETER Experiment Name: At_Drought_Soil_Dry_P Parameter: Post Timepoint (hr) Value: 6
  misc_feature: MA Experiment 20001558 PARAMETER Experiment Name: At_Drought_Soil_Dry_P Parameter: Post-Treatment Value: Re-Water vs. No Drought
  misc_feature: MA Experiment 20001558 PARAMETER Experiment Name: At_Drought_Soil_Dry_P Parameter: Timepoint (day) Value: 13
  misc_feature: MA Experiment 20001558 PARAMETER Experiment Name: At_Drought_Soil_Dry_P Parameter: Treatment Value: Drought vs. No Drought
  misc_feature: MA Experiment ID: 20001560 Result: Down-regulated in Transcription
  misc_feature: MA Experiment 20001560 PARAMETER Experiment Name: At_Drought_Soil_Dry_P Parameter: Age (day) Value: 28
  misc_feature: MA Experiment 20001560 PARAMETER Experiment Name: At_Drought_Soil_Dry_P Parameter: Organism Value: A. thaliana
  misc_feature: MA Experiment 20001560 PARAMETER Experiment Name: At_Drought_Soil_Dry_P Parameter: Plant Line Value: WS
  misc_feature: MA Experiment 20001560 PARAMETER Experiment Name: At_Drought_Soil_Dry_P Parameter: Post Timepoint (hr) Value: None
  misc_feature: MA Experiment 20001560 PARAMETER Experiment Name: At_Drought_Soil_Dry_P Parameter: Post-Treatment Value: None
  misc_feature: MA Experiment 20001560 PARAMETER Experiment Name: At_Drought_Soil_Dry_P Parameter: Timepoint (day) Value: 14
  misc_feature: MA Experiment 20001560 PARAMETER Experiment Name: At_Drought_Soil_Dry_P Parameter: Treatment Value: Drought vs. No Drought
  misc_feature: MA Experiment ID: 20001905 Result: Down-regulated in Transcription
  misc_feature: MA Experiment 20001905 PARAMETER Experiment Name: At_Drought_Reproduction_P Parameter: Age (day) Value: 40
  misc_feature: MA Experiment 20001905 PARAMETER Experiment Name: At_Drought_Reproduction_P Parameter: Organism Value: A. thaliana
  misc_feature: MA Experiment 20001905 PARAMETER Experiment Name: At_Drought_Reproduction_P Parameter: Plant Line Value: WS
  misc_feature: MA Experiment 20001905 PARAMETER Experiment Name: At_Drought_Reproduction_P Parameter: Timepoint (day) Value: 10
  misc_feature: MA Experiment 20001905 PARAMETER Experiment Name: At_Drought_Reproduction_P Parameter: Tissue Value: Rosettes
  misc_feature: MA Experiment 20001905 PARAMETER Experiment Name: At_Drought_Reproduction_P Parameter: Treatment Value: Drought vs. No Drought
aaacacacttgtcgtctcttctctctctcgcagctcttctctattttcagcaatcgcctataatattaggtaaagctaaaagggtctgattcgtttgttttttcactgaagaatttggaaggaagtgattccgttgtgaaacagaaaagaagtatgggtactcacattgatatcaacaacttaggcggcgatacttctagagggaatgagtcaaagccattggcgaggcagtcttcgttatattccttaacgtttgatgagcttcagagcacattaggtgagccggggaaagattttgggtctatgaatatggatgagttactcaagaacatatggactgctgaggatactcaagcctttatgactactacatcttcggttgcagccccgggacctagtggttttgttccgggaggaaatggtttacagaggcaaggctccttgaccttgcctagaacgcttagtcagaagactgtcgatgaagtctggaaatacctgaattcgaaagaaggtagtaatgggaatactggaacggatgcgcttgagaggcaacagactttaggggaaatgactctggaagatttcttactccgtgctggcgttgttaaagaagataatactcagcagaacgaaaacagtagtagcgggttttatgctaacaacggtgctgctggtttggagtttggatttggtcagccgaatcaaaacagcatatcgttcaacgggaacaatagttctatgatcatgaatcaagcacctggtttaggcctcaaagttggtggaaccatgcagcagcagcagcagccacatcagcagcagttgcagcagccacatcagagactgcctccaactatctttccaaaacaagcgaatgtaacatttgcggcgcctgtaaatatggtcaacaggggtttatttgagactagcgcagatggtccagccaacagtaatatgggaggagcagggggtactgttacagctacttctcctgggacgagcagtgcagaaaacaatacttggtcatcaccagttccttacgtgtttggtcggggaagaagaagcaatacgggcctggagaaggttgttgagagaaggcaaaagagaatgatcaagaatcgggaatccgctgctagatcaagggctcgaaaacaggcttataccttggaactggaagctgagattgaaagtctcaagctagtgaatcaagatttgcagaagaaacaggctgaaataatgaaaacccataatagtgagctaaaggaattttcgaagcagcctccattgctggccaaaagacaatgcttgagaagaacccttaccggtccgtggtaagaaggtgaagtcaaagcaagaagaacctgctaatgtaatacaggaccactcaaaaggaagacactgggagagtaatatgtaatagaagatagtgctactgtacaggagaaactacagagacgcttacaatgtagaaatcttttgagctgaatttaactaagagtgcagtctgtgtagagtatgagagctttcaatatgaattcataattttcataaacatatgtaaaactttcagatttagctatagagaagatgtgactaact

SEQ ID NO: 107955 - protein, 392 aa, Arabidopsis thaliana
  peptide (1)..(392): Ceres Seq. ID no. 13652485
  misc_feature (309)..(367): Pfam Name: bZIP transcription factor Pfam Description: bZIP transcription factor
  misc_feature (1)..(392): Homolog of NCBI NO: 18402757 NR Description: abscisic acid responsive elements-binding factor
  misc_feature (1)..(333): Homolog of NCBI NO: 25373979 NR Description: hypothetical protein F14J22.7 [imported] - thaliana >gi|10120429|gb|AAG13054.1|AC011807_13 Unknown protein
  misc_feature (1)..(249): Homolog of NCBI NO: 7406677 NR Description: putative ripening-related bZIP protein [Vitis
  misc_feature (250)..(392): Homolog of NCBI NO: 7406677 NR Description: putative ripening-related bZIP protein [Vitis
  misc_feature (121)..(392): Homolog of NCBI NO: 18402186 NR Description: abscisic acid responsive elements-binding factor
  misc_feature (75)..(252): Homolog of NCBI NO: 18418350 NR Description: abscisic acid responsive elements-binding [Arabidopsis thaliana] >gi|6739280|gb|AAF27181.1|AF093546_1
  misc_feature (262)..(392): Homolog of NCBI NO: 18418350 NR Description: abscisic acid responsive elements-binding [Arabidopsis thaliana] >gi|6739280|gb|AAF27181.1|AF093546_1
  misc_feature (20)..(90): Homolog of NCBI NO: 18418350 NR Description: abscisic acid responsive elements-binding [Arabidopsis thaliana] >gi|6739280|gb|AAF27181.1|AF093546_1
  misc_feature (1)..(392): Homolog of NCBI NO: 18402186 NR Description: abscisic acid responsive elements-binding factor
  misc_feature (1)..(370): Homolog of NCBI NO: 11994451 NR Description: abscisic acid responsive elements-binding factor
MGTHIDINNLGGDTSRGNESKPLARQSSLYSLTFDELQSTLGEPGKDFGSMNMDELLKNIWTAEDTQAFMTTTSSVAAPGPSGFVPGGNGLQRQGSLTLPRTLSQKTVDEVWKYLNSKEGSNGNTGTDALERQQTLGEMTLEDFLLRAGVVKEDNTQQNENSSSGFYANNGAAGLEFGFGQPNQNSISFNGNNSSMIMNQAPGLGLKVGGTMQQQQQPHQQQLQQPHQRLPPTIFPKQANVTFAAPVNMVNRGLFETSADGPANSNMGGAGGTVTATSPGTSSAENNTWSSPVPYVFGRGRRSNTGLEKVVERRQKRMIKNRESAARSRARKQAYTLELEAEIESLKLVNQDLQKKQAEIMKTHNSELKEFSKQPPLLAKRQCLRRTLTGPW

SEQ ID NO: 107956 - protein, 342 aa, Arabidopsis thaliana
  peptide (1)..(342): Ceres Seq. ID no. 13652486
  misc_feature (259)..(317): Pfam Name: bZIP transcription factor Pfam Description: bZIP transcription factor
  misc_feature (1)..(342): Homolog of NCBI NO: 18402757 NR Description: abscisic acid responsive elements-binding factor
  misc_feature (1)..(283): Homolog of NCBI NO: 25373979 NR Description: hypothetical protein F14J22.7 [imported] - thaliana >gi|10120429|gb|AAG13054.1|AC011807_13 Unknown protein
  misc_feature (1)..(199): Homolog of NCBI NO: 7406677 NR Description: putative ripening-related bZIP protein [Vitis
  misc_feature (200)..(342): Homolog of NCBI NO: 7406677 NR Description: putative ripening-related bZIP protein [Vitis
  misc_feature (71)..(342): Homolog of NCBI NO: 18402186 NR Description: abscisic acid responsive elements-binding factor
  misc_feature (25)..(202): Homolog of NCBI NO: 18418350 NR Description: abscisic acid responsive elements-binding [Arabidopsis thaliana] >gi|6739280|gb|AAF27181.1|AF093546_1
  misc_feature (212)..(342): Homolog of NCBI NO: 18418350 NR Description: abscisic acid responsive elements-binding [Arabidopsis thaliana] >gi|6739280|gb|AAF27181.1|AF093546_1
  misc_feature (1)..(40): Homolog of NCBI NO: 18418350 NR Description: abscisic acid responsive elements-binding [Arabidopsis thaliana] >gi|6739280|gb|AAF27181.1|AF093546_1
  misc_feature (1)..(342): Homolog of NCBI NO: 18402186 NR Description: abscisic acid responsive elements-binding factor
  misc_feature (1)..(320): Homolog of NCBI NO: 11994451 NR Description: abscisic acid responsive elements-binding factor
MNMDELLKNIWTAEDTQAFMTTTSSVAAPGPSGFVPGGNGLQRQGSLTLPRTLSQKTVDEVWKYLNSKEGSNGNTGTDALERQQTLGEMTLEDFLLRAGVVKEDNTQQNENSSSGFYANNGAAGLEFGFGQPNQNSISFNGNNSSMIMNQAPGLGLKVGGTMQQQQQPHQQQLQQPHQRLPPTIFPKQANVTFAAPVNMVNRGLFETSADGPANSNMGGAGGTVTATSPGTSSAENNTWSSPVPYVFGRGRRSNTGLEKVVERRQKRMIKNRESAARSRARKQAYTLELEAEIESLKLVNQDLQKKQAEIMKTHNSELKEFSKQPPLLAKRQCLRRTLTGPW

SEQ ID NO: 107957 - protein, 340 aa, Arabidopsis thaliana
  peptide (1)..(340): Ceres Seq. ID no. 13652487
  misc_feature (257)..(315): Pfam Name: bZIP transcription factor Pfam Description: bZIP transcription factor
  misc_feature (1)..(340): Homolog of NCBI NO: 18402757 NR Description: abscisic acid responsive elements-binding factor
  misc_feature (1)..(281): Homolog of NCBI NO: 25373979 NR Description: hypothetical protein F14J22.7 [imported] - thaliana >gi|10120429|gb|AAG13054.1|AC011807_13 Unknown protein
  misc_feature (1)..(197): Homolog of NCBI NO: 7406677 NR Description: putative ripening-related bZIP protein [Vitis
  misc_feature (198)..(340): Homolog of NCBI NO: 7406677 NR Description: putative ripening-related bZIP protein [Vitis
  misc_feature (69)..(340): Homolog of NCBI NO: 18402186 NR Description: abscisic acid responsive elements-binding factor
  misc_feature (23)..(200): Homolog of NCBI NO: 18418350 NR Description: abscisic acid responsive elements-binding [Arabidopsis thaliana] >gi|6739280|gb|AAF27181.1|AF093546_1
  misc_feature (210)..(340): Homolog of NCBI NO: 18418350 NR Description: abscisic acid responsive elements-binding [Arabidopsis thaliana] >gi|6739280|gb|AAF27181.1|AF093546_1
  misc_feature (1)..(38): Homolog of NCBI NO: 18418350 NR Description: abscisic acid responsive elements-binding [Arabidopsis thaliana] >gi|6739280|gb|AAF27181.1|AF093546_1
  misc_feature (1)..(340): Homolog of NCBI NO: 18402186 NR Description: abscisic acid responsive elements-binding factor
  misc_feature (1)..(318): Homolog of NCBI NO: 11994451 NR Description: abscisic acid responsive elements-binding factor
MDELLKNIWTAEDTQAFMTTTSSVAAPGPSGFVPGGNGLQRQGSLTLPRTLSQKTVDEVWKYLNSKEGSNGNTGTDALERQQTLGEMTLEDFLLRAGVVKEDNTQQNENSSSGFYANNGAAGLEFGFGQPNQNSISFNGNNSSMIMNQAPGLGLKVGGTMQQQQQPHQQQLQQPHQRLPPTIFPKQANVTFAAPVNMVNRGLFETSADGPANSNMGGAGGTVTATSPGTSSAENNTWSSPVPYVFGRGRRSNTGLEKVVERRQKRMIKNRESAARSRARKQAYTLELEAEIESLKLVNQDLQKKQAEIMKTHNSELKEFSKQPPLLAKRQCLRRTLTGPW

SEQ ID NO: 107958 - DNA, 1084 bp, Arabidopsis thaliana
  misc_feature (1)..(1084): Ceres Seq. ID no. 13652666
  misc_feature: MA Experiment ID: 20000307 Result: Down-regulated in Transcription
  misc_feature: MA Experiment 20000307 PARAMETER Experiment Name: At_Germinating_Seeds_Sub_P Parameter: Age (hr) Value: 24 vs. 0
  misc_feature: MA Experiment 20000307 PARAMETER Experiment Name: At_Germinating_Seeds_Sub_P Parameter: Organism Value: A. thaliana
  misc_feature: MA Experiment 20000307 PARAMETER Experiment Name: At_Germinating_Seeds_Sub_P Parameter: Plant Line Value: WS
  misc_feature: MA Experiment 20000307 PARAMETER Experiment Name: At_Germinating_Seeds_Sub_P Parameter: Tissue Value: Germinating Seeds
  misc_feature: Pfam Name: DUF1004 Pfam Description: GAGA binding protein-like family
gagagaaagagtgctcagagtgagcgagagcatagcggtggagtgtcgccactggtaactccgacgatttttctcgtttgcgagctgcaacgcgaaggtgtgatctttccactgaaactrgctatcaagatgaattcatttcctgcacaaaaccttatgctatctgctacaaacgcaaacaaggactcaggcttgcgtacgtctaatgctcattggttacattcatgtatcgccgttccaaagaccacaggcattgatctttctcaggaacctcctgctgaaggtgtgatggtgcctcaatctcatttgtttcctcctcctattagagattccagaaacgatactgaaactgtgaaacagaagtccgtaaatcagtctccttcgaaagctttgaagccaaaaccgcaaaggaagaaacgctctgtatccaacaagtcaaagaaaacacctagcataccagaaacaaaacgtgagaaaaagaatctggacatcaacattgacatctcaagctttgatacttctggggttcctcctcctgtatgttcatgtacaggcgtttcaagggtttgctacaaatggggcatgggcggttggcaatcctcatgttgtaccatcagcatatcgacatacccactacccatgagcacaacaagacctggagctcgtcttgcaggaagaaaaatgagcaatggtgcttatgttaagctccttgcgaggcttgcggacgaaggctatgacctctctcaccctcttgatctcaagaaccattgggccagacacggtactaacaagtttgtgaccatcaagtagtcgtttcattagttgggtttgatttagatattagcttttgtggcttctttttaagtccttttcacagtcttagccttttggtatatatttgggagtactgtatttgctatagtagrggtatcctttacttgtttcccctgaagtagagtatatttcctgcaaaaatcccaacagtcgtggaaacacattatggcatgaacttgggtaacttcggtcatgcaacacattgctttggaattcacaaataaatttcaataagaaatgaatattagcg

SEQ ID NO: 107959 - protein, 269 aa, Arabidopsis thaliana
  peptide (1)..(269): Ceres Seq. ID no. 13652667
  misc_feature: Pfam Name: DUF1004 Pfam Description: GAGA binding protein-like family
  misc_feature (23)..(269): Homolog of NCBI NO: 30686452 NR Description: expressed protein [Arabidopsis thaliana]
  misc_feature (44)..(269): Homolog of NCBI NO: 30686455 NR Description: expressed protein [Arabidopsis thaliana]
  misc_feature (89)..(269): Homolog of NCBI NO: 26190436 NR Description: barley B recombinant [Hordeum vulgare]
  misc_feature (40)..(40): Xaa is any aa, unknown or other
ERKSAQSEREHSGGVSPLVTPTIFLVCELQREGVIFPLKXAIKMNSFPAQNLMLSATNANKDSGLRTSNAHWLHSCIAVPKTTGIDLSQEPPAEGVMVPQSHLFPPPIRDSRNDTETVKQKSVNQSPSKALKPKPQRKKRSVSNKSKKTPSIPETKREKKNLDINIDISSFDTSGVPPPVCSCTGVSRVCYKWGMGGWQSSCCTISISTYPLPMSTTRPGARLAGRKMSNGAYVKLLARLADEGYDLSHPLDLKNHWARHGTNKFVTIK

SEQ ID NO: 107960 - protein, 226 aa, Arabidopsis thaliana; identical to SEQ ID NO: 72076
  peptide (1)..(226): Ceres Seq. ID no. 13652668
  misc_feature: Pfam Name: DUF1004 Pfam Description: GAGA binding protein-like family
  misc_feature (1)..(226): Homolog of NCBI NO: 30686452 NR Description: expressed protein [Arabidopsis thaliana]
  misc_feature (1)..(226): Homolog of NCBI NO: 30686455 NR Description: expressed protein [Arabidopsis thaliana]
  misc_feature (46)..(226): Homolog of NCBI NO: 26190436 NR Description: barley B recombinant [Hordeum vulgare]

SEQ ID NO: 107961 - protein, 217 aa, Arabidopsis thaliana; identical to SEQ ID NO: 72077
  peptide (1)..(217): Ceres Seq. ID no. 13652669
  misc_feature: Pfam Name: DUF1004 Pfam Description: GAGA binding protein-like family
  misc_feature (1)..(217): Homolog of NCBI NO: 30686452 NR Description: expressed protein [Arabidopsis thaliana]
  misc_feature (1)..(217): Homolog of NCBI NO: 30686455 NR Description: expressed protein [Arabidopsis thaliana]
  misc_feature (37)..(217): Homolog of NCBI NO: 26190436 NR Description: barley B recombinant [Hordeum vulgare]

SEQ ID NO: 107962 - DNA, 809 bp, Arabidopsis thaliana
  misc_feature (1)..(809): Ceres Seq. ID no. 13652714
  misc_feature: MA Experiment ID: 20000180 Result: Down-regulated in Transcription
  misc_feature: MA Experiment 20000180 PARAMETER Experiment Name: At_Germinating_Seeds_P Parameter: Age (hr) Value: 24 vs. 0
  misc_feature: MA Experiment 20000180 PARAMETER Experiment Name: At_Germinating_Seeds_P Parameter: Tissue Value: Germinating Seeds
  misc_feature: MA Experiment ID: 20001911 Result: Up-regulated in Transcription
  misc_feature: MA Experiment 20001911 PARAMETER Experiment Name: At_Drought_Reproduction_P Parameter: Age (day) Value: 40
  misc_feature: MA Experiment 20001911 PARAMETER Experiment Name: At_Drought_Reproduction_P Parameter: Organism Value: A. thaliana
  misc_feature: MA Experiment 20001911 PARAMETER Experiment Name: At_Drought_Reproduction_P Parameter: Plant Line Value: WS
  misc_feature: MA Experiment 20001911 PARAMETER Experiment Name: At_Drought_Reproduction_P Parameter: Timepoint (day) Value: 10
  misc_feature: MA Experiment 20001911 PARAMETER Experiment Name: At_Drought_Reproduction_P Parameter: Tissue Value: Flowers
  misc_feature: MA Experiment 20001911 PARAMETER Experiment Name: At_Drought_Reproduction_P Parameter: Treatment Value: Drought vs. No Drought
aaaaatgtctcgattgctctcaaaaaccctaattcccaacggaagattcctcctccgtcgtttcaacgagccggcgattacgacaccaccaaacgtcgtctgtttcagccgccgcttttcatccatcccacaagtcatcgagcttgaaatcgattctaaaaacgaagcggaagcagcaattctcaaaaagctaaacgaattcgtacgaaggatcatcgttcataattcgactccagattggcttccttttgcacctggctcttccttttgggtacctcctcatcagattacggctacaaagatcgccaatttggtcgataaggtgactaatccgttgacggaggaagagtctctttcgctttcgtctccttatggttggccttgttcctctttcttcattcctcctccagatggttcctcatctacacaagaggaagaagctagcgtggagttgaaaatcccggggaatgagatgttggaagtgaagctagcacattatccagatcctatttactcttttaaacctgaagatggtgaagagtgaagagtgattcgataccttttccagcacgagagagcaggacaggattggaaaaaacagatgacgatcgaaactcaagcagtttgtacatacagttgaaaaccatgggagttatatgatctttgggtgactttatacaccttgtttactatgttttataattgacttaatataattagcttgggggcttctccactttgcagagtttatggkgatgctcgggtaacttgacatttcatttataatgacaattcttccctttgaccct

SEQ ID NO: 107963 - protein, 180 aa, Arabidopsis thaliana
  peptide (1)..(180): Ceres Seq. ID no. 13652715
  misc_feature (2)..(180): Homolog of NCBI NO: 18398961 NR Description: expressed protein [Arabidopsis thaliana]
  misc_feature (26)..(180): Homolog of NCBI NO: 14423398 NR Description: Unknown protein [Arabidopsis thaliana]
  misc_feature (6)..(148): Homolog of NCBI NO: 25364101 NR Description: hypothetical protein F9K20.6 [imported] - thaliana >gi|3834306|gb|AAC83022.1| EST gb|R65024 comes from this
  misc_feature (6)..(133): Homolog of NCBI NO: 18412160 NR Description: expressed protein [Arabidopsis thaliana]
  misc_feature (6)..(133): Homolog of NCBI NO: 21592720 NR Description: unknown [Arabidopsis thaliana]
  misc_feature (2)..(133): Homolog of NCBI NO: 18394407 NR Description: expressed protein [Arabidopsis thaliana]
  misc_feature (2)..(133): Homolog of NCBI NO: 30685027 NR Description: expressed protein [Arabidopsis thaliana] At1g16840/F17F16.27 [Arabidopsis thaliana]
  misc_feature (52)..(108): Homolog of NCBI NO: 38175698 NR Description: unknown protein [Oryza sativa (japonica
  misc_feature (107)..(133): Homolog of NCBI NO: 38175698 NR Description: unknown protein [Oryza sativa (japonica
  misc_feature (61)..(133): Homolog of NCBI NO: 38346553 NR Description: OSJNBa0035M09.14 [Oryza sativa (japonica
KMSRLLSKTLIPNGRFLLRRFNEPAITTPPNVVCFSRRFSSIPQVIELEIDSKNEAEAAILKKLNEFVRRIIVHNSTPDWLPFAPGSSFWVPPHQITATKIANLVDKVTNPLTEEESLSLSSPYGWPCSSFFIPPPDGSSSTQEEEASVELKIPGNEMLEVKLAHYPDPIYSFKPEDGEE

SEQ ID NO: 107964 - protein, 179 aa, Arabidopsis thaliana; identical to SEQ ID NO: 24941
  peptide (1)..(179): Ceres Seq. ID no. 13652716
  misc_feature (1)..(179): Homolog of NCBI NO: 18398961 NR Description: expressed protein [Arabidopsis thaliana]
  misc_feature (25)..(179): Homolog of NCBI NO: 14423398 NR Description: Unknown protein [Arabidopsis thaliana]
  misc_feature (5)..(147): Homolog of NCBI NO: 25364101 NR Description: hypothetical protein F9K20.6 [imported] - thaliana >gi|3834306|gb|AAC83022.1| EST gb|R65024 comes from this
  misc_feature (5)..(132): Homolog of NCBI NO: 18412160 NR Description: expressed protein [Arabidopsis thaliana]
  misc_feature (5)..(132): Homolog of NCBI NO: 21592720 NR Description: unknown [Arabidopsis thaliana]
  misc_feature (1)..(132): Homolog of NCBI NO: 18394407 NR Description: expressed protein [Arabidopsis thaliana]
  misc_feature (1)..(132): Homolog of NCBI NO: 30685027 NR Description: expressed protein [Arabidopsis thaliana] At1g16840/F17F16.27 [Arabidopsis thaliana]
  misc_feature (51)..(107): Homolog of NCBI NO: 38175698 NR Description: unknown protein [Oryza sativa (japonica
  misc_feature (106)..(132): Homolog of NCBI NO: 38175698 NR Description: unknown protein [Oryza sativa (japonica
  misc_feature (60)..(132): Homolog of NCBI NO: 38346553 NR Description: OSJNBa0035M09.14 [Oryza sativa (japonica

SEQ ID NO: 107965 - DNA, 1979 bp, Arabidopsis thaliana
  misc_feature (1)..(1979): Ceres Seq. ID no. 13652767
  misc_feature: MA Experiment ID: 20000440 Result: Up-regulated in Transcription
  misc_feature: MA Experiment 20000440 PARAMETER Experiment Name: At_Closed-Flower__Sub_P Parameter: Tissue Value: Closed Flower vs. Whole Plant
tgtggactcaaagctattttaagtacaacacacgtggagaaagcagatacattgtctcgtaacagaaaacaaactcaagaatggacccaatcttagagttctaacaatcttaatctcatgtctcttgatgatccccaaagcaaatccagatcaatgtgtgttccagagtttaacagcaacaacaacacgacgaccttcgcacagattttagtaatctcatccattggcttactcttagcccktgcactgcacttccgtctaaggaagctacgtcactccaagaacatccctcgtctcagatcgtctcaaaaacacaaaggccatgagaagcttgagagattctctcactatgttgtgcggcagatgggattcaaggacaggagagaatgtcctcatctctgcaaattagctaatgagtacataagaaaatcaggcagctgtgaggaagacatatacagcttcttctctgaagagcctggtgctgattctctcttcattaagctcgttgaagagtttgagagatgtattcttagttactttgcttaccactggagccatgcggatctcatgatcagtcaggttactaataaactttcattatcccttctttgttatattactaatagaccaaaaacatttcagatactcagtgccgatgcagagcctaagaagaagctaaagcacattgtcatggcggctacaagggaacagaggtttgagagggtgactaaaaatctaaaagtggcaagagtgtttaacacattggtaggggaaatgaaagcaatggggatcgcatctgttgatgactcagagtgtacagaagttatggctccagttgcacacaaggaccgaagcccggttctacttcttatgggaggtggtatgggtgcaggaaagagcactgtgcttaaagacattctcaaagaaccgttttgggcaggagctgatgctgtggtgattgaagccgatgcttttaaagaatctgatgtgatatacagagctttaagcgccagaggtcatgttgatatgatcaagactgctgaattcgttcaccaatcatcaacagacgcagcatcatcgctgctcgttacagctctcaacgaagggcgagacgtgayaatggatggaacactctcttgggtaccatttgtggttcagaccataacaatggcgaggaatgtgcatcgccatcgttacagaatgggagctggctacaaggttggtgagaatggagatgttatagagaactattgggaacgcataggcgaaaggcaacagcttcaagaagatggaagggagagaaagccatacaggatagagttagttggagttgtatgtgatgcatatttagcagtgattcgaggaattaggagagctataatgtgtagaagagcagttagagtgaggtctcagctgagatctcacaagaggtttgcgaatgcgtttcttacctattgcaacttagttgacaatgctagactttactgcaccaatgctcttgaaggttctccaaagctgatagggtggaaagagaaggaaaagacattgctagtggatccagaggagatagactgtttgaagaatgtagggaggttaaacgagaatgcagattctatttacgagctatacagaaatccaaatcctgcttgtgaagctggatcaatatggaaagacattgttctttctccttctaggttcaacattcaacaagagctcaaatactcaattcagaaagtggaaagattcaaacagtatctccaagaaacaccaagatgagagatgaagatagataaacgcagaagatctcttagctttttttttcccggtatgtcattcatttatgtaactcctaaaacatcaaacaaaattgaatctctctagtaaagagagaattggcaacacctaacctaagagatagttacattgtcaagcttggtcttaagagatgtttaaggaagcaaatgtatgacatgattcag

SEQ ID NO: 107966 - protein, 552 aa, Arabidopsis thaliana
  peptide (1)..(552): Ceres Seq. ID no. 13652768
  misc_feature (13)..(552): Homolog of NCBI NO: 28207052 NR Description: hypothetical protein [Arabidopsis thaliana]
  misc_feature (126)..(552): Homolog of NCBI NO: 15224537 NR Description: hypothetical protein [Arabidopsis thaliana]
  misc_feature (1)..(155): Homolog of NCBI NO: 15224537 NR Description: hypothetical protein [Arabidopsis thaliana]
  misc_feature (126)..(552): Homolog of NCBI NO: 28207050 NR Description: hypothetical protein [Arabidopsis thaliana]
  misc_feature (13)..(155): Homolog of NCBI NO: 28207050 NR Description: hypothetical protein [Arabidopsis thaliana]
  misc_feature (118)..(547): Homolog of NCBI NO: 15222183 NR Description: hypothetical protein [Arabidopsis thaliana]
  misc_feature (175)..(542): Homolog of NCBI NO: 99733 NR Description: hypothetical protein H1flk - Arabidopsis thaliana
  misc_feature (175)..(542): Homolog of NCBI NO: 15219698 NR Description: expressed protein [Arabidopsis thaliana]
  misc_feature (64)..(191): Homolog of NCBI NO: 99733 NR Description: hypothetical protein H1flk - Arabidopsis thaliana
  misc_feature (64)..(191): Homolog of NCBI NO: 15219698 NR Description: expressed protein [Arabidopsis thaliana]
  misc_feature (42)..(42): Xaa is any aa, unknown or other
  misc_feature (334)..(334): Xaa is any aa, unknown or other
MSLDDPQSKSRSMCVPEFNSNNNTTTFAQILVISSIGLLLAXALHFRLRKLRHSKNIPRLRSSQKHKGHEKLERFSHYVVRQMGFKDRRECPHLCKLANEYIRKSGSCEEDIYSFFSEEPGADSLFIKLVEEFERCILSYFAYHWSHADLMISQVTNKLSLSLLCYITNRPKTFQILSADAEPKKKLKHIVMAATREQRFERVTKNLKVARVFNTLVGEMKAMGIASVDDSECTEVMAPVAHKDRSPVLLLMGGGMGAGKSTVLKDILKEPFWAGADAVVIEADAFKESDVIYRALSARGHVDMIKTAEFVHQSSTDAASSLLVTALNEGRDVXMDGTLSWVPFVVQTITMARNVHRHRYRMGAGYKVGENGDVIENYWERIGERQQLQEDGRERKPYRIELVGVVCDAYLAVIRGIRRAIMCRRAVRVRSQLRSHKRFANAFLTYCNLVDNARLYCTNALEGSPKLIGWKEKEKTLLVDPEEIDCLKNVGRLNENADSIYELYRNPNPACEAGSIWKDIVLSPSRFNIQQELKYSIQKVERFKQYLQETPR

SEQ ID NO: 107967 - protein, 540 aa, Arabidopsis thaliana
  peptide (1)..(540): Ceres Seq. ID no. 13652769
  misc_feature (1)..(540): Homolog of NCBI NO: 28207052 NR Description: hypothetical protein [Arabidopsis thaliana]
  misc_feature (114)..(540): Homolog of NCBI NO: 15224537 NR Description: hypothetical protein [Arabidopsis thaliana]
  misc_feature (1)..(143): Homolog of NCBI NO: 15224537 NR Description: hypothetical protein [Arabidopsis thaliana]
  misc_feature (114)..(540): Homolog of NCBI NO: 28207050 NR Description: hypothetical protein [Arabidopsis thaliana]
  misc_feature (1)..(143): Homolog of NCBI NO: 28207050 NR Description: hypothetical protein [Arabidopsis thaliana]
  misc_feature (106)..(535): Homolog of NCBI NO: 15222183 NR Description: hypothetical protein [Arabidopsis thaliana]
  misc_feature (163)..(530): Homolog of NCBI NO: 99733 NR Description: hypothetical protein H1flk - Arabidopsis thaliana
  misc_feature (163)..(530): Homolog of NCBI NO: 15219698 NR Description: expressed protein [Arabidopsis thaliana]
  misc_feature (52)..(179): Homolog of NCBI NO: 99733 NR Description: hypothetical protein H1flk - Arabidopsis thaliana
  misc_feature (52)..(179): Homolog of NCBI NO: 15219698 NR Description: expressed protein [Arabidopsis thaliana]
  misc_feature (30)..(30): Xaa is any aa, unknown or other
  misc_feature (322)..(322): Xaa is any aa, unknown or other
MCVPEFNSNNNTTTFAQILVISSIGLLLAXALHFRLRKLRHSKNIPRLRSSQKHKGHEKLERFSHYVVRQMGFKDRRECPHLCKLANEYIRKSGSCEEDIYSFFSEEPGADSLFIKLVEEFERCILSYFAYHWSHADLMISQVTNKLSLSLLCYITNRPKTFQILSADAEPKKKLKHIVMAATREQRFERVTKNLKVARVFNTLVGEMKAMGIASVDDSECTEVMAPVAHKDRSPVLLLMGGGMGAGKSTVLKDILKEPFWAGADAVVIEADAFKESDVIYRALSARGHVDMIKTAEFVHQSSTDAASSLLVTALNEGRDVXMDGTLSWVPFVVQTITMARNVHRHRYRMGAGYKVGENGDVIENYWERIGERQQLQEDGRERKPYRIELVGVVCDAYLAVIRGIRRAIMCRRAVRVRSQLRSHKRFANAFLTYCNLVDNARLYCTNALEGSPKLIGWKEKEKTLLVDPEEIDCLKNVGRLNENADSIYELYRNPNPACEAGSIWKDIVLSPSRFNIQQELKYSIQKVERFKQYLQETPR

SEQ ID NO: 107968 - protein, 470 aa, Arabidopsis thaliana
  peptide (1)..(470): Ceres Seq. ID no. 13652770
  misc_feature (1)..(470): Homolog of NCBI NO: 28207052 NR Description: hypothetical protein [Arabidopsis thaliana]
  misc_feature (44)..(470): Homolog of NCBI NO: 15224537 NR Description: hypothetical protein [Arabidopsis thaliana]
  misc_feature (1)..(73): Homolog of NCBI NO: 15224537 NR Description: hypothetical protein [Arabidopsis thaliana]
  misc_feature (44)..(470): Homolog of NCBI NO: 28207050 NR Description: hypothetical protein [Arabidopsis thaliana]
  misc_feature (1)..(73): Homolog of NCBI NO: 28207050 NR Description: hypothetical protein [Arabidopsis thaliana]
  misc_feature (36)..(465): Homolog of NCBI NO: 15222183 NR Description: hypothetical protein [Arabidopsis thaliana]
  misc_feature (93)..(460): Homolog of NCBI NO: 99733 NR Description: hypothetical protein H1flk - Arabidopsis thaliana
  misc_feature (93)..(460): Homolog of NCBI NO: 15219698 NR Description: expressed protein [Arabidopsis thaliana]
  misc_feature (1)..(109): Homolog of NCBI NO: 99733 NR Description: hypothetical protein H1flk - Arabidopsis thaliana
  misc_feature (1)..(109): Homolog of NCBI NO: 15219698 NR Description: expressed protein [Arabidopsis thaliana]
  misc_feature (252)..(252): Xaa is any aa, unknown or other
MGFKDRRECPHLCKLANEYIRKSGSCEEDIYSFFSEEPGADSLFIKLVEEFERCILSYFAYHWSHADLMISQVTNKLSLSLLCYITNRPKTFQILSADAEPKKKLKHIVMAATREQRFERVTKNLKVARVFNTLVGEMKAMGIASVDDSECTEVMAPVAHKDRSPVLLLMGGGMGAGKSTVLKDILKEPFWAGADAVVIEADAFKESDVIYRALSARGHVDMIKTAEFVHQSSTDAASSLLVTALNEGRDVXMDGTLSWVPFVVQTITMARNVHRHRYRMGAGYKVGENGDVIENYWERIGERQQLQEDGRERKPYRIELVGVVCDAYLAVIRGIRRAIMCRRAVRVRSQLRSHKRFANAFLTYCNLVDNARLYCTNALEGSPKLIGWKEKEKTLLVDPEEIDCLKNVGRLNENADSIYELYRNPNPACEAGSIWKDIVLSPSRFNIQQELKYSIQKVERFKQYLQETPR

SEQ ID NO: 107969 - DNA, 1067 bp, Arabidopsis thaliana
  misc_feature (1)..(1067): Ceres Seq. ID no. 13652781
  misc_feature: MA Experiment ID: 20000169 Result: Down-regulated in Transcription
  misc_feature: MA Experiment 20000169 PARAMETER Experiment Name: At_100uM_ABA_P Parameter: Age (day) Value: 14
  misc_feature: MA Experiment 20000169 PARAMETER Experiment Name: At_100uM_ABA_P Parameter: Organism Value: A. thaliana
  misc_feature: MA Experiment 20000169 PARAMETER Experiment Name: At_100uM_ABA_P Parameter: Plant Line Value: WS
  misc_feature: MA Experiment 20000169 PARAMETER Experiment Name: At_100uM_ABA_P Parameter: Timepoint (hr) Value: 6
  misc_feature: MA Experiment 20000169 PARAMETER Experiment Name: At_100uM_ABA_P Parameter: Tissue Value: Aerial
  misc_feature: MA Experiment 20000169 PARAMETER Experiment Name: At_100uM_ABA_P Parameter: Treatment Value: 100uM ABA vs. No Treatment
  misc_feature: MA Experiment ID: 20000179 Result: Down-regulated in Transcription
  misc_feature: MA Experiment 20000179 PARAMETER Experiment Name: At_Germinating_Seeds_P Parameter: Age (hr) Value: 6 vs. 0
  misc_feature: MA Experiment 20000179 PARAMETER Experiment Name: At_Germinating_Seeds_P Parameter: Tissue Value: Germinating Seeds
  misc_feature: MA Experiment ID: 20000234 Result: Up-regulated in Transcription
  misc_feature: MA Experiment 20000234 PARAMETER Experiment Name: At_Siliques_P Parameter: Age (day) Value: 21
  misc_feature: MA Experiment 20000234 PARAMETER Experiment Name: At_Siliques_P Parameter: Organism Value: A. thaliana
  misc_feature: MA Experiment 20000234 PARAMETER Experiment Name: At_Siliques_P Parameter: Plant Line Value: WS
  misc_feature: MA Experiment 20000234 PARAMETER Experiment Name: At_Siliques_P Parameter: Tissue Value: Less Than 5mm Siliques vs. Whole Plant
  misc_feature: MA Experiment ID: 20000235 Result: Up-regulated in Transcription
  misc_feature: MA Experiment 20000235 PARAMETER Experiment Name: At_Siliques_P Parameter: Age (day) Value: 21
  misc_feature: MA Experiment 20000235 PARAMETER Experiment Name: At_Siliques_P Parameter: Organism Value: A. thaliana
  misc_feature: MA Experiment 20000235 PARAMETER Experiment Name: At_Siliques_P Parameter: Plant Line Value: WS
  misc_feature: MA Experiment 20000235 PARAMETER Experiment Name: At_Siliques_P Parameter: Tissue Value: 5-10mm Siliques vs. Whole Plant
  misc_feature: MA Experiment ID: 20000264 Result: Up-regulated in Transcription
  misc_feature: MA Experiment 20000264 PARAMETER Experiment Name: At_Open_Flower_P Parameter: Age (day) Value: 21
  misc_feature: MA Experiment 20000264 PARAMETER Experiment Name: At_Open_Flower_P Parameter: Plant Line Value: WS
  misc_feature: MA Experiment 20000264 PARAMETER Experiment Name: At_Open_Flower_P Parameter: Tissue Value: Open Flower vs. Whole Plant
  misc_feature: MA Experiment ID: 20000286 Result: Up-regulated in Transcription
  misc_feature: MA Experiment 20000286 PARAMETER Experiment Name: At_Open_Flower_P Parameter: Age (day) Value: 21
  misc_feature: MA Experiment 20000286 PARAMETER Experiment Name: At_Open_Flower_P Parameter: Plant Line Value: WS
  misc_feature: MA Experiment 20000286 PARAMETER Experiment Name: At_Open_Flower_P Parameter: Tissue Value: Half Open vs. Whole Plant
  misc_feature: MA Experiment ID: 20000436 Result: Down-regulated in Transcription
  misc_feature: MA Experiment 20000436 PARAMETER Experiment Name: At_Drought_P Parameter: Age (day) Value: 7
  misc_feature: MA Experiment 20000436 PARAMETER Experiment Name: At_Drought_P Parameter: Organism Value: A. thaliana
  misc_feature: MA Experiment 20000436 PARAMETER Experiment Name: At_Drought_P Parameter: Plant Line Value: WS
  misc_feature: MA Experiment 20000436 PARAMETER Experiment Name: At_Drought_P Parameter: Timepoint (hr) Value: 12
  misc_feature: MA Experiment 20000436 PARAMETER Experiment Name: At_Drought_P Parameter: Tissue Value: Whole Plant
  misc_feature: MA Experiment 20000436 PARAMETER Experiment Name: At_Drought_P Parameter: Treatment Value: Drought vs. No Drought
  misc_feature: MA Experiment ID: 20000437 Result: Down-regulated in Transcription
  misc_feature: MA Experiment 20000437 PARAMETER Experiment Name: At_Drought_P Parameter: Age (day) Value: 8
  misc_feature: MA Experiment 20000437 PARAMETER Experiment Name: At_Drought_P Parameter: Organism Value: A. thaliana
  misc_feature: MA Experiment 20000437 PARAMETER Experiment Name: At_Drought_P Parameter: Plant Line Value: WS
  misc_feature: MA Experiment 20000437 PARAMETER Experiment Name: At_Drought_P Parameter: Timepoint (hr) Value: 24
  misc_feature: MA Experiment 20000437 PARAMETER Experiment Name: At_Drought_P Parameter: Tissue Value: Whole Plant
  misc_feature: MA Experiment 20000437 PARAMETER Experiment Name: At_Drought_P Parameter: Treatment Value: Drought vs. No Drought
  misc_feature: MA Experiment ID: 20000445 Result: Down-regulated in Transcription
  misc_feature: MA Experiment 20000445 PARAMETER Experiment Name: At_100uM_NAA__P Parameter: Age (day) Value: 14
  misc_feature: MA Experiment 20000445 PARAMETER Experiment Name: At_100uM_NAA__P Parameter: Organism Value: A. thaliana
  misc_feature: MA Experiment 20000445 PARAMETER Experiment Name: At_100uM_NAA__P Parameter: Plant Line Value: WS
  misc_feature: MA Experiment 20000445 PARAMETER Experiment Name: At_100uM_NAA__P Parameter: Timepoint (hr) Value: 6
  misc_feature: MA Experiment 20000445 PARAMETER Experiment Name: At_100uM_NAA__P Parameter: Tissue Value: Aerial
  misc_feature: MA Experiment 20000445 PARAMETER Experiment Name: At_100uM_NAA__P Parameter: Treatment Value: 100uM NAA vs. No Treatment
  misc_feature: MA Experiment ID: 20001248 Result: Down-regulated in Transcription
  misc_feature: MA Experiment 20001248 PARAMETER Experiment Name: At_Far-red-induction_P Parameter: Age (day) Value: 7
  misc_feature: MA Experiment 20001248 PARAMETER Experiment Name: At_Far-red-induction_P Parameter: Light Value: Far-red vs. White
  misc_feature: MA Experiment 20001248 PARAMETER Experiment Name: At_Far-red-induction_P Parameter: Organism Value: A. thaliana
  misc_feature: MA Experiment 20001248 PARAMETER Experiment Name: At_Far-red-induction_P Parameter: Plant Line Value: Columbia
  misc_feature: MA Experiment 20001248 PARAMETER Experiment Name: At_Far-red-induction_P Parameter: Timepoint (hr) Value: 4
  misc_feature: MA Experiment 20001248 PARAMETER Experiment Name: At_Far-red-induction_P Parameter: Tissue Value: Whole Plant
  misc_feature: MA Experiment ID: 20001451 Result: Down-regulated in Transcription
  misc_feature: MA Experiment 20001451 PARAMETER Experiment Name: At_Far-red-induction_P Parameter: Age (day) Value: 7
  misc_feature: MA Experiment 20001451 PARAMETER Experiment Name: At_Far-red-induction_P Parameter: Light Value: Far-red vs. White
  misc_feature: MA Experiment 20001451 PARAMETER Experiment Name: At_Far-red-induction_P Parameter: Organism Value: A. thaliana
  misc_feature: MA Experiment 20001451 PARAMETER Experiment Name: At_Far-red-induction_P Parameter: Plant Line Value: Columbia
  misc_feature: MA Experiment 20001451 PARAMETER Experiment Name: At_Far-red-induction_P Parameter: Timepoint (hr) Value: 24
  misc_feature: MA Experiment 20001451 PARAMETER Experiment Name: At_Far-red-induction_P Parameter: Tissue Value: Whole Plant
  misc_feature: MA Experiment ID: 20001558 Result: Up-regulated in Transcription
  misc_feature: MA Experiment 20001558 PARAMETER Experiment Name: At_Drought_Soil_Dry_P Parameter: Age (day) Value: 27
  misc_feature: MA Experiment 20001558 PARAMETER Experiment Name: At_Drought_Soil_Dry_P Parameter: Organism Value: A. thaliana
  misc_feature: MA Experiment 20001558 PARAMETER Experiment Name: At_Drought_Soil_Dry_P Parameter: Plant Line Value: WS
  misc_feature: MA Experiment 20001558 PARAMETER Experiment Name: At_Drought_Soil_Dry_P Parameter: Post Timepoint (hr) Value: 6
  misc_feature: MA Experiment 20001558 PARAMETER Experiment Name: At_Drought_Soil_Dry_P Parameter: Post-Treatment Value: Re-Water vs. No Drought
  misc_feature: MA Experiment 20001558 PARAMETER Experiment Name: At_Drought_Soil_Dry_P Parameter: Timepoint (day) Value: 13
  misc_feature: MA Experiment 20001558 PARAMETER Experiment Name: At_Drought_Soil_Dry_P Parameter: Treatment Value: Drought vs. No Drought
  misc_feature: MA Experiment ID: 20001757 Result: Up-regulated in Transcription
  misc_feature: MA Experiment 20001757 PARAMETER Experiment Name: At_50mM_NH4NO3_L-to-H_P Parameter: Timepoint (hr) Value: 6
  misc_feature: MA Experiment 20001757 PARAMETER Experiment Name: At_50mM_NH4NO3_L-to-H_P Parameter: Tissue Value: Leaf
  misc_feature: MA Experiment 20001757 PARAMETER Experiment Name: At_50mM_NH4NO3_L-to-H_P Parameter: Treatment Value: 50mM NH4NO3 vs 100mM Mannitol
  misc_feature: MA Experiment ID: 20001905 Result: Down-regulated in Transcription
  misc_feature: MA Experiment 20001905 PARAMETER Experiment Name: At_Drought_Reproduction_P Parameter: Age (day) Value: 40
  misc_feature: MA Experiment 20001905 PARAMETER Experiment Name: At_Drought_Reproduction_P Parameter: Organism Value: A. thaliana
  misc_feature: MA Experiment 20001905 PARAMETER Experiment Name: At_Drought_Reproduction_P Parameter: Plant Line Value: WS
  misc_feature: MA Experiment 20001905 PARAMETER Experiment Name: At_Drought_Reproduction_P Parameter: Timepoint (day) Value: 10
  misc_feature: MA Experiment 20001905 PARAMETER Experiment Name: At_Drought_Reproduction_P Parameter: Tissue Value: Rosettes
  misc_feature: MA Experiment 20001905 PARAMETER Experiment Name: At_Drought_Reproduction_P Parameter: Treatment Value: Drought vs. No Drought
aaattcacactactatcttcttcttcttcgatttagcacagaagctgcagttttatcaatgttctccctttcgtttccatcttcttcttctgcccttttaccttctctcgttgctttcgattcttcgcgtcgtctctctttgcaaccaaagaagttaaatcgtcttcaaagtcacttattttcacctcaacatctctcattctctcagtctaatgtctctcgttacagagcgttttgtgtttcttcaagctctcctccagagggaacagtctccgtagtcgatttccatgagaaagattggtcctttctcgaatctatggaaattgactccactgaacatactcagaagattgagaggatcataaaggctggagaattatccgaatcttcgagggttttggtttcaattagctccgaaacattcgttgatcgtttggtagaatcttcaccttctcagcttttgctcattgtccatgactccctttttacgttagcctgtatcaaagagaagtacgacaaagtcaaatgttggcaaggagaaatgatctatgtcccggagaaatggtctccattagacgctgtgtttctctactttcttccagctttgccttttgacctcgacgaactgttcaagacactctctcaacgttgttcctcaggtactatgttctgacttttcttcactcactatgtctcaggctaacacttgttggagtcttagttgctaacactagtctaatgcttgtgacaggtgcaagagtagtaatcagtcacccgcaaggtagactaggcttggagcagcaaaggaaagagttttcagatgtggtcgtctctgatttacctgatgagtccacattgagtaatgttgctgagaagcattcatttgagctaacccagtttgttgatgagcaaggcctttatctcgctgttctgaaatcctctaaacaatagtagattatgtcaagagaacatctgttgtatgagattatatttttgcctgttgtgttgtgatgaaatatacagccaacaatggagaaattattcattctgagtaaaacaaaaccttt

SEQ ID NO: 107970 - protein, 223 aa, Arabidopsis thaliana
  peptide (1)..(223): Ceres Seq. ID no. 13652782
  misc_feature (20)..(220): Homolog of NCBI NO: 15227474 NR Description: expressed protein [Arabidopsis thaliana]
  misc_feature (20)..(220): Homolog of NCBI NO: 28207164 NR Description: hypothetical protein [Arabidopsis thaliana]
  misc_feature (20)..(223): Homolog of NCBI NO: 28207166 NR Description: hypothetical protein [Arabidopsis thaliana]
  misc_feature (27)..(220): Homolog of NCBI NO: 34902316 NR Description: Unknown protein [Oryza sativa (japonica
NSHYYLLLLRFSTEAAVLSMFSLSFPSSSSALLPSLVAFDSSRRLSLQPKKLNRLQSHLFSPQHLSFSQSNVSRYRAFCVSSSSPPEGTVSVVDFHEKDWSFLESMEIDSTEHTQKIERIIKAGELSESSRVLVSISSETFVDRLVESSPSQLLLIVHDSLFTLACIKEKYDKVKCWQGEMIYVPEKWSPLDAVFLYFLPALPFDLDELFKTLSQRCSSGTMF

SEQ ID NO: 107971 - protein, 204 aa, Arabidopsis thaliana
  peptide (1)..(204): Ceres Seq. ID no. 13652783
  misc_feature (1)..(201): Homolog of NCBI NO: 15227474 NR Description: expressed protein [Arabidopsis thaliana]
  misc_feature (1)..(201): Homolog of NCBI NO: 28207164 NR Description: hypothetical protein [Arabidopsis thaliana]
  misc_feature (1)..(204): Homolog of NCBI NO: 28207166 NR Description: hypothetical protein [Arabidopsis thaliana]
  misc_feature (8)..(201): Homolog of NCBI NO: 34902316 NR Description: Unknown protein [Oryza sativa (japonica
MFSLSFPSSSSALLPSLVAFDSSRRLSLQPKKLNRLQSHLFSPQHLSFSQSNVSRYRAFCVSSSSPPEGTVSVVDFHEKDWSFLESMEIDSTEHTQKIERIIKAGELSESSRVLVSISSETFVDRLVESSPSQLLLIVHDSLFTLACIKEKYDKVKCWQGEMIYVPEKWSPLDAVFLYFLPALPFDLDELFKTLSQRCSSGTMF

SEQ ID NO: 107972 - protein, 118 aa, Arabidopsis thaliana
  peptide (1)..(118): Ceres Seq. ID no. 13652784
  misc_feature (1)..(115): Homolog of NCBI NO: 15227474 NR Description: expressed protein [Arabidopsis thaliana]
  misc_feature (1)..(115): Homolog of NCBI NO: 28207164 NR Description: hypothetical protein [Arabidopsis thaliana]
  misc_feature (1)..(118): Homolog of NCBI NO: 28207166 NR Description: hypothetical protein [Arabidopsis thaliana]
  misc_feature (1)..(115): Homolog of NCBI NO: 34902316 NR Description: Unknown protein [Oryza sativa (japonica
MEIDSTEHTQKIERIIKAGELSESSRVLVSISSETFVDRLVESSPSQLLLIVHDSLFTLACIKEKYDKVKCWQGEMIYVPEKWSPLDAVFLYFLPALPFDLDELFKTLSQRCSSGTMF

SEQ ID NO: 107973 - DNA, 1675 bp, Arabidopsis thaliana
  misc_feature (1)..(1675): Ceres Seq. ID no. 13652881
  misc_feature: MA Experiment ID: 20000171 Result: Up-regulated in Transcription
  misc_feature: MA Experiment 20000171 PARAMETER Experiment Name: At_42deg_Heat_P Parameter: Age (day) Value: 14
  misc_feature: MA Experiment 20000171 PARAMETER Experiment Name: At_42deg_Heat_P Parameter: Organism Value: A. thaliana
  misc_feature: MA Experiment 20000171 PARAMETER Experiment Name: At_42deg_Heat_P Parameter: Plant Line Value: WS
  misc_feature: MA Experiment 20000171 PARAMETER Experiment Name: At_42deg_Heat_P Parameter: Temperature (deg C) Value: 42 vs. 22
  misc_feature: MA Experiment 20000171 PARAMETER Experiment Name: At_42deg_Heat_P Parameter: Timepoint (hr) Value: 1
  misc_feature: MA Experiment 20000171 PARAMETER Experiment Name: At_42deg_Heat_P Parameter: Tissue Value: Aerial
  misc_feature: MA Experiment ID: 20000173 Result: Up-regulated in Transcription
  misc_feature: MA Experiment 20000173 PARAMETER Experiment Name: At_42deg_Heat_P Parameter: Age (day) Value: 14
  misc_feature: MA Experiment 20000173 PARAMETER Experiment Name: At_42deg_Heat_P Parameter: Organism Value: A. thaliana
  misc_feature: MA Experiment 20000173 PARAMETER Experiment Name: At_42deg_Heat_P Parameter: Plant Line Value: WS
  misc_feature: MA Experiment 20000173 PARAMETER Experiment Name: At_42deg_Heat_P Parameter: Temperature (deg C) Value: 42 vs. 22
  misc_feature: MA Experiment 20000173 PARAMETER Experiment Name: At_42deg_Heat_P Parameter: Timepoint (hr) Value: 6
  misc_feature: MA Experiment 20000173 PARAMETER Experiment Name: At_42deg_Heat_P Parameter: Tissue Value: Aerial
  misc_feature: MA Experiment ID: 20001457 Result: Down-regulated in Transcription
  misc_feature: MA Experiment 20001457 PARAMETER Experiment Name: At_50mM_NH4NO3_L-to-H_P Parameter: Age (day) Value: Undefined
  misc_feature: MA Experiment 20001457 PARAMETER Experiment Name: At_50mM_NH4NO3_L-to-H_P Parameter: Organism Value: Undefined
  misc_feature: MA Experiment 20001457 PARAMETER Experiment Name: At_50mM_NH4NO3_L-to-H_P Parameter: Plant Line Value: Undefined
  misc_feature: MA Experiment 20001457 PARAMETER Experiment Name: At_50mM_NH4NO3_L-to-H_P Parameter: Timepoint (hr) Value: 0.5
  misc_feature: MA Experiment 20001457 PARAMETER Experiment Name: At_50mM_NH4NO3_L-to-H_P Parameter: Tissue Value: Siliques
  misc_feature: MA Experiment 20001457 PARAMETER Experiment Name: At_50mM_NH4NO3_L-to-H_P Parameter: Treatment Value: 50mM NH4NO3 vs. 100mM Manitol
ggggcgacttaaaacgcatttcaagaaaattactaaacactacaacaatcttataataacatttactaaaaatgtccacgtttgtaaaagtcaccgacttaatcactatcatgttctttctagccattgctgccgtcataaccgcctcaaacacagccgagttggatgtacttgaaatggctagaactgctgtggttgaagccaagactagttttgggtcaatggctgtgactgaggcaactagtgaagttgctggtagttattataaattggggttaagtgaatgcgagaagctctacgatgagagtgaagctaggctatcgaaactggtcgtagatcatgagaatttcaccgttgaagatgttagaacgtggctaagtggcgtgcttgcgaatcatcacacttgtttagacggtttaattcagcaacgtcaaggtcataagcctttggtccatagcaacgtcacgttcgtgctccatgaagctttggctttctacaaaaagtctagaggtcatatgaaaaagaggctgcatggaccagcgagacagggccatggaccaacgagaccaaaacatagaccaacgagaccaaatcatggaccaggaagatcacaccatggaccatcaagaccaaaccaaaacggtggaatgttagtgtcatggaatccaacaagttcaagggcagatttcgtggtggctcgggacggttcggcgactcatcggacgataaaccaagcattagccgccgtttcaagaatgggtaaaagtcggttgaatagagtgataatatacataaaagctggtgtttataacgaaaaaatcgaaatagatagacacatgaaaaacatcatgctagttggtgatggtatggaccgtacaattgtcaccaataaccgaaacgtcccggacggttccacgacttatggatcagcgacattcggagtgtccggggatggattttgggcacgggacataacgttcgagaatactgcaggaccacataaacatcaagctgtggcgttgagagtgagctcagacttgtctttattctatcggtgtagtttcaaaggatatcaagatactcttttcacgcactcacttcgtcaattctaccgcgatcgtcatatttatggtacgattgatttcatatttggagatgcggcagctgtttttcagaactgtgatatatttgtgaggcggcctatggatcatcaaggcaacatgatcacagctcaaggaagagacgacccacatacaaattcaggcatttcgatccaacactcacggatcagggccgcaccagaattcgaagcagttaaaggccggtttaagagctacttgggccggccatggaagaagtactcacggacagtgtttctcaaaacagatatcgacgagttgattgacccgagagggtggagagaatggagtggcagttatgctttgtcgacgttgtattacggcgagtttatgaacaccggagctggagcagggactggtagaagggtgaactggccgggatttcacgtcctacgcggtgaggaagaggcttctccgtttaccgtcagccgattcatacaaggagattcttggatccctatcaccggtgtgccgttttcagctggggtttgagtcacttttgaatgaataaatcatcaacacaatataacatattt

SEQ ID NO: 107974 - protein, 519 aa, Arabidopsis thaliana
  peptide (1)..(519): Ceres Seq. ID no. 13652882
  misc_feature (205)..(505): Pfam Name: Pectinesterase Pfam Description: Pectinesterase
  misc_feature (1)..(519): Homolog of NCBI NO: 29824409 NR Description: putative pectinesterase [Arabidopsis thaliana]
  misc_feature (1)..(519): Homolog of NCBI NO: 30695263 NR Description: pectinesterase family [Arabidopsis thaliana]
  misc_feature (1)..(519): Homolog of NCBI NO: 11279194 NR Description: pectinesterase-like protein - Arabidopsis thaliana
  misc_feature (174)..(519): Homolog of NCBI NO: 18406733 NR Description: pectinesterase family [Arabidopsis thaliana] At2g45220/F4L23.27 [Arabidopsis thaliana]
  misc_feature (174)..(519): Homolog of NCBI NO: 25313433 NR Description: probable pectinesterase [imported] - Arabidopsis
  misc_feature (66)..(143): Homolog of NCBI NO: 18406733 NR Description: pectinesterase family [Arabidopsis thaliana] At2g45220/F4L23.27 [Arabidopsis thaliana]
  misc_feature (66)..(143): Homolog of NCBI NO: 25313433 NR Description: probable pectinesterase [imported] - Arabidopsis
  misc_feature (66)..(519): Homolog of NCBI NO: 34393863 NR Description: putative pectinesterase [Oryza sativa (japonica
  misc_feature (170)..(519): Homolog of NCBI NO: 7447371 NR Description: probable pectinesterase (EC 3.1.1.11) precursor - pea >gi|3088646|gb|AAC14742.1| pectin methylesterase [Pisum
  misc_feature (170)..(519): Homolog of NCBI NO: 7447372 NR Description: pectinesterase (EC 3.1.1.11) precursor - garden
MSTFVKVTDLITIMFFLAIAAVITASNTAELDVLEMARTAVVEAKTSFGSMAVTEATSEVAGSYYKLGLSECEKLYDESEARLSKLVVDHENFTVEDVRTWLSGVLANHHTCLDGLIQQRQGHKPLVHSNVTFVLHEALAFYKKSRGHMKKRLHGPARQGHGPTRPKHRPTRPNHGPGRSHHGPSRPNQNGGMLVSWNPTSSRADFVVARDGSATHRTINQALAAVSRMGKSRLNRVIIYIKAGVYNEKIEIDRHMKNIMLVGDGMDRTIVTNNRNVPDGSTTYGSATFGVSGDGFWARDITFENTAGPHKHQAVALRVSSDLSLFYRCSFKGYQDTLFTHSLRQFYRDRHIYGTIDFIFGDAAAVFQNCDIFVRRPMDHQGNMITAQGRDDPHTNSGISIQHSRIRAAPEFEAVKGRFKSYLGRPWKKYSRTVFLKTDIDELIDPRGWREWSGSYALSTLYYGEFMNTGAGAGTGRRVNWPGFHVLRGEEEASPFTVSRFIQGDSWIPITGVPFSAGV

SEQ ID NO: 107975 - protein, 506 aa, Arabidopsis thaliana
  peptide (1)..(506): Ceres Seq. ID no. 13652883
  misc_feature (192)..(492): Pfam Name: Pectinesterase Pfam Description: Pectinesterase
  misc_feature (1)..(506): Homolog of NCBI NO: 29824409 NR Description: putative pectinesterase [Arabidopsis thaliana]
  misc_feature (1)..(506): Homolog of NCBI NO: 30695263 NR Description: pectinesterase family [Arabidopsis thaliana]
  misc_feature (1)..(506): Homolog of NCBI NO: 11279194 NR Description: pectinesterase-like protein - Arabidopsis thaliana
  misc_feature (161)..(506): Homolog of NCBI NO: 18406733 NR Description: pectinesterase family [Arabidopsis thaliana] At2g45220/F4L23.27 [Arabidopsis thaliana]
  misc_feature (161)..(506): Homolog of NCBI NO: 25313433 NR Description: probable pectinesterase [imported] - Arabidopsis
  misc_feature (53)..(130): Homolog of NCBI NO: 18406733 NR Description: pectinesterase family [Arabidopsis thaliana] At2g45220/F4L23.27 [Arabidopsis thaliana]
  misc_feature (53)..(130): Homolog of NCBI NO: 25313433 NR Description: probable pectinesterase [imported] - Arabidopsis
  misc_feature (53)..(506): Homolog of NCBI NO: 34393863 NR Description: putative pectinesterase [Oryza sativa (japonica
  misc_feature (157)..(506): Homolog of NCBI NO: 7447371 NR Description: probable pectinesterase (EC 3.1.1.11) precursor - pea >gi|3088646|gb|AAC14742.1| pectin methylesterase [Pisum
  misc_feature (157)..(506): Homolog of NCBI NO: 7447372 NR Description: pectinesterase (EC 3.1.1.11) precursor - garden
MFFLAIAAVITASNTAELDVLEMARTAVVEAKTSFGSMAVTEATSEVAGSYYKLGLSECEKLYDESEARLSKLVVDHENFTVEDVRTWLSGVLANHHTCLDGLIQQRQGHKPLVHSNVTFVLHEALAFYKKSRGHMKKRLHGPARQGHGPTRPKHRPTRPNHGPGRSHHGPSRPNQNGGMLVSWNPTSSRADFVVARDGSATHRTINQALAAVSRMGKSRLNRVIIYIKAGVYNEKIEIDRHMKNIMLVGDGMDRTIVTNNRNVPDGSTTYGSATFGVSGDGFWARDITFENTAGPHKHQAVALRVSSDLSLFYRCSFKGYQDTLFTHSLRQFYRDRHIYGTIDFIFGDAAAVFQNCDIFVRRPMDHQGNMITAQGRDDPHTNSGISIQHSRIRAAPEFEAVKGRFKSYLGRPWKKYSRTVFLKTDIDELIDPRGWREWSGSYALSTLYYGEFMNTGAGAGTGRRVNWPGFHVLRGEEEASPFTVSRFIQGDSWIPITGVPFSAGV

SEQ ID NO: 107976 - protein, 484 aa, Arabidopsis thaliana
  peptide (1)..(484): Ceres Seq. ID no. 13652884
  misc_feature (170)..(470): Pfam Name: Pectinesterase Pfam Description: Pectinesterase
  misc_feature (1)..(484): Homolog of NCBI NO: 29824409 NR Description: putative pectinesterase [Arabidopsis thaliana]
  misc_feature (1)..(484): Homolog of NCBI NO: 30695263 NR Description: pectinesterase family [Arabidopsis thaliana]
  misc_feature (1)..(484): Homolog of NCBI NO: 11279194 NR Description: pectinesterase-like protein - Arabidopsis thaliana
  misc_feature (139)..(484): Homolog of NCBI NO: 18406733 NR Description: pectinesterase family [Arabidopsis thaliana] At2g45220/F4L23.27 [Arabidopsis thaliana]
  misc_feature (139)..(484): Homolog of NCBI NO: 25313433 NR Description: probable pectinesterase [imported] - Arabidopsis
  misc_feature (31)..(108): Homolog of NCBI NO: 18406733 NR Description: pectinesterase family [Arabidopsis thaliana] At2g45220/F4L23.27 [Arabidopsis thaliana]
  misc_feature (31)..(108): Homolog of NCBI NO: 25313433 NR Description: probable pectinesterase [imported] - Arabidopsis
  misc_feature (31)..(484): Homolog of NCBI NO: 34393863 NR Description: putative pectinesterase [Oryza sativa (japonica
  misc_feature (135)..(484): Homolog of NCBI NO: 7447371 NR Description: probable pectinesterase (EC 3.1.1.11) precursor - pea >gi|3088646|gb|AAC14742.1| pectin methylesterase [Pisum
  misc_feature (135)..(484): Homolog of NCBI NO: 7447372 NR Description: pectinesterase (EC 3.1.1.11) precursor - garden
MARTAVVEAKTSFGSMAVTEATSEVAGSYYKLGLSECEKLYDESEARLSKLVVDHENFTVEDVRTWLSGVLANHHTCLDGLIQQRQGHKPLVHSNVTFVLHEALAFYKKSRGHMKKRLHGPARQGHGPTRPKHRPTRPNHGPGRSHHGPSRPNQNGGMLVSWNPTSSRADFVVARDGSATHRTINQALAAVSRMGKSRLNRVIIYIKAGVYNEKIEIDRHMKNIMLVGDGMDRTIVTNNRNVPDGSTTYGSATFGVSGDGFWARDITFENTAGPHKHQAVALRVSSDLSLFYRCSFKGYQDTLFTHSLRQFYRDRHIYGTIDFIFGDAAAVFQNCDIFVRRPMDHQGNMITAQGRDDPHTNSGISIQHSRIRAAPEFEAVKGRFKSYLGRPWKKYSRTVFLKTDIDELIDPRGWREWSGSYALSTLYYGEFMNTGAGAGTGRRVNWPGFHVLRGEEEASPFTVSRFIQGDSWIPITGVPFSAGV

SEQ ID NO: 107977 - DNA, 749 bp, Arabidopsis thaliana
  misc_feature (1)..(749): Ceres Seq. ID no. 13652889
  misc_feature: MA Experiment ID: 108462 Result: Down-regulated in Transcription
  misc_feature: MA Experiment 108462 PARAMETER Experiment Name: At_Germinating_Seeds_cDNA_P Parameter: Age (day) Value: 2 vs. 0
  misc_feature: MA Experiment 108462 PARAMETER Experiment Name: At_Germinating_Seeds_cDNA_P Parameter: Tissue Value: Germinating Seeds
  misc_feature: MA Experiment ID: 108463 Result: Down-regulated in Transcription
  misc_feature: MA Experiment 108463 PARAMETER Experiment Name: At_Germinating_Seeds_cDNA_P Parameter: Age (day) Value: 3 vs. 0
  misc_feature: MA Experiment 108463 PARAMETER Experiment Name: At_Germinating_Seeds_cDNA_P Parameter: Tissue Value: Germinating Seeds
  misc_feature: MA Experiment ID: 108464 Result: Down-regulated in Transcription
  misc_feature: MA Experiment 108464 PARAMETER Experiment Name: At_Germinating_Seeds_cDNA_P Parameter: Age (day) Value: 4 vs. 0
  misc_feature: MA Experiment 108464 PARAMETER Experiment Name: At_Germinating_Seeds_cDNA_P Parameter: Tissue Value: Germinating Seeds
gaggttacacagacctactcctcaaatccttaacgtactcggagaagaaaaatggtatctgggttgattaatgagaaccctatcatttacccaaagaaagagaggcgtcttcgtactgatacaagcattactgatgagcttacaccagaaccaattgatcaacttgagatttttgatcatataagagatatcaaagatccagagcatcctaatactctggaagatctcagagtagttacagaagactcagttgaagtggatgatgagaacagttatgttagggttacgttcactccaactgtcgaacattgtagcatggcaaccgttatcggtctttgtgtccgtgtgaaacttctacgaagccttccttctcgatacaagattgatataagggtagcacctggttctcatgcaacagaagatgcattgaataaacaactaaacgataaagaacgtgtggcggctgcactagagaatccaaacctcgtggagatggttgatgaatgcctgccatcagaagagtgaattgcttttattttcttgtgagcaagtaatttacacaagcctggtggtctcagtttacactatcaatacatgtctctgttttatttgcaaagattttgatccatcacatcgactaggacttgcattgtaatacttactctgatttcaagtttgttctcaatcatttcaataaagtctcaaacacaagttctttttaataaaagttgacgtgtcatttcgattcc

SEQ ID NO: 107978 - protein, 157 aa, Arabidopsis thaliana; identical to SEQ ID NO: 35345
  peptide (1)..(157): Ceres Seq. ID no. 13652890
  misc_feature (36)..(115): Pfam Name: Domain of unknown function DUF59 Pfam Description: Domain of unknown function DUF59
  misc_feature (1)..(157): Homolog of NCBI NO: 28973748 NR Description: unknown protein [Arabidopsis thaliana]
  misc_feature (1)..(157): Homolog of NCBI NO: 15221347 NR Description: expressed protein [Arabidopsis thaliana]
  misc_feature (1)..(153): Homolog of NCBI NO: 38347077 NR Description: OSJNBa0006A01.18 [Oryza sativa (japonica
  misc_feature (40)..(153): Homolog of NCBI NO: 38567963 NR Description: OSJNBa0093F12.4 [Oryza sativa (japonica
  misc_feature (1)..(153): Homolog of NCBI NO: 15232658 NR Description: hypothetical protein [Arabidopsis thaliana]
  misc_feature (1)..(157): Homolog of NCBI NO: 34896898 NR Description: hypothetical protein [Oryza sativa (japonica group)] >gi|24899438|gb|AAN65008.1| hypothetical protein [Oryza
  misc_feature (1)..(153): Homolog of NCBI NO: 20455368 NR Description: Hypothetical protein At3g09380
  misc_feature (4)..(153): Homolog of NCBI NO: 7706343 NR Description: CGI-128 protein [Homo sapiens]
  misc_feature (1)..(156): Homolog of NCBI NO: 24662341 NR Description: CG7949-PA [Drosophila melanogaster]
  misc_feature (4)..(153): Homolog of NCBI NO: 21312046 NR Description: RIKEN cDNA 1110019N10 [Mus musculus]

SEQ ID NO: 107979 - DNA, 1219 bp, Arabidopsis thaliana
  misc_feature (1)..(1219): Ceres Seq. ID no. 13652895
  misc_feature: MA Experiment ID: 108433 Result: Up-regulated in Transcription
  misc_feature: MA Experiment 108433 PARAMETER Experiment Name: At_rhl_Mutant2_cDNA_P Parameter: Age (day) Value: 7
  misc_feature: MA Experiment 108433 PARAMETER Experiment Name: At_rhl_Mutant2_cDNA_P Parameter: Organism Value: A. thaliana
  misc_feature: MA Experiment 108433 PARAMETER Experiment Name: At_rhl_Mutant2_cDNA_P Parameter: Plant Line Value: rhl Mutant vs. wt landsburg
  misc_feature: MA Experiment 108433 PARAMETER Experiment Name: At_rhl_Mutant2_cDNA_P Parameter: Tissue Value: Roots
  misc_feature: MA Experiment ID: 108461 Result: Up-regulated in Transcription
  misc_feature: MA Experiment 108461 PARAMETER Experiment Name: At_Germinating_Seeds_cDNA_P Parameter: Age (day) Value: 1 vs. 0
  misc_feature: MA Experiment 108461 PARAMETER Experiment Name: At_Germinating_Seeds_cDNA_P Parameter: Tissue Value: Germinating Seeds
  misc_feature: MA Experiment ID: 108462 Result: Up-regulated in Transcription
  misc_feature: MA Experiment 108462 PARAMETER Experiment Name: At_Germinating_Seeds_cDNA_P Parameter: Age (day) Value: 2 vs. 0
  misc_feature: MA Experiment 108462 PARAMETER Experiment Name: At_Germinating_Seeds_cDNA_P Parameter: Tissue Value: Germinating Seeds
  misc_feature: MA Experiment ID: 108463 Result: Up-regulated in Transcription
  misc_feature: MA Experiment 108463 PARAMETER Experiment Name: At_Germinating_Seeds_cDNA_P Parameter: Age (day) Value: 3 vs. 0
  misc_feature: MA Experiment 108463 PARAMETER Experiment Name: At_Germinating_Seeds_cDNA_P Parameter: Tissue Value: Germinating Seeds
  misc_feature: MA Experiment ID: 108464 Result: Up-regulated in Transcription
  misc_feature: MA Experiment 108464 PARAMETER Experiment Name: At_Germinating_Seeds_cDNA_P Parameter: Age (day) Value: 4 vs. 0
  misc_feature: MA Experiment 108464 PARAMETER Experiment Name: At_Germinating_Seeds_cDNA_P Parameter: Tissue Value: Germinating Seeds
  misc_feature: MA Experiment ID: 108501 Result: Down-regulated in Transcription
  misc_feature: MA Experiment 108501 PARAMETER Experiment Name: At_ap2_floral_buds_cDNA_P Parameter: Plant Line Value: ap2 (Ler.)
  misc_feature: MA Experiment 108501 PARAMETER Experiment Name: At_ap2_floral_buds_cDNA_P Parameter: Tissue Value: Closed Flower
  misc_feature: MA Experiment ID: 108579 Result: Down-regulated in Transcription
  misc_feature: MA Experiment 108579 PARAMETER Experiment Name: At_4deg_Cold_cDNA_P Parameter: Temperature (deg C) Value: 4 vs. 22
  misc_feature: MA Experiment 108579 PARAMETER Experiment Name: At_4deg_Cold_cDNA_P Parameter: Timepoint (hr) Value: 6
  misc_feature: MA Experiment 108579 PARAMETER Experiment Name: At_4deg_Cold_cDNA_P Parameter: Tissue Value: Aerial
  misc_feature: MA Experiment ID: 20000030 Result: Down-regulated in Transcription
  misc_feature: MA Experiment 20000030 PARAMETER Experiment Name: At_CS6630_Roots_cDNA_P Parameter: Plant Line Value: CS6630 vs. WS
  misc_feature: MA Experiment 20000030 PARAMETER Experiment Name: At_CS6630_Roots_cDNA_P Parameter: Tissue Value: Roots
  misc_feature: MA Experiment ID: 20000113 Result: Down-regulated in Transcription
  misc_feature: MA Experiment 20000113 PARAMETER Experiment Name: At_42deg_Heat_cDNA_P Parameter: Temperature (deg C) Value: 42 vs. 22
  misc_feature: MA Experiment 20000113 PARAMETER Experiment Name: At_42deg_Heat_cDNA_P Parameter: Timepoint (hr) Value: 8
  misc_feature: MA Experiment 20000113 PARAMETER Experiment Name: At_42deg_Heat_cDNA_P Parameter: Tissue Value: Aerial
  misc_feature: MA Experiment ID: 20000179 Result: Up-regulated in Transcription
  misc_feature: MA Experiment 20000179 PARAMETER Experiment Name: At_Germinating_Seeds_P Parameter: Age (hr) Value: 6 vs. 0
  misc_feature: MA Experiment 20000179 PARAMETER Experiment Name: At_Germinating_Seeds_P Parameter: Tissue Value: Germinating Seeds
  misc_feature: MA Experiment ID: 20000180 Result: Up-regulated in Transcription
  misc_feature: MA Experiment 20000180 PARAMETER Experiment Name: At_Germinating_Seeds_P Parameter: Age (hr) Value: 24 vs. 0
  misc_feature: MA Experiment 20000180 PARAMETER Experiment Name: At_Germinating_Seeds_P Parameter: Tissue Value: Germinating Seeds
  misc_feature: MA Experiment ID: 20000224 Result: Down-regulated in Transcription
  misc_feature: MA Experiment ID: 20000227 Result: Down-regulated in Transcription
  misc_feature: MA Experiment 20000227 PARAMETER Experiment Name: At_Root-Tips-vs-Tops_P Parameter: Tissue Value: Root Tips vs. Root Tops
  misc_feature: MA Experiment ID: 20001557 Result: Down-regulated in Transcription
  misc_feature: MA Experiment 20001557 PARAMETER Experiment Name: At_Drought_Soil_Dry_P Parameter: Age (day) Value: 27
  misc_feature: MA Experiment 20001557 PARAMETER Experiment Name: At_Drought_Soil_Dry_P Parameter: Organism Value: A. thaliana
  misc_feature: MA Experiment 20001557 PARAMETER Experiment Name: At_Drought_Soil_Dry_P Parameter: Plant Line Value: WS
  misc_feature: MA Experiment 20001557 PARAMETER Experiment Name: At_Drought_Soil_Dry_P Parameter: Post Timepoint (hr) Value: 3
  misc_feature: MA Experiment 20001557 PARAMETER Experiment Name: At_Drought_Soil_Dry_P Parameter: Post-Treatment Value: Re-Water vs. No Drought
  misc_feature: MA Experiment 20001557 PARAMETER Experiment Name: At_Drought_Soil_Dry_P Parameter: Timepoint (day) Value: 13
  misc_feature: MA Experiment 20001557 PARAMETER Experiment Name: At_Drought_Soil_Dry_P Parameter: Treatment Value: Drought vs. No Drought
  misc_feature: MA Experiment ID: 20001558 Result: Down-regulated in Transcription
  misc_feature: MA Experiment 20001558 PARAMETER Experiment Name: At_Drought_Soil_Dry_P Parameter: Age (day) Value: 27
  misc_feature: MA Experiment 20001558 PARAMETER Experiment Name: At_Drought_Soil_Dry_P Parameter: Organism Value: A. thaliana
  misc_feature: MA Experiment 20001558 PARAMETER Experiment Name: At_Drought_Soil_Dry_P Parameter: Plant Line Value: WS
  misc_feature: MA Experiment 20001558 PARAMETER Experiment Name: At_Drought_Soil_Dry_P Parameter: Post Timepoint (hr) Value: 6
  misc_feature: MA Experiment 20001558 PARAMETER Experiment Name: At_Drought_Soil_Dry_P Parameter: Post-Treatment Value: Re-Water vs. No Drought
  misc_feature: MA Experiment 20001558 PARAMETER Experiment Name: At_Drought_Soil_Dry_P Parameter: Timepoint (day) Value: 13
  misc_feature: MA Experiment 20001558 PARAMETER Experiment Name: At_Drought_Soil_Dry_P Parameter: Treatment Value: Drought vs. No Drought
acgtgtatgaaaaaaaacgaaggatccttttttactggaaagatgttttttttttcttatcttctgagataaattgcgatagagagagagaacaaaaaaattctcagtgagcgcttattgatcaacaatggcgaaagagacagtgtgtgtaaccggagctaatggtttcatcggatcttggataatccgaacgttaattgagaaaggatatactaaaatccacgcttcgatttacccaggatccgacccgactcatcttctgcaactacccggatccgattctaagatcaagatctttgaagcggatctcttagactctgatgcaatctccagagctattgatggatgtgcgggagtgttccacgtggcgtcaccttgtacgttggatccaccggtagatccagagaaggagctggtcgaaccggcggttaagggaacgatcaatgtgttggaagctgctaagaggtttaatgtgagacgcgtggtgatcacgtcatctatctccgcattggttcctaaccctaattggccggaaaaagttcccgtcgatgagtcgtcgtggtccgatcttgatttttgcaagtcgaggcagaaatggtatccaatttcgaagacattagctgagaaagcagcttgggaattttcggagaagcatggaaccaacattgtgacgattcatccatcaacatgtctcggaccgcttctgcaaccgaacctaaacgcaagctgtgctgttctgctacagcttttacaaggctcgaccgagacgcaagagcatcactggctcggtgtggttcacgtgaaagatgtggctaaaggtcatgtgatgctattcgaaacacctgacgcttctggacggtttttatgcactaatgggatttatcagttcagtgagtttgctgctcttgtgtctaagctcttccctgagtttgctgttcacaagtttgataaagagactcaacctgggcttacgtcgtgtaatgatgcggctaagcgattgattgagctcgggctggtttttactgcggttgaagatgcggttaaggagacggtccagagtcttagagacaaaggcttcctctgagaatgtatgatatatctttgcaaatttcaaaatctgtgacctttattgtatgatacaagtagagaaactaagggcatctccattcatgagaaacccataaagtttctcaaacaaaaaaaatattaatattatatt

SEQ ID NO: 107980 - protein, 318 aa, Arabidopsis thaliana; identical to SEQ ID NO: 40384
  peptide (1)..(318): Ceres Seq. ID no. 13652896
  misc_feature (6)..(292): Pfam Name: NAD dependent epimerase/dehydratase family Pfam Description: NAD dependent epimerase/dehydratase family
  misc_feature (1)..(318): Homolog of NCBI NO: 15226955 NR Description: cinnamoyl-CoA reductase family [Arabidopsis
  misc_feature (6)..(318): Homolog of NCBI NO: 34906124 NR Description: putative cinnamoyl-CoA reductase [Oryza sativa
  misc_feature (1)..(318): Homolog of NCBI NO: 15237678 NR Description: cinnamoyl-CoA reductase family [Arabidopsis
  misc_feature (4)..(318): Homolog of NCBI NO: 28876000 NR Description: putative cinnamoyl-CoA reductase [Oryza sativa
  misc_feature (6)..(318): Homolog of NCBI NO: 34907928 NR Description: putative cinnamoyl CoA reductase [Oryza sativa
  misc_feature (4)..(318): Homolog of NCBI NO: 9998901 NR Description: cinnamoyl-CoA reductase [Populus balsamifera
  misc_feature (4)..(318): Homolog of NCBI NO: 40233135 NR Description: cinnamoyl CoA reductase [Populus tomentosa]
  misc_feature (4)..(318): Homolog of NCBI NO: 2960364 NR Description: cinnamoyl CoA reductase [Populus balsamifera
  misc_feature (1)..(318): Homolog of NCBI NO: 30694964 NR Description: cinnamyl-alcohol dehydrogenase (CAD), putative
  misc_feature (4)..(318): Homolog of NCBI NO: 31414896 NR Description: cinnamoyl CoA reductase [Fragaria x ananassa]

SEQ ID NO: 107981 - DNA, 2304 bp, Arabidopsis thaliana
  misc_feature (1)..(2304): Ceres Seq. ID no. 13652905
  misc_feature: MA Experiment ID: 20000180 Result: Up-regulated in Transcription
  misc_feature: MA Experiment 20000180 PARAMETER Experiment Name: At_Germinating_Seeds_P Parameter: Age (hr) Value: 24 vs. 0
  misc_feature: MA Experiment 20000180 PARAMETER Experiment Name: At_Germinating_Seeds_P Parameter: Tissue Value: Germinating Seeds
  misc_feature: MA Experiment ID: 20000184 Result: Up-regulated in Transcription
  misc_feature: MA Experiment 20000184 PARAMETER Experiment Name: At_Shoots__P Parameter: Age (day) Value: 7
  misc_feature: MA Experiment 20000184 PARAMETER Experiment Name: At_Shoots__P Parameter: Tissue Value: Shoots vs. Whole Plant
  misc_feature: MA Experiment ID: 20000185 Result: Up-regulated in Transcription
  misc_feature: MA Experiment 20000185 PARAMETER Experiment Name: At_Roots__P Parameter: Age (day) Value: 7 vs. 21
  misc_feature: MA Experiment 20000185 PARAMETER Experiment Name: At_Roots__P Parameter: Organism Value: A. thaliana
  misc_feature: MA Experiment 20000185 PARAMETER Experiment Name: At_Roots__P Parameter: Tissue Value: Roots vs. Whole Plant
  misc_feature: MA Experiment ID: 20000227 Result: Up-regulated in Transcription
  misc_feature: MA Experiment 20000227 PARAMETER Experiment Name: At_Root-Tips-vs-Tops_P Parameter: Tissue Value: Root Tips vs. Root Tops
  misc_feature: MA Experiment ID: 20000265 Result: Up-regulated in Transcription
  misc_feature: MA Experiment 20000265 PARAMETER Experiment Name: At_Open_Flower_P Parameter: Age (day) Value: 21
  misc_feature: MA Experiment 20000265 PARAMETER Experiment Name: At_Open_Flower_P Parameter: Plant Line Value: WS
  misc_feature: MA Experiment 20000265 PARAMETER Experiment Name: At_Open_Flower_P Parameter: Tissue Value: Closed Flower vs. Whole Plant
  misc_feature: MA Experiment ID: 20000438 Result: Up-regulated in Transcription
  misc_feature: MA Experiment 20000438 PARAMETER Experiment Name: At_Shoots__P Parameter: Age (day) Value: 14
  misc_feature: MA Experiment 20000438 PARAMETER Experiment Name: At_Shoots__P Parameter: Tissue Value: Shoots vs. Whole Plant
  misc_feature: MA Experiment ID: 20000439 Result: Up-regulated in Transcription
  misc_feature: MA Experiment 20000439 PARAMETER Experiment Name: At_Roots__P Parameter: Age (day) Value: 14 vs. 21
  misc_feature: MA Experiment 20000439 PARAMETER Experiment Name: At_Roots__P Parameter: Organism Value: A. thaliana
  misc_feature: MA Experiment 20000439 PARAMETER Experiment Name: At_Roots__P Parameter: Tissue Value: Roots vs. Whole Plant
  misc_feature: MA Experiment ID: 20000495 Result: Up-regulated in Transcription
  misc_feature: MA Experiment 20000495 PARAMETER Experiment Name: At_Guard_Cells_P Parameter: Harvest Date Value: 8/2/2002
  misc_feature: MA Experiment 20000495 PARAMETER Experiment Name: At_Guard_Cells_P Parameter: Organism Value: A. thaliana
  misc_feature: MA Experiment 20000495 PARAMETER Experiment Name: At_Guard_Cells_P Parameter: Tissue Value: Guard Cells vs. Leaves
  misc_feature: MA Experiment ID: 20000794 Result: Up-regulated in Transcription
  misc_feature: MA Experiment 20000794 PARAMETER Experiment Name: At_Petals_P Parameter: Age (day) Value: 23-25 days
  misc_feature: MA Experiment 20000794 PARAMETER Experiment Name: At_Petals_P Parameter: Plant Line Value: WS
  misc_feature: MA Experiment 20000794 PARAMETER Experiment Name: At_Petals_P Parameter: Tissue Value: Petals vs. Whole plant
  misc_feature: MA Experiment ID: 20001450 Result: Up-regulated in Transcription
  misc_feature: MA Experiment 20001450 PARAMETER Experiment Name: At_Far-red-induction_P Parameter: Age (day) Value: 7
  misc_feature: MA Experiment 20001450 PARAMETER Experiment Name: At_Far-red-induction_P Parameter: Light Value: Far-red vs. White
  misc_feature: MA Experiment 20001450 PARAMETER Experiment Name: At_Far-red-induction_P Parameter: Organism Value: A. thaliana
  misc_feature: MA Experiment 20001450 PARAMETER Experiment Name: At_Far-red-induction_P Parameter: Plant Line Value: Columbia
  misc_feature: MA Experiment 20001450 PARAMETER Experiment Name: At_Far-red-induction_P Parameter: Timepoint (hr) Value: 8
  misc_feature: MA Experiment 20001450 PARAMETER Experiment Name: At_Far-red-induction_P Parameter: Tissue Value: Whole Plant
atcttattctctatcttctctcttccctcttctctcttctcttcatatgtgtagggtcgaagacaagaacgacaccgtttcaagggttgcaatttgcaaccttttgattggtctctcttctctttgcccaaccaaaaacaacctttgatgatataaagatcagccaactttgtccatcccaattctctcttttttttttgtttccctaatgttttagacaaacacaattttccataattatttatttattcaatttttatctgtttttgggttacatatatcatcatcattggagactgccatatttgttaatcgtgatattaatttaactaatgtctcaaacaagctactaccgatcaccgttcggagacacgacttacaccaaagtgttcgtcggaggattagcgtgggaaactcctaccgacgaaatgcgtcgttacttcgaacagttcggagagattcttgaagccgtcatcatcaccgataaaaacaccggcaagtctaaaggctacggattcgtgacgtttcgggagtcggactcagccacgagagccgtcgctgatccaaatccggtgatcgacggaagaaaagccaattgtaatattgcatcttttggacggcctcgaccatcgccgcctcgaggtcgaggacaaacaggaagtccgagtcagtaccaaagtggaggaccatcaacctataccgggatggctgcaccactgccaccggctgcagctccccagctcatgtatccgtcgtacgggtacacctataaccctgatcaatttgggtaccaccaagcattgtacaacacacagttgcaacaagcacaatactatcagcagcagcaacagctttatggaggaggagcaacatcaccatcatcatcaggagcaaccatcatgccttctccatactattatggctattctcttcaagctcctagagtaccataccaacaccatcatcatcttcctcaaccatataatcctcaacaacatcatcatcaacggttttcttctccttctttcctcgtttacccatccaattcctcttttgcccctcctctccaaggagtactatcttcttccaccggtacgtacttaataaattcctttttttttttcatatttctttggatatatttctagttgtctactcatactaattagttttaatttagaaacccatataacttaacatgatatcaagacctctatatattttttaaaaaagtgcattcattgatcacgatatcataaccctagattgttaatccaaatagagtgtgttcttgatccaaaaagtatcatctcatgatgactagaagaaccaccttatcgaaaatacgttttttagaaatctcacatctaaaataaaatgtaatctaatgcaatagacagaaatcatcaaatctcttaatataaatagttttgagttaaaattcctaacaacttacatagttcagtgttttatctctataatatttgttgtccctcttattcaaacgacaccgttcatcaccacgtgtgattgcattgatcattcatgcacgtgatctatccgttttgctgtcttaaactcgaaaaagaaacatatatttgatgcactctaagcaaaaaaaaaaagaagggattgaaatggaaaagaaaaggagagtgaatgattggagagaacagtgaataaaggatagcatgtggagtgagctgtctgtttcaattacattggtatatgtgtctcttctatcatctgtcaatttggtcgccaatcgtcatgccagtgaagccaccatacactgacaacttctacccaaaacgatatatttatgtgtctatatttgcatattcgttttggacactattgatcatatattgatcattgcataaattattcatctacttaaatcagaataatttgcaacattagtaggaatacactatatattgtctgattttatatgttttttgttttgtttcctccagaatctgaagcagtaccacaacaagtaccagctgcagaaggcgaagcaacaacgactgctcctgaaatcacaacaagcaacaccaaagaacctatttcttcttgatctctctctcatttcccaatttgtacaatcttcacatttttacctctctctctctgaaaaaaagaaaacagctaattcatttatttctcaaccagagcaatgacttgagccccaagaagacagactcaacactgtcaaacttaaaaagacggctcaagataaatctcttgtcatattttgctctttttctgacgggatatatataaaaatttgagctattc

SEQ ID NO: 107982 - protein, 271 aa, Arabidopsis thaliana
  peptide (1)..(271): Ceres Seq. ID no. 13652906
  misc_feature (19)..(76): Pfam Name: RNA recognition motif. (a.k.a. RRM, RBD, or RNP domain) Pfam Description: RNA recognition motif. (a.k.a. RRM, RBD, or RNP
  misc_feature (1)..(253): Homolog of NCBI NO: 18411885 NR Description: RNA recognition motif (RRM)-containing protein
  misc_feature (1)..(253): Homolog of NCBI NO: 25405025 NR Description: protein F3F9.20 [imported] - Arabidopsis thaliana
  misc_feature (1)..(256): Homolog of NCBI NO: 25518109 NR Description: T16E15.6 protein - Arabidopsis thaliana Contains similarity to seb4D protein from Mus musculus gb|X75316
  misc_feature (1)..(144): Homolog of NCBI NO: 18395106 NR Description: RNA recognition motif (RRM)-containing protein thaliana] >gi|21593674|gb|AAM65641.1| unknown [Arabidopsis
  misc_feature (6)..(246): Homolog of NCBI NO: 22330665 NR Description: RNA recognition motif (RRM)-containing protein
  misc_feature (11)..(245): Homolog of NCBI NO: 34907334 NR Description: P0698A10.29 [Oryza sativa (japonica
  misc_feature (6)..(260): Homolog of NCBI NO: 18394923 NR Description: RNA recognition motif (RRM)-containing protein
  misc_feature (6)..(260): Homolog of NCBI NO: 15010636 NR Description: At1g20880/F9H16_14 [Arabidopsis thaliana]
  misc_feature (6)..(260): Homolog of NCBI NO: 23505939 NR Description: At1g20880/F9H16_14 [Arabidopsis thaliana]
  misc_feature (12)..(245): Homolog of NCBI NO: 18395177 NR Description: RNA recognition motif (RRM)-containing protein thaliana] >gi|13605871|gb|AAK32921.1|AF367334_1 [Arabidopsis thaliana] >gi|16323282|gb|AAL15396.1|
MSQTSYYRSPFGDTTYTKVFVGGLAWETPTDEMRRYFEQFGEILEAVIITDKNTGKSKGYGFVTFRESDSATRAVADPNPVIDGRKANCNIASFGRPRPSPPRGRGQTGSPSQYQSGGPSTYTGMAAPLPPAAAPQLMYPSYGYTYNPDQFGYHQALYNTQLQQAQYYQQQQQLYGGGATSPSSSGATIMPSPYYYGYSLQAPRVPYQHHHHLPQPYNPQQHHHQRFSSPSFLVYPSNSSFAPPLQGVLSSSTGTYLINSFFFFIFLWIYF

SEQ ID NO: 107983 - protein, 239 aa, Arabidopsis thaliana
  peptide (1)..(239): Ceres Seq. ID no. 13652907
  misc_feature (1)..(44): Pfam Name: RNA recognition motif. (a.k.a. RRM, RBD, or RNP domain) Pfam Description: RNA recognition motif. (a.k.a. RRM, RBD, or RNP
  misc_feature (1)..(221): Homolog of NCBI NO: 18411885 NR Description: RNA recognition motif (RRM)-containing protein
  misc_feature (1)..(221): Homolog of NCBI NO: 25405025 NR Description: protein F3F9.20 [imported] - Arabidopsis thaliana
  misc_feature (1)..(224): Homolog of NCBI NO: 25518109 NR Description: T16E15.6 protein - Arabidopsis thaliana Contains similarity to seb4D protein from Mus musculus gb|X75316
  misc_feature (1)..(112): Homolog of NCBI NO: 18395106 NR Description: RNA recognition motif (RRM)-containing protein thaliana] >gi|21593674|gb|AAM65641.1| unknown [Arabidopsis
  misc_feature (1)..(214): Homolog of NCBI NO: 22330665 NR Description: RNA recognition motif (RRM)-containing protein
  misc_feature (1)..(213): Homolog of NCBI NO: 34907334 NR Description: P0698A10.29 [Oryza sativa (japonica
  misc_feature (1)..(228): Homolog of NCBI NO: 18394923 NR Description: RNA recognition motif (RRM)-containing protein
  misc_feature (1)..(228): Homolog of NCBI NO: 15010636 NR Description: At1g20880/F9H16_14 [Arabidopsis thaliana]
  misc_feature (1)..(228): Homolog of NCBI NO: 23505939 NR Description: At1g20880/F9H16_14 [Arabidopsis thaliana]
  misc_feature (1)..(213): Homolog of NCBI NO: 18395177 NR Description: RNA recognition motif (RRM)-containing protein thaliana] >gi|13605871|gb|AAK32921.1|AF367334_1 [Arabidopsis thaliana] >gi|16323282|gb|AAL15396.1|
MRRYFEQFGEILEAVIITDKNTGKSKGYGFVTFRESDSATRAVADPNPVIDGRKANCNIASFGRPRPSPPRGRGQTGSPSQYQSGGPSTYTGMAAPLPPAAAPQLMYPSYGYTYNPDQFGYHQALYNTQLQQAQYYQQQQQLYGGGATSPSSSGATIMPSPYYYGYSLQAPRVPYQHHHHLPQPYNPQQHHHQRFSSPSFLVYPSNSSFAPPLQGVLSSSTGTYLINSFFFFIFLWIYF

SEQ ID NO: 107984 - protein, 147 aa, Arabidopsis thaliana
  peptide (1)..(147): Ceres Seq. ID no. 13652908
  misc_feature (1)..(129): Homolog of NCBI NO: 18411885 NR Description: RNA recognition motif (RRM)-containing protein
  misc_feature (1)..(129): Homolog of NCBI NO: 25405025 NR Description: protein F3F9.20 [imported] - Arabidopsis thaliana
  misc_feature (1)..(132): Homolog of NCBI NO: 25518109 NR Description: T16E15.6 protein - Arabidopsis thaliana Contains similarity to seb4D protein from Mus musculus gb|X75316
  misc_feature (1)..(20): Homolog of NCBI NO: 18395106 NR Description: RNA recognition motif (RRM)-containing protein thaliana] >gi|21593674|gb|AAM65641.1| unknown [Arabidopsis
  misc_feature (1)..(122): Homolog of NCBI NO: 22330665 NR Description: RNA recognition motif (RRM)-containing protein
  misc_feature (1)..(121): Homolog of NCBI NO: 34907334 NR Description: P0698A10.29 [Oryza sativa (japonica
  misc_feature (1)..(136): Homolog of NCBI NO: 18394923 NR Description: RNA recognition motif (RRM)-containing protein
  misc_feature (1)..(136): Homolog of NCBI NO: 15010636 NR Description: At1g20880/F9H16_14 [Arabidopsis thaliana]
  misc_feature (1)..(136): Homolog of NCBI NO: 23505939 NR Description: At1g20880/F9H16_14 [Arabidopsis thaliana]
  misc_feature (1)..(121): Homolog of NCBI NO: 18395177 NR Description: RNA recognition motif (RRM)-containing protein thaliana] >gi|13605871|gb|AAK32921.1|AF367334_1 [Arabidopsis thaliana] >gi|16323282|gb|AAL15396.1|
MAAPLPPAAAPQLMYPSYGYTYNPDQFGYHQALYNTQLQQAQYYQQQQQLYGGGATSPSSSGATIMPSPYYYGYSLQAPRVPYQHHHHLPQPYNPQQHHHQRFSSPSFLVYPSNSSFAPPLQGVLSSSTGTYLINSFFFFIFLWIYF

SEQ ID NO: 107985 - DNA, 1931 bp, Arabidopsis thaliana
  misc_feature (1)..(1931): Ceres Seq. ID no. 13652913
  misc_feature: MA Experiment ID: 20000234 Result: Down-regulated in Transcription
  misc_feature: MA Experiment 20000234 PARAMETER Experiment Name: At_Siliques_P Parameter: Age (day) Value: 21
  misc_feature: MA Experiment 20000234 PARAMETER Experiment Name: At_Siliques_P Parameter: Organism Value: A. thaliana
  misc_feature: MA Experiment 20000234 PARAMETER Experiment Name: At_Siliques_P Parameter: Plant Line Value: WS
  misc_feature: MA Experiment 20000234 PARAMETER Experiment Name: At_Siliques_P Parameter: Tissue Value: Less Than 5mm Siliques vs. Whole Plant
  misc_feature: MA Experiment ID: 20000235 Result: Down-regulated in Transcription
  misc_feature: MA Experiment 20000235 PARAMETER Experiment Name: At_Siliques_P Parameter: Age (day) Value: 21
  misc_feature: MA Experiment 20000235 PARAMETER Experiment Name: At_Siliques_P Parameter: Organism Value: A. thaliana
  misc_feature: MA Experiment 20000235 PARAMETER Experiment Name: At_Siliques_P Parameter: Plant Line Value: WS
  misc_feature: MA Experiment 20000235 PARAMETER Experiment Name: At_Siliques_P Parameter: Tissue Value: 5-10mm Siliques vs. Whole Plant
  misc_feature: MA Experiment ID: 20000438 Result: Down-regulated in Transcription
  misc_feature: MA Experiment 20000438 PARAMETER Experiment Name: At_Shoots__P Parameter: Age (day) Value: 14
  misc_feature: MA Experiment 20000438 PARAMETER Experiment Name: At_Shoots__P Parameter: Tissue Value: Shoots vs. Whole Plant
  misc_feature: MA Experiment ID: 20000794 Result: Up-regulated in Transcription
  misc_feature: MA Experiment 20000794 PARAMETER Experiment Name: At_Petals_P Parameter: Age (day) Value: 23-25 days
  misc_feature: MA Experiment 20000794 PARAMETER Experiment Name: At_Petals_P Parameter: Plant Line Value: WS
  misc_feature: MA Experiment 20000794 PARAMETER Experiment Name: At_Petals_P Parameter: Tissue Value: Petals vs. Whole plant
  misc_feature: MA Experiment ID: 20001558 Result: Down-regulated in Transcription
  misc_feature: MA Experiment 20001558 PARAMETER Experiment Name: At_Drought_Soil_Dry_P Parameter: Age (day) Value: 27
  misc_feature: MA Experiment 20001558 PARAMETER Experiment Name: At_Drought_Soil_Dry_P Parameter: Organism Value: A. thaliana
  misc_feature: MA Experiment 20001558 PARAMETER Experiment Name: At_Drought_Soil_Dry_P Parameter: Plant Line Value: WS
  misc_feature: MA Experiment 20001558 PARAMETER Experiment Name: At_Drought_Soil_Dry_P Parameter: Post Timepoint (hr) Value: 6
  misc_feature: MA Experiment 20001558 PARAMETER Experiment Name: At_Drought_Soil_Dry_P Parameter: Post-Treatment Value: Re-Water vs. No Drought
  misc_feature: MA Experiment 20001558 PARAMETER Experiment Name: At_Drought_Soil_Dry_P Parameter: Timepoint (day) Value: 13
  misc_feature: MA Experiment 20001558 PARAMETER Experiment Name: At_Drought_Soil_Dry_P Parameter: Treatment Value: Drought vs. No Drought
  misc_feature: MA Experiment ID: 20001560 Result: Down-regulated in Transcription
  misc_feature: MA Experiment 20001560 PARAMETER Experiment Name: At_Drought_Soil_Dry_P Parameter: Age (day) Value: 28
  misc_feature: MA Experiment 20001560 PARAMETER Experiment Name: At_Drought_Soil_Dry_P Parameter: Organism Value: A. thaliana
  misc_feature: MA Experiment 20001560 PARAMETER Experiment Name: At_Drought_Soil_Dry_P Parameter: Plant Line Value: WS
  misc_feature: MA Experiment 20001560 PARAMETER Experiment Name: At_Drought_Soil_Dry_P Parameter: Post Timepoint (hr) Value: None
  misc_feature: MA Experiment 20001560 PARAMETER Experiment Name: At_Drought_Soil_Dry_P Parameter: Post-Treatment Value: None
  misc_feature: MA Experiment 20001560 PARAMETER Experiment Name: At_Drought_Soil_Dry_P Parameter: Timepoint (day) Value: 14
  misc_feature: MA Experiment 20001560 PARAMETER Experiment Name: At_Drought_Soil_Dry_P Parameter: Treatment Value: Drought vs. No Drought
  misc_feature: Pfam Name: zf-C3HC4 Pfam Description: Zinc finger, C3HC4 type (RING finger)
atcaaatacaacattgtagcaattgcgttttcgactttatagagatattttcatagagatggtctcgaagctaacaagttgacaaatttcttcgttataagagagatagatgagttgcaggagagtgctgaagtcgatacaagccttggcggctcatagtttactcttctgtttcacgcttttattggtgcttaaactcgatcacaccgtctcttcctcatggtggatggtgtttttcccgctgtgggcttttcatgcagttgttgcaaggggcagattctctcttcctgctcctgttgctccacgtaaccgtcattgggctccttgccatgctgttgtcgcgacaccgttacttgtagcatttgaattactcctctgtatatacctcgagagttcttatgctcgttggccaccagctgtcagtttgaagattgctttcttaccattgttggcttttgaattaacaatactggtagacaatttgagaatgtgtcgagcattgatgccaggagacgacgacagcataactgatgatgcaatatgggaggcacttcctcatttctgggttgcaatttccatggtgttcacgttggctgctacgttctttaccctcctaaagctttctggcgacgtagttgctcttggatggtgggatctattcataaattttggaattgccgagtgctttgcttttcttgtttgcacaaaatggtccaatccagtaatccatagaagctcacgtgcccgagaaaccgggtcatcttctaccagtatcagatatcttgactggaacagcggccttgtggttgctccagaagaggatagacaccaagatagatggtgcggtttgcaagatattggtggtcatatgttaaaaattcccgttattttatttcaagttgtcctttgcatgtatttagaggggactcctgaaagagctaaggatatatcgatcccagtactgttttctccactattcctattgcaaggcctcggtgttctctttgctgcttctaaactcctagagaagatcgtcctcttactccgcggggaagctggtccgggattgtattttagattttcatcaagtgcccatgattgcttgggattcttgcaccatggttccaggctattaggttggtggtcaattgacgaaggaagccgggaggaacaagctcgactgtactttgatcaagaatctggttacaatacattcagtggtcatccgcctgagatagtcaagaaaatgccaaaggaagatcttgcagaagaggtaactttacctctctggcatttttttgtttcccaattcagtgctgatattaactttaggttctctttgttgttgaatcttgtttcttctagtttcagcattgcttaagtgttgtttgcattcaatctaatttgatatctctaggtgtggagacttcaagcagcacttggtgaacaaacagaaatcacaaaattcagccagcaggaatatgaaagactgcaaaatgagaaagtgctgtgtagggtttgctttgaaaaagatatcagtttggtactgcttccatgtagacaccgtgttctctgcagaacctgtgcagacaagtgtacaacatgtccaatatgtcgtatagacattgaaaaacgactatctgtatacgacgtatgactgtgttaactttggcccatgatcaagagtaggatttgtggttgatgctccagacaaacattccagtttaccaaccatactgtttcccaaacttctgatgtttttgctgaatctttttgtttgtctgaatcagcagctagtataaaaaaaagtataggtgtatacgtgtatgtatttttctgtaggaaacctcattcaaactttagctgtaacatacaaagtttgtataatatccatctcttttttgtataaatcacaaactaagttatgcttt

SEQ ID NO: 107986 - protein, 423 aa, Arabidopsis thaliana
  peptide (1)..(423): Ceres Seq. ID no. 13652914
  misc_feature: Pfam Name: zf-C3HC4 Pfam Description: Zinc finger, C3HC4 type (RING finger)
  misc_feature (1)..(389): Homolog of NCBI NO: 18394611 NR Description: zinc finger (C3HC4-type RING finger) protein [Arabidopsis thaliana] >gi|21592855|gb|AAM64805.1| unknown
  misc_feature (1)..(389): Homolog of NCBI NO: 22330616 NR Description: zinc finger (C3HC4-type RING finger) protein
  misc_feature (150)..(417): Homolog of NCBI NO: 6714286 NR Description: F15H18.5 [Arabidopsis thaliana]
  misc_feature (40)..(149): Homolog of NCBI NO: 6714286 NR Description: F15H18.5 [Arabidopsis thaliana]
  misc_feature (8)..(389): Homolog of NCBI NO: 13937305 NR Description: unknown protein [Oryza sativa]
  misc_feature (1)..(389): Homolog of NCBI NO: 18409134 NR Description: expressed protein [Arabidopsis thaliana] unknown protein [Arabidopsis thaliana]
  misc_feature (1)..(236): Homolog of NCBI NO: 25373333 NR Description: unknown protein F2P9.18 [imported] - Arabidopsis
  misc_feature (270)..(340): Homolog of NCBI NO: 25373333 NR Description: unknown protein F2P9.18 [imported] - Arabidopsis
  misc_feature (351)..(389): Homolog of NCBI NO: 25373333 NR Description: unknown protein F2P9.18 [imported] - Arabidopsis
  misc_feature (222)..(389): Homolog of NCBI NO: 12324138 NR Description: hypothetical protein; 29936-28688 [Arabidopsis
MSCRRVLKSIQALAAHSLLFCFTLLLVLKLDHTVSSSWWMVFFPLWAFHAVVARGRFSLPAPVAPRNRHWAPCHAVVATPLLVAFELLLCIYLESSYARWPPAVSLKIAFLPLLAFELTILVDNLRMCRALMPGDDDSITDDAIWEALPHFWVAISMVFTLAATFFTLLKLSGDVVALGWWDLFINFGIAECFAFLVCTKWSNPVIHRSSRARETGSSSTSIRYLDWNSGLVVAPEEDRHQDRWCGLQDIGGHMLKIPVILFQVVLCMYLEGTPERAKDISIPVLFSPLFLLQGLGVLFAASKLLEKIVLLLRGEAGPGLYFRFSSSAHDCLGFLHHGSRLLGWWSIDEGSREEQARLYFDQESGYNTFSGHPPEIVKKMPKEDLAEEVTLPLWHFFVSQFSADINFRFSLLLNLVSSSFSIA

SEQ ID NO: 107987 - protein, 384 aa, Arabidopsis thaliana
  peptide (1)..(384): Ceres Seq. ID no. 13652915
  misc_feature: Pfam Name: zf-C3HC4 Pfam Description: Zinc finger, C3HC4 type (RING finger)
  misc_feature (1)..(350): Homolog of NCBI NO: 18394611 NR Description: zinc finger (C3HC4-type RING finger) protein [Arabidopsis thaliana] >gi|21592855|gb|AAM64805.1| unknown
  misc_feature (1)..(350): Homolog of NCBI NO: 22330616 NR Description: zinc finger (C3HC4-type RING finger) protein
  misc_feature (111)..(378): Homolog of NCBI NO: 6714286 NR Description: F15H18.5 [Arabidopsis thaliana]
  misc_feature (1)..(110): Homolog of NCBI NO: 6714286 NR Description: F15H18.5 [Arabidopsis thaliana]
  misc_feature (1)..(350): Homolog of NCBI NO: 13937305 NR Description: unknown protein [Oryza sativa]
  misc_feature (1)..(350): Homolog of NCBI NO: 18409134 NR Description: expressed protein [Arabidopsis thaliana] unknown protein [Arabidopsis thaliana]
  misc_feature (1)..(197): Homolog of NCBI NO: 25373333 NR Description: unknown protein F2P9.18 [imported] - Arabidopsis
  misc_feature (231)..(301): Homolog of NCBI NO: 25373333 NR Description: unknown protein F2P9.18 [imported] - Arabidopsis
  misc_feature (312)..(350): Homolog of NCBI NO: 25373333 NR Description: unknown protein F2P9.18 [imported] - Arabidopsis
  misc_feature (183)..(350): Homolog of NCBI NO: 12324138 NR Description: hypothetical protein; 29936-28688 [Arabidopsis
MVFFPLWAFHAVVARGRFSLPAPVAPRNRHWAPCHAVVATPLLVAFELLLCIYLESSYARWPPAVSLKIAFLPLLAFELTILVDNLRMCRALMPGDDDSITDDAIWEALPHFWVAISMVFTLAATFFTLLKLSGDVVALGWWDLFINFGIAECFAFLVCTKWSNPVIHRSSRARETGSSSTSIRYLDWNSGLVVAPEEDRHQDRWCGLQDIGGHMLKIPVILFQVVLCMYLEGTPERAKDISIPVLFSPLFLLQGLGVLFAASKLLEKIVLLLRGEAGPGLYFRFSSSAHDCLGFLHHGSRLLGWWSIDEGSREEQARLYFDQESGYNTFSGHPPEIVKKMPKEDLAEEVTLPLWHFFVSQFSADINFRFSLLLNLVSSSFSIA

SEQ ID NO: 107988 - protein, 297 aa, Arabidopsis thaliana
  peptide (1)..(297): Ceres Seq. ID no. 13652916
  misc_feature: Pfam Name: zf-C3HC4 Pfam Description: Zinc finger, C3HC4 type (RING finger)
  misc_feature (1)..(263): Homolog of NCBI NO: 18394611 NR Description: zinc finger (C3HC4-type RING finger) protein [Arabidopsis thaliana] >gi|21592855|gb|AAM64805.1| unknown
  misc_feature (1)..(263): Homolog of NCBI NO: 22330616 NR Description: zinc finger (C3HC4-type RING finger) protein
  misc_feature (24)..(291): Homolog of NCBI NO: 6714286 NR Description: F15H18.5 [Arabidopsis thaliana]
  misc_feature (1)..(23): Homolog of NCBI NO: 6714286 NR Description: F15H18.5 [Arabidopsis thaliana]
  misc_feature (1)..(263): Homolog of NCBI NO: 13937305 NR Description: unknown protein [Oryza sativa]
  misc_feature (1)..(263): Homolog of NCBI NO: 18409134 NR Description: expressed protein [Arabidopsis thaliana] unknown protein [Arabidopsis thaliana]
  misc_feature (1)..(110): Homolog of NCBI NO: 25373333 NR Description: unknown protein F2P9.18 [imported] - Arabidopsis
  misc_feature (144)..(214): Homolog of NCBI NO: 25373333 NR Description: unknown protein F2P9.18 [imported] - Arabidopsis
  misc_feature (225)..(263): Homolog of NCBI NO: 25373333 NR Description: unknown protein F2P9.18 [imported] - Arabidopsis
  misc_feature (96)..(263): Homolog of NCBI NO: 12324138 NR Description: hypothetical protein; 29936-28688 [Arabidopsis
MCRALMPGDDDSITDDAIWEALPHFWVAISMVFTLAATFFTLLKLSGDVVALGWWDLFINFGIAECFAFLVCTKWSNPVIHRSSRARETGSSSTSIRYLDWNSGLVVAPEEDRHQDRWCGLQDIGGHMLKIPVILFQVVLCMYLEGTPERAKDISIPVLFSPLFLLQGLGVLFAASKLLEKIVLLLRGEAGPGLYFRFSSSAHDCLGFLHHGSRLLGWWSIDEGSREEQARLYFDQESGYNTFSGHPPEIVKKMPKEDLAEEVTLPLWHFFVSQFSADINFRFSLLLNLVSSSFSIA

SEQ ID NO: 107989 - DNA, 1311 bp, Arabidopsis thaliana
  misc_feature (1)..(1311): Ceres Seq. ID no. 13652963
  misc_feature: MA Experiment ID: 20000184 Result: Down-regulated in Transcription
  misc_feature: MA Experiment 20000184 PARAMETER Experiment Name: At_Shoots__P Parameter: Age (day) Value: 7
  misc_feature: MA Experiment 20000184 PARAMETER Experiment Name: At_Shoots__P Parameter: Tissue Value: Shoots vs. Whole Plant
  misc_feature: MA Experiment ID: 20000227 Result: Up-regulated in Transcription
  misc_feature: MA Experiment 20000227 PARAMETER Experiment Name: At_Root-Tips-vs-Tops_P Parameter: Tissue Value: Root Tips vs. Root Tops
  misc_feature: MA Experiment ID: 20001451 Result: Down-regulated in Transcription
  misc_feature: MA Experiment 20001451 PARAMETER Experiment Name: At_Far-red-induction_P Parameter: Age (day) Value: 7
  misc_feature: MA Experiment 20001451 PARAMETER Experiment Name: At_Far-red-induction_P Parameter: Light Value: Far-red vs. White
  misc_feature: MA Experiment 20001451 PARAMETER Experiment Name: At_Far-red-induction_P Parameter: Organism Value: A. thaliana
  misc_feature: MA Experiment 20001451 PARAMETER Experiment Name: At_Far-red-induction_P Parameter: Plant Line Value: Columbia
  misc_feature: MA Experiment 20001451 PARAMETER Experiment Name: At_Far-red-induction_P Parameter: Timepoint (hr) Value: 24
  misc_feature: MA Experiment 20001451 PARAMETER Experiment Name: At_Far-red-induction_P Parameter: Tissue Value: Whole Plant
accgggcatccattttcgtttgaatctcaacgttttttgcttgattttagcttctgagagagtccagatccaaggaattggaggaagaataatgtcggcaaggcatgggcaatcgtcgtatcgagatcggagtgacgaattcttcaaaattgtggagactctaaggagatcgattgctccggctccggcggcgaataatgtgccgtatggtaataatcggaacgatggtgcgagaagagaggatcttatcaacaaatccgagttcaacaagagagcttctcatattggtttagctattaatcaaacgtcgcagaagctatcgaagcttgcgaaacttgcaaagaggacatcagtgtttgatgatcctactcaggagatacaagagctgacggtagtcatcaagcaagagatctctgctctaaattctgctctggtcgaccttcaattgttccgcagttctcagaatgatgaagggaataactctagagacagggacaaaagtactcactcagcaactgttgttgacgatctaaagtatcgtttgatggatactaccaaagagtttaaggatgttcttaccatgagaaccgagaatatgaaggtccatgaaagtagaaggcaactcttctcttcaaatgcttcaaaagaatcaacaaacccattcgttcgccagcgtcctttggctgctaaggctgctgctagtgaatctgttcctcttccatgggcaaatgggtcttcttcatcttcatctcagttagtcccatggaagccgggagagggagaatcttcaccattgttgcagcagagtcaacaacaacagcaacagcaacagcaacaaatggtcccattgcaagacacatatatgcagggtcgagcagaagctctacacaccgttgaatcaacaatccatgagctaagcagtatcttcacacaactagcaaccatggtttctcaacaaggggaaattgcaatcaggatcgatcaaaacatggaagatacattagcaaatgtggaaggcgcacagagccaactggccaggtatctcaacagtatatcatcaaaccgatggctaatgatgaagattttcttcgtactcattgcatttctcatgattttcctcttcttcgtggcataaacattgagactaaaaattgattttaaagagtttcaacatctagacatggttcttttgtcctatcgtatcttattgacatgtaaagacttaagagaaaaaagggatcttatgctctgttcagattaatggagagatatataatgtcactttcatgtaaaattgctttcaagttttcc

SEQ ID NO: 107990 - protein, 377 aa, Arabidopsis thaliana
  peptide (1)..(377): Ceres Seq. ID no. 13652964
  misc_feature (290)..(352): Pfam Name: SNARE domain Pfam Description: SNARE domain
  misc_feature (31)..(377): Homolog of NCBI NO: 30687459 NR Description: syntaxin of plants SYP32 [Arabidopsis thaliana]
  misc_feature (34)..(377): Homolog of NCBI NO: 34906154 NR Description: putative t-SNARE SED5 [Oryza sativa (japonica
  misc_feature (38)..(377): Homolog of NCBI NO: 2981439 NR Description: syntaxin of plants 31 [Arabidopsis thaliana]
  misc_feature (38)..(377): Homolog of NCBI NO: 15239228 NR Description: syntaxin of plants SYP31 [Arabidopsis thaliana]
  misc_feature (64)..(373): Homolog of NCBI NO: 40747582 NR Description: hypothetical protein AN9526.2 [Aspergillus
  misc_feature (39)..(373): Homolog of NCBI NO: 32490453 NR Description: syntaxin homologue [Aspergillus oryzae]
  misc_feature (82)..(377): Homolog of NCBI NO: 20148780 NR Description: syntaxin 5 [Phytophthora sojae]
  misc_feature (85)..(377): Homolog of NCBI NO: 28829569 NR Description: similar to syntaxin 5 [Schizosaccharomyces pombe]
  misc_feature (39)..(373): Homolog of NCBI NO: 6323054 NR Description: Sed5p is a t-SNARE (soluble NSF attachment receptor) required in ER to Golgi transport.; Sed5p
  misc_feature (41)..(210): Homolog of NCBI NO: 31212921 NR Description: ENSANGP00000012968 [Anopheles gambiae]
PGIHFRLNLNVFCLILASERVQIQGIGGRIMSARHGQSSYRDRSDEFFKIVETLRRSIAPAPAANNVPYGNNRNDGARREDLINKSEFNKRASHIGLAINQTSQKLSKLAKLAKRTSVFDDPTQEIQELTVVIKQEISALNSALVDLQLFRSSQNDEGNNSRDRDKSTHSATVVDDLKYRLMDTTKEFKDVLTMRTENMKVHESRRQLFSSNASKESTNPFVRQRPLAAKAAASESVPLPWANGSSSSSSQLVPWKPGEGESSPLLQQSQQQQQQQQQQMVPLQDTYMQGRAEALHTVESTIHELSSIFTQLATMVSQQGEIAIRIDQNMEDTLANVEGAQSQLARYLNSISSNRWLMMKIFFVLIAFLMIFLFFVA

SEQ ID NO: 107991 - protein, 347 aa, Arabidopsis thaliana
  peptide (1)..(347): Ceres Seq. ID no. 13652965
  misc_feature (260)..(322): Pfam Name: SNARE domain Pfam Description: SNARE domain
  misc_feature (1)..(347): Homolog of NCBI NO: 30687459 NR Description: syntaxin of plants SYP32 [Arabidopsis thaliana]
  misc_feature (4)..(347): Homolog of NCBI NO: 34906154 NR Description: putative t-SNARE SED5 [Oryza sativa (japonica
  misc_feature (8)..(347): Homolog of NCBI NO: 2981439 NR Description: syntaxin of plants 31 [Arabidopsis thaliana]
  misc_feature (8)..(347): Homolog of NCBI NO: 15239228 NR Description: syntaxin of plants SYP31 [Arabidopsis thaliana]
  misc_feature (34)..(343): Homolog of NCBI NO: 40747582 NR Description: hypothetical protein AN9526.2 [Aspergillus
  misc_feature (9)..(343): Homolog of NCBI NO: 32490453 NR Description: syntaxin homologue [Aspergillus oryzae]
  misc_feature (52)..(347): Homolog of NCBI NO: 20148780 NR Description: syntaxin 5 [Phytophthora sojae]
  misc_feature (55)..(347): Homolog of NCBI NO: 28829569 NR Description: similar to syntaxin 5 [Schizosaccharomyces pombe]
  misc_feature (9)..(343): Homolog of NCBI NO: 6323054 NR Description: Sed5p is a t-SNARE (soluble NSF attachment receptor) required in ER to Golgi transport.; Sed5p
  misc_feature (11)..(180): Homolog of NCBI NO: 31212921 NR Description: ENSANGP00000012968 [Anopheles gambiae]
MSARHGQSSYRDRSDEFFKIVETLRRSIAPAPAANNVPYGNNRNDGARREDLINKSEFNKRASHIGLAINQTSQKLSKLAKLAKRTSVFDDPTQEIQELTVVIKQEISALNSALVDLQLFRSSQNDEGNNSRDRDKSTHSATVVDDLKYRLMDTTKEFKDVLTMRTENMKVHESRRQLFSSNASKESTNPFVRQRPLAAKAAASESVPLPWANGSSSSSSQLVPWKPGEGESSPLLQQSQQQQQQQQQQMVPLQDTYMQGRAEALHTVESTIHELSSIFTQLATMVSQQGEIAIRIDQNMEDTLANVEGAQSQLARYLNSISSNRWLMMKIFFVLIAFLMIFLFFVA

SEQ ID NO: 107992 - protein, 196 aa, Arabidopsis thaliana; identical to SEQ ID NO: 97009
  peptide (1)..(196): Ceres Seq. ID no. 13652966
  misc_feature (109)..(171): Pfam Name: SNARE domain Pfam Description: SNARE domain
  misc_feature (1)..(196): Homolog of NCBI NO: 30687459 NR Description: syntaxin of plants SYP32 [Arabidopsis thaliana]
  misc_feature (1)..(196): Homolog of NCBI NO: 34906154 NR Description: putative t-SNARE SED5 [Oryza sativa (japonica
  misc_feature (1)..(196): Homolog of NCBI NO: 2981439 NR Description: syntaxin of plants 31 [Arabidopsis thaliana]
  misc_feature (1)..(196): Homolog of NCBI NO: 15239228 NR Description: syntaxin of plants SYP31 [Arabidopsis thaliana]
  misc_feature (1)..(192): Homolog of NCBI NO: 40747582 NR Description: hypothetical protein AN9526.2 [Aspergillus
  misc_feature (1)..(192): Homolog of NCBI NO: 32490453 NR Description: syntaxin homologue [Aspergillus oryzae]
  misc_feature (1)..(196): Homolog of NCBI NO: 20148780 NR Description: syntaxin 5 [Phytophthora sojae]
  misc_feature (1)..(196): Homolog of NCBI NO: 28829569 NR Description: similar to syntaxin 5 [Schizosaccharomyces pombe]
  misc_feature (1)..(192): Homolog of NCBI NO: 6323054 NR Description: Sed5p is a t-SNARE (soluble NSF attachment receptor) required in ER to Golgi transport.; Sed5p
  misc_feature (1)..(29): Homolog of NCBI NO: 31212921 NR Description: ENSANGP00000012968 [Anopheles gambiae]

SEQ ID NO: 107993 - DNA, 2336 bp, Arabidopsis thaliana
  misc_feature (1)..(2336): Ceres Seq. ID no. 13652971
  misc_feature: MA Experiment ID: 20000234 Result: Up-regulated in Transcription
  misc_feature: MA Experiment 20000234 PARAMETER Experiment Name: At_Siliques_P Parameter: Age (day) Value: 21
  misc_feature: MA Experiment 20000234 PARAMETER Experiment Name: At_Siliques_P Parameter: Organism Value: A. thaliana
  misc_feature: MA Experiment 20000234 PARAMETER Experiment Name: At_Siliques_P Parameter: Plant Line Value: WS
  misc_feature: MA Experiment 20000234 PARAMETER Experiment Name: At_Siliques_P Parameter: Tissue Value: Less Than 5mm Siliques vs. Whole Plant
  misc_feature: MA Experiment ID: 20000265 Result: Up-regulated in Transcription
  misc_feature: MA Experiment 20000265 PARAMETER Experiment Name: At_Open_Flower_P Parameter: Age (day) Value: 21
  misc_feature: MA Experiment 20000265 PARAMETER Experiment Name: At_Open_Flower_P Parameter: Plant Line Value: WS
  misc_feature: MA Experiment 20000265 PARAMETER Experiment Name: At_Open_Flower_P Parameter: Tissue Value: Closed Flower vs. Whole Plant
  misc_feature: MA Experiment ID: 20000286 Result: Up-regulated in Transcription
  misc_feature: MA Experiment 20000286 PARAMETER Experiment Name: At_Open_Flower_P Parameter: Age (day) Value: 21
  misc_feature: MA Experiment 20000286 PARAMETER Experiment Name: At_Open_Flower_P Parameter: Plant Line Value: WS
  misc_feature: MA Experiment 20000286 PARAMETER Experiment Name: At_Open_Flower_P Parameter: Tissue Value: Half Open vs. Whole Plant
  misc_feature: MA Experiment ID: 20000437 Result: Up-regulated in Transcription
  misc_feature: MA Experiment 20000437 PARAMETER Experiment Name: At_Drought_P Parameter: Age (day) Value: 8
  misc_feature: MA Experiment 20000437 PARAMETER Experiment Name: At_Drought_P Parameter: Organism Value: A. thaliana
  misc_feature: MA Experiment 20000437 PARAMETER Experiment Name: At_Drought_P Parameter: Plant Line Value: WS
  misc_feature: MA Experiment 20000437 PARAMETER Experiment Name: At_Drought_P Parameter: Timepoint (hr) Value: 24
  misc_feature: MA Experiment 20000437 PARAMETER Experiment Name: At_Drought_P Parameter: Tissue Value: Whole Plant
  misc_feature: MA Experiment 20000437 PARAMETER Experiment Name: At_Drought_P Parameter: Treatment Value: Drought vs. No Drought
tttcttcgtcttcttcggacggacaatctcgtttacgcattttatcgaacagtttgtgtgcataaaagctaacgagtggtgaatctaacggactatgggattttcgcttgctgttcgactgaatagatcttcgtctcgttcgtgttgttagccgatgaggaatgccgttgttgcgctccgccatcaccgtcgtgtttcgctgctccggagaattgtagcgttccgtgatgacaatactatttgtctgtctccaagcttgaagaataatgaactctcaagacagacaaattcatgggtttcaccattttgcttgcaacgcagagcgtattcgacgggtttcaccagcgtacatggtggaatacctacggcagagtatgcaaagttgcggagagaatcccttgaaactgaatttggacatgctctaggagcatatagctcgaaaagtttttctgcagtgtatcgttttggaccctttttggctttgtatagagctgcaatcatttcgtatcatgtggtgaagcttgccttttggcagctgtttgttcaggatatgaggaaacgggctgtcaagttccgtgagactcttatcagcttggggcctttctacattaaggcactgagcacgagaccagacatattaccatctatatactgtcaggaactttcaaaattgcaggaccagattcctccatttccaactactgttgccatgcgatgtattgaagagcaactgggtgctccagtgtcaaaactttttgcagatattagtcttaaacctgttgctgctgcatccctgggtcaggtatacaaagctcatctgcattctggacaattggtagccgttaaggttcagagacctggaatgtcactcattctaacacgtgatgccctcttattcaaaatgattgggggacaactgaaacgatttgctaaagcccgtaaggatcttttggtagcggtgaatgagatggtcaggcatatgtttgacgaaatagattacgttctcgaggcaaaaaatgcagaacgatttgcctctctatacagttttgactcagggaatgagcagattgatgataacgctggacctaggaatatgtccaggaatcacagagcagagaacatcaaagtccctaaaatttactggaattttacacgcacagcagtgctcacaatggaatggatcgatggcataaaattaacagatgaaattaagctgaaaagggcttcccttgatagaagggacttgatcgatcagggcttatcctgttcattaaagcagcttcttgaggttggattctttcatgctgatccgcacccaggaaatcttgtggctactaaagaagggtctcttgtttactttgacttcggaatgatggggaatattccacgccattaccgtgtgggacttattcaaattctggtgcattttgtcaaccgtgattctctaagtttggcaaatgatttcctgtccttgggatttttgcctgaaggggttgatatacaagcagtttcaaatgctttgcgtacttcatttggttctactacgagaatatcacaagatttccagggggtgatggaacaattatatgatgttatgtacgagttcaacttttcgctgcctccagactatgctcttgttataagatctcttggttcactggaaggcacggctaagattcttgatccagagtttaaagtgattgagagtgcatatccatttgttatcgggaggctattagcagatccaagcccagatatgaggaaaatactaagggagcttgtcatttgtaatgatggatcaataaggtggaatcgtcttgaacgcctggtagcagcaatatcagaacaggcttctgcgacttcaggagactctccagaagataaaacgttgaagaaatcatcggaactgaaatcattcgacatgcattcagtagtttccgcaacagaagatctgctactgttcatattatccgagaaagggcagagagttcgggtcttccttcttcaagacataatcagagtggttgatattttcctggaagtagaggctcttgagctcaacaagaccatcaatcttaagacggaagaagggacaatgaaaagagtgagcaatggattcaaaggtctgagtgaggcggtgaagcttgcaccgggaatgtggatatcaatgcttcttcggatgtcaaggaagtctgaggttcatagttatgctttagatattgtttctgcattgtctacacattttggccacaaagtgcctcacacttgttggatccttctctccaaattgctccatcacaataagagccaataattaaacgttcgtctatgctatt

SEQ ID NO: 107994 - protein, 719 aa, Arabidopsis thaliana
  peptide (1)..(719): Ceres Seq. ID no. 13652972
  misc_feature (191)..(296): Pfam Name: ABC1 family Pfam Description: ABC1 family
  misc_feature (56)..(715): Homolog of NCBI NO: 34394127 NR Description: putative ubiquinone biosynthesis protein ubiB
  misc_feature (153)..(719): Homolog of NCBI NO: 34901462 NR Description: OSJNBa0040K22.7 [Oryza sativa (japonica
  misc_feature (303)..(559): Homolog of NCBI NO: 22298493 NR Description: ORF_ID:tll0950~hypothetical protein
  misc_feature (93)..(296): Homolog of NCBI NO: 22298493 NR Description: ORF_ID:tll0950~hypothetical protein
  misc_feature (321)..(559): Homolog of NCBI NO: 17232452 NR Description: hypothetical protein [Nostoc sp. PCC 7120]
  misc_feature (93)..(296): Homolog of NCBI NO: 17232452 NR Description: hypothetical protein [Nostoc sp. PCC 7120]
  misc_feature (303)..(566): Homolog of NCBI NO: 33867054 NR Description: possible protein kinase: ABC1 family sp. WH 8102] >gi|33639655|emb|CAE09039.1| possible protein
  misc_feature (85)..(296): Homolog of NCBI NO: 33867054 NR Description: possible protein kinase: ABC1 family sp. WH 8102] >gi|33639655|emb|CAE09039.1| possible protein
  misc_feature (317)..(682): Homolog of NCBI NO: 33241332 NR Description: Predicted protein kinase [Prochlorococcus marinus marinus str. CCMP1375] >gi|33238862|gb|AAQ00927.1| Predicted
  misc_feature (134)..(296): Homolog of NCBI NO: 33241332 NR Description: Predicted protein kinase [Prochlorococcus marinus marinus str. CCMP1375] >gi|33238862|gb|AAQ00927.1| Predicted
MRNAVVALRHHRRVSLLRRIVAFRDDNTICLSPSLKNNELSRQTNSWVSPFCLQRRAYSTGFTSVHGGIPTAEYAKLRRESLETEFGHALGAYSSKSFSAVYRFGPFLALYRAAIISYHVVKLAFWQLFVQDMRKRAVKFRETLISLGPFYIKALSTRPDILPSIYCQELSKLQDQIPPFPTTVAMRCIEEQLGAPVSKLFADISLKPVAAASLGQVYKAHLHSGQLVAVKVQRPGMSLILTRDALLFKMIGGQLKRFAKARKDLLVAVNEMVRHMFDEIDYVLEAKNAERFASLYSFDSGNEQIDDNAGPRNMSRNHRAENIKVPKIYWNFTRTAVLTMEWIDGIKLTDEIKLKRASLDRRDLIDQGLSCSLKQLLEVGFFHADPHPGNLVATKEGSLVYFDFGMMGNIPRHYRVGLIQILVHFVNRDSLSLANDFLSLGFLPEGVDIQAVSNALRTSFGSTTRISQDFQGVMEQLYDVMYEFNFSLPPDYALVIRSLGSLEGTAKILDPEFKVIESAYPFVIGRLLADPSPDMRKILRELVICNDGSIRWNRLERLVAAISEQASATSGDSPEDKTLKKSSELKSFDMHSVVSATEDLLLFILSEKGQRVRVFLLQDIIRVVDIFLEVEALELNKTINLKTEEGTMKRVSNGFKGLSEAVKLAPGMWISMLLRMSRKSEVHSYALDIVSALSTHFGHKVPHTCWILLSKLLHHNKSQ

SEQ ID NO: 107995 - protein, 587 aa, Arabidopsis thaliana
  peptide (1)..(587): Ceres Seq. ID no. 13652973
  misc_feature (59)..(164): Pfam Name: ABC1 family Pfam Description: ABC1 family
  misc_feature (1)..(583): Homolog of NCBI NO: 34394127 NR Description: putative ubiquinone biosynthesis protein ubiB
  misc_feature (21)..(587): Homolog of NCBI NO: 34901462 NR Description: OSJNBa0040K22.7 [Oryza sativa (japonica
  misc_feature (171)..(427): Homolog of NCBI NO: 22298493 NR Description: ORF_ID:tll0950~hypothetical protein
  misc_feature (1)..(164): Homolog of NCBI NO: 22298493 NR Description: ORF_ID:tll0950~hypothetical protein
  misc_feature (189)..(427): Homolog of NCBI NO: 17232452 NR Description: hypothetical protein [Nostoc sp. PCC 7120]
  misc_feature (1)..(164): Homolog of NCBI NO: 17232452 NR Description: hypothetical protein [Nostoc sp. PCC 7120]
  misc_feature (171)..(434): Homolog of NCBI NO: 33867054 NR Description: possible protein kinase: ABC1 family sp. WH 8102] >gi|33639655|emb|CAE09039.1| possible protein
  misc_feature (1)..(164): Homolog of NCBI NO: 33867054 NR Description: possible protein kinase: ABC1 family sp. WH 8102] >gi|33639655|emb|CAE09039.1| possible protein
  misc_feature (185)..(550): Homolog of NCBI NO: 33241332 NR Description: Predicted protein kinase [Prochlorococcus marinus marinus str. CCMP1375] >gi|33238862|gb|AAQ00927.1| Predicted
  misc_feature (2)..(164): Homolog of NCBI NO: 33241332 NR Description: Predicted protein kinase [Prochlorococcus marinus marinus str. CCMP1375] >gi|33238862|gb|AAQ00927.1| Predicted
MRKRAVKFRETLISLGPFYIKALSTRPDILPSIYCQELSKLQDQIPPFPTTVAMRCIEEQLGAPVSKLFADISLKPVAAASLGQVYKAHLHSGQLVAVKVQRPGMSLILTRDALLFKMIGGQLKRFAKARKDLLVAVNEMVRHMFDEIDYVLEAKNAERFASLYSFDSGNEQIDDNAGPRNMSRNHRAENIKVPKIYWNFTRTAVLTMEWIDGIKLTDEIKLKRASLDRRDLIDQGLSCSLKQLLEVGFFHADPHPGNLVATKEGSLVYFDFGMMGNIPRHYRVGLIQILVHFVNRDSLSLANDFLSLGFLPEGVDIQAVSNALRTSFGSTTRISQDFQGVMEQLYDVMYEFNFSLPPDYALVIRSLGSLEGTAKILDPEFKVIESAYPFVIGRLLADPSPDMRKILRELVICNDGSIRWNRLERLVAAISEQASATSGDSPEDKTLKKSSELKSFDMHSVVSATEDLLLFILSEKGQRVRVFLLQDIIRVVDIFLEVEALELNKTINLKTEEGTMKRVSNGFKGLSEAVKLAPGMWISMLLRMSRKSEVHSYALDIVSALSTHFGHKVPHTCWILLSKLLHHNKSQ

SEQ ID NO: 107996 - protein, 534 aa, Arabidopsis thaliana; identical to SEQ ID NO: 74171
  peptide (1)..(534): Ceres Seq. ID no. 13652974
  misc_feature (6)..(111): Pfam Name: ABC1 family Pfam Description: ABC1 family
  misc_feature (1)..(530): Homolog of NCBI NO: 34394127 NR Description: putative ubiquinone biosynthesis protein ubiB
  misc_feature (1)..(534): Homolog of NCBI NO: 34901462 NR Description: OSJNBa0040K22.7 [Oryza sativa (japonica
  misc_feature (118)..(374): Homolog of NCBI NO: 22298493 NR Description: ORF_ID:tll0950~hypothetical protein
  misc_feature (1)..(111): Homolog of NCBI NO: 22298493 NR Description: ORF_ID:tll0950~hypothetical protein
  misc_feature (136)..(374): Homolog of NCBI NO: 17232452 NR Description: hypothetical protein [Nostoc sp. PCC 7120]
  misc_feature (1)..(111): Homolog of NCBI NO: 17232452 NR Description: hypothetical protein [Nostoc sp. PCC 7120]
  misc_feature (118)..(381): Homolog of NCBI NO: 33867054 NR Description: possible protein kinase: ABC1 family sp. WH 8102] >gi|33639655|emb|CAE09039.1| possible protein
  misc_feature (1)..(111): Homolog of NCBI NO: 33867054 NR Description: possible protein kinase: ABC1 family sp. WH 8102] >gi|33639655|emb|CAE09039.1| possible protein
  misc_feature (132)..(497): Homolog of NCBI NO: 33241332 NR Description: Predicted protein kinase [Prochlorococcus marinus marinus str. CCMP1375] >gi|33238862|gb|AAQ00927.1| Predicted
  misc_feature (1)..(111): Homolog of NCBI NO: 33241332 NR Description: Predicted protein kinase [Prochlorococcus marinus marinus str. CCMP1375] >gi|33238862|gb|AAQ00927.1| Predicted

SEQ ID NO: 107997 - DNA, 1966 bp, Arabidopsis thaliana
  misc_feature (1)..(1966): Ceres Seq. ID no. 13652975
  misc_feature: MA Experiment ID: 108434 Result: Up-regulated in Transcription
  misc_feature: MA Experiment 108434 PARAMETER Experiment Name: At_Root_Tips_cDNA_P Parameter: Tissue Value: Root Tips
  misc_feature: MA Experiment ID: 108461 Result: Up-regulated in Transcription
  misc_feature: MA Experiment 108461 PARAMETER Experiment Name: At_Germinating_Seeds_cDNA_P Parameter: Age (day) Value: 1 vs. 0
  misc_feature: MA Experiment 108461 PARAMETER Experiment Name: At_Germinating_Seeds_cDNA_P Parameter: Tissue Value: Germinating Seeds
  misc_feature: MA Experiment ID: 108579 Result: Down-regulated in Transcription
  misc_feature: MA Experiment 108579 PARAMETER Experiment Name: At_4deg_Cold_cDNA_P Parameter: Temperature (deg C) Value: 4 vs. 22
  misc_feature: MA Experiment 108579 PARAMETER Experiment Name: At_4deg_Cold_cDNA_P Parameter: Timepoint (hr) Value: 6
  misc_feature: MA Experiment 108579 PARAMETER Experiment Name: At_4deg_Cold_cDNA_P Parameter: Tissue Value: Aerial
  misc_feature: MA Experiment ID: 108668 Result: Down-regulated in Transcription
  misc_feature: MA Experiment 108668 PARAMETER Experiment Name: At_2mM_SA_cDNA_P Parameter: Plant Line Value: WS
  misc_feature: MA Experiment 108668 PARAMETER Experiment Name: At_2mM_SA_cDNA_P Parameter: Timepoint (hr) Value: 6
  misc_feature: MA Experiment 108668 PARAMETER Experiment Name: At_2mM_SA_cDNA_P Parameter: Treatment Value: 2mM SA vs. No Treatment
  misc_feature: MA Experiment ID: 20000113 Result: Down-regulated in Transcription
  misc_feature: MA Experiment 20000113 PARAMETER Experiment Name: At_42deg_Heat_cDNA_P Parameter: Temperature (deg C) Value: 42 vs. 22
  misc_feature: MA Experiment 20000113 PARAMETER Experiment Name: At_42deg_Heat_cDNA_P Parameter: Timepoint (hr) Value: 8
  misc_feature: MA Experiment 20000113 PARAMETER Experiment Name: At_42deg_Heat_cDNA_P Parameter: Tissue Value: Aerial
  misc_feature: MA Experiment ID: 20000495 Result: Up-regulated in Transcription
  misc_feature: MA Experiment 20000495 PARAMETER Experiment Name: At_Guard_Cells_P Parameter: Harvest Date Value: 8/2/2002
  misc_feature: MA Experiment 20000495 PARAMETER Experiment Name: At_Guard_Cells_P Parameter: Organism Value: A. thaliana
  misc_feature: MA Experiment 20000495 PARAMETER Experiment Name: At_Guard_Cells_P Parameter: Tissue Value: Guard Cells vs. Leaves
  misc_feature: MA Experiment ID: 20001248 Result: Up-regulated in Transcription
  misc_feature: MA Experiment 20001248 PARAMETER Experiment Name: At_Far-red-induction_P Parameter: Age (day) Value: 7
  misc_feature: MA Experiment 20001248 PARAMETER Experiment Name: At_Far-red-induction_P Parameter: Light Value: Far-red vs. White
  misc_feature: MA Experiment 20001248 PARAMETER Experiment Name: At_Far-red-induction_P Parameter: Organism Value: A. thaliana
  misc_feature: MA Experiment 20001248 PARAMETER Experiment Name: At_Far-red-induction_P Parameter: Plant Line Value: Columbia
  misc_feature: MA Experiment 20001248 PARAMETER Experiment Name: At_Far-red-induction_P Parameter: Timepoint (hr) Value: 4
  misc_feature: MA Experiment 20001248 PARAMETER Experiment Name: At_Far-red-induction_P Parameter: Tissue Value: Whole Plant
atcaaagtgcgtgtatcctgattcttacttgctacctttcttcttccttcttcatcattcatcattcatcattcatcattcatcattctcatatctctcttcttttactggggatcacaatatctatctagttgtaaattgtgaatgatagatcctgagccttcttgccgccacctcttgaacttaatgtacttgaaaccagtctccacatagcgatagagagagagatctgttatgtgtgtattcatcaagttctctttttttgggctcaaagtgtaaaaggagacattttcaattctgagttcttttgttttcttataataaaatctgggttttctgagattttcttcacatcgtccgaaacgtggacacattttgatcttttgggtgtcactgtgtcaataaaggttgaaactttgattacatttctctcaaaaggattaatttttatttctctatctgggtgagatttggattaattggtgaggaatcggaagaaactggcgagattacaagcgattgtgaaatatcagaatctaataagaggaagaagaggcatggcggctcctacagggaacgggccagtgataccaattctaggtttccttacatgtgtggcttttatctatctctcctttggagatttgtggttcggtctcaaaacggagggcgagttagcattcgtgaaacggaatgggacacagtttgtggtcgatggtaaggctctgtatgtgaatggttggaactcttattggttcatggaccatgctgtgaatgatcatagtagacatcgcgttagtgctatgcttgaagctggagctaaaatgggtctcactgtttgtagaacatgggcttttaatgatggaggctacaatgctcttcagatctctcctggtagattcgatgaacgagttttcaaggccttagatcatgtaatcgcagaggccaaaacacatggtgttaggttgcttctgagcttagtgaataacttacaagcttatggagggaaaactcagtacgtcaattgggcatggcaggaaggtgtaggcctcagctcatccaatgattccttcttctttgacccatctatccgcagatacttcaagaattatctcacggtgctgctgacccgtaaaaactctttaaccgggattgagtacagaaacgacccaacaatttttgcatgggagttgataaacgagcctcgctgcatgtctgatgtctctggggatactctacaagactggattaacgaaatgacagcattcattaaatcaattgacaacaagcatcttctaactgttggcttggaagggttctacggtcccagtagcccaaaaaagctgacagttaaccccgaacggtgggcctctgagcttgggtcagattttgttcgaaactctgattcgccaaacatcgattttgcctcggttcatatctaccctgatcactggtttcacgatcaagggtttgaagaaaaactcaagttcgttgtaaaatggatgctatctcacattgaagatggggacaaggaactgaagaagcctgttctgttcaccgagtttggactctcgaatctgaacaaggactacgatccatcgcagcgggatcggttctacagaaccatctttgatgttatttacaaatcagccaagaggaagcggtctggtgcaggaacactagtgtggcagtttctgatagaaggcatggaaggtttcaacgatgactttggaatagtcccatgggagcaagactccattcagagattaatgattgaacagtcttgcagattgagtcgaatcactggacgccatcttcttgacaagaagtccatagaaatgtgttcccatagaccatgagaatacagattcttttttgttcttgcctctcatatgggcatataaccaaactcaaaacctttatataagagatagtaaatttaaccttcccattttgcttttttccc

SEQ ID NO: 107998 - protein, 433 aa, Arabidopsis thaliana
  peptide (1)..(433): Ceres Seq. ID no. 13652976
  misc_feature (47)..(135): Pfam Name: Cellulase (glycosyl hydrolase family 5) Pfam Description: Cellulase (glycosyl hydrolase family 5)
  misc_feature (1)..(433): Homolog of NCBI NO: 30681096 NR Description: glycosyl hydrolase family 5/cellulase endohydrolase) [Arabidopsis thaliana] >gi|30793940|gb|AAP40422.1|
  misc_feature (164)..(433): Homolog of NCBI NO: 25354515 NR Description: (1-4)-beta-mannan endohydrolase [imported] -
  misc_feature (1)..(135): Homolog of NCBI NO: 25354515 NR Description: (1-4)-beta-mannan endohydrolase [imported] -
  misc_feature (4)..(432): Homolog of NCBI NO: 15235255 NR Description: glycosyl hydrolase family 5/cellulase endohydrolase) [Arabidopsis thaliana] >gi|7488130|pir||T09048
  misc_feature (6)..(415): Homolog of NCBI NO: 34909462 NR Description: putative (1-4)-beta-mannan endohydrolase [Oryza
  misc_feature (28)..(416): Homolog of NCBI NO: 10178872 NR Description: (1-4)-beta-mannan endohydrolase [Coffea arabica]
  misc_feature (42)..(412): Homolog of NCBI NO: 34912090 NR Description: putative mannan endo-1,4-beta-mannosidase [Oryza
  misc_feature (37)..(413): Homolog of NCBI NO: 15241093 NR Description: glycosyl hydrolase family 5/cellulase
  misc_feature (10)..(415): Homolog of NCBI NO: 15239973 NR Description: glycosyl hydrolase family 5/cellulase
  misc_feature (41)..(415): Homolog of NCBI NO: 29786430 NR Description: endo-beta-1,4-mannanase [Lactuca sativa]
MAAPTGNGPVIPILGFLTCVAFIYLSFGDLWFGLKTEGELAFVKRNGTQFVVDGKALYVNGWNSYWFMDHAVNDHSRHRVSAMLEAGAKMGLTVCRTWAFNDGGYNALQISPGRFDERVFKALDHVIAEAKTHGVRLLLSLVNNLQAYGGKTQYVNWAWQEGVGLSSSNDSFFFDPSIRRYFKNYLTVLLTRKNSLTGIEYRNDPTIFAWELINEPRCMSDVSGDTLQDWINEMTAFIKSIDNKHLLTVGLEGFYGPSSPKKLTVNPERWASELGSDFVRNSDSPNIDFASVHIYPDHWFHDQGFEEKLKFVVKWMLSHIEDGDKELKKPVLFTEFGLSNLNKDYDPSQRDRFYRTIFDVIYKSAKRKRSGAGTLVWQFLIEGMEGFNDDFGIVPWEQDSIQRLMIEQSCRLSRITGRHLLDKKSIEMCSHRP

SEQ ID NO: 107999 - protein, 366 aa, Arabidopsis thaliana
  peptide (1)..(366): Ceres Seq. ID no. 13652977
  misc_feature (1)..(68): Pfam Name: Cellulase (glycosyl hydrolase family 5) Pfam Description: Cellulase (glycosyl hydrolase family 5)
  misc_feature (1)..(366): Homolog of NCBI NO: 30681096 NR Description: glycosyl hydrolase family 5/cellulase endohydrolase) [Arabidopsis thaliana] >gi|30793940|gb|AAP40422.1|
  misc_feature (97)..(366): Homolog of NCBI NO: 25354515 NR Description: (1-4)-beta-mannan endohydrolase [imported] -
  misc_feature (1)..(68): Homolog of NCBI NO: 25354515 NR Description: (1-4)-beta-mannan endohydrolase [imported] -
  misc_feature (1)..(365): Homolog of NCBI NO: 15235255 NR Description: glycosyl hydrolase family 5/cellulase endohydrolase) [Arabidopsis thaliana] >gi|7488130|pir||T09048
  misc_feature (1)..(348): Homolog of NCBI NO: 34909462 NR Description: putative (1-4)-beta-mannan endohydrolase [Oryza
  misc_feature (1)..(349): Homolog of NCBI NO: 10178872 NR Description: (1-4)-beta-mannan endohydrolase [Coffea arabica]
  misc_feature (1)..(345): Homolog of NCBI NO: 34912090 NR Description: putative mannan endo-1,4-beta-mannosidase [Oryza
  misc_feature (1)..(346): Homolog of NCBI NO: 15241093 NR Description: glycosyl hydrolase family 5/cellulase
  misc_feature (1)..(348): Homolog of NCBI NO: 15239973 NR Description: glycosyl hydrolase family 5/cellulase
  misc_feature (1)..(348): Homolog of NCBI NO: 29786430 NR Description: endo-beta-1,4-mannanase [Lactuca sativa]
MDHAVNDHSRHRVSAMLEAGAKMGLTVCRTWAFNDGGYNALQISPGRFDERVFKALDHVIAEAKTHGVRLLLSLVNNLQAYGGKTQYVNWAWQEGVGLSSSNDSFFFDPSIRRYFKNYLTVLLTRKNSLTGIEYRNDPTIFAWELINEPRCMSDVSGDTLQDWINEMTAFIKSIDNKHLLTVGLEGFYGPSSPKKLTVNPERWASELGSDFVRNSDSPNIDFASVHIYPDHWFHDQGFEEKLKFVVKWMLSHIEDGDKELKKPVLFTEFGLSNLNKDYDPSQRDRFYRTIFDVIYKSAKRKRSGAGTLVWQFLIEGMEGFNDDFGIVPWEQDSIQRLMIEQSCRLSRITGRHLLDKKSIEMCSHRP

SEQ ID NO: 108000 - protein, 351 aa, Arabidopsis thaliana
  peptide (1)..(351): Ceres Seq. ID no. 13652978
  misc_feature (1)..(53): Pfam Name: Cellulase (glycosyl hydrolase family 5) Pfam Description: Cellulase (glycosyl hydrolase family 5)
  misc_feature (1)..(351): Homolog of NCBI NO: 30681096 NR Description: glycosyl hydrolase family 5/cellulase endohydrolase) [Arabidopsis thaliana] >gi|30793940|gb|AAP40422.1|
  misc_feature (82)..(351): Homolog of NCBI NO: 25354515 NR Description: (1-4)-beta-mannan endohydrolase [imported] -
  misc_feature (1)..(53): Homolog of NCBI NO: 25354515 NR Description: (1-4)-beta-mannan endohydrolase [imported] -
  misc_feature (1)..(350): Homolog of NCBI NO: 15235255 NR Description: glycosyl hydrolase family 5/cellulase endohydrolase) [Arabidopsis thaliana] >gi|7488130|pir||T09048
  misc_feature (1)..(333): Homolog of NCBI NO: 34909462 NR Description: putative (1-4)-beta-mannan endohydrolase [Oryza
  misc_feature (1)..(334): Homolog of NCBI NO: 10178872 NR Description: (1-4)-beta-mannan endohydrolase [Coffea arabica]
  misc_feature (1)..(330): Homolog of NCBI NO: 34912090 NR Description: putative mannan endo-1,4-beta-mannosidase [Oryza
  misc_feature (1)..(331): Homolog of NCBI NO: 15241093 NR Description: glycosyl hydrolase family 5/cellulase
  misc_feature (1)..(333): Homolog of NCBI NO: 15239973 NR Description: glycosyl hydrolase family 5/cellulase
  misc_feature (1)..(333): Homolog of NCBI NO: 29786430 NR Description: endo-beta-1,4-mannanase [Lactuca sativa]
MLEAGAKMGLTVCRTWAFNDGGYNALQISPGRFDERVFKALDHVIAEAKTHGVRLLLSLVNNLQAYGGKTQYVNWAWQEGVGLSSSNDSFFFDPSIRRYFKNYLTVLLTRKNSLTGIEYRNDPTIFAWELINEPRCMSDVSGDTLQDWINEMTAFIKSIDNKHLLTVGLEGFYGPSSPKKLTVNPERWASELGSDFVRNSDSPNIDFASVHIYPDHWFHDQGFEEKLKFVVKWMLSHIEDGDKELKKPVLFTEFGLSNLNKDYDPSQRDRFYRTIFDVIYKSAKRKRSGAGTLVWQFLIEGMEGFNDDFGIVPWEQDSIQRLMIEQSCRLSRITGRHLLDKKSIEMCSHRP

SEQ ID NO: 108001 - DNA, 1726 bp, Arabidopsis thaliana
  misc_feature (1)..(1726): Ceres Seq. ID no. 13652991
  misc_feature: MA Experiment ID: 20000185 Result: Down-regulated in Transcription
  misc_feature: MA Experiment 20000185 PARAMETER Experiment Name: At_Roots__P Parameter: Age (day) Value: 7 vs. 21
  misc_feature: MA Experiment 20000185 PARAMETER Experiment Name: At_Roots__P Parameter: Organism Value: A. thaliana
  misc_feature: MA Experiment 20000185 PARAMETER Experiment Name: At_Roots__P Parameter: Tissue Value: Roots vs. Whole Plant
tttcttcctcctccgccgagatttttctccgtctctcgttctccgcaatggcggcggtcgctacctccttctgtttctctccacatcgatcgccgtcacgttttggaaaccctaattcatccattcgaagaacaatcgtctgtaaatcatctcctcgcgatgaatctccagccgtctccacttcttctcagcgaccggaaaagcagcagaatcctctgacttcacagaataaaccggatcatgatcacaaaccggatcctgggattggtaaaattggaatggagataatgtcaattgcattacctgctgcattagctttagctgctgatcctataacatctcttgtcgacactgccttcgttggccatattggttctgcggaattagctgcagtaggagtgtcagtttctgtattcaatttggtgtcgaagctcttcaatgttcctttactaaatgtcacaacatcgtttgttgcggaggagcaagcaattgctgctaaggatgataatgattctatagaaacaagcaagaaagtgctgccttcggtttcaacttcattagttcttgctgctggagttggtattgcagaggccattgcgctatctctcgggtctgatttcttgatggatgtcatggctataccttttgattcaccaatgcggataccagcagagcagttcctcagacttcgagcgtatggtgcaccaccaattgttgttgcattggctgcgcaaggagcttttcgaggtttcaaggacacaacaacgcctctatatgccgttgttgcggggaatgtacttaatgcggtattggatccaatcctgatatttgtccttggttttggtatctctggtgctgcggctgctactgtgatttctgaatacttgattgcatttattcttctatggaagttgaatgagaatgtagttttgctctctcctcaaatcaaagtgggaagagccaaccagtacctcaaatcaggtgggcttctcattggtagaacggtggctttgcttgtgccattcacattagctacttcgttagcagctcaaaatggacccactcaaatggctggccatcaaatcgtcttggaaatctggttggctgtctctttactcaccgatgctttagccattgctgcacagagtcttcttgccaccacttactctcaaggagaatacaaacaagcccgggaagttctcttcggagtccttcaagtaggtttagcaactggaactggtttggctgctgtattgttcatcactttcgaaccattttcaagcttattcacaacggattcagaagttttaaagattgctttgtcagggaccttatttgtggctggatctcaaccggtgaatgctctagcgtttgttttggatgggctctattatggtgtctctgacttcggatttgccgcttattctatggtgattgtcggattcatatcttccttgttcatgcttgtggctgcaccaacgtttggccttgccgggatctggactggtttgttcctcttcatggcgttgcggttggttgctggagcctggagattggggacaagaaccggtccatggaaaatgctatggtctgctccagagaagccagaatgaagcggatcactgttttttgcggtatgatgcgtgactcttaagttaagataaatgaaaatggagtaaactaacaatgtaaaaaacatagtctcatagtcatagtatattgatgc

SEQ ID NO: 108002 - protein, 536 aa, Arabidopsis thaliana
  peptide (1)..(536): Ceres Seq. ID no. 13652992
  misc_feature (104)..(301): Pfam Name: MviN-like protein Pfam Description: MviN-like protein
  misc_feature (16)..(525): Homolog of NCBI NO: 7487160 NR Description: hypothetical protein At2g38330 [imported] - thaliana >gi|3395439|gb|AAC28771.1| hypothetical protein
  misc_feature (16)..(536): Homolog of NCBI NO: 30687474 NR Description: MATE efflux protein family [Arabidopsis thaliana] unknown protein [Arabidopsis thaliana]
  misc_feature (176)..(517): Homolog of NCBI NO: 25405456 NR Description: hypothetical protein F11M15.20 [imported] - thaliana >gi|4836944|gb|AAD30646.1|AC006085_19 Hypothetical
  misc_feature (90)..(168): Homolog of NCBI NO: 25405456 NR Description: hypothetical protein F11M15.20 [imported] - thaliana >gi|4836944|gb|AAD30646.1|AC006085_19 Hypothetical
  misc_feature (169)..(528): Homolog of NCBI NO: 15231918 NR Description: MATE efflux protein family [Arabidopsis thaliana] putative integral membrane protein [Arabidopsis thaliana]
  misc_feature (92)..(187): Homolog of NCBI NO: 15231918 NR Description: MATE efflux protein family [Arabidopsis thaliana] putative integral membrane protein [Arabidopsis thaliana]
  misc_feature (176)..(476): Homolog of NCBI NO: 19386721 NR Description: P0678F11.10 [Oryza sativa (japonica
  misc_feature (88)..(176): Homolog of NCBI NO: 19386721 NR Description: P0678F11.10 [Oryza sativa (japonica
  misc_feature (88)..(520): Homolog of NCBI NO: 37532300 NR Description: putative membrane protein [Oryza sativa (japonica group)] >gi|18958689|gb|AAL82672.1| putative membrane protein
  misc_feature (176)..(374): Homolog of NCBI NO: 18403476 NR Description: expressed protein [Arabidopsis thaliana]
SSSSAEIFLRLSFSAMAAVATSFCFSPHRSPSRFGNPNSSIRRTIVCKSSPRDESPAVSTSSQRPEKQQNPLTSQNKPDHDHKPDPGIGKIGMEIMSIALPAALALAADPITSLVDTAFVGHIGSAELAAVGVSVSVFNLVSKLFNVPLLNVTTSFVAEEQAIAAKDDNDSIETSKKVLPSVSTSLVLAAGVGIAEAIALSLGSDFLMDVMAIPFDSPMRIPAEQFLRLRAYGAPPIVVALAAQGAFRGFKDTTTPLYAVVAGNVLNAVLDPILIFVLGFGISGAAAATVISEYLIAFILLWKLNENVVLLSPQIKVGRANQYLKSGGLLIGRTVALLVPFTLATSLAAQNGPTQMAGHQIVLEIWLAVSLLTDALAIAAQSLLATTYSQGEYKQAREVLFGVLQVGLATGTGLAAVLFITFEPFSSLFTTDSEVLKIALSGTLFVAGSQPVNALAFVLDGLYYGVSDFGFAAYSMVIVGFISSLFMLVAAPTFGLAGIWTGLFLFMALRLVAGAWRLGTRTGPWKMLWSAPEKPE

SEQ ID NO: 108003 - protein, 521 aa, Arabidopsis thaliana
  peptide (1)..(521): Ceres Seq. ID no. 13652993
  misc_feature (89)..(286): Pfam Name: MviN-like protein Pfam Description: MviN-like protein
  misc_feature (1)..(510): Homolog of NCBI NO: 7487160 NR Description: hypothetical protein At2g38330 [imported] - thaliana >gi|3395439|gb|AAC28771.1| hypothetical protein
  misc_feature (1)..(521): Homolog of NCBI NO: 30687474 NR Description: MATE efflux protein family [Arabidopsis thaliana] unknown protein [Arabidopsis thaliana]
  misc_feature (161)..(502): Homolog of NCBI NO: 25405456 NR Description: hypothetical protein F11M15.20 [imported] - thaliana >gi|4836944|gb|AAD30646.1|AC006085_19 Hypothetical
  misc_feature (75)..(153): Homolog of NCBI NO: 25405456 NR Description: hypothetical protein F11M15.20 [imported] - thaliana >gi|4836944|gb|AAD30646.1|AC006085_19 Hypothetical
  misc_feature (154)..(513): Homolog of NCBI NO: 15231918 NR Description: MATE efflux protein family [Arabidopsis thaliana] putative integral membrane protein [Arabidopsis thaliana]
  misc_feature (77)..(172): Homolog of NCBI NO: 15231918 NR Description: MATE efflux protein family [Arabidopsis thaliana] putative integral membrane protein [Arabidopsis thaliana]
  misc_feature (161)..(461): Homolog of NCBI NO: 19386721 NR Description: P0678F11.10 [Oryza sativa (japonica
  misc_feature (73)..(161): Homolog of NCBI NO: 19386721 NR Description: P0678F11.10 [Oryza sativa (japonica
  misc_feature (73)..(505): Homolog of NCBI NO: 37532300 NR Description: putative membrane protein [Oryza sativa (japonica group)] >gi|18958689|gb|AAL82672.1| putative membrane protein
  misc_feature (161)..(359): Homolog of NCBI NO: 18403476 NR Description: expressed protein [Arabidopsis thaliana]
MAAVATSFCFSPHRSPSRFGNPNSSIRRTIVCKSSPRDESPAVSTSSQRPEKQQNPLTSQNKPDHDHKPDPGIGKIGMEIMSIALPAALALAADPITSLVDTAFVGHIGSAELAAVGVSVSVFNLVSKLFNVPLLNVTTSFVAEEQAIAAKDDNDSIETSKKVLPSVSTSLVLAAGVGIAEAIALSLGSDFLMDVMAIPFDSPMRIPAEQFLRLRAYGAPPIVVALAAQGAFRGFKDTTTPLYAVVAGNVLNAVLDPILIFVLGFGISGAAAATVISEYLIAFILLWKLNENVVLLSPQIKVGRANQYLKSGGLLIGRTVALLVPFTLATSLAAQNGPTQMAGHQIVLEIWLAVSLLTDALAIAAQSLLATTYSQGEYKQAREVLFGVLQVGLATGTGLAAVLFITFEPFSSLFTTDSEVLKIALSGTLFVAGSQPVNALAFVLDGLYYGVSDFGFAAYSMVIVGFISSLFMLVAAPTFGLAGIWTGLFLFMALRLVAGAWRLGTRTGPWKMLWSAPEKPE

SEQ ID NO: 108004 - protein, 444 aa, Arabidopsis thaliana
  peptide (1)..(444): Ceres Seq. ID no. 13652994
  misc_feature (12)..(209): Pfam Name: MviN-like protein Pfam Description: MviN-like protein
  misc_feature (1)..(433): Homolog of NCBI NO: 7487160 NR Description: hypothetical protein At2g38330 [imported] - thaliana >gi|3395439|gb|AAC28771.1| hypothetical protein
  misc_feature (1)..(444): Homolog of NCBI NO: 30687474 NR Description: MATE efflux protein family [Arabidopsis thaliana] unknown protein [Arabidopsis thaliana]
  misc_feature (84)..(425): Homolog of NCBI NO: 25405456 NR Description: hypothetical protein F11M15.20 [imported] - thaliana >gi|4836944|gb|AAD30646.1|AC006085_19 Hypothetical
  misc_feature (1)..(76): Homolog of NCBI NO: 25405456 NR Description: hypothetical protein F11M15.20 [imported] - thaliana >gi|4836944|gb|AAD30646.1|AC006085_19 Hypothetical
  misc_feature (77)..(436): Homolog of NCBI NO: 15231918 NR Description: MATE efflux protein family [Arabidopsis thaliana] putative integral membrane protein [Arabidopsis thaliana]
  misc_feature (1)..(95): Homolog of NCBI NO: 15231918 NR Description: MATE efflux protein family [Arabidopsis thaliana] putative integral membrane protein [Arabidopsis thaliana]
  misc_feature (84)..(384): Homolog of NCBI NO: 19386721 NR Description: P0678F11.10 [Oryza sativa (japonica
  misc_feature (1)..(84): Homolog of NCBI NO: 19386721 NR Description: P0678F11.10 [Oryza sativa (japonica
  misc_feature (1)..(428): Homolog of NCBI NO: 37532300 NR Description: putative membrane protein [Oryza sativa (japonica group)] >gi|18958689|gb|AAL82672.1| putative membrane protein
  misc_feature (84)..(282): Homolog of NCBI NO: 18403476 NR Description: expressed protein [Arabidopsis thaliana]
MEIMSIALPAALALAADPITSLVDTAFVGHIGSAELAAVGVSVSVFNLVSKLFNVPLLNVTTSFVAEEQAIAAKDDNDSIETSKKVLPSVSTSLVLAAGVGIAEAIALSLGSDFLMDVMAIPFDSPMRIPAEQFLRLRAYGAPPIVVALAAQGAFRGFKDTTTPLYAVVAGNVLNAVLDPILIFVLGFGISGAAAATVISEYLIAFILLWKLNENVVLLSPQIKVGRANQYLKSGGLLIGRTVALLVPFTLATSLAAQNGPTQMAGHQIVLEIWLAVSLLTDALAIAAQSLLATTYSQGEYKQAREVLFGVLQVGLATGTGLAAVLFITFEPFSSLFTTDSEVLKIALSGTLFVAGSQPVNALAFVLDGLYYGVSDFGFAAYSMVIVGFISSLFMLVAAPTFGLAGIWTGLFLFMALRLVAGAWRLGTRTGPWKMLWSAPEKPE

SEQ ID NO: 108005 - DNA, 1360 bp, Arabidopsis thaliana
  misc_feature (1)..(1360): Ceres Seq. ID no. 13652995
  misc_feature: MA Experiment ID: 20000184 Result: Down-regulated in Transcription
  misc_feature: MA Experiment 20000184 PARAMETER Experiment Name: At_Shoots__P Parameter: Age (day) Value: 7
  misc_feature: MA Experiment 20000184 PARAMETER Experiment Name: At_Shoots__P Parameter: Tissue Value: Shoots vs. Whole Plant
  misc_feature: MA Experiment ID: 20000214 Result: Down-regulated in Transcription
  misc_feature: MA Experiment 20000214 PARAMETER Experiment Name: At_4deg_Cold_P Parameter: Timepoint (hr) Value: 6
  misc_feature: MA Experiment ID: 20001911 Result: Up-regulated in Transcription
  misc_feature: MA Experiment 20001911 PARAMETER Experiment Name: At_Drought_Reproduction_P Parameter: Age (day) Value: 40
  misc_feature: MA Experiment 20001911 PARAMETER Experiment Name: At_Drought_Reproduction_P Parameter: Organism Value: A. thaliana
  misc_feature: MA Experiment 20001911 PARAMETER Experiment Name: At_Drought_Reproduction_P Parameter: Plant Line Value: WS
  misc_feature: MA Experiment 20001911 PARAMETER Experiment Name: At_Drought_Reproduction_P Parameter: Timepoint (day) Value: 10
  misc_feature: MA Experiment 20001911 PARAMETER Experiment Name: At_Drought_Reproduction_P Parameter: Tissue Value: Flowers
  misc_feature: MA Experiment 20001911 PARAMETER Experiment Name: At_Drought_Reproduction_P Parameter: Treatment Value: Drought vs. No Drought
gttcttctccgacaacttcttcatcagttggtttcgtcgtctccgaacatagttttctcgaaagcacgaacctcacagtgggctgaagagttctcggaatagccatggatggggtgggtgaaagttcgactcaaaatgaggtagaagagaagcctgtgattgttagagttaagcgaaaagttggacagtctctgctcgatgctttctggttggagataaatgaaagaccactcaaacggccgactctggatttctcaaagctatctatttcagattcaggggagagaggtccttctgtggcagaggatgtgaaaccgaagaaggtgctagtgcggcatttggagacagttacggactctgaaaccacagctgatattatccactctttctttgagtctgatcataatgagaaaagttgcagtaaaggaaagtttgaggagaggaaaattgctttcaagaaagacaatagaaaggaacagcgcctgaccaaatctgtacaaaagcaacagattgcttcagagaatgctcggtttgagcaaatatggcggagtaggaagggaaacaaggaaggcatccatgagaagtgtcatttctttgacgttattcgtgttgatactgaagaaagacgagacaatgcacaagagtttacatccctggaggaccagaaaatgctcgctagtttcttgcctctccttagagaatgtattccaacagcagctgaagagattgaagctgatatacaatctagtcacaccgaagaatacgtttatgattattatgctgtgaacgaagagatggatatcagcgaagatagttccaagaatcagtttcctcttgtcatagtagaggatgaagaagaattctgtgatggatctgatgaatcagactacgactctgaagattcaaacgctgaagatcatccaaagactgattacccagaggaggaagaagaagaagaagaagaagatgatgatgatgatgatgatgatgaatcagaagaagaaaagagtgaagcctctgatgaatcagacgacgaggagacttcaaaacgacatgtgagaagtgtccttggagatgacgagtttgatgattacgcagaggatgtgtatggttacagcgagagcgatgaggagtttgagtcttagttaatgcctaaatgtgtctactattcttattgagagatactaaagagaattaccgtaaggctgtgaatcaaaattgtgtctccacttttaaacgaaattagaggtgaaatcactgaaatgcatgtaagggtgatgttttgaacagagtagatcatcatatatatattctacagaaaacataaaaaaaaaataaaatcaatacattttgaaagatt

SEQ ID NO: 108006 - protein, 346 aa, Arabidopsis thaliana
  peptide (1)..(346): Ceres Seq. ID no. 13652996
  misc_feature (70)..(345): Pfam Name: Mpp10 protein Pfam Description: Mpp10 protein
  misc_feature (1)..(346): Homolog of NCBI NO: 30684530 NR Description: expressed protein [Arabidopsis thaliana] unknown protein [Arabidopsis thaliana]
  misc_feature (122)..(346): Homolog of NCBI NO: 25408058 NR Description: hypothetical protein At2g30280 [imported] - thaliana >gi|2347194|gb|AAC16933.1| hypothetical protein
  misc_feature (63)..(119): Homolog of NCBI NO: 25408058 NR Description: hypothetical protein At2g30280 [imported] - thaliana >gi|2347194|gb|AAC16933.1| hypothetical protein
  misc_feature (1)..(44): Homolog of NCBI NO: 25408058 NR Description: hypothetical protein At2g30280 [imported] - thaliana >gi|2347194|gb|AAC16933.1| hypothetical protein
  misc_feature (99)..(345): Homolog of NCBI NO: 9631239 NR Description: orf 48 [Ateline herpesvirus 3]
  misc_feature (206)..(343): Homolog of NCBI NO: 23509612 NR Description: hypothetical protein [Plasmodium falciparum 3D7]
  misc_feature (97)..(345): Homolog of NCBI NO: 120943 NR Description: GLUTAMIC ACID-RICH PROTEIN PRECURSOR
  misc_feature (80)..(346): Homolog of NCBI NO: 26554099 NR Description: DNA topoisomerase IV subunit A [Mycoplasma >gi|26454107|dbj|BAC44437.1| DNA topoisomerase IV subunit A
  misc_feature (80)..(312): Homolog of NCBI NO: 23508707 NR Description: hypothetical protein [Plasmodium falciparum 3D7]
  misc_feature (70)..(345): Homolog of NCBI NO: 23508069 NR Description: hypothetical protein [Plasmodium falciparum 3D7]
MDGVGESSTQNEVEEKPVIVRVKRKVGQSLLDAFWLEINERPLKRPTLDFSKLSISDSGERGPSVAEDVKPKKVLVRHLETVTDSETTADIIHSFFESDHNEKSCSKGKFEERKIAFKKDNRKEQRLTKSVQKQQIASENARFEQIWRSRKGNKEGIHEKCHFFDVIRVDTEERRDNAQEFTSLEDQKMLASFLPLLRECIPTAAEEIEADIQSSHTEEYVYDYYAVNEEMDISEDSSKNQFPLVIVEDEEEFCDGSDESDYDSEDSNAEDHPKTDYPEEEEEEEEEDDDDDDDDESEEEKSEASDESDDEETSKRHVRSVLGDDEFDDYAEDVYGYSESDEEFES

SEQ ID NO: 108007 - DNA, 1637 bp, Arabidopsis thaliana
  misc_feature (1)..(1637): Ceres Seq. ID no. 13653001
  misc_feature: MA Experiment ID: 108434 Result: Up-regulated in Transcription
  misc_feature: MA Experiment 108434 PARAMETER Experiment Name: At_Root_Tips_cDNA_P Parameter: Tissue Value: Root Tips
  misc_feature: MA Experiment ID: 108461 Result: Up-regulated in Transcription
  misc_feature: MA Experiment 108461 PARAMETER Experiment Name: At_Germinating_Seeds_cDNA_P Parameter: Age (day) Value: 1 vs. 0
  misc_feature: MA Experiment 108461 PARAMETER Experiment Name: At_Germinating_Seeds_cDNA_P Parameter: Tissue Value: Germinating Seeds
  misc_feature: MA Experiment ID: 108595 Result: Down-regulated in Transcription
  misc_feature: MA Experiment 108595 PARAMETER Experiment Name: At_Ler-pi_Ovule_cDNA_P Parameter: Plant Line Value: null
  misc_feature: MA Experiment ID: 20000111 Result: Down-regulated in Transcription
  misc_feature: MA Experiment 20000111 PARAMETER Experiment Name: At_42deg_Heat_cDNA_P Parameter: Temperature (deg C) Value: 42 vs. 22
  misc_feature: MA Experiment 20000111 PARAMETER Experiment Name: At_42deg_Heat_cDNA_P Parameter: Timepoint (hr) Value: 6
  misc_feature: MA Experiment 20000111 PARAMETER Experiment Name: At_42deg_Heat_cDNA_P Parameter: Tissue Value: Aerial
  misc_feature: MA Experiment ID: 20000179 Result: Up-regulated in Transcription
  misc_feature: MA Experiment 20000179 PARAMETER Experiment Name: At_Germinating_Seeds_P Parameter: Age (hr) Value: 6 vs. 0
  misc_feature: MA Experiment 20000179 PARAMETER Experiment Name: At_Germinating_Seeds_P Parameter: Tissue Value: Germinating Seeds
  misc_feature: MA Experiment ID: 20000180 Result: Up-regulated in Transcription
  misc_feature: MA Experiment 20000180 PARAMETER Experiment Name: At_Germinating_Seeds_P Parameter: Age (hr) Value: 24 vs. 0
  misc_feature: MA Experiment 20000180 PARAMETER Experiment Name: At_Germinating_Seeds_P Parameter: Tissue Value: Germinating Seeds
  misc_feature: MA Experiment ID: 20000437 Result: Down-regulated in Transcription
  misc_feature: MA Experiment 20000437 PARAMETER Experiment Name: At_Drought_P Parameter: Age (day) Value: 8
  misc_feature: MA Experiment 20000437 PARAMETER Experiment Name: At_Drought_P Parameter: Organism Value: A. thaliana
  misc_feature: MA Experiment 20000437 PARAMETER Experiment Name: At_Drought_P Parameter: Plant Line Value: WS
  misc_feature: MA Experiment 20000437 PARAMETER Experiment Name: At_Drought_P Parameter: Timepoint (hr) Value: 24
  misc_feature: MA Experiment 20000437 PARAMETER Experiment Name: At_Drought_P Parameter: Tissue Value: Whole Plant
  misc_feature: MA Experiment 20000437 PARAMETER Experiment Name: At_Drought_P Parameter: Treatment Value: Drought vs. No Drought
  misc_feature: MA Experiment ID: 20001911 Result: Down-regulated in Transcription
  misc_feature: MA Experiment 20001911 PARAMETER Experiment Name: At_Drought_Reproduction_P Parameter: Age (day) Value: 40
  misc_feature: MA Experiment 20001911 PARAMETER Experiment Name: At_Drought_Reproduction_P Parameter: Organism Value: A. thaliana
  misc_feature: MA Experiment 20001911 PARAMETER Experiment Name: At_Drought_Reproduction_P Parameter: Plant Line Value: WS
  misc_feature: MA Experiment 20001911 PARAMETER Experiment Name: At_Drought_Reproduction_P Parameter: Timepoint (day) Value: 10
  misc_feature: MA Experiment 20001911 PARAMETER Experiment Name: At_Drought_Reproduction_P Parameter: Tissue Value: Flowers
  misc_feature: MA Experiment 20001911 PARAMETER Experiment Name: At_Drought_Reproduction_P Parameter: Treatment Value: Drought vs. No Drought
agttcctttttttttgttctccgaacgttctctcctctctgtctatcatcgaacgccgtcgctctcgccgttgacttctaccagtgaccccaacgccttcaatttccgcctcgtcggataatttcatcggagaagacaatggtgatggaagttacagagactgagcgatggtgcgttgtaactggtggtagaggattcgctgcaagacatcttgtagaaatgctcgtacgttaccaaatgttccacgttcgtatcgccgatttagctcctgcgatagtgctcaatcctcacgaggaaactggaattctcggtgaagcaattagatccggtagagttcaatacgtctccgctgatcttcggaacaaaactcaagttgtcaaaggttttcaaggagcagaagtggtgtttcatatggcagctccagattcatcgattaacaatcaccagcttcagtactcagttaatgttcaagggacaacaaatgtaattgatgcttgtattgaggttggagtaaagaggctaatctatacaagttctccgagtgttgtgtttgacggggtccatggtactttgaatgctgatgaatcactgccgtatccacctaagcataatgattcatattcagctactaaagctgaaggggaagctttgattttgaaagcgaatggaagaagtggactactcacttgttgcatacgtcctagcagcatatttggtcctggtgataaattaatggttccatcgcttgttactgctgccagggctgggaaatccaagttcattataggtgatgggagtaacttctatgatttcacttatgttgaaaatgttgtgcacgcccatgtctgtgctgagcgagctctagcatcaggaggagaagtatgtgcaaaagctgctggccaggcttacttcattaccaacatggagccaattaaattttgggagtttatgtcacagcttcttgaaggacttggctatgagaggccaagtataaagatacctgcaagtctcatgatgccaatagcatatcttgtggaactagcatataaattactcggaccgtatgggatgaaagtaccagtgctaacaccttctagggttaggctactctcttgcaacagaacatttgattcttcaaaagcaaaggatcgtttaggctattctcctgttgtcccacttcaggaaggtataaagaggacaatagattcattctcacacttgaaagctcaaaatcaacccaaaacagaagttactgaaacaattcaatggaaaaagcagactctcattgccatagtcattctgattactctctatcataactttgttgcaaccaccggatcatcttccgtcataataactgctgtttccaaggttttgttggtatcatcaatttttatgttcatcaatggcattttaccagagaaaatgaaagtgttcgggagcaagaagatcgactaaagaatactccaaatttgagctttgtgtaaggtaaacaacgacttattttttcctctatacattgataaacatgactcctgcctgtgtagatggatgttgtttggtctgagttttgcgtcgtttattttacgatttgtaatttgaactctgtaactgtcgatttcggttactctgatacc
